United States Patent Application Publication US 2015/0376612 A1 - sequence listing, part 8

SEQ ID NO: 18538 - DNA, 1024 bp, Homo sapiens
ttgactagacaaaaggtgcagagtagagtatgcagtgatttcagggtgttgggctctgacaagatgatgccgacttagacagtgttagtcaacatcaaatgtctggatcaagagaggcaagaatcccgtggatttggcgttggccagaacttgtctggaatcttgttttctgccttgagtgtcacctgttgagagctctgttgacaaactggcatttgtccttgggagagtagcctcaggaccaggggtgaagagttcagtaaactgtgtttaacccaaggaaagatacagggtgtgtcagattttgtaaggattttcaaggagcagtagatagtggccctacagtggaatgaaccttcacaccgaggatctgcttcctttgttggaggtgggaaagcaaaagctggatgcttggaattgtcatggctgccgtctgagtgatgctaccttgagtggacggtttggccaactaaggagtaaggcctctccctcatgtcacattgagtggtgctaatgtttcctgaagtttccctttcttttcagttcagtgtttcagaatctcagccttccagcagaatcccctttgtttgctctaaatatacattcccaagccccgtgtggccattctgatttactaggtctggggttgggggattgtgggtgccgagaatcagtatttctatcaagctcccaaggggacctgatatatacatggagctgaaaagtacccacctaacagacttgccagctccttaaggataagaactatattttcttcctttttttgtatgcctccccatgcaaggataattacacagaataagcactgagatgcctgttgatggatttattccagcaattttttttttttagctctctttgtctggaactttgcaaaataaacaccatggtcactccgtgctttgtgagtgacgtgctagaatggaatttcactgttttaaattcagggttaatttcttgctttcaaatgaattatgaaaggaagaggagagacctttggaaa

SEQ ID NO: 18539 - DNA, 1033 bp, Homo sapiens
ggctagagtagtcttcccatcctgctttagctaatcaactctttctcatcatttaggcttcaaatggatcatcactttctctggggtgcaggggtctttcatataagtatttctttgaactcattccaaaaaagtggatttttagaaatagaaaaaactaatttagaaatagaaaattaattgagttttagtttttagaaaattatctaagaagtagatttttagaaatagaaaattaacgtagatcacagaaaattatccaaactcagttaattttcccttttccagcaactgtatttgtcctccccacttctcttccctgccttctttttttctccttagcacttacaatgtctcactcatgtagactcgaagcttcacaagggcagggattttagtctatttcattgaaaatctgtcaccagtcactggcccagagagagtcctcaaaaataattgttgaatgaatgaatgaatgaatgaatgatgatggcgtgatgattgtgtattcctcatctggctgtaagtttcacaaggccaggcactggggtcctattttgctcactgttgctgtgtgggaaagagttagtacagcagactgtcgcaagcttggctcttggctgcatctgggaacttggaatttaggagggctgtcaccattcccagatcagataaagatggctcactctgtctagactgcttgtaccaaaaatagggctcatgtggaatacctgctttcctttgtggaggctggaattttgttatatgctacagagagggtgcctacgtggccaacttccaataaaaactgtggacactgagtccctaatacatttctctggtagacaatacttcatatatattttcacagctcatttctgggggactaattaaatgcatcctgtgtgaccccactggaagaggacatttggaatcttgtacctggttttctccagacttcgcctcattcaccatttccctgtgctcattttgccttgcatccttttgctgtgataaatctcagccatgagtg

SEQ ID NO: 18540 - DNA, 1057 bp, Homo sapiens
tctctctgggttctacatatgtagatttaactaatgacagattaaaagcattcgaacaaacggagggtggtatctgtactgaaaatgtaccaactgcttttttttgtcattattccttaaacaatccaacataaccactatttatatcgtgtttatattgtattaggtattataagtaatctagagatgatttaaagtgtacaggagcatcacatacattatatgcaaatactatacaattttatgttagggacttgagcatttgtggattttggtatttgggggggttccttgaaccagtcccctttggatactgagggacaactgtacaaatcacatttaggagtggatgcaggtcagtcgtgacatctcatccaccccttcctcacccaagattctccgtggcttgtgtcaaggcctcaccacatcagaatatttctgctcatggttgctgagacagagctggacaggtccagcatccattccccaaaacagaactcaaactgacgatcatcaagatattccagctatggcaaactgcggaagaattaggacagatgtatgacttatttcatataaagctaaatcagtttaatttatatgattgtcctttattatgagattatgttcaacagatattttcagtgttaaaatattcttttttttttttttttgagacagggtctggctctgtcacccagggtctagcacagtggcacgattttggctcactgcagcttcctcctcccaggctcaagagatattcttgcctcagccctccaagtagggctacacgtgtgtgccaccgtgcctggctattttttgtagggacagggtttcaacatgttgccaaggctagtctctaactcctgggctcaagcaatctgctcacctgggtctcccaaagtgttgggattataggtgtgaaccaccatacccagccaaaatattcttttcaaagtgattagaagtaggagaagcttgctctctttttattggcacttctgtcttacatgcactttttgatttaaattattctgtcttctatgaaatgaca

SEQ ID NO: 18541 - DNA, 1056 bp, Homo sapiens
aacgaggaggagggaaagggtccagagcagtaaagagcctgtaaataaattcataccagcttcagccccatgctttcgtttgggattcctcatccaaccctgacggcttccctgcgggacatatttccccctcttacagataggaaaccttgcccaatgtgattacgccaggaagtcagatttcaaatctaaatgtgcctaatgccaaaactgtacctcttgccactcaacatctgcagtcaaaggcttcctgactcaggatttgctggggtctggctctgggctattagaattagatgcgtgagaccctttcaatctaaaccttaagtattttgcctgttggacagatgcctggttgtccctttaatccatcgcccaaaaagcctgaggaaggatggcaggtggacttggatctaggccactcccttagatcctgattaggggacctctgcgactgctcatctgggaggaactaggggagcgctaatgtgttgtccttgactgggcaagaagggaaggagaattgtgaaacatgcacaattagaagtcgtgcacctgggttcatatcctggctgggccacttactttctggcgggtggggagggcagacaagttgctcatcctctctgcgcctcagtttcttcatctacaaaatgaagatgttggttatttctttattcaagggttgttgagaggatgaagtgctaaaaatgcttgaccagcattcacacaggcactaagacggtgagtactcactacttagcgctgtcaacatcatctccgtccacatcaatgtcgtcatcgtccttatgaaaagccctgggcatcattttgcccttgagctggatgtccatgttggaaaaacagctagtggaaggcgtgcccaaatctcagaagttggcgtttccttgcagatatcattggtggccattggaggggaaaaagatgctttggaaaccaggacacagagaaaagtgcctcgtattatacagagccaagagaggtcactgtggaagtacagaggaagccttggcctaattgcacggttaatacaat

SEQ ID NO: 18542 - DNA, 1042 bp, Homo sapiens
tatctactaaaaatacaaaaattagctgggcatggtggtggggacctataatcccagctacttggaggctgatgcagcagagtctgttgaacccaggaggcagaggttgcagtgagccaagacagtgccactgtgttccagcctgggcaacaagagtgaaactctgtctcaaaaaaaaaaaaaaattgtttctggccccacgttacagatgaggcttttaaagatacccagccaatggtccacagtgatgtaactcatcagtggtccacctgacattggaaattcggttgctttggaaccttctactacatcccctttccttactcactgacatcattcccagatcaaagaaagataaaagaaggaagggctggagacgttgttttcctgtatgctccttgatgaagggctcagagctaagcgcggagtaggtgcttaagcccttccatttgaaaggagctttaaacacctttggtggcagctaagagtgtcaaaatggagggatgtgtaggggacctagggcctgggtaacattgtcccaggccagggcctattgtgttgtgtgtgtctccactttccagcctttgggaacgcagagggggacctctgtaattggtaccagcatcccttccttgcagggtccgtccttcctctgagttgggggaaggggtctccatggtttcttctaccaggtagacccagaatcactttcaacttgctcacctgtctgtgcagtgtttgagttcttccctgggaagcttgctcacatcatccacttctctctgggttctccgtaccgctttccccaatccaagctaagctcttctcttagttattctaataactgcccaatatcaggcactaccctcaacactgtttcccatggcaattattttacatgacagtttaaaaaacaggaatgctcgatttgtattcccattttgcagacaagccaacgaaggcttggaggggttgaatggcccaagtttcctaagtggccaggggcagagtcaggatctgaacccaagacataggcccagga

SEQ ID NO: 18543 - DNA, 1063 bp, Homo sapiens
ttctcttaccattctggaggtcaaaagtccaaaatgggtctgtcttagtccttttgtgttgctataaaggaatgcctgagctgggtcatttacaaaggaaggaaatttatttgtctcatgtttctgcaggatgtccaagaagcatggtgccaatgtatttctgatgagggcgtcaggcagcttctactcatggtggaaagtgaaggggagccagcatgttcagagaacatatagggagaaagggagcaagagaggggaggggaggtgccagagactttaaaagaaccaactctctgggaacaaatagagggagaacattaatctagccatgagggatccacccccgtaacctagactcctgtcatcagccacggcctccaacattggagatcaaatttcaacatgagatttggaagcaacagacatccaaactatagcagggtctccttgggccaaaatcaaggtgttggcagggctgggctctgggggcttctggggagaatttgttctgactttttcgatttctggaggccacctgtgttccttggctggtggccacatcttccatccttaaaaccagcagtgcagcgtcttcaattctgtccctggctctgctccttctctccccctcctctccccctttgtcatctttttaggtttatttgtgaccttttagatcctttgtgactgcattggtcttccttgggtaactgcgcatactctcctcatgtcaagaacttacatccctctacaaagtcccatctgccatgccaaataacacctttgcaggtttcagggtagagcatggatgccttttgattttgatttggttgtttttggtagagatgatatcttgctctattgccaggctgatctcggactcctgggctccatcaatcctcttgcttcccaaagtgctgggattataggtgtgagccagtacacttggccttttggcaccattattctgcctgccatcctgtcctaactaaagaaagtaaggtccctccatcctccatcttagcccttctttccttagcctcctaacactcaacgcaattta

SEQ ID NO: 18544 - DNA, 2263 bp, Homo sapiens
tagagacgggatttcaccatgttggccaggctggtctcaaactctggacctcaaatgatccaaccgcctcggacttccgaagtgctgggattacaggcgtgagccaccgtgactgacctgtttttaatttttttagagacagagtttcacactgtttaccagattggagtgcagtggtgcaatcctagcttactgcagcctgtaggtcccgggctcaagcgatcttcccacctctgccacttgaataggtgggactacaggtgggtaccaccatacccagctgttgaaaaaaaaatggtggggtattactctgttgcccaggctggtgttgaactcctggcctcaagcgatcctcctgcctcggcctcccaaagtgctgggattacaggcttgagctacttccccaggctcttcccccgtttgttaatacataccatgaccttggcctttcccacctcttaggttttgcttactttcccttctgtcctttacttatgactctgcccccttttgacctctgctaaaattatttgttactgttgttatgttattatttcatgtgttaagtctacagtgtataacttgggtttacttatctcatttaacccttaggaaaaccttacacttaaatactcaaagccttgattttgcaggtctgattgatgggcatacagaggaattaaatgaccttgtcttccacatatggtataaggcacagtagtggaagcaggatccaaatctgtgtctgtgtttggatcaacagccctggccaccatcttgattcatttctcttatctgtaattctatggagggaggttccattgtatatttttttctttcaattacagtattatttgtatattggaagcctattgtactttatctgtgtaactgtcgtagcagctagaggctagtaggactggctgaaatgtcagaggaaggagggaagaaaagggagaaaagcaggacaaatgaacgcagattaaggaaaataaaaaagagtgtttggctaacttgcataaaaaggatctcatttttctttgtaacacattactacatacagtgaccatagtgtttctctaatttcttcaggacttactttgaagatgaagaagtatgtgtatccgctttttgtctttcagaataacatactgctgtctgtaaaaatacagataatttctctcttaaattccataagctggagacactgcccctgtttcaaatgaatacagattcattttgtcacctgtgtgaaattggtgtccgtgtgccttgcttcctaggctgtccaccatgacatcagcctgcccatgcaatgcttgagatttgccctgtgactcaacccaaatctaaagcccgagtcgtatgaatccaggacacctgcctgcaaatgcatttttcatgtataggttattcactctggtctttgagattatgtaattagcatatgttgtcatagtgatgtatttattataatggaggtgttctcaggaaaccagatttaatacttttaaatcagaggccaacatggacttttaggaattccattcacagtaaattttatgcgtggtgaaaggttatggaatgggtttccatgccatgtctccccctgtcccacaaatctcagctggcctgcaaaggttccactgtggatttttgccagccagccacgctgatgtagacagaatatttcggatttatattattgcttacttggcacatcttccattggaaatggaatagagaaaaggtggcttggctgtttggtttatgtcctaaaaccttatcgtaatgtgattctccttaacagagggattcgtaagcttaggactgatagagatttggcttttctgctgttggattgatagctccttgactgctgaagccattgcccatctgttcaactgttgtattcacgaggaggttagacccctgacccaaggcccaggtacctggctttcctcagttgggatcagaaggccacaaagttttcttatattttaagcatcaaagtagcaccactgtacagcatctttacttaatctgccctctttcacgtgtgtgcatccctggcatgcttaaacaagaaaggcaaatgagagagagcgagtgagtgcgagcgagagagccctgaggtgccagaaggctgtggttcctttgtgtctacagaaaagatataacgattgaattagactcttaaatatctgtggatgtcaggttgaatacaagcagctattcagtgttttactctggcaggagaaca

SEQ ID NO: 18545 - DNA, 1304 bp, Homo sapiens
attattttctacctagatcaggtataaggtggatgtattattggcattcctaggactgttttaaaggaagtacctatgaggcctcatgataagccagatgtccagaagccagcttgagaccagggctcctggtcacttaaaagatgtttggggctgggcgtggtggctcacacctgtaatcccagcactttgggaggctgaggtgggcagatcacgaggtcaagagatcgagaccatcctggccaatatggtgaaacctgtcactactaaaaatccaaaaattagctgggcgtggtggtgagcacctgtaatcccagctactcgggagcctgaggcaggagaatcacttgaacccgggaggtggaggttgcagcgagtcaaggtcacgccagtgtactccagcctgggtgacagagcgagactccgtctcaaaaaaaaaaaaaaaaaaaaaaagaaaaagaaaaaggtgtttggaagccatgtcccatgaattccaaatacaattgaggactctataaaggactataaaaaaagttgtaataaattatgcagacccctcagcagttgactcacctctctggtgctccaggtatttctcagcgtgttcggggtctccctgtgttacctggacagctcctgccatcattagcacacagccaagattcctcgaccacccatgactctggatttatcatcctcaagaattgggggctgtggaaaagatgccaaatttgttcttttcagatttaggttcttctgtgataaaaatagacttggtaaagaagcagatatttctttaatacgtgtatatattagactgtgaatttattcatcttccttattcatcatataagtaaattatatgattggacccaggcataaaacgtgatttgactcccccttgcccatcacagttctggagttcacatatcatttgttactttgaaaaatgaacttttgttatttgattatggtaataaataatatacatggtagaaggagaagaaaatgaagaaaaatttagaaacttggacagaggaaaatgaaaatgttctattaattccactagcatgagataatcactcttaatattttgttgcatgttcttttctttcttctgagtgatagcatttttttcaacaaattgggctcgtaatatataggcacatagatatataattaaaaaaacaagaatttctcatgtcattaaacattgcttgaaaaaacatactagtaatttcctaagattacaccatgtaaatgaattgtattttatgtaaccattccctagtgttggatagcta

SEQ ID NO: 18546 - DNA, 2303 bp, Homo sapiens
gttgttttgaattttggaaatagaccagtgattcttcagtagggtcgtaaggtcccgtcaatgcagcagtcaaattttttcttggtgggggggatgcatatgtgtatgtgtgtgcatgagtatcttgataatttagaaagattaattaaacattgatcatctatgtgaccacatttaaaatgagcaccaccacatccaaatgtctgagtttacattttgtgtcggtacttgctttggcagaactctgtgcctttccccaagtcttctgtgaccttctcacctggcctgcatcctggtccttatcaaccgtattttacagttaaggaaactcggctcaaactagcttcggggactcgctgtggccataggtgccctaggctgcagtctgagagtgaaactgaggtctcactcccttcatagtctgctctccgtctctgcctcatctggcttctcagggtggtggggcgtgggcactaatttgatttgatcacttagagacaacagcttacaaaatgctaccgagcagtgcctgtcctttctgagaacttgatataataacgttggcttgatctcctcagcctgtgtcttgagggaacaagtaaattaaacaagtaattagatccataatgtttttagaagttagaagatttaaatatatgaatctcatctgagtgtgcagccttttgtctgctgtgtttcctgccaaaagatctcttgacaggaaataaacattaaaataatctttaatcccttgtttggtctattaccattaacaattgatgcactttaattttgtggggttttaactacaaaatggaacggctaagtagtgataattgggtttggaattatacggtcatttatatcaacagagatgcaaggggctgggagggagggtgattaattatttactatttcctggctgtggttcctattatagaattttctgatatgttcttctgtgaacaattatcaccaaatgaaagtaaacaaatctgtgatttgaagccttatttagaagttagtctatatttaggtgatgtgggcttgattttcacagaccctgtgggctgtctgtgtgtgttccttttctcagtaccccagctctgtattcgagcgtggttatctttgtgcatcttaaaatccacaatgcacagcctggggagaagccttggttttgccagggggaaaaaaagagaaacacaacattgagtgaggtctagggtgaataccaaaggtctgttttgaaatgggggtgtgggttattcttctctctttctgatttgcttcagtacagtatgggatggggaagaatcaaaattattatgtcaacatgaggatgaaagttatgctctgttgtttctcataacatttgtgtgtgtgtgggtgggtgggtgtgtgtgaaaggtaggatcacctctctgtgcctcagtctccccatcatccttcggtggtagatcaatgctatctgatgaggccttttttgggatcacccactccaacatgcatgtcctttctctgtcccctcctggtgcctgtattagtctgttctcacattgatgtaaaggactacctgaggctggctaatgtataaagaaaagaggtttaattggctcatggttccgcaggccatacaggaagcccagttagggaggcctaaggaaacttaaaatcatggcagaagatgaaagggaagcaggcatgttctgcatggctggagtaggaggcaaggagcgaaggaggaggtactacccacttttaaacaaccagatctggtgagaactcactcactgtcatgagaacagcaagggggaaatcagccctctgatccaaccacctcccaccgggcccctcctccaacattggggattgcagtttgatgtgaaattttggctgggacacaaatcccaaccatatcggcacccactgagcacatcctcgtggatcttcctggctctccttacaaggggttccttccaaacccaagcgccacaatccttaggcagattgctctgacacagaagactggtgagttctagacttgatgtgtttcatgggaaacaggaagacatttaggggaggctgtagatacacagccgctctgtttagggaaggctgtcgatacaccgctgctctgaccatcatggcgtctggtccatgctcagattctggagtgttagggtcttcgggcacatggtggatgagcgttttgcttcgtgtactcatttatttctgaaaataatgcagccccttgtagggctttctggctaattgagtggtgccatcattcatgcaattgcgca

SEQ ID NO: 18547 - DNA, 1505 bp, Homo sapiens
cggataatatgccatcacatggtgtcatttaatatattcattcctatttatagacattgaagttagatccatgtcttactattacacatgacttagtaatgaatgttcctgcatgtatatttggtctgcttgagcaaggatattgggagggaggatttccagcagcagaagtggtggaacaaaggcactgtgtacacctttgaaacaattaacttcaccaaaattactaaactgtcctctagaatggttaaaccaatttcctctctaccattcacacgtgagaatgcctgtggccccccagaaattatctccagcagcagcaacagagaggactggaatgccattgacaggtcccacaagtcagcaatcagcacgccattttttaaaatttatgttgctattgtatcgtaaggttcttctgaagcgaccacttcataacactgtgtagtccaatccctaagctgggcaatttttttttcccctttcaatacatcacattgattttctgtatgactttatctgcttaatacaaagtgggattgaacagttatttgtctggatttgatcattccttattaaacatttatgatttagctttcaccgcggcatcttcttgtaaggtgtttcttatttttatcattttccgtaaaggtaggattgtgttgacagccctgtaataaatgtctcttggaagagatgtgttgctgagaggtggggagggggtgggggctctgtgcatggaatggggggaaaagcttcagggaagggcagtgcaaattgtttctggactgatgccatcttttaataatagtagttaatagactgggtacaatggctgacgcccgtaatcccagtgctttgagaggccgaggccggtgtatcgcctgagtccaggagttagagaccagcctgggcaaacagcctgaggcaaaacctcatctctacaaaaaatacaaaaaatcagctgggcgtggtgatatgcatctgtggtctgagctactcaggaggataaggtgggaggatcatttgagcccggtagatggaggttgcaatgaaccgagattgtgccactgcactccagcctggatgatagagcgagaccatgtctcaaaataatgataataattgtagtagtagtagtggtggtggtggtggtggtagtagtagtagtgaatgccctgactttggggtttgcagtaagctaggattaagtgcttcacagtgaggcacagtggggagctactctgaggatgaattgcctagtaaataagtgaggtttgtataaccgaggccagatcttagaacctcctgctatctgtacatagaagaatgttttagtcagaggcaaggcaaggtcaccaggattcactgagagtgttggtcagcatttcatctgcatatacaggactggaaaataagagagcgcaatgagacatctagtttttttctctttcgtttgttctgtttcccactgagagaattttctagctttatgtggagaaaac

SEQ ID NO: 18548 - DNA, 1050 bp, Homo sapiens
ggttggagaaaaagcagtcacagctcctggctgctgtggctgctttgagcttcttcctcgatcaggctggatcattaccagcctgtaccctcaaaggatgcccttagtcctgtcccctctcactagcagggattccaagcttgtaaataaagtctcccacttaaaatgtgagcagagtgaagagctggcagtgtcaaaactctgtgtccagatgttttatgattttcccttttccagatgagcccggtgtatccgtatcagtgtgtctaggaagaccaagcatgccgaacggccagcagagtagaaactctgtgtgcccatccattatgtactccctgaattaggctccttgaggctcaattattaaagtgggatttttcttaattattaacagttaaaaataggaaaatagatttcaaggggaaaaaatttgcaggcaacaagagtccaattctaaatgtgtgcatgtgcgtaaaacggaatttgccaaacatgaataggcacttacaatgtgactggaattggctctgtcatgtgtcagcctaatagcctaaaccctggttcaatacaatgaacttgggaaggtttgcttaatgaaagaactgacgttttctgtgcagcggctgcattcatcagcctgcatcctgttcattacactacaaagggctgccaatgggaattggtaggatcatctattaggtaaatgcgatggggacaaaagatagcagagcccggggctttgtggaattttctgtggtggtccgggttcctggagtagggagctgtgatgacgggcaacagatttccaagttggcacgcgggcttctggagtcacgggctgaattccggcactgccacatcttgccacgcacatcctaagggagtgtagagaagagagttttcagttatgcatgacactgccttacccattgtggattcagtagggatattcataactgtgaatttgaatataactattaaataattgaattattattattgagttactgaatataactattgagttttccctctccatctgggcacatg

SEQ ID NO: 18549 - DNA, 1032 bp, Homo sapiens
aaattctcgtaggcattatattgcatctacacataaggacacagtgtttacagaccccaaagcttgctgtcccctgggcaggtgcatgagggggtcccaggcaatcaggctcttctcaaacctgaattatacccggcctcagggtataggggtcaggcagctgtttgacaggattcttgcaaatgtttttggtttctctgtctactcattacgtacactctgccagaggttgaaaactcaatgttgagattacatacatcctgaaaacactgtttaaataaaattttggcctgcatcctgtttttgaaaacttgcaatggcttgccaacgttttcaagttgagaagtttcacaaaaaaaattcggatttccagcttctttcaaaaacacaggtcaaacatcctgagcctgttctgtggtcagttactcattagcagcctctgctctaggaggaatagttatgggtcctttcagacatgcaacccccaaaactccatgttgtttacagtgtgggacacctgactttcaccttttatgatacctgcctggggcatgcatgtggtgactttttccatctctggtctctatcttatctcttgtgatgaactcaggtctataaagcatttgggcactgcctggcacataggatatgtccagaaaacactagctggtattaaaacagaggaaacatgggaactgagggtggtcagtgacatcacattgtatttcctttatggtgtccttctgagtacagaaccaaacatttcttaggcgtacaatttcctgcctccaaattaatgttatttctaaaaagtagcccgttccactcctacaaatctttgcccaaatatgtccttttcagggatgacatccttagccactgtttaaaatagcaaatttctttccaaactctgccgtccctgaatctctaccctgctttatttttctccttagcagacatcatttctctgtttaatctgtctacttgctaattgtctcactgccctccccctccccactggagagtgaatga

SEQ ID NO: 18550 - DNA, 1022 bp, Homo sapiens
gtgagccgaggttgtgccactgcactccagcctggctgacagagggagactctatctcaaaaaaaaataataaaaataataaaaaaaaaattacatgaaaaatagagacaaagtctcgctttgttgcctaggctggtcttgaactcctgggttcacgtgatcctcctgcctcggcttcccaaagtgctgggattacaggcacgagctgccacgcctcacctcttgttttcaataccattgataagttgtggtcttcagggacttgtgggcattttcaagttaaatatccaacagtcgtgatttagggcatgaagagctcactcatcaagatgtatgtaattcagattttctgagtgtttaattcggcgtctttggtcacaaggaacagagttttacttgtgccacctcttctaagaaaaaggtttactgtaagagataatgttggcaagctgaggaaaggaggcagttttgggtaactgtctcttgcgatcccctcctgcacaactgtggcgttctctttttctgactagctgattctgctgctgctggatttattcattcttctccctcacagttttggctcgcacatgcttcctttttagctcatggccgtgcagttcaactcaacctcatggcatctttttatcagctgtccctgctgcaacaggcttagagttggtttcccaattccctagcgcagaaatccactggcatgagtcatctttcccattggtagattgcagagcaaacttctggacagatttgcccttggctcatgtatgattggacctgcggtctgtccaggtgtactcagagtggggaaggggagcggtggcaggtaatacaaaacccacctaagtagaaggacctatgaaccatgagggttttccttagcagggagtgccagtgggtagggatgactggttttgcagtttagggccaagtgagttggaatgacagctgtggcgtgttgagtcagatcaagtccagaattcctctccaccccacccatttgcagttcc

SEQ ID NO: 18551 - DNA, 1045 bp, Homo sapiens
aagaagtgccttttgcctaccaccatgtttctgaggcctccccagccatgtggaactgtaagtccagttaaacctctttttcttcccagtctcaggtatgtctttatcagcagcgtgaaaacggactaatacagtgaggaaatccatgtgttaggaagggagtgtggttgtacttcaacctggaactgtctaactcctaaggttttattaatatctagtccatttctctcaatctaatagtaaatggaagagaagcaacaacttttgttttccaattccttttgaacatttgaaaggttttctgaaaggacttaaagaaaccatagcttccttaccagttcccaaagcttcagtccttaccaaagtgtacattgcctttaaggagatttgtttccatcaatccctcccatttacaaggaattacagaagagtgatgcccccttcaaagtggctcacacctggctgacatctgttcattaagaatgcctgcctttgggttctaagacgtccaaggagctcttatgggtaacacctgtagatttatagacgttcctctctgactgtaagggccatatgcctgaatctctcacccccatgtttataaaacttaacaattgtggaagcaatgaattgaaggactagggtcaccagtggagtcccataaataggttgtttatgatccctgtgaaacaagaagaccctcttaatttcatgcttcttaaactggggtatgagtggccccaggtttccctgttgggggtactgataccagagttcatttgaagtcattggaaaccaaggcatattttcttaaagagacaactgtttttggtgaataggccatgttgtttatagtaaaaacaaacatgaatattctgtaatagaagatatcgtttgcatggtgttttaaagctaaaacttgagttattaaacacccttctctccctggggatgccttttgctatggggttgcatccacggaagagtttgaaagcccaaccatatggacatcatattattcatttttatttgccatccagagctt

SEQ ID NO: 18552 - DNA, 1029 bp, Homo sapiens
aggtacgctgtggaaggacagatgtcattccttaaaggggctgcactgaattagaccaggggttctcaaagtggggtccctggaccggcagcatcaccatcacctggaaacttgttagagatgcagatcttgggccccgccccagacctcctgaatgtgaatctctggtggggagggagacgaagtgggagcctgtaggctgcagtctgtgttaagctttctgggtgattctgatacacggtcaagtttgagatgtagcaggagaagcaggaaacataggagagaagccactaggggtgggaatcagaaatacggtgtccctgcctacctaggggctacattcctccgggcaagtctttttaactctctctgcctggcaacttccttaacaaagagtgatactaatacctgccttcctgtctttgccacatcacgggattttctacagctcatattggttacagtgatagcagctgagatttaggctgcacctgagtaccaggcagggtcctaagtgacttcagactctatagacagtccctgacttataatggtttgacttagattttttcacctttgggatgctgagaaaaccatacacatccagtagaaaccgaactttacattttgagtttcgatttttttttttcacctgggctagtaatacgtggtaggatactctctcacaatgctaggccacagcagcgagctgcagctcccagtgatcacaagggcaaagaatcgatattctaccaggcacggtgttgcctgataaccttgcccagctgtaggctaatgtaagtgttcttttttatattttctttaatttttttaaatttccacctgttttggggggggtacaggtggtatttggttacatgagtaagttctttactggtgattggcgagactttggtgcacccatcactcgagcagtatacactgcatccagtttgtactcctttatgcctcacccttttaccactctttccctctcagtccccaaagtccattgtatcattcttatgc

SEQ ID NO: 18553 - DNA, 1026 bp, Homo sapiens
gtgatggctcacgcctgtgatcctagcacttttggaggcttatgtgggtggatcgcttgagctgaggagtttgagactgggcaacatggtgaagccgtgtttctacaaaaaatacaaaaaaaaaaaaaaattagccaggcgtggtagcttgtgactgtactcccagctacttgggaggctgaagtgggaagatatcctgagcccaggaggcagaggttgcagtgagctgagatcgtgccactgtactcccacatgggtgacagagtgagaccctgtctcaagaaaccgaaaaacgaaagaaaaacaagttcatgagataccacatacgtgaatatatgctaacacagcagcattattttttggttaatcaatgattatcaatgcttctgtgattttaaaaaggagagtcagctattccctcttctgcccgctgatatctacagcctctaccagatggtacctcacttaattgaggtttgccttttttcaggctcttctaatgatcttctggccaactctaaatcacctttaaacttcatggaatttatgcattcttgttaatttatatccatgtaatatcagggtatttctctttgtagctgcatcttctaagataatggtttttcatggagactggcattgtcccgtccctatgagggggacatttgggaatggcatttttagtactcacaaggtaactggggcactcttggtcttggggaggggaggtggctggggacgcagagggtcctgcggtgggtggatacttacaacatagaaatgtcctggctcttgatgctggctacaccctcagtaagagatactgtcctagggtcatttttttcaacccacactagttacgtggactgtcttagtcagtccaggctgctataacagaataccgttgactgggtggcttgatttttttttttttctcccagttctggaggctggaagtcagatgtcagggcaccagcatggttggtttctggtgagtgctcttttctgcatttgtggacagctgcc

SEQ ID NO: 18554 - DNA, 1034 bp, Homo sapiens
gctcctacttgtcattccagcattttgggaggctgaggtgggaggattgcatgagctcaggagttcaagaccagtgtgggtaacatagagactctgtctctacacatttttttttttaattagctggggatggtggcttgcacctgtagctccagctactcagagggaggctgaagcaggaggatcccttgagtccaggagtttgaggctgtagtgagccctggtctcaccactacacttcatcctgggcaacagagtgagatgctgttttgtttttgtttttttttgtttgtttgtttggttttttttggaaaaagaaagaatcaccataaaaaagatgggtaactcggaaatttcaaatgcttgaatttcttgggttgggaagaatatcccaaaatgtgtttccaactacctcactgattttgacttcacagggagaatattttgatttttatgctctgagttgctggtactgctgtgggcacagaactgggtatgacagaacatttttctgaactatgactctgatcttctcaatctctcagtgggaaagagttttggaacttattatttttaaaaacttggtaaaagatttataccataatatttatcattttaaccatttctcagtgcacaattcagtggcataaaagggcattcctgttgtgcaaccatcacccctatccatctccaagtgaacttgattcttaaatctcccagccatctgtttcaattcactagatgttgttccacccagcacgtcatggtggaaaggggcaggctgtgattttttttttttttaacctccagcagctgtgttccctgtggcaactatgtaacctctctgagcctcaacatctgtctataaaatggaaacagtgcaacctaccttagcatttgatgatctcaacttggatcccatagcgggtatctccaaaatttcctcatcttgactacgttctggtgaaacttaagatgtcagcacatgacctacctcccttcccttctcattcatctgcattttcacaatgctt

SEQ ID NO: 18555 - DNA, 1052 bp, Homo sapiens
agaataaaacaaaaaccctattcctattcctacaattctggtactttgccacaaggtggtggtagtgtatcttgagtaaggaatatgacctgctagatataagcatctgtttatttacacactaaggaatgtttgagtgtggaacgtggtttagatgctgtgcgtacagcagtgactcagataggtgtgtattctcaagaagctttcattctaatgacacatactttgtctccagtcagagttatggcaggtttttttttttttttttttttgactaaattcacccatatttgatggcaagtgtgatcacagcatgtttataaaaatcattcttaattaaggcatttccatcttatcaagccccctatttaataaggatatcaaaaaagaaaacagttttcgtgcatatgtgtagctttttagattcactttttccttatttgacccatataaactttgtctgtctgtgtctgtcagtctcacacacatccttcaacacatctcttatttctttccagagccaggctaaagcacccttgccatcttctctctctgctgttaaattagatgccttctccaggaatctctctgggggcatcctgagccttcccgattccatttcagatttctttctgtaatcaagagctccatctctgttgctttcctggggctcttcctctcctctttttgaagcttttcatttccctttatattctttcattcgtcaactacaaagaagctgcaggcaggaacaagagagctcagcacacttggtgcagtctctctggcttggtaattggtcccaagaaaatagtttttttccaattatggcaacattgaaaacttatccaggagaggaaaggctctttcagctgctctttctcgatccttgcagtttcccttttgacctgtgggtacacatggtactgacgcaattggcacctcagatggttcttcctgacagctacccttgcaactgactcaggatacaaactacctttttttttggagacagatctcactttatcacccagtctggagtgtaattgacg

SEQ ID NO: 18556 - DNA, 1030 bp, Homo sapiens
gaaaataaattggccccctgaccccttatgaagtgacatcattcatctgaaaggtttatcgccctgcgtgtcattttgaagttccctactctcctcctcgttctctaaatccatgaaaaaatagaaatgggaggaagaactggagagaggggttctgtgtgtgtggaatgtggctctggaaagcccccagccctcctgttaacacaatgcttttatcccgtaatctctgcctgcgggagacaaaataacagttcatctggaaaacaagattaactcatttaacttacgtagtgatcacagagagaagcttgttggagttgtctggctgaaggaaagcccgcgattctcggccattccggttcacagggcctgggtagcgggcccagcctgttgcaagtaatcgggctctgtcagatcagccttggtgagattgggatattaccagggtattctgttcatctctgacacaggccctctcaatctgatagacggtgtgcctcttctcttcattagaacatcttcctgaacacttgcctgtctgcactgccctgctaaggggttttcaggtgagcgtgctgtgggtaccttcacatttcaggccttttaacagggaatgaaaaccaactgccctgtgattccaagtctgctgatgcatgtgaaattggctttgtgttggggcctcttcttccaaagcaacagtaagcattttttttttttttgtgataatctctctctgtcacccacgctggagtgcagtggtgtgatctcagctcactgcaacctccgtcttctgggttcaagtgattctcctgcctgagcctcccgagtaactgggattacaggcacccgccacccgacgcccagctaatttttgtatttttggtagagatggggtttcaccatgttgcccaggatggtcttgaacccctgatctcaggtgttccaccctccttgtcctcccaaagtgttgggattacaggcgtcagccaccgcccccggccgatagttgcctttcttaccagcctgggcc

SEQ ID NO: 18557 - DNA, 1378 bp, Homo sapiens
aggccaaatgaaagaaccttccataaggggacgcagcacagtttgaatataagtgttccctccaattcccatgttagtgctttactatgagtattgaccagtgttaaagagtgagcgcacaggagccttctcaaagcctcctgcacacactctcccactgtaaatgcacgagtattgatcacaattattccgtaaacacatcttacaaattccctcagtgcacgcgccatctaaattaatccaaattcagaacaaagctctcttggaaaaggaaagagcatctctttcaggagcttccctcttggacattaaatcttccataatctgtgctagttcggcaaagaagccccaacgtcctcccaatcatagggcgcctgagctcttggtctcctatatcttatattcattatagatgtcttatatccattcctgtatcctttgtgatgtcttgagtgagaaaatgctctgaccaataagccaatgttcaattgacttcgaaatgttatgtgggataggctcattcagggtggtacggctgtagacaaaatgctatatgcattggctgggcgcggtggctcacacctgtaatcccagcactttgggaggccgaggtgggcagatcatgaggtcaagagatcgaaaccatcctggccaacctggtgaaactctgtctctactaaaaatacaaaaattagctgggcatagtgttgtgtgcctgtaggcctagttacttgggaggctgaggcgggagaatcgcttgaacccaggaggcggaggttgcagtcagccgagattataccactgcactccagcctggtgacagagtgagactccatcttaaaaaaaaaaaaaagtcttatattgattaaaagagacttaagacacatagtaccagatggattgtgtgatgctcattttgatttggatttaggggaacctgctctcaaagacatttttctgagacaaataggaaaatttgaatatggagtagctaatagatagtattaagagagtagccttcattttttaaagtataataatattttaattgagtttatgttagagatgcataccgaaaaatctacaagtgaaatgatatgataactaagacttgctttaaaataatgcggaaaaaactgttagagtaatagcgtaaataattcaagattggaaaatgttcatgttaaattattgttggccgactgtgggttcatttaattaggttctctgttttggggtatgttgaaaatttttcataagaaaatattattcagaggtctcaagaggcaggctgccaagaatagcagttagaaatagctagtatcaggcctggtgtagtggctcatgcctgtaatcccagtgctttgacaggctgagg

SEQ ID NO: 18558 - DNA, 1031 bp, Homo sapiens
gaattatgtgtccccaaaattcatgtgatgaagccctaattcacagtacctcataatgttactctatttggagatacagccttttaaaggatggttaagttaaaatgaggttgcttggatggtccctaattcagtttaatttgggtccttataaaaagaggaaatttggatgcacagagacaccaggaattcatatgcatggaggaaagaccacagtggcaaaagacacattgaggaggtggctgtctgcaagccaaggcaaggggcctccggagaagccaaacctgctgacaccttgaccttgaatgtgcagccttcagaactgtgagaaaatcaatttctgttgtttaagccacctagtctgtcacattttcttatggcaacccctgtagataatacagtcccattctctggggaaacagatacctccgccagggtcctgatctgaatatgatttggggtgatggaacagaaacacccgaggactgtcgttggggaacaggaaacctgtctgtagtcctggctctgtctccaattggctacgagggcttgtgtgtactctagttctctttccgtgacactgcatttggggggaaggtaagggaactggggaaaagaaggcaaaatgatgacttaaagagactgatgaacccaaagctctcttgtgaagccccttctagaataagtccgtctcacgttacagtgcttaggaagtgttagatgtactgtcatttcttcaacatatatgtcctatattagtctattctcacactgctagtgaagacatacctgagatggggtaatttgtaaaagaaagaagtttaacggactcatagttgcacatggctggggaggccacacgatcatggcggaaggcaaaggaggagcaaaggggcgtcttacatggtggcaggcaagagagcctttgcaagggaactgccctttataaaaccatcagatctcgtgagacttattcactgtcacgagaacagcatgggaaagacctgcccccatgattcagttacctccca

SEQ ID NO: 18559 - DNA, 1032 bp, Homo sapiens
ctcccatggttgtctgtgaggacaacagaaagtaatgttttctctgaaaagtttaaaagggtaaatggcttcatcacatggtgatgacagtgattattccaagagatggctgtaagctccctgagaacagaggtgctctgtgtaaatctagtctgtctccccaggcttagtggttgacctagactataccaagagtaagtgtgttttttaaatttaatttaaatcaattcattaagcattgctaaattggaaaaccatggaatatagagatccagtagttaagagcctactgggagagacagcataataattacaataagtgcagaacttgcaataatgtaattgaaataatgtaatacaatcctgcttaatattacactgtatatattcattgacttatagactgagctccttatcttgttcattgctatggctttagcaccttttgaacagtggtgcttggcttttggtaggtggtcaacaaatgtgtattaagtatatgaactgttggaagggtctgctgtgaaggatgtgatttgctctctttgatggtggacaaagaaggtttcctggtggaagagattaatgagttgggttttgatgaatgaataggagtttccccagacacacggaggagacagaatggaatgaaagaggggttttccaagaagaggcactgaagggcaagacttcattgcttctttgatactccaatgccggcttcctttgggttggactctgatggatctaatcgaggattaggatggaggtaggtgggaacatatttagaaggatgccctgtggtttttctccttcctgctatttatatttccctctctgtctttcccacctgtttggtgatgaggaaggagctgtgtactggtttgaaacctattcacgacatagtggacccaacaccaagtgtcttattgtaaatggatccacttttactacagttactttaatggcatctaaatgataaatgttaataagcatttttgcttgggaaagcacaatggtattagcctgcca

SEQ ID NO: 18560 - DNA, 1054 bp, Homo sapiens
aggaaacccaactttgtaaatgtgactttcctttgctactttttgcctattaagcagccatgtatgtaaagtattaaattagcatccaggcactttctttttttctagaaggtggtattttgcatattaatacttgcttaaatcaagaagctaagactttgtattatattttgctttacgtgccttgattaaggtcatgatcctgacattccagtcccaaaggagaccaaggaaatgaccagcacgtggctcactccctgtctgtccagtagaggacaccaaggcacgatgaccgcagctcctgtagtagttatggtcactgactccgggttcagacggacttggggttcagtcctagctctggcgcttaccagttttctcaagtgactttgagcatctttactcaaggctcttggtctcagttttctcatctgtaaaatggagatcgcagtatctaactcatgggtgtgtttaaggattcagtgatggagaaaatagctgaaaagtgaccgtatgaaatgagcagcagttgtcaagtacttggcatagttcctgtcacataggaagcatccagtaagtagtggtatctgttgtgattatgatcatattttatttcatggagttcagtaagagtacaaagcgaggagtttttctgcccctccagtagctgtagaatttgtgtgatgactatgtgagcttatcccctggtaggtataatggaaagactaacaagagtagaagagggatgtaactggagcatgatttaaaggaactgtagtttgtctctgtttttttttttttttttttttttcctctaaataaacaaaggaatagaagatcctgtgaagagctgggtgtggtggctcatggctgtaatctcagcactttaggaggccaaggcaggaggattgcttgagcccagtagttcaagatcagtctgggcaacataatgaaaacctaatgtctacaaaaagtataaaaattagccaggcgcagtggctcacgcctgtagccccacctacttgggaggctgaggcaggaagattgcttgagc

SEQ ID NO: 18561 - DNA, 1126 bp, Homo sapiens
tgcttcttcccaaagtcacctttgctctctcctgaccaccgttggtgtctcaaagtctcacatgtgacaacacacatatcatcaaattcatgagtatccatggcacacaatgttttccttttcttctcttctctttctttcttgttttgttttgttgttttattttgttttgttttactgagataggatctgtctctttcccccaggctacagtgcagttgcgtgatattagctcactgcagcctcaaacttctaggctgaagtgatcctcccacctcaacgtcctgagtagggagggcactacaggcgcatgcctccacatctgactaattactaaatttttaaaaatttttttagacactgagtctcaccgtcttgccctggctggtctcaaactcctgggctcatacaattcccctgcctcagaatcccaaagtgctgggattataggcatgaggcaatgtgcccggcccacaatggttttcatatagctattgtgtattgcgttattgccttagtcacagaagcccataaaaaacagattccaataaagagactaggtttgcagagtgatgagtggggcccttgaaataattacatttagtgggttatatgtctatttttttggtcgttccttgctcatctgtctttatttttgtttatttatttattcatttatttgagatggagtctcactctgtcacccaggctggagtgcagtggtatgatctcggctcactacagcttccacctcccatgttcaagctattttcctgcctcagccttctgagtagctggaattacaagcgcccgccaccatacttcgctaatttttgtatgtatatgtgtatatatatgtatataatatatatattttttagtacagatgcggtttcatcatgttgatcaggctggtctcgaacttctgacctcagaatgatccgcctgcctcagcctcccaaagtgctgggattacaggtgtgagccacaatgcccagccttatatatgtatttattaagtttggggggaacaggtggtgtttggttacatgaataagttctttagtgatgatttctgagattttgatgtacccatcacccgggcagtgtatactgtagccaatat

SEQ ID NO: 18562 - DNA, 1050 bp, Homo sapiens
caacagtgattggatgtcatgtgctttcagaaggcacactacacatcttcggttcctccaagctctaggaaagggttgtggaattgggttgggtgacaacaggtcggtaagaagagggctgggctgagtgtaaagaaattccttggctgggcatggtggctcacgcctgtaatccagcactttgggaggctgaggcagataaatcacctgaggttaggagttcaagaccagcctggctaacacggataaacctcgtctctactgaaaacacaaaaattagcttggcttcctggtgcatgcctgtaatcccagctactgcagaggctgaggcaggagaatcgcttgaacccaggaggcggaggttgcagtgagccgagatcgtaccattgcactccagcctgggcaacagggagagattccatctcaaaaaacaaacaaacaaacaaacaaaaaccccagatattccttattatggaagaagaagcaggaaatatgtttttgaataatctgggtcagagaattgtgcatttattattgctaggatgcatatacacattgaactcagtcaacttactctctctaaattatctcaccggtggagacattgcctcaggagtcgagccctgtggtgtgcctcctgctgtcaccacatttgaccacctaactgaccccactgtggtcacctttgccacctgccctgctttggtcccttctctgcattcgccccatgccatgtagcactgctgagtttgaaaataattgcatctcctgaaaactccatttcttagagagtgagctccagcaccatcagcctgaagttgaagaaatgggactcaggaaggctggagtcttcaggcgttcttacaatgctgatgcgactcagacggctgcctgcactgtcctctgtgcttctaagtgaaattacccgtcggggggctcctgagagttaaatcaagcagcctctcttgaagcacagtaaatgctgacgtgatttgtgaagatggctctgctaatagggttggcagcgtcctttggcttggacctttggac

SEQ ID NO: 18563 - DNA, 1051 bp, Homo sapiens
ccacgatgatccactggggcagtggccagcaaagtccctgtccagccagccactcgtttttatcaataaatttttactgaaacacagtcatgcctgttaggttaggaactgcctagcgccacttcacactgcagtaggagagtgagtagttgtgacagagaccatttatcccacaaagcctagaatctttattataatcctgtaacagaaagcatttactgactccttagcattgccatgtttagcaaataaaattgcaggatgctggtcaggcgcggtggctcacgcctgtaatcccagcattttgggaggccaaggtgggcagattacttgaggtcaggagatcgagatcagccgggccaacctggtgagatcccatctctactaataatacaaaaaatagctggcgtggtggcgcatgtctgtaattacagttactcgggaggctgaggcaggagaatcacttgaacctgggaggcagaggttgaagtgacccaagatcaccactgcaccccagcctgggcgacagagtgagactgtgtctcaaaaacaaaatatctggctgggcacagtggctcatgcctgtaatcccagcactttgggaggctgaggtgggtggatcacttgaggtcaggagttcaagaccaggctggccaacatggcaaaaccctgtctatactaaaaatacagaaatcagtggggcatggggcgggtgctctgtagtctcagctactcaggaggctgaggcaggagaattgcttgaatccaggagacggaggttgcagtgagttgagactgtgccactacactccagcctgggcggcagagtgagacgctgtctcaaataaatacatacatacaacataaagtaagatgttaaagtaaattttaattttagataaacaatggataattttttagcaaaaggatgttccacatttaactggacattatctctgtctctctccctccttacctgcctcctatcctctcttcccaccccctacgatgtctatgtatagtttcaacctggcaaccctgtgacctcagc

SEQ ID NO: 18564 - DNA, 1050 bp, Homo sapiens
actaggtgccctagaaatgttctttcctctgactcaaatgacaaatcagtttctagggaaaggaacgcacagcgatccccagcgcatcacgagaaatctctctccagctttgccctggctgcgctggtgactcactcggggctaaaactgtttatgtctgcggagtcagagcgttctgccctgcggtttcagttcacatggggttgggcgacacagttttgttttcactttggtttatcgtgtgagtttccatccatcaactcttttgtatctgatgttcttgggaaactttgcgggaattcacttgaaattgtccagtgaacagccattgcgagtctcatggtcagagccgggggcttcccagtgtagggtctggtcaaggaaagggccacttcctgggcctcccaaaaagaggaaggagaaggccctggcttgtggaagagtaagaggggcctcgttaatgtctcccaagcacagtaccccaactccccacatacagtcccaacccttactgcagccgggaggttaggtgtctgccgtgctcatgaacaggaagtgaacccgatcagcccccgaaggaaacatccgtctctctccttggaggagacacttgagtgtctttctctgtgtgctgcagccgttattgatatcagttcccaggcaaggttcatgctggcagaggaggccactctttctgcactggagagcaaaagccatcttatctctctgagtgcaaggtgacagtgaggagattggccctgtgtatccctcagagaccagtattccctcatttgccaatctagaaagaagactgtgtttgctgtcatttgtttcttaactcattgattctcaaacagaatcttcccagggatctgcttcatgctgtattttgtactgtgtcctgagatgatgaggattcggtgtctaccctcaagaagcatcatttagagaagaaattagaaaagtaagtgaggcaggagaacaggatctggaggcagggaatctaaggctgattcacgttgactttgtataattaaatcaaaaggaaaa

SEQ ID NO: 18565 - DNA, 1048 bp, Homo sapiens
tttgtccaaggacatcgttttgatatgatgaaccatgggtggtttgggcatttgtcaaagcagggtcagcagaaagctgacgtagttgggtctaaagtacaacaggactgagcatggtggctcacacctgtaattctagtgcattgggaggccaaggcaggaggattgcttgaggccaggtgttcaagaccagccttggcaatatagcaagacattgcctgtacaaaaaatttaaaaattagctgggaatgatggtgcatgcctgtagtctcagctacttgggaggctgaggcaggaggatcaactgagcccaggagtttaaggctgcagtgagccatgatcatgccactacactccagtacactccaggactttaggcctgctaaagtgcattgtagtaatactagatatcagcacccttgccatggcctcatgagcagtgaaatgaactttcttgctcctggatttttggctcttggccttgtaatttttttttttcatgggatattagtcaacatgatgtgagcagagtcttgagatgtgcttgcatgattggctttgtactcctgcatttttcccatagccaatgccttttcttcagcttgggctgcagaatgagatagatgaaacagacctgaatctgacttataccctggagccattttcagcaaacccagtcaatatcaggccaacctcaaccaattcttagactagtgagtgaggaaaataaatatttgatcttgtgaacccttgaaattttgaggttgtttgttatgcggcagtattttggcagtagctgatgaatacaccactccccatccctagtggcttcctataccatttagaataaaaatacacgctcttttccagggtctacatgtcctgaagacctgaactcctgcctgcctctcagtttatttcctacctcaagtagctgtgcccaatgtcctcccaatatcctgcaaccactctagtcttctttcttttcctgggacccacagagcctatatctgcttcaaggcttttgtacatgttgtttcttttgcct

SEQ ID NO: 18566 - DNA, 1068 bp, Homo sapiens
gttcctgtcttcatgcccatgtgtacgcagtgttgagcttcgacttgtaagtaagaacatgcggtatttggttttctgtttctgcatttattcgctcaggataatggcttcaagctgtatccacgttgctgcaaagaacatgattttcttcttttttatggctgtgtagtatttcgtggtgtatacgtaccacattttctttaactaatccaccattgatgggcacttaggatgattccatgtctttgctgttgtgggtagtgctgccaagaacgtgagtgcaggtgtctttttagtagagtgatttattttcctttgaatgtatacccactaataagattgctaggtcaaatggtaattctatttttagacctttgagaaatctccaatttatttttcatagggacaaggttgcagagaaaagagaagagtgctgtttcaaacagttgaaaccattcctacttccaaaaagaatttgactcaaaagggaatagtacactacatataaaagacagatgtatttaatttgtgtttcgaactacatatcagaaattagttagaagaagatatgagataaatatacctggaaactttatgaattatttctgacatctagcattaaatttagctgggtttcctgggagtcaaaagcaaagagttttcaaccaaaaaaaagaaacagaggtgtatagtaacacacctctgtcctgcaacataactgtaagaatttatcagattatatatatatatatttatcagattatatatatatttatcagattttatatatatatatatatatatatatatgcatatgtttgtatataaatatacatgtaaagacccaaaactcatataaaaagacaaggtgatacagcattttaaaacagtttactaaaaataacaaaacattcttccatcagtcatgcatgccttatatttatgtagatacaaaaatagagtttgatattaaacaatactccaagaaagccatttctgcagagttaaaaaatacgtaggttcagttccttaccaacacgtagacatgttgtgatgaaagaaggaaag

SEQ ID NO: 18567 - DNA, 1049 bp, Homo sapiens
agctaaattttacaggtagttggggtttcaccatttaacccagttaactcttctataagtgccgtattaaagcaggtggtgtattttgaaagacgtatgtaaaaacatttgtatttatttatatgaatgaatacattttatttatttatataaatacattatatttattcacataaacacattttatttatataaataaatccatttttatttatttatataagtaaataaattttcctataaataatctttctgattgacagatagcgaccttcctgctatgtccttacatgacagaggaagagatcatctttcttcagcctcttctgacaagtccaccagtctcattcatgagggttccactctcatgactgaagtacctcctaaaggctccccctcctaataatatcaccttggagattagggtttccaaatatgagtttggggggacacattgattccacaacactgaccttctatcagatcagccaggatgctctttttcaaacttctgtcaatctttccccaccttcacaatgtgcccctattattattaatatttaaaatattgaagatctaattaatgttgaaatttttctttaaatcaattcatagattcattaactttgttttaaaaggaaatgttctatttccatcgtaaagggaagatcaatatgatttgccacatatagatgaagataaacctatatacaaagaaaatagaactatagtaattccatgtagctattattaccagagaatactctaagcccaatgcttgtgttctctttgggcaaatggaagatgagccacttgtagagaggtattaaaaaccaaagcaagatcttttgcaagtagattaattgggcaagacaaagggaataataactatgtcaccaaaattatttaatgcagggtccaggagccaccttaatcatccataaattggttaggcatgtttattaccacagattggaagcaggcttcccccaagtgtgtttccctttgtaatgccagtgtcgtaacgccactatctatacttttcaaca

SEQ ID NO: 18568 - DNA, 1043 bp, Homo sapiens
attacacggagaagtgttagaacagggtaatcaactgggaacccatttcaggtgaatgccaagatgttttgaaggtgggcatggcagggaaataacaggatgccatgcttggtgagaaatgaattcgtaagtgtgcactgtctgccataaagagccaggcaaggcacagaaaatattcttctgtttctttttctattctaccctctctctgctttttcttctctcactgctgctgaagcagtgagagcctgttgagttaaaataagccagtgaggattttggtggtgtttgcccttgaagcctcttgacatacagtgtcatcaaggagcagtgggtgagcctgcccatatctcgggcacaaacctaggtactcattgaatcctttaaactaaccctctaaagaattctcaatctgtggatgagaaatggcaacacagggatgttaaactgcatgcctacaatcatccatttggaagaagcagggctggaatttgaacatgagactgtatgctccctgttgtagtttcctatggctgctgtaaaaagttagcacaaatgcagaggcttaagacagcacaaatgtcttatcttacagttctgaaggtttcgctccagagtgagttttatggagtgaaaatcaaaatgttggcaggccttaggggagagtccattcctttcatcttccagtctctagaggctgctggcatttttcagctcacggccacagcactctaatctctgctttcactatcccttcttttttctgtgactctgaccttcttgcttccctcttacaatgacccttttaattgcattaggcccaccaggctcatccaggatgtatttgtctgtgttcacactagtgataaagacatacccaaaactgggtaatttatcaacaaaaagagatttgatggactcacagttccatgtggctagggtgggtgcacagtcatggcggaaggcaaaaggcacatctcacacggcagcagacgagagagagtgacagccaggtgaaggagtttcccgttataaaaacatta

SEQ ID NO: 18569 - DNA, 1034 bp, Homo sapiens
atacctcaattccttttgcctgcctggctcctctcctctcttctgcctgttcattgaactgaaagattatcaggactgtattcagcccggccaataatatcacaaaacaaaaatatcttgtgggtttgaaatttatgagtgttttgactgttcacagcaatgcctttgagaatcacagtgtgtcatcccctccccacccccacgaacatgtagtttttgggcaacttttcgatgagtaaaacagggcctgacttttaccccaaagtgatgttcttttgtggcttgtctactccaagaactgagatacccagactcatttctcatctcttgttgaaacagagaagtcactgtagcgccctccggggggtggggtatcaagggagagtatgggctttgaaactgctcatcccgtctacaaccttggagggcatggtgtttcactcccccacctctccccacaacttcaccctgctccaatgaggatgaaaatgtctttcttatagatgggacaggagccttagtaatatggtgcgagcaatggttcacataggggacaggtgttcattcaatggtgggtattattataataatcattagcatcattgctagtgactttatttttcctttagccaatggagcagtggcttttggcccactactttcgactgaatctatgagtgaatgtgatcctccgttttaaccctgtcttattggatgttggtaaacagtatatcatgagcccctgtaagagcttgaatccttcaaagacaaggtcagtcagtggccatcactactctaaacgtaagaccctgtgatgactgacacttactaggtttctcatttatttatttttctctgcaggacacagctatgtgttccaaagatggtcttaaacctataggagtataacaccatggctagttcagaaaaccttattccaacttccaaacttagaagatactgggaagtaaaagggagagaagggaatgcatggcttgggctaaaaaaatgattctgcattcatctcagaagga

SEQ ID NO: 18570 - DNA, 1091 bp, Homo sapiens
agacaccgtgcctgctgctaagaggcccctggtcctactgagtggtcagctgtttacactgacagtcccagcgtggtataataagcattaacacagagacatgtacagggtgctgagaaagctaatttttgcaatagtcaaaaaagacctcagggcagactccccagcacagagttccaagcctttacctaaaaaggtaatcattttataagtacctattatgtgccagatactaggataggcactttgcatagaaactcacatttcgactgggcctggtggctcacgcctgtaatcccagcactttgggaggccggggcaggcagatcatgaggtcaagagatcaagagcatcccggccagcatggtgaaaccctgtctgtacaaaaaatataaaaatgagctgggtgtggtggcacatacctgtagttccaactgctcagaatgctaaggtaggagaatcgcttgaacccaggaggtggaagttgtagtgagccaagatcgcatcactgcactccagcctgggtgacagagtgagactccatctgaaaaaaaaaaaaaaaaaaaagacatttacattttatctttactgtagctatggctgcctatcccaaggatgggaagtctgaagttcaaactggtgatgatccccaccccaagtcacacagttagctttatagttaaatcagggtgtgcctgatttcctagccataccaggcagcctatttcttgaataacctcccatcccctgtgtctcctttgtggagctcttggcaatactctggtgattggtaaccactgatacgccgccagcagtccacgcttgggtggaaggcaggtttcacgtaactgatttaccacttggtaaaggaacgaggtgacagcaagaccacaaactaataaatatgccggtattgacataatgtcggacctcagtatgattgatgcatgtgttgttgactgggatgtcacatgttcaggctgtaatcctggtctcagtatgactgtgaggacggggccaagtcatttcacaatttgggtgagtgttccaagcttctcagaagagcgacgcaatagaaattcaaggtatga

SEQ ID NO: 18571 - DNA, 1090 bp, Homo sapiens
ctcacaacctatgaccacatacgaggaagcgaggtgtcccttttgcagttgttcagaaggtcccgtgggcaggagcagccagaggaacatgaaaccagctcgtaggtggtacttgtggcaacagcagttatagccaaggagaagttaaattctaaagacttgggcagtctccagggaatatactaactgagaaataacatccataaaaataattcaatactagtatgtaaaactaaaaacaataaccaagtgtgactggctgtctaagaattaagcaaagtaagatgaagtgtcttttgctagcaggcgctctcagcaaaggagataaggctgcagtaattctcttcccaccttcgatgggcaggtgcaacctttggctgcagaaattctcacttcccagcagcagctttgagcaccctgctctgaatgtttcttgggcagcagcagctagggaagaaactcagttaaggctgtttgaggacccaaggtggtctcactctgcaacacacatcggcagccagtggtgtgctggtaaatgattaacaactggctctctgaaaaacaaacaaacacattgtgcacctatacatgtacacacacagcttattatttattatttctctgaaatatgggtagcatataatttacaaataagaagaagaatagtatacacagtactgtttcttataaattcgagatagtcagtttttaccaaatgcttctgatttttgctgcgctattatatccattacaaaaccattgttgcagtataaaattgcagtatgtagctgtgacatgaatattggttgatattttcatttttattaagaagtaaggcaaaaacaaaataagacatatgtcagaacttcacttatccttctttgctgaattggataatggttttaaaataccaaaaaatatttcttcaatttttttctgctactcataatgtagcatctgtagagcgacacacttttgaatttgagttaatatttcttttttattttattttattttttgagatggagtctcattctgtcgcccaggctggagtgcagtggcgcgatctctgctcaccgcaacctccgcc

SEQ ID NO: 18572 - DNA, 1041 bp, Homo sapiens
tctgtgggtagtctttttattcttttgatatcatctcgtgatgcacaaaagttttaacaacaaaagtttgggtgttgtatctaagaatccattgtcaaatccaaggtcatgaacgtttacctctgtggtgtcacccctcctctcgcatttggtgagaggagtcttctgtgttgattgtcatggtggtgtgagagcagaagggaaacatggtttcagaaaagagtttttccctgaaaccacccctctattttcttctcagacttttatagttttagcacttatgttaagacttttgatccattttacgtcaatttttctatatagtttaaggtaggcattcaactttgttcttttgaatgtgaatatccatttgtcccagaagcattgattaaaaaagataattctttctctattaaatggtctttgcacccttatcagagatcaattggccataaatgtaagtatttctttctggactctgaattatatcccattgatctgtatgcctgtccttatgccattgccacattgttttggttactgtactctgtgtaagttttgaaatttggaattgtgaattctccaactttgttcttcattttcaagattgttttgggtattctgggtcccttgtatttccatttgaattttaagatcaatataatttaaattttaatcatggcagtgttcaataactggcttgcatattttttgaacagtcatcagctcttgtgagccacggttggccagctcccaaacaccatgacatacaacttgcaggaaaagctcattttccagtttttccccctccagctgtaggggatatattttcgttaattcctgtgaccatatggcagcatggttaggatcttgggcttccaaatcagacagttgtaaacttaaactccaattctgccacttattgtgtcactttggacaagttacttcacctctccaagcctcagtttccctgactataaaatgctaacaatagttgttctttccttattggacactcaagaggattaaatattattcatg

SEQ ID NO: 18573 - DNA, 1046 bp, Homo sapiens
acaacaacaaacaaacaagaaacaaaaaatacatagaagaggccttctcttcacaagtttttcttattgttttttgtttttttaagggaggaaatttctttcagaagtcagtactggacattcccttatttcaccttgagctacacatcccatagtcagcttagccctgtccctggtgcgggggagcaggacggttgcctgtatcccttagtcattgccgcaggcttgctgcatcacaaaccaccattagacctcagtggcccgcagcaataaacattcgattctcgccatctctgggtttgaggtgaccttggctaagctcccctgcattgctctgctcatctttctcacgagtctggcaatggggctgggaatgggctgatctaggctggacttggctggagtaacccagccccaccttggatctctctcctctacttcccacatgtatccttttcatggttaaaggtagaaacagaaaaaaacaggcagaaacataaaaagctcggagatggcttcctattgcttcttcattctgggccagagcaaatcatatggtcgtactccagggtgaggaagtatgtcccacttacagactgaaaaggtgctgcaagtctgcacggcagagggcatggataaggggttcgtaaaaacttagggccatttaatacaaatttgtcacatcacactggcttggattgattttgattcattgctctgtcgcccaaacagaattataattattttagtaaggaaagaggaaggatacctttggggcagacaatggatagagcttactatacaagtctatagaggcatctcacctgtagaaatcttaagatgagggttagccaaagcaaagagtggttcagggtgggaaagccaaggaaggccaggatcctcaccaagattgccagcagggagctctgattgtccacagctctgctctctgctcaccccggggatttagcagtaacagaatccacactagaaggacagagtgctgtacagacagaaggaaagacgcagacccaaaccttgataac

SEQ ID NO: 18574 - DNA, 1044 bp, Homo sapiens
tttcatcttatctatatatctgtatctatatctaatctattttttgagaaaggctctcactctgttgctcaggctggagtgaagtgatgcaatctcaggtcactgcaactgctgtctcatgggatcaagtgatcttcacacctcagcctcccaagtaactgggaccacaatgcccagctaatttttatatttttttgtagagacggtgttttgccatgttgcactggctggtctggaactcctgggctcaggagatctgcctgcctcagcctcccagagtgctgggattccaggcgtgagtcaccatgccaggcccctgcctctgtttaaatgctcaaacttggtatggaactgcacagactatacggctgctctccactcaagaatacaaattgaacattgactttcctcattttttatccagttttgctttccagagacccagatatggcttcattttttaaatgaaattttgcaggtcattagctcataatgattaaatgattctggttattagcataaaacacagctgtagtacataagaggtaacctttattgtttaaatattattcaatgtgcctacatagcacacagcaaaaaaaactttttttcagactattcagccattatggaaataacttataattacattcagaaatgttgcaaatgcaactcatccttgcagtgggataaacattgcctagaagggtttgaagaggaatccaggttagaaacaatgaaaatttttggctgggcaaggtggctcacgtctgtaatcccagcacgttgggaggccgaggcaggagaatcatttgagggcaggagttcaagacctcctcatctctacaaaaaataaaatatttgaaaaaaaaaagtgaaatttttgatatagaagaggatgtagggcaggtagggctcagaaagacccatgccatatagcaaagttcttagtaacacaggctttgggttacagcaggctagattcaaatcctgctgtggtcagaatgtctgtgtcaccccagcattcatttgttaggagatggg

SEQ ID NO: 18575 - DNA, 1019 bp, Homo sapiens
aagctatgggatgtacagcagagtataacaatgataaatgatgttgtgtgtaatttttctactattaacataaagtaatataaactgaaggacactggtctattgagagacttagaagctaatgttccatatcagatgcggccaatgtcaggactgaatacagattaggcagtgtccttttctccccaggggaattaaagtttgagacaccacttgctgccagtggttttatggcattttgttggggccggtggtgcctttcttggtctattaattcaggagccgtaaacaacaatgtgagcaaaatgcttttccggtgggatgcatttcatttatatgtgcttgtatcgtctataccttgtcaatccattttgtcacaataagtgtttttaaattgtgtagattacctccacttcattatggttcctggcatttgtgtcttatgcaaggctattatgtgaagttaggaaatatttaaaactctgcctttctaaagaaacagggacacggtgcagaaaagttcatctggagttaggcttgtgtcttgccgtctctttaacggagagttcatgggcagggtacagtctgtgagaaggaatgaaaaccccagggtagatgctaacaaaaatcacttttaaaaaatgtatggtgtccatctgggttagcaaacacatgctcacacgtctgtgcttgctggatttttaagaacttaccagcatttaaggttttcttatgaaactgattttactcaccagggatagagtctcaaagttggaggtattttatgttgttttaaataatatcgtcatcacatgtcattttagaccccaaaagtccactccgaatctctgcgtatggaattgaggaggggtgaggctgtcagaagccgagggacttggccaaggtcacatggctttggacggccccctgaaccttggagctcatgttctgtggcactttgcatactgacctttctgctcttttatgctgcctgctctctaatattgtccaaaaacctt

SEQ ID NO: 18576 - DNA, 1086 bp, Homo sapiens
tggagtgcagtggtgcaatcttggctcactgcagcctccacctctgcctcccaggttcaagtgatactcatctcaagtggtttctacctcattaaaacaaacaaacaaacaccactcaccatttttgtggtgggcatggtggctcatgcctgtaatcccagctctttgggaggccaacgcaggtagatcccctgaggttgggagtttgagaccaccctggccaacatggtgaaatcccatctctactaaaaatacaaaaattagctgggtgtggtggcatgtgctataatcccagctactcaggaggctgaggcaggaaggtcacttgaacccaggaggtagaggttgcagtaagctgatatcatgtcaccgcactccaacctgggtgacaaggctagaccctatctcaaaaataaagaaacccttgctattttagcttccgatgaggatatttatccttctagcatttgaatgcagccaaagtccttactgggcaaatttttgagctctcaccccacattaacaatttctctccttaactttgtttctgaatgaagttatccacagagttttaaagtgagtggtgagttgtggatacctcttccgagcaggtgcacccccatcctgccattgtccctctccttagtgtatatggattgatgacatttcagtttcagacaaagggacatttcattttttttaggagattaaagctgtgtaagatatacaatttaaactgaatgttgatattttatagattgttgagtccgattgtcctgatctaaaattaactggttttgtgatttggtgtaaatcgcttaacctctttcaatgttttttcagcaaaatggggtaagaacagaatctgccttgcagagaattaaccgagatgatgtgtggaaagggcctatcccagaggctggtgtaccatggtggcttctcctggctctgctggttattattattagcattattgtcattgtgaaagtgacaaggaatgtgcctgtgcgtgaatctcactcttagatcagacgtgcttttgaaatatccagatatatacaacacaaagagcgaagtttgttttat

SEQ ID NO: 18577 - DNA, 2133 bp, Homo sapiens
tagattgtgaaatgtttaaggaggcaaagaatatttaaccaagaaaggaaaagtgtatttgagagagacctgatgagttcaccactgcctctggagaatcaaatccaaaacagcatatatatgtatattttttagagacggagtctcaccctgtcgcccaggctcgagtgcagtggcgccatctcaggatctcggctcactgcaagctccgcctcccgggttcatgccattctcctgtctcagcctccggagtagctgggactacaggcacccgccacctcgcctggctaatttttttttttgtattgtttgtatttttcatatttttcgtagagtcagggtttcacagtgttatgcaggatggtctcgatttcctgacatcgtgatccgcccgcctcagcctcccaaagtgctgggattacaggcgtgagctgacgctcccggcctacagcatagatttgaggcatcttgaaggtagatgcagaagagtgggatctactttggatttttagattaatcactgttaagacttaaacagcttcttatttgggtgaaacatgggagtgtcaaaaataagtcactgtcactctttgccaacttcctttaactctttatacggctatatctccatagatatccagtttttgttttgtttttgtttctgttttcagttcctctccaaactgtcaaggacagtgccaagatctgcgaatatagaaagattaagagtttttttctgccttgttgggtcttctttctagcatgccaggaacatttttctcatcttttgaacattagggaataacacccaatgccaccctataatctcgagacagaagtggaggatcctcttaagacaagaaatctttcaaagccaaataatgaattaatccaaagccacttgaggctctagatagatcttagcagtcaaagcaataaatatataatcccataaatctaaactttgtggtatattcattaggctgtctgttttcttttctttcaaatgtttcacttaattccctgatataataaggcttccaaattcttggtgtttttctacaaccaagaccttgaactttttcctctcaggatttctttcatgagaacccattttctggccatttggatatcattgatgagggaattgaagcatttccctattctttagagtttcattaaagtttgactatattccagtaacaattgttgcataacaaaccacccccaaatttagtggcttaaaacaacaacatttattttgttcaggaatctgtagtttcagcagggctctgaggaacagcttgtctctgctccagcatcagctgaagcagcttgaaagccagggtctgagatcatctgaaggttgttcactcatgagtctgaggattgatgctgactggtgggtgggacccttgctggagggtctattggctggaacacctacacattgtctccatgtaccctgagcttcctcacaatatggcggctgggttccaagggtgagcgtcccaagagaaagaaccaagcagatgctgcattgccttttatggccttccatagaagttacatagccctaggttttcctgcattctattttttaggctgtcagacccaccccaaccaggtttgcagtgagaggaaatagaccccacctcttctggaagagaatgtgggactggacatactgccatggccacttttgaaagatgcagtctgccacataagcaaacagttcgtgtcctgcagtgggatattgggaaaagaatggtatttggcaaggggtcaggaaacctgcttttgaatcctacctctgcctcttactagccacatgactgggtcttagcatgctcatctatgaaatgggggacactaatgctgaccccacatttgtgctgaggattatgcaaataaaatctgtaatttgtgcaagcatccaccaagtgcctggtgcagactggatgctcaataagtctttggtgggtccatgtattgaattggaatctgcacattatggccattatttaggtttcttgtgtcctaatctatgtcactgagtacatccttgctgtttttcatgaattttccactgagtcgcaacatgccactggccagtgaaggtcaggcaggaaa

SEQ ID NO: 18578 - DNA, 1002 bp, Homo sapiens
tttacctcccattatttcttccgctgaacaggacgtttggttctaattgttaagcctgcctaatgctgattgaagcgggccatagtatcaagggtggaagaaggtgggaatataaactagatttgctcccttctgtaggaataactctatgaagactttctttttggagacaaatcatcttatgcaggggggaaaaaaaactccctaaaaaagacaaatgacagcgcaagatccaaaaagacaagtgctcagtcattttgtcataatgccagaagagacagtaatgctgtgtggactatgcattcagacatttagaaaatactgcaggcagagctggggattccgtggccagaagcatatttggtgaaccgaggacgcatcaaagagcttctctggtgtttagtaacttgcactgtatttcagaggtttataaagggaagggacaggaaagcagtgtgccagtaagacaactcctcttctcgtctggattttagaggaatgcagtgaacaaatgatgaaaaagtctgaagggactttggtaattcagtatccgaaaaacaatcagtgttttgtgacattcttagttgtgatctaccttatgttgtatacacatggtcactcacatacataggtgtattattctgcaattgctgagtaattgatgatccttcattctctctgtgattcataggctctctgggttggataaatcacttcggggaattatatctactagtatatttatgtcactagaattcctttgagaagctatcactgtgtacatttactgtatctattaactttcttcatctccctcttcctccctttcttcctttcctttccctttcctttctcctctcctgtcctttctctctccctccctctttcttttctttctttttcctttttctctctctctttccccctttttgtatttctaggagaaacggggtttcaccatgttggccaggctggtctcaagctcctgacctcaggtgatcc

SEQ ID NO: 18579 - DNA, 1224 bp, Homo sapiens
tttttaatggccttgaaatttttgaagagttccggtcagttattttgtagaatgcccgtaatttgggtttgtctgatgtgttctcttgattagaatgacgtggtgcatttttgggaggaatatacataagtgatgtgccattcttcggccatcaagtcagaggatgtgtaatgtgaaaatatcttattactagtgatgttagccttgacctctcggttaacgtggtatctgccagatttctccactgtaaaggatcatttttttcctttgtaattaataaatatattgggggaggtactttgggactacttctcaaattttcatccattaattttagcatccctctggggatcttgcctgcaatgattaatactgtggtattctcatgactgatattgtctttctgtcatgccttctattttttggtgggaattcttctacatggaaggctgtttcttcttctccatttatattggtatggatacgtgaatatttagtttattctgtaggtcataatacgacagtattgtgatatattttggtgctcaaattgttccggctttggcccataggaggtctttcgggcaggttcctgcacccttttgacatgccccgttcttttttgagcactttcttattttttggcactgtaagaggctttacactgtcatcttggacttccctgcctcagtcttggaattaactcattctccatggaggcttggttcgttttattatagaatcatatttagaactaagatctaggtgctagttgcgctcattactgctggagtgtcattgcttctagaacttctcaacagagtttagaaatatgtgtattatacaaacccatgcacatacacctatctccatttattcctgtatctctgtgtatattataattttagtatatttatatttctttctggacacattccattatttgttcatatatttataacatatcagtatctattataaattatatatatgtacactttaatgtgtgtttgtacctaattccaatccaacacaacaactgggttttttcaaacttgtttctttgtttttttctttttgtggagagcagggtcttgctatgttgcccagctcagtctcaaagtcctgggctcaagcgattctcccgcctcagcttccctaagtgttgggattacagacttgagccactgcatctagccacaactgagttcattattctgagct

SEQ ID NO: 18580 - DNA, 1085 bp, Homo sapiens
cttttgtttgaagacaaatgcagtgagtttaatcacaggtgatctgaaaggcaccacctatcttttgctatgttcactttgcagaaactttggcgaaactggctgaatgaagatcgattccaatttgtaaatgtggcagacaataaaatttccccaagcactttgatgatgtttgtgttaatacttcctgctcagagctgtagcccatcagattctagagctaaccgaagagggaagacaacctgtcttctcccagtttccagcctgtatagacttaatcattttcaaggtttaaggttgtttttgtttattggttggggtggagagagacgcaccacctctcctaacttctgtgtttgcttccctcatgctgtgtggatcagaaaagatagcctgttcattcatcacttatttcctgacttccaccttgggtctgtcagattctgtgtgaagcccaggggatccagggaaaattgaggcccagtccttactctcatgtaactcgaagtcttttacagaagacagacttgggaacaaatcaatcaaaatgagttttgtacggaaaaagtcggtgcacgcacaaggtacccaagaaggaggtgactaactttatctaactttacttgcagggcaaggcaaataattagggaaagtttccttcagacaggggaagacaaatatgagtatccagggaggatgtttctggcagagggatcagcataggaaaggagttcagggttgaaaagagtcagtctggtccctagaaataatttttttggtgcataaagggccagaacagaatgacagaggaaaatgataaggatttaggcagggactgcgttggaaagggccttgcaacaggcctggacgttgtttgtaggcaagtaggggcaccgaaagctttaaagcagggagtaacaggcttgtagtgacttttatcgaagtagaagttgaatagatctagcctggcacagtggctcacgcctgtaatcgcagcactttggttggctgaggcgggtggatagcttgaggtcaagagttcgagaccagcctggccaacatcacaaaacctcatttctgctaaa

SEQ ID NO: 18581 - DNA, 1050 bp, Homo sapiens
aagtcttgctcgcagatagcctcttagcagagccaaaagccagcagagagaagactcagcatttgctttggagtaagtttgtgtgtgtatgtttatctcccttttactcatgggctcttttttcccaaataactgaggggccagcacatttggagaacatgggatttatcattgacgtcagtgccttgggagtctatgtttatgtgagcttaaaggttttggaagctgaatgacacagatcaaagtctctccactgatctgtcttccagtcctccaggggacttcttccatcaactacaaatcattgatcaaagtattggtctgtcacctgtccatgtgtaaggccaggcctaagtgctctgacagggcatgactcaatcctcaaacaggaagggggaaattgctttccgtctcctaaccctaagatcctggatggcaggtaatctgcttcctcaagattctgttgatacacattcaggactctggtttctgttttgcttgatgacaatgacccagtttctttgactaaataaatgtatagacacacattacttcttttcattctaagaatcataagtttttcaaactttagaatcacaaggtccattaaaggacatctcccctgaccttcccattttgtagatgggaagactaaggtccaagcttgaatgacctgccatcatggggataaccggaattgatacaatgtcttgattcaagattcagagctcattttttctgtgtcagattaaaaaaaaaacaaaaaacccttactgatcttttaaatatgtaattcttcctcctcttctccccttgtctctcttctcacccctaccaatgtaatcagttctttttttcttttttggagacggaatctcactctgttgcccaggctggagtgcggtggtgcgatcttgcctcacggcaacctctgcctcctgggttcaagcaattctcctgcctcagtctcccaagtagctgggattacaggtgcatgccaccatgcccagctaaatttttgtattttagtagagacgggttttcaccgtg

SEQ ID NO: 18582 - DNA, 1045 bp, Homo sapiens
gaactgaaatcccaggtacctgcccagaggcagctcccttggcccttgggtccctgttgttccaggtgttactcctattctttttgtagttgtctagggatttagtttctcacatcctgaggtccactaggtgctattagctggtgctaactgacagctctaggcagaaagcctttctcaggatcccagcttccctgtcttccagaactcaaagacggcttttgtttgttagttttgaggatggagacagctgtcattctaatgaggacttaaatgtgtccctgctgaccgagccagaacttatttttatgttgccactaggagtcttctgagatgctcttgtggctggatgtagaatccctttgctcatctctagacacagactagacaacgaaatacattcccctaaaatagcccagggttagttctatgacctttgtcactgttggtacagttctaagaggatattgattttttttttctttttaattcatagtctcaactatgtctcaagactgcccagcagtatttctgtttactcgatctaatttctcttccattcctcacagtggcaatttcaagcttctcctttttccccaagccccataatctccccctgatgcccttagaaagcttccctggtcagtcctcctcaccacctccagctccccctagaaactgaccatttatcccatcccggctgacttcttcccttttacaagaagatgtctctctttgaattcaactcagaggtcagcttcactgcctgccctgtggagtcgactctgtgtcccacccttcaggaatacggcttaataataagatgataaggattcgtaccagggattggcaaatgacagtcattttctgtttccttaagtaaaattttattaaaatacagctccactcattcatttatatattgttcatatctaattattttcacactgcaatggtgcatagtcaaatgctttctatctggctttttaagaagatctttgtccctcccccaccccccgccccgatttatactatggatcagcag

SEQ ID NO: 18583 - DNA, 1015 bp, Homo sapiens
gaggatataaaaggaagcatacagtgggcctcattctgacaaatttttagtaaatcacaggttgcctttcctaaatccctcaatatgatggctagtctgtttcatagtgaataaaaagtgatcctggatgaatgaataaagtgaaattcagataatttttctcaaaactgaaattgtttaaatcttcctttagttctcttttttctgcctgccccttctttcatataccctgtttttcacctcttttgtctcagtcccatctgatatttgaataacaatatgtaatttcaggtttaggattgttgatctgtaaatctcagcctagtgctttcaactcctggctttctcctaagttcaccctcctcccttccctcctttctgtaaggactctaaacgattgcgcttcattaagttatttttataatgagttcctgttaccagggaatacagagttaaaaaggtgatctcactaaaagtaattagcataagacctgctggacctgtagaagtgactggatggtaatcaatagcaatatgattacacccatgcagcaattataaattatttaaaacactacccctaggttactgactagttgcctttaaattaaattctctgtcgataattgatgcaaagaattaatgtgagaacaccttcagttactgcaactttttcaaggtggcataaaatattgaactattgcccgtcattagcagctaagctgtctgtttgctctaacatccttcttttctaaattggtcaagaaagagtctcagatcttgaaagatgacaaatgatttcgaatccactgctgggtattcttctaagagcactgaaatgtcccagtgagaaatttcatatatgaaggcaaaggaaaaaaaaattaaactttaaataatgaccagttatacttcatcaactctaacaaatgaaggagcagagttggttttccggagtttgcttcagttctttgatatggtcagtgtaggtcggggaggtcttccctagcttgag

SEQ ID NO: 18584 - DNA, 1636 bp, Homo sapiens
tgcagccttgacctcctgggctcaagcaatcctcccacctcagcctcctgaatagctggagctacaggcaagtgtactgtggcaattgttaatgttcacttttatttccatagttagccttgatcgtttagttttaaagagttatacaacacatacacacacatctaattgttgtgttattgggttaatgggaatattttagactcaagcctggttctttgcttctctccagcacagcaaaggatacacctccaagtataatattgaacttcaaagttagtaatgttcagtgatgcttaagcatgtagatcataaagtcctagactattttttgtctaaattattgtttgtagtcagcctctctactggttggaaacacaggcttgagtttggctttctgctctacctagttcattgctgcagctgtaatccagcctgattctaattttcaactggagatggttgtcttcttttttattccatgaaacaaattgattaatgtgtcgagggagcaaggtggtacttatacctacccagcctgcttgtgtgtgtctcaaggtggagagaggctgtggaaacaatagagagaatagcatggaaggccacgttgcaattaaacaagattgggaaagaagacgggactaaaatcatgccttgaagatgtttatcatatgaagttgaccttgagaccccaagaccggcttcagttttccacaatgcggctattatgagaaaaacagtgactaactgagcactgtgcataactcagttctcggaattttcaatcagaaattatctgatgacgggactaattcttattacgatagttccaatggatccacccaggatccacctccacaactaggtgtacagaagctggagatcccatcatgccgccgggcaccggtttacgagaactctatgtcttatcttggtagtacgattaggaaaacaaacacaatggtttctgccttcaatgtttccatggtgagggcagttattaggcatatgctaaagtgtaatatccgctttttcaaaccacatttcaaagttgatagcatcaacggctttaaaatcacttttaaagaatctgggcttacccagttaacagaaatagaacctgcctgtttatcagtgggtttgcctcacttttctgtgggtttcttttcttttcttaattatgcattaagaaaataacttaagtttctgtgcatacaacatcttcctttctcattcccagtaccctagaaacacagccgttcactgaagaggatttgagtgttgtctcctctgtggggtcaaaacatcatgcttctttctgttctgccccatggcagtggtgacgatggcctagcttccatcccgtagcttcttgtgtttttctattccaccagtctatcaaccctgtatttgttgtcaaatttacactgtccacaggcaaagatctattctcctttagaatttaataggagggtttggaaatgatgccatggaaaccctgagcagcttggcaatgctgaccccaaatgagaaataactatcattggtgttttccttctactactattatcttgcccattgatcttcaaaaagttcattggtcaaattgattgaggaacgcaagacttaaatgtaa

SEQ ID NO: 18585 - DNA, 1619 bp, Homo sapiens
cgaaacaccccagcttctatcattctcaagcttagtgtgtgcaagactcatggatgctgcttgttataaaggaagataaattatgaacaggcagactggtctgtgaaccttacccagaaaaatacacagtagtccagtatattggcctccagggcaaagctacctaggttctgagtccaattatggccttcatgagtcttgtttctttggacaggttttccagtgtctctgagcctcaacttcctcatgtataaagtggagatgatgccattacaggttgctgctttatggcacataattaatactagctcttatttataggaactgaacaaagccccagttgttttgaagcatgtcctatcattaacacaggtaatcaggatatattcattgaagtctcactgtgtgccaggcactatgctatgcaccttatgtgtgttattttatttcatccttccagctctgggaggtgatgactgtcatctgcattttgcacatgacaaatctgagggtcagagaacttgcccagggtcacacaattagtagatggcagctcaaggggtttttgcctgcgtcttcacccaaagccactaacacgggatctgtcaattgcattgctggtgatcaagaaatgccagctcctccgctcttccctgagtgccttgttggagacaaaaccagcagggttatatccccagcactgtaatttagtgtggcagtcaggggaaaacaccttgtagaatttcatttcttatcatttaatgtcccctttaattctcatttaagttcccctctgtaaaaggcagtcccttcagctctcataaaactttatggtctttacttgtgattaggcaatggtaaaattgattctctaaaaccaacttctagtcaagttatgtaattagccaataagggaggctgagagaggaagatatacaaggttctccctcaagaggtcagacgtattatcattggttagatgccgtatctttaaaacaccatcagcttggaaaacactatccattagcaagagatcagagcaagagaaacctcgaagggtcgaacggtccattctgagggctccacaaagaactcggcatcccagaaggatgattagccttccatctctcgagttgtctcagagcacaacaggtctgagtgtttttttctttaatgaattaaccctttggatttcagccctagcttttgcttcccacatctgacatcctgccctacctcctgccagaaaagattttgatttcgatcatggcagttgctgtcgctgaggtaatatgaggagatccgagacctcatccttgcagggagtgggcttgagataattctcgttacaagtttgcctagtgcttcacataagcagaggccccaagacatcagcaagcccgttttttgcctcttcctggttcatggttagactgcatttttgagcctctgcctgttaggtgcagccatgtgcctgagtcttggccaatggactgttggaagacgagacgttggccccttctcaacctgacctgtaaaaacctgtcttgcaaaaccctcacggctctttcccctgcagtcttgatgtgaacaagcatgatgatgttggaagccataca

SEQ ID NO: 18586 - DNA, 1028 bp, Homo sapiens
tttagatgcataaaagccaaaatatgtataggagaagctccaaaataaaatatcccagagtggcttgtaagcatccttccaacaggttcaggttgatttaccttgctgtggatatttaattatgtcattgaaaaaaacaccagtaattaaatcattatttcttagatgtgaggtccaaggacattctagaggaagtcaaaggcagagggaggaagggtgggacgatggaggcctgaagggctggtggagaggaaagaaggcagcctgtgccgtcagagagagttcaactccatccgtgcagctgctagcatcttgccttactcagcctctgtgaaccttaagttgctcagaatgagacaggtaacacctgcctccgtggtttgtcaggacatttagaaatgcagacttgctcaagacctggatctcaggtggtaggttggtccacagacagtggcaccactagctattatttatttgttgtcactgtttgggacccctgttgctgtctcaccaaagaacttcttgtctcccttttagaagtttccagagcgtcttcctgatgttgcatagagcactcacacctaacagatctcagaacttgtatcttttctgggtggctagactgaaaaatccattttcttgtgagtgagccagaggtctgtctcttgcggcatttctgcttttgagaacctcccgtttcctgaaaggcaccagaccccaagacagctctgctgcctgattggtaggtgcccatgacagctctgcttcatgcctgctgcctcctcatccctctggatgccttgtggtcctgcttgtctgaagagcataaacttgggggttcccactcgaaaagaggttccagcagttccagcccctatgtcaggggagccacttttggggctggtggtaggcagaactttggccctcgacatctcctctgttggcattactcctatggtggtgttacgtaacatgacaaaagggaccttgcagatgtaattaaggtaactaatcagctgactttagaa

SEQ ID NO: 18587 - DNA, 1015 bp, Homo sapiens
tgggtggatgaacagatgaatggatgcatggatgaatgagtagttggatggatggataaatgatgcatggatagatgaatggtgaaacttttatattttactaaaaatctgcattgatagcctagtggcttgctaaaaataagggagctgcccaaatgccccatttcctttatatacttgtggagcagcagcgaaggccaagccagtgccaggggctggaaacagacacataaataagaacaaataagatacagacctgacctcaatgattttttgatatagaagcataggcacataaataaattcctgtaatgggagtctagggtgaggggtggtgggtgccataataaaaattatataaagtgctatggggaagcaaagctacatgaccaatttgttctatttatttatttgttattattatgttttttgagacagagtctcgttctgtcactcaggctggagtgcggtggcatgattgtagctcactccagtcttgagctcctggactcaagagatcctcctgcctcagtttcctgagtagctgagaccacaggcacgggacaccatgccagtctaatttttaaattttttgtagggacagggcctcactgtgttgcccaggcttatctcaaactcctggcttcaagtgatccttctgcattgtcccccacaaagtattgggaatgtattctttcctgatcaggaaactccgcagagagaaagtgacagttgaagactatattgaattttggcccacaggaaaaggaaactttgctgttagggtcacctggaggagagactgcaggggtcagagatcagggccatatgctagagctgcaatgtgggtgctcaaatgatgttcagtgcatcttcacagatggacctccacatgtccctcatgccctaaaatagatattctccacagctgcacatacaacaacgtcagtgaaatccgttgagaggagcattgaggagatgagtcaggtgtgccgcagcactcaggtcagacttg

SEQ ID NO: 18588 - DNA, 1033 bp, Homo sapiens
ctcctgttcctttcgtgtccgttgggtgcaggcattatttccagtgtatgtgaccgcttcccccgtgggaacagtgtggcattgttccctgggcaagccaacagctcagccctgtcctagagaaccctggagctacgacgagggtaccctggacccctgtcctaaatgttctttgactctgcttagccactgaggatgtttgcatttgattcatttgcttattatgatcaagaaacgttacctgtcaacattggataaaccatccgagggaaattaatcaaaacccccttcagacaaactgcatcacatcgattctctccttataggccttcttgttttgtgttctctgtgtgtgttttttttcccctagcgtgctgaagggtggcattggagtaccatttaaagaataatttttaagaaatgaacatcaggacatagacgtctgaatatgaggaagtgcctcatgtgaaaaaggacgtaatgtgctttaaagaaagaagaaggagataggacgacacttttgatacaaaggttatttttataatacttgcatttttatcggttcacgtattttaacagggagccctgactgaagtcacaaaaattatgactccggcaccgaggtacttatctgacaaatgcaatgcgaatggtcttgttcttatcaatgagatcagatttcagaaatgaatgtgaagaccgaggcgttgctttgtgcacagataaccttgcaggcgcaaactcccaaaccagaataaaagaattctctatgaaataatgggccaggaagcccaatcgcgtcacactgtaatagacagtggggggtggaatcaaaagggggaaaaaactcatttcatctcagttaatggcagggaaacgaaggcagagaaggactttctttggagcggagctggtacgacaaagagcagggtttcgccgtgtcatgcaccatttgccgttgcactagggctcttttcaggagctgtgaagccattattataatgtgaaaaaggtggaaagaaatactcccttc

SEQ ID NO: 18589 - DNA, 1126 bp, Homo sapiens
attttgcccatagagattatcctctcagttggatttattttaaacaagttttgccccttatacattaaggtgcatgcaataaatcacttatgtaataaactactctatattatgtgggaaaaaaaaaaggagctggtggcagggggagagatttcaaattgagctagacctcaggcatgaagggaggggagagagggggaaatgtggaggaagggggcgtttgtgcagtgggaagttggagaaagtacaaatgaaagcctctctgcagtgaacctcatgactgctttagagaggtgcttatgtaataactgcagtggtgtcgctttagaaaaagttacagagcttgtctttctagagcaacctcttggcttatcttaattaccagcagtccatagtgagactggagggaagaaaaaaagatgtaagcttttattaaatagaagaaaatcaggggcagaggacagagggtgtgattaggggtctggggtaaccacaaatctgggcaactggaatttattgtaatggtaaattacactaataataatctggggatgaaaacagggcaggcagtgaaacctgaatctcagctggacgatgaatgagttttaatgcaagtgtatcgacgtgctgtactcctaacacattatttgttatctgaaatttagatttccttgggtgtcctgcctttttttttttttttttttttttttttgagatggagtttcactcttcttgcccaggctggagtgcaatggcgtgatctcagctcactgcagcctccaccttccaagttcaagtgattctcctgcctcagcctcctgagtagctgggataacaggtgcacaccaccatgcccggctagtttttgtatttttagtagagacagggttttgacatgttgccaggctgctctcgaactcctgacctcaggtgatccacctgccttggcctcccaaagtgctgggattacaggtgtgagccaccgcacccggcccctgcctttttattttgctaaacctgatgacccttgccatagcagaactaaagtgatgatgatgattacagcagatcagttattttgagctctgactttgcatgaggccctttattaagtgcttcacttgtg

SEQ ID NO: 18590 - DNA, 1084 bp, Homo sapiens
cgggttctccctgtctataaggggaaaagacagggttcacaccaaggcctgtctggatccaaaacccatgctcataatcactaagttatactacctcttcgagatgctgatttggaaaataactccatgatgaaacatgtcaagggagactgcctgtactccgtaatgcagaaatgcattagagctcaaaaatctatgctgtttaggaaagaaaaatgatatcgctcagaaaatcatttaaaaacttcctggtgaatgcacccagctcgccaatgcatgccagccacagggcctcacagcacatttcaggagcaagacaattcagaccccactcttccccctgaaaaacctccttccagaaccctcttttgcagtgagcagagataagcctctccaatttacatgtttgtcattctctaactttgagagcccaataaaactaagtgcttagtgagaatcagacatggataagctgcttgtaatttatgatttaatgcagcatagtataaaaataggcaatgaaactgaaaggcaatcaaagtctattgtcacaaggaatgggaggaacggggacgtgatctaacatttgctgagatcctgctgtataccgggaacagaacatatatggtttcatttcatcctcccattatcaccgtgaggcctcttccgcttatctattgctgagtaacaaggtgtacccctcaatttactggcgtaaaacgacaacagttttattacatctcatgattttctgggtcaggactctggatagggtttggctggttgagtctcctcttgcagtggctgttgatggaggtcatttagtggaatccagttggcaggagagctggccttggagagtctaggatggcttttgtcacatgtccagggctttgtcaggttagcagggcagggagggctcagctggtctcagctcgtggctgctccagcaccgtggtctcagggtgattggattcttgtagggcagctgtttcagctacacagcagaagtggcacggccttttctgacttagtctcagaaggcagagggtgtcacttccactgcatctttggggaaggcagt

SEQ ID NO: 18591 - DNA, 1028 bp, Homo sapiens
cagtaccgcatggcgagccagtacccgtgaatgctacttcctccaaagagaattcctgggataacagagaatccattcatggctgccaggaggacttggatatttctcattttccattggccctggagtggaggaacagagccgaaaagtacgtggggggcaggcaaagctgcggtcagaggcagaccctgttggtgttggccgtgtcaaccagctttgctggtttctattatagccctggtgtggcaaaggacactgtgtgactgtgagctcaggtcagcattgcgatcccttcaggcctctggcttgcaggttcctgttcaaccctcttaaatatgcttttgaagcccgtacgttcggtccacgccaactcctgtttatactggtgcgaagtgatgcctgctcagattctgggcgtttcacgggaaggtattaaatgtgttttgaaaatacttgaaagtccagctgtgtatgctttattttatatttagccttaaattagagactccatatacctcaagtaataaaaaggcacagcaggcacttgggttttccctcagcttgctggggccgtgcacctatgtgagattttattatttgtaattttgggggggttaatttcacagcttaattctggcctttatgcatttagagctcccctcttgtgtttcagaaaggaggagttgttgttttcttttcacttgagtttaataaatgaaaaaggggaagggagagggaaggaagaggaaaaagcacaaatgtgcttgtttttggatcagcccctgtactgggcacatggatgcagtcagtcctcagtgtaccccaggaaagaggaaactgagtctccatgtggctttctgtctggcctttctcttttgcttgccttgtgctttgaatgcaggcctgatgtttgcctgtggacctcaggatttgtaaggccatctccacccacctacagctaagtttcccaagagccgatctccagccaaagtccaaggttccttgatgacccctgggaggagatgcaa

SEQ ID NO: 18592 - DNA, 1031 bp, Homo sapiens
agcactttaaaattattatctccttaaacctcactgcagagttataaggaaagcactgttatcagatgaagaagtagatttcatcaagtgactcacccggtatcatatagctgcttagcggcaaaaccaggatgtgaatggagagctctttctcggataccaaagctatttaatatttatcattgactaataatggtagagaaagtaatcatcataacctctgccctttattagtcactcatggtgtcacaagccctttacaaagcactgtgcatgcaaatgattcctcataacaaccttgggaggtagttactttcattgtgttagctatctcttgctgtgtaagaaattaccacaaatttagtatatttgttatctcatagctccataggttaaaagtcctggttcaggctgggacttctgctcagggtctcatgaggctgaaatcaaagcgtcagccagggatggggtcttatcagaggcccttggttattaacagaattcattttcttgtaactgtaggactgaggtgcttgttttcttgctggctgttgactgagggccccttgcagcccctagaggctattctcaggctctcaggccctatccacagatgacctcacaacatgactgttggcttcttcaagactgaaggaggctcccccatgctctgagtcactctcttcagtgagggcccagccccttttaagggcctagcgattagatcagtcccacttaggattgaatcccttttgattaatgcaaaaccaactgcgttcaggcctccatgacatctgcgaaattcctccccctttgcttggtagcctaactcactcaggggggcaaattatcccatcatattcacagttgccgcccacactcaagagaggggattctataggaaatggaagtcttgggggccatcttgaatcctgactaccatagtctgtgaaatccccatttcacagatgttgaaactgagacttagaagcattatgcaccatgccaaaggccatggaaggacagagctt

SEQ ID NO: 18593 - DNA, 1022 bp, Homo sapiens
aaatacttctctgatcagagcatacctgccgtgctcaaagcacttgcttacttggaatgccataaattacatgaaggaattattcattgtatcacgaaacataccttccagtctcccgagtagtgtattaggctaagtatggtcttttaaattattactttaaaaataaaagataatggaattatagcattaaatacattttgcaaatgatcttctagtaggattattgaaagacagtaaaggcaagtataaatcagaagcaaaatcattgtcctctaattcattaatggttaataatattgctgactcttttaacttgtcaacatttcctacattcaacattgtactctaatatccagtaaagtgaaacaaacaaacaaataaatacacttttttcaagaaaaaataaatatctgtgatctcatcatttgaccgtcagtattttcatttttgcatgtgccactttaatttccctaggcaacactagctagtggcccacaataagacgtagaaaacaagaccacgtaccttccagaatcattggccctggctctactcctggaaacccagtccatctctaatccctttgatttccaatgggaggcaaatccaggggagttctagactgtctagaatattgtaccaagaacaaaaggccaaccccattagacagtggccaagggaggtgaactaaagttggtgctgtgaacagggctaatggtttgtgatttacccataagtggaaggtgtactccggctgctcctttaatattttatgattagcagtagaggtgtgtctgggggaaagagtcagcttattttatttatttattaattttttgagatggagtctcactctatcatccaggctggagtgtggtaggtgggatcttggctcactgcaacctcgtctcccgggttcaagtgattctcctgcctcagcctcccaagtagctgggagtacaagtgtgcaccaccatgcctggctaatgtttgtatttttagtagggacggggtttcgc

SEQ ID NO: 18594 - DNA, 1079 bp, Homo sapiens
catgctcatcctctgcctgccctgggtttttaatttgtgcgtgtgggtggggtggggggcgggggggggcacttatcaccacctgcatattatgcttttgtgcatttcaggttggtctttcccgcaagaaggtaaactcatctgcagctgtattcgctgtgcctatggtagtgcctggcaaatgcacagaagtgggtattactgaggactttgtggttcgaatggaatgagtgtgctgctgacagtgttgcgagtcatctgcaaatgaaaagtccttccttctcttcccttctggaaccttccaaagaggctagcctcctgagagggcgtctcctgggaatgcctgtgatccaggcaaggcacctaaatcagccaataaataattagttttgagaaaaaagcctgcacaaaagcagaactcacagattttctcattgatcttcctgcctttgccttggccatggtcagtctttggggctattagctgcatgtacaagtgcacaggggatgggaggggggctccggaagatccctaacccattgtggacacaccatttatgttagtggaatctggtaagagtgattgaggagagagcattgggtgaatgaccctgtaatccttataaaaatagtagcaacggtaactaatgatgtttatgaactgcctaagaatgccatgactgtgtcaagcacttcccataactagctcatgtaaagcctgtaaccatcttgggggtgaggacaattatgtcccattgtgttatgtgtctgtgtttgcaggagttgttcagtggtaaggtgcagtcaggacttaaacccgtgttcctgagagtagctctgtgctgcctgacacactccttcctcctgaatgcacaatcatatgttcacgtgccacatggttttcagaaagcactgcacgtgtaggaagctcaagacagagacgtggctggtcacggtggctcatgcctgtaatctcaacgctttgggaggctgaagcaggaggatcacttgagcctaggagttcgagacctgggcaacatggtgagacccccatctctacaaacaacaacaacaaaaaa

SEQ ID NO: 18595 - DNA, 1048 bp, Homo sapiens
aatgattagaatatttgtaaagttcctggcaaaggtttgattataaattagcgtcatcatgaacgttcaaggtggggaccttttttttttttttttgaggcagagtctagctctgtcgcccaggctggaatgcagtggcatgatctcggctcactgcaacctcctcctcctgggttcaagcgattcttctgcctcagcctcccgagtagctgggactacaggcacacgccaccacgcctggctaatttttgtatttttaatacagacagggtttctccatattggtcagggtggtctcgaactcctgacctcatgatctgcccgcctcaaagtcccaacgtgctgggattacaggcatgagccaccacgccctgctaaggtggcaatctttatacataaaaaacaggaatgacttcttcgaattggtgcactagagaaatgttttccagtcgcctaagcgtttaagcatggtaaacagattaccatattagttgcccagaccttgcaaaacttcatagtgtttgtttgtttcccttgggaggctgttctgagaaggaaccttttcattcctcggagttctgatgtgttcattggcccctgttgtcatgctggatatgggggcggttcaaggggggcttgggtgcctgagaaaaagagtgaaaaacccaactgcgaaaacccaagagaaaccgaaagagtgaacactggaaaaaaaaaaaagggggggccggcgagcttcaggacctaagcggttaaggaactggctttgacaggaagtgggcaggaggctgttttcagtatgctcatgggaacccagctggaaagtgctgtggtgagtgtgtgtggaaaaaaggggctttaatcaagctataaatatctgtttctttgaagttttatgaccaacaattaatgttactggaaggcccataaaaagggctgtttcttgacttggtgggtctgagtgggccagggtcgggttaagatgctagcctcgtggggtgccatcctgacagattctactgtgtgcgtgtgtgtgtgtgtgtgtgtg

SEQ ID NO: 18596 - DNA, 1049 bp, Homo sapiens
gctagataaaagttggttttctcaagagggtttctgcacacacccgaccgcatctttttcttttcttttctttgttttttttttttttttttttgagacggagtctagctctgtcaccaggctggagagcagtggtattatctgggctcactgcaacctccacttcctgggttcaagtgattctcctgcctcagcctcctgagtagctgggaccacaggtgcatgccaccacgcccagctaatttttgtatttttagtagagacggagtttcaccatgttggccaagatggtctcgatctcttgacctcgtgatcttttctcgcctcggcctcccaaagtgctgggattacaggtgtgagccaccgcaccgggcctcacgtttttcttttaaagaaatgtgtaattcagatcagtcttgctttcaggtagtctgaattaggggagtttgcctgtgtgcaagagaaggcttcctacttcattttcttgtgtgcagggagccatttatgactaataggattcattacatgtgtgtttagcccaccgattattaaggctttaacaatattaaaacctaaagagataacagaggggaagcctttgggagctaggaatcaatcgtgctgggtggcttgaaaacagggcagtaaaatggcagccgcctagcctgtggtctttaatattaataaagccagaggcgatatcacttagttgttccaacatgattggttcctcatggatgtgcacccttgctcatcaccatctcaccaccaggctgaccctatacatcttccaggagcccagctctttcccctggaaatggttctctgagtttcagctgcagttcagggaaaaggccagcagccacgttccttgttttgtgtaattggtctttagcctgatctgattcatctggcgaaacccctttttccagtaaaagtcgttggcgaggagtgaattgtgatggaaacagagacagatgtatgtacctttcatggacataatttccccaagactgaacacaaaaatgagggtttttggagatctctct

SEQ ID NO: 18597 - DNA, 1148 bp, Homo sapiens
aagtaaaccagctgccccgagcaggagcacagcttccagatcactcatcaaggggccgtgggtgacagggctggcctgctgctgcctttaatgggcgtagatgttgttgttcatgtttcccagcccattggtgatgacacagaggcaggagccggggctgcagactaaattatatacatctcaagggcagttagacaattagctcgcccacaggaacattgcaataagcacagtatctgctttcccagcaaagccaagtgcaagttcctgcctgctctgatgacctcttgtgcctccagtgtgggaagggaccaggtccctcaatgctgccgcctcccaccctgtgctgccacgtggatttaactccttcgtgttccccatgttcttagtcagtatggttgttgtgccatggattcaaatggggttgcttgatttgatttgccctttacttggctggaattctctctaacaatcaatggaaacacagctcatagggatgcatgtagcctgtctcatatgtgaaaaagaaactttcaatgtatacttcatctcattccaacaagaattggaaacagcaacatcaggacttatatggtgcagggtggtcagtaagtaggaaagaaactcggggcatggaagtgaacaggaagcccagagtgaagccaggacccaaaacccacaggtgctgctcttgttataagccagccacacatttgtctttgagccttttagcagctgccacaaactgggagaaaccatcagttatgcagtttacaatatctctaaactcaaaacaagccagtaattcagaaaaagcccagttcttctcacaaagaaagatctaagtgtgatatgagagtatatgcatggagaatattttctgagctggtgatgagctgcagggggcctctcccagcccccgcactggttgcacttttaaataagagaaaaaaacagtgataggactgacctgcgtgtagaagtttcaagttacaagaaaaacacttcacaggatccaaatccttaaagtcctgaaggaaacagagagcatatacaccagctttcgccacccaattcggatgtgttagaatgaagagtctcttattttttaatgaatttttctctatttaaaagtacagggatacctc

SEQ ID NO: 18598 - DNA, 1035 bp, Homo sapiens
agttctgggccataactctagagcaaccccaacccccaggccatggaccaagtgtcaacaatgttgacattgtgaatccctgatctggaggaacatagctttggggcagtgccaggatttaatatgggttctttggacttcagagccccttgtgctaaattgaaacattatggtgttgctttgagcaaacaattagcatttttgccatagctttttacttctccatgttgaaattatcaaagattatcgtcgaaggcgtggtttctttactatctgtcttctccaggagactgtcatctctgtgagtgcaggaatccggctggtggtgtttttactctaacacctctttcagtacatacatacagtaggtgcttagtagatgtttactgaatgaatggataaacatgtacaaaattatgatcccttgtgttaaatatggtagggaagcaacataatgtgccctggagtttcacagaagaaggggctttcttccagcttggggatggaggtgagctgtcattctggatgatgtgatggggaaagaggatgtgagctgaggcttggaaccaagcagagcttgggctttggggtgctgggaggacagaatgctggaaacagaggtaagaagggtaagcacctagtcaacatgagtgatttagctttgggagctgatcaagtgatatgatttggctctgtgtcccaactcaaatgtcatctcgaattgtaatccccacgtgtcaaaggagggaccaggtggaggtaatttgatcatgggggtggttttccccatgctgttctcatgctagtgagtgagttgtcatgagatctgatggctttgtaagtgtttggtagttcgttctgtgttcattctccctcctgccgccttgtgaagaaggttcttgcttccccttcgtcttctgccatggtggtaagtttcctgaggcctccccagtcatgtgaaacggtgagtcaattaaacctctttcctttataaactacccagtctcaggtatttctgtgtagcagtgtaagaac

SEQ ID NO: 18599 - DNA, 1030 bp, Homo sapiens
tttttccaatctcagtaagttttttagggttatgaagattgagcactgacgacgctgaaataccacagtgcaaatgcttccgtagattccctgggctctgcactcaccagatccatttctatgataaagcacagagctcctcaaacagaacagtcgagttgcaggctcagcagcctccttgtcagtgtcctgctcaactcagccaactcagccaggatatggctttggatctttctgttggaaaaaaataaacatttgacatactttaatatactaaaaaaaaaattaatatctgtacttcaagatgtcaagattagtaaaatattcacttttttttccctagacctttgaaactcacaactctacgacacctctacaggaaagaagccttggactagatataaatagtacgtgtgtgttaatatgaaactgaattttggaaatgcatcattcccttatagatttctttcacttggtaaaacgtgtatagtaggatcctaatttaaaacttttattgttttcagaaaaattgaaaagtaaatatctgttgaaggaggaaagctaatctaccatagttctcctttagaatttactagaataacaataaacaacaaaacaataattacaaaaacaaaagttagctaatagttgttgagcatttcttgtgtgccaggcaccacactaagatgtttatatgtattctttccttaatcttcacagtagtcctgtgaataagcgccattcatcaggaaactgggtttcagggaggtatggtaactctctaggcaaagtcacacagctaaggagtggcaaaactgggagtaaaatccaggtacgtctggatctggagcccatgctcttaatgcgctggataaacttctagaacaatgagaatcatgactgtattgctactcacagatgtctgaagtctctcactagaaaacccaagagaaaagagtacagaactactaaagtaaatttacaaaagtggtggggtaaaataaaaattcataaaaaaatgaaaactttc

SEQ ID NO: 18600 - DNA, 1043 bp, Homo sapiens
aggcctcacaatcatggtggaaggcaaatgagaagcaaagtcatgtcttacatggcggcaggcaagagagcttgtgcagggaaactcccatttataaaaccaccagagctcatgaaacttattcactaccatgagaatagtatgggggaaatcgttcccatgactcaagtatctccacctggccctgcccttgtcacatgggggttattacaattcaaggtgacacttgtgtggagacacagccaaaccatatcacaggcatgagctaccacgcccgccagcatgtcttttttaaacattttaaaatctattctttatcttgtttcagagaggatttggagttacagaaacacattagactgggcatggtggctcacacttgtaatcccagcacttcaggaggtttctcctagtgtactctcacacttctgataccagatatgtgggggagggggtttcccccacacattaagcaagtgtgaaacatgatatagaaaaatgacttcactctgggccgggtgtagtggctcacgcctgtaatcctagcactttgggaagccgaggtgggcagatcacccgaggtcaggagttcgagaccagcctagccaacatggcaaaaccttgtctctactaaaaatagaaaaattagttgggggtagtggcagccgcctgtaatcccagctattcgagaggctgaggcaggagaactggttgaaccggggaggcagaggttgcagtgagccaagatcatgccactgcactctagcctgggtgacagagtgaaactctgcctcaaaaaataaaataaaggccaggcatggtggctcacgcctataatcccagcactttcagaggccaaggcaggtgggtcacaaggtcaagagtttgagactagccttagcaacatggtgaaggtgaaccccgactctactaaaaatacaaaaattagctgggcctggtggtgtgcacctgtaatcccagctacttaggaggctgaggcaggagaatcgcttgaacccgggagacataggttgcagtgagcc

SEQ ID NO: 18601 - DNA, 1035 bp, Homo sapiens
cttgccacgacacccacaatgccgcccttgggtcctgcccagtggactgtatgtgccacaataactagaagagagggttttaaatgttctcaccaccaagagacaatacgtttgaggtcgaggacatgttaaacactctgacttgatcactatgcaatgtatatgtccatccatgctgcacaccgcaccccatcagtaggaataattactgtgtgtcgattatgaataaaaaaatgttttaaaggagcggtaggtttgcctctaaacaccatcagtcagtttcacggtgttggtaagatcagctcaggactgagacctaagggaaattgcccctgtggctcttctttaagagggggacacagtaaatacaccatgacaatagtctcaacaaccctccacgttatgcaaaacagggcagtcattttcaaccttgggacacatctgtgacaagcttattaaaaatccagatgtccagccccaccccggacctgttaagtcacaatctctcagtcattacaatggcaagtttccttccaccactctaggccagcagtgacataattcaaaagcgcaagtcattgaaagcagttctgcgaatatgtagcttttgatgatcaggagtaaatttagagtacccagaatattgcatgttctgtctgcccatagtcaggcttctgataagaatttcacagcagaaaactctgaggttgtagtctctagtaggacagatgtgtcgccaatgaagagtgatctgctcttaccaccatctaaaccgggatgcaacaacgttctcaattgaagatcagggagccagtcaggaaatgtacctgaggtatgctgaggaagaccgtgcaggtggggccgaattgttggactgaaaagctctgggtttctttcagcactcaagtgtaactctgggaatggctttcaacctgttgttttgttttcatactaaattttaactaaatccttttcttccctattgtttttgtgtttttttgtttgtttttgagacagagtctcactccatcaccc

SEQ ID NO: 18602 - DNA, 1027 bp, Homo sapiens
agtgacattatggtggctctgtacaggtttccagtcctgtgatcacttgtaaaatttagggttttctggagacctattgcaacaaaagtttgtttagctctcagtcctggagagaaaatgaaaaaaaagattcctaagatttttagatcctttgatgagtcagctaagaatgtaagtggcttccccccgacccccccttattttttgagagaaggcaggtctagtgaggatagaatgagacatagggcctcaaatccagcctaggtcatcatgagcgacttttctgggctctagcttccttatctgtgaagtgaggtggttgggctacatggacagcaaatcccctttaagtctaagttatgtagctctatgctatttttgttttgcctcatgtgtatgtgttgtgaggaggaggacctgtttctgtttttatagctttattgtgtcatttaaagttttgttttatgttaatattaaagcatttccattcccctgtcatacaggactttattgggtattctgttgtataaatccaggcctgtagagttgtatcacaacaatcatttattttatgctgttaatctgggtatgttccaaggcctaattattgatgagcctgttttgccatttaaatataaagtttgactcacagatgatactgatgaaactacttaaggagactaataggatctctgtaggaggtccaagtttcatagtaacatagacattattttttgaatatctgaaacatacactgtagtttaatgtcacatgggcactaaagtccgtgagtactatgtggtgtgtgcagagcctgcttttcatccccagtttacttttgttgattaatttatgtgaataactgcatagcctcttattagattctttgcttccctgttaatgctgagaatacactcccgaggcagcagtatccactaagtgttccctggtaatgagagtctggctgtgaagcaaagtgatttcacagtaatgttcagttaataatgttttgctttctttacaatat

SEQ ID NO: 18603 - DNA, 1022 bp, Homo sapiens
ggtctggagaccgacagaatccacatcacccaagagctcattacaaagacaagcactcaggctgcattgccaaccttctgaatcagaaaaaccttgttttgaacagttcccagttgaattgtatgagcattaaagtttgagaagcactgggccttaatcctttcagcgttgtacagatacagttattaaacgttcttccttgtttttgatctggttcagctttgttgtacctaaggtcatcagaaaaaatcatatgtgagagcacttcacatttaaagacttgagtatttaaagaccactgtcagcttcaagtttattgtacatgtaatcatcaagcagcatcttcactttgtaaactgctgggctaggttgtcagcatacagtgataaagagggctccagcctcaaggaacttggagtttactaaaggaaatagagaaataccataatgtaggccagaacttgatcattccatagtatgtcataataaagttattgataaggtgctggggaaattcataacaggaatctatttttacctacaaagaggtaagggcggaggtgcagcttgtggcaggatggagtgatctaggaaaaatctgtagaacagctggcattacaactgatctttcaaagacgggtgggaattgggcaggcacaaatggtattgggggaggttaagggcaggataggatgatgggaaggtgtcaggggcagatgtaaggatgtgaatttaaaccgtaattaaagttttgatacttaaccttcaggtgtttggagacttcaagtgtacagcaattcattttttcatgggctttggaaaggatcacattttatggaagtctgaaatggtccatgctcgtatttcaggaagtctcttattccttcctcttagccattgtgtatcctctgccacctgctgagaaaaacctgtattctttatatttgttcgtttctttgttttaaatagagatgaggtcttgctgtgttgcccacaatggtcttgaactcctgggctcaagc

SEQ ID NO: 18604 - DNA, 1049 bp, Homo sapiens
tagggcagagggaaaacacccaaggaaggaacaaatcaggaagtattttccccatcccacagggctgagattcatcccattggaagtgtgtgtgctgaggccgctggagagtgtgcacccctggtctcctgcatgctggtaggagcaagcacaggaggagtgagaggaaggcagccgacagcggcatagtggccctttggcccctggccttgccagtctgcaccctctgtgaacaaaagaccagcttctacactgggttcatttctccctagtattttctgtttcattgattcctacactcatctatattacttccatccttttacttactttgggtttcttttactcttttctagcttcttcaggtagaattctagattacttatggtagatcttttgcttttctaaggcacaccatgaaagccttcaactttccacagagcaccactctagctggacatgctgatatgttttattttcatgaccattcagtctgcagtatcatttttccttcttcagattggatggtttctgttgctctgtcttgtttgctgctgctttcttttgttatttccatccagtgaattttttatttcaaatttatgttagttatttatttatgttagtaattctaaaatgtttgtgtactttgtttttaggtttttaaattttctgtgctgaaatttcctatctttccatcacaagcatattttcctttcccttactgagcatcactgtggtagttgtgttcaagtccttgcctgttaattccagtatctgagtcatctcaagagttggcgtctattgattgtttgctcccttgagaaatgggttctaatttttctggctcttcttctgttgaggagttctggactgaatcctggatatggttactattatgtttttgaagctttgaattttcttatattgctttagagtgttgctctgagttttagtcagcaattgacttggttagacttaaattgcaagctgtgccacctgccatgggtggcagctgaaatctcagtccagttctcgaagcctcggtc

SEQ ID NO: 18605 - DNA, 1173 bp, Homo sapiens
tgtagggccttgtaagaactttggccgttaactctgagggagaggagagagctgtgtctgctctaatacattcaggaaagtggcagctctgaagaccgaagtgcctcctggcttgcctctctccctcccgcagcctcttcctcttcctcttcctcttcctcttcctcttcctctccctctccctgaccctcccccagctgcccactgttttgtggggattgattgggcccattgaggcctgctgcctggagtagcagccttgcccacagtccagtctggggacctttctcggccatcccctcctccagctatcctcagtgttggtcacttatggcttttgctatttatatagcacagtggtttataaactctgcttctagaatttcgcaacccgtcctgcagcatgttatctgtccaggcagatagtggcgatctttatccaaatcaaaggactgaaattaaggggatggaattgtctgcattttatgttttccacccaacatattttgtcataaactgggaacttgtgtaaggtggcatccagtttagttcaatcctgtatgtaatcatttcaagcttaataaattagttaatatttgttaaacacctactgtgtcttggggtttctgcgagatgtgagattcattggcggacaaaccagatagcgtttttgccaagtcaccgagatagtttcaggtccttggccatcatctttttccaccaactccaggtcagctcaggggcccaccaggtggaagtcgcccttccctggcggacctcgcccgttcccattccttctggcaaagtcagatttggtgaaaaggccacagcagctgggtggagttccacttgccagctcgaggaagagttctgggaggcacgggaagccaaaaccgcctgtgaaggaggcctggtgcagctcagaaagccctggctctggccgaggtttgggatgtgtggctgccatggcaacccgtctccccgacgaagggtagacgggttgggcgccgaacgcagggtgttgcaggttgggctccattttgactctggtggagaacgatcacctggctgcaaaaccaacctccccgcccagtacaagcatctcctcttcccccttgggccacgagggtgggggacttgaggcaggagtgggtttttgtagtggggtcattg

SEQ ID NO: 18606 - DNA, 1029 bp, Homo sapiens
ggcgctgtgagtgtgtcatgggaccgatgatcctaagctcccagacctactgcggagggttgaggggttgggcgtgagagcctggcacccggcctgacaggcagagaggggctcccaaaggccacacgcaaggccatcactctgttcttggcgtgttggtttgcacgttcattgcctgctggccagagcgagctggtgtgtcagactcacatgaacgggcttaggggaagaaagggaggcttttccatcacagccaggctttctcagagatattcaggttcccaagaagtggctgtgagatctggagttgatggacttaattcagagacaaacatgcgcactctgtgttcagggccttgcatctgtttcgtccatccactaggcctcagagcagccctgggaggtagatatgatcgcgcccatttgacagatgtggaaaccaaggatcatccatttgttcttgggtttcttttctaattcacctcatacgtcctaggccctgagacgcagtggcaactaggaaattgcacttcgggtcctcgctggagttcattcaggaggggtgcccagggccgggccactttgcacttgagtgcacacagtgactctccaagcagaccgccgagtccctccagtcccgcagagtttccgggtgtcctcagccacaggaggtgaggctggagtgggccggcccattgcccggtccccagagagagccagactccccaggaactaatttcttaagagaccttgaaggctcttaactccctaagcgaatccagctgtgcctggtggccggcactgttgcagatgtcctggccaaagccagcttggtttggaagcccggccccaacagccgccaagtctggaaatgaagtaaatgagtgagttgttcttggccattttcccctcatctcaacccagctcaaatcaaactggagctctgacctcaggcatcgcacattccatactccccggcctcctggggttcaaaggcgcacggcaggcgataaccgcactgggcgttga

SEQ ID NO: 18607 - DNA, 1033 bp, Homo sapiens
acccacgtggcttcagggcccaggcctgccctgtgactcacgcggcctgtcacccgccgtttcatgtttcaggcctcgcctgtacactggtgcttctcaggaagtcttagggaagatgacttatttattagccgtttttttaaaatctcttaattaaaaaaacaaccagtgtgagtatgtggaaatgtgattcaccatgtgatcggggaggtcagagccagagtccctggctcaaaggtaacacccctgtccacctggatgaagaatgttccagaagcttccctccaggcacggtccttgcctgctgagcagtcaccgggggaatcgggggcagttaccggggcctcagactgtgggagctgcctcttcctgggtctccagccgtgatttcagactcgtctttcatccttcccctctcggttgccagcccagtgctggagggacgcagggcagagcccagccagctgcaggtgtttccaggcatgtgctgggaatggagcagatgcggggctgaagctttccccagaactggcctttattgacgcagagggtgggaaagaaggcacgtggctgtgctgggagagggtgggtctccctatagcctggacctgggaagggccttctctagagctctccagggacggccagacagctccccttccaccttggggtgtaagcggaacaggacacactcccctcaggaagcacggtatcaaagagggtcaggaggagccccagccggctcccgttctgaggaggcacctgtgggcatgggggacccccggggccgccccccgatgcctccgctgatgcttaaggtcacacagcaggacatggtagctgggttcaaactcaggtcaggccaactgcaaagcctgtgctctttcgactcctggatggacactgcccaggtgcccctgggtaactgatacccttgtccccaaacaactctgaatctcttttcatcatgaatattattaataacaataaatactaataactgccatttatcaagagcccctacttgccaggt

SEQ ID NO: 18608 - DNA, 1310 bp, Homo sapiens
gtagctggaattacaggtgcatgccaccatacccagctaatttttgtatttttagtagagtcgggatttcaccctgttggccaagctggtctcgaactcctgacctcaagtgatccgcccacctcggcctcccaaagtgctggggttacaggcgtgagccattctgctactaaccggcaagtgacttaagtccttgtgccttccttgcctgatttatgaaatggcaacaatcctggggatgatgggaggacttttttattcagtcaacacatgagtggtgcctactatatgctaggccctattctaagtgttgcaactattaaatagagtagtctgcagagcagccctaaggggcagctactgcctagctccgatgaggaaactgaggcccagagaggttaagtaacgtacccagctgctaggaggcagggctgggcttcagaccatggagtctggacccgggacctgggctgacagttgcagcataacaaggattaggtgagatgctacatcagtgaggtgaccacttgtcctgttttgcctggacagtcccagtttacacttgtagtcctagtaaagtgatcagtgacgcttcatttcattcatagattacatggtcaacttatgtattgagtattcaggacaatcctggggacatggtggcactgcctccatgtgagcaatggagggggaggtgacatggccacagagcacccagcctggctcgcctgggggtgcctgggttacccgcagaacggagatgtcctcgttcattaactcattcgctcagcgatccatgggcctgtcacgtgcgccaggcatttgggcgtcatgctgatggctgggcgaggatggggaggactcagacaaaagaagacagccagcaggctctgggaaatgaagtcacatccaagacctgcccttgtgagaaatgtcaagtgttaccgttatcatcatattcccattgctttgtttggcaaattatgacaatatggctgttaactaagcagattctgattacctattgtttgaatgcaaaaaacaaaacaaaaaaagaagcaagaaaaagccttctggctatgtgaccagtatttagaaatttccattcctgaacaggcctcagggcagagccagtccccaggctgtgcggagccactgctgtccctgcaatgccgggtaatcactttgtctttgctgctgcatccatcacgccctgtctctctgtccttagatatgtttgcgtgatgtcgtgggatgtggctttcccaggcagtctgttaagcagccagagatctactctggcctcctcg

SEQ ID NO: 18609 - DNA, 1034 bp, Homo sapiens
atgaacccccatgtactcatcatctgcttcaacagttcccagcttatgatgagtcttggggtgtagctgcctctgtatgcttccctctctcccagccactgtttagatgcaaatccctgacatgctgttagttcatcagaaatgacttaaataggaatctctaaaaaataaagtatcttttaacaaatagatataaatgtaataccatcctcatgcctaagaaactaacaataattccttgatatcaaatgtccaatgttcacatttccctagttatttcattcatgatttttactattggtttgctcatttaagattccggacgtggtctacaccctgtatttgcttactgaaggttttacaatctctttaagttagtcatctgccctgtagaattttccatattctgagttttgctgattgcttcctcatggtgtcatttaacacattcctctgttccctgtatttcctgtagatttcctgcataccttgtgaattcctagtttgtttttacacaaggtctcactctgttgctcaggctggagtacagttgcatgatcgtggctcactgcagcttcaacttcccaggctcagatgatcctcccacctcagccttcctggtagctgggactacaggtgtgcaccaccacgcctgcctaattttttgtatgttttgtagagatggcgtttcaccatgttgcccaggctggtctcgaactcctgggctcaagtgatctgcccacctctacctctcaaagtgctaggattacacgtgtgagccactgcacctggcctctagttagttttagacctgtgctgtccaataccacggccaccagccacacatggtcgctgagcacttgaaatgaggtcctcattgagatgtgctctaagtgtaaaacgcacactggattttgaagacttagtatgaaaaaaaatatacagtatctcactactcattttttgtattgattatatgttgaagtgataatatatttgatatattgggttaaaatatattattaacattgatt

SEQ ID NO: 18610 - DNA, 1028 bp, Homo sapiens
aaagaatgaagtgaatctaaaatgcatgactgtggaaagatatccaagacatgttattgtctaagactcatcacacaaatgcataacacaaaggtattttttaatatgtatatgattgcatagaaaaatgagaccaaggaaacaccctcctctggcaagagagtgggcttgaattcaggtaaaggggattttgttgcttttcacacttctcatttctatattattcaaattgtaatgacagccctgtattcacatattagctgtgaaattgcaaagtatgtaataggccattatgagaaagaaaaagccccacattttagccagtgtgtccttggagtctcccccgacaatgccagggaagtgggaaacattttttcctgaagaaatgtggagcagaggcgattctctgggtgtgtttaggaaatgatcccatccttcgggaatgccgtttttggagttcgacgttctctggaggcttgggagatgcagccagggcgcagagttggcagtggctgcagacatctcttttcaatgtggacctcctgccacagccacgagattcaaggattttctaggaaaatgaacgccagtggatgtgtggaattttttcacaaagtaagtgacgggggtccctttgcacttctcatgcccccatggttaattgtgtgtgtgtgctggaagtggaggagggcggtgggtggtgcagctgtttgaggactcacccttcttcggaaggctggggtcaatggggtgctgtttccccgagtcagttgaaacgcccatggctaaagcctgtggatcatctcacccctgcatttcctatttggctctcactttggtcgaaagacagcggagcgcagaaaatctgtcataattgtgaaagtaggacctgtcatcctctaagggtcattcttcctggcccaccgggcttgttgacacctggagttgggtagcagagagagggatgtcgggaccgtgaattaacagtggccaccacttcatggtgaatggcatccagacaacacctt

SEQ ID NO: 18611 - DNA, 1146 bp, Homo sapiens
agccttcagcctcactggaggaagggtgtctcggaagagttgcatcatgagacccttggtggagtcgctcaccaggacggccttggccccgaccctggcaccagcccagggtgactttgatgtcgtgttctggcgcgtccttgggcccatttccctcctgtctcccgggggctcttttgcatgttcttcccaaggcttcagagaccttcagctccgcgtctgaagcagccatctctttcttggatctcaagagtggtgatttctggcaactgcctcagactccatttctcatctctgtctacaaaactagcctggagttgggctgtcgggttggcctggacatcctctgagcagcgattggcccttgccctgtttctgtgaatgaacgcggtcgctcttggaaagagcccccaccaccttgcagatgtgctggggtagggtgggggcgtgcgaggttggattacatgagactttgggttctttcctgcagtcattcctaagcggtacttctctgcatctggcctttaacagtgagtggacggggccagtgttcttggagcacctactgtgtgcttgctctgttagttctttgtttccttccctgacgggagttaggccttgccacccttatgttacagacggggagactggggctctgagaagcgacttccccagggtgcccggcccgcacatggtcgagcgggggtctcaaatcccgttgagtcttacttcaagtccaggctccttgatcgctggccctgcttgccctggtggcccacagtcccagagtcagtggcgccaaggtccctcaggctggttgtgaaatcagtttgagtgcagaatgacggcggttcacatcgagcttggtgcccaccctgctagcctgcctgggacttccccagcattagcaccagcatcagtcctgcctcccaggaaccccctccgtctcagacacacctccatgattggtccctgcctcacatcccagtttcttcaaatatcagcaagtttcacactgagagagaaatgtagataaccaataataaaatgaaatgacctctggtccctattgtcagagccataatagtgacattacaaaaatgcacctttagaccaggtgcagtagctcatgcctgtaatcccagc

SEQ ID NO: 18612 - DNA, 1223 bp, Homo sapiens
atccccattaccactacgctattatcactatcaccatcaccatcatcaccatcaccttcatcatcaccgtcatccccattaccactacgctattatcactgtcaccatcaccatcatcaccatcaccttcatcatcaccatcatccccattaccactacgctattatcactgtcaccatcaccatcatcaccatcaccttcatcaccaccatcatccccattaccactacattattatcactatcaccatcaccatcatcaccatcaccttcatcaccaccatcatccccattaccactactttattatcactatcaccatcaccatcatcaccatcaccttcatcaccaccatcatcccaattaccactacattattatcactatcaccatcaccatcatcaccatcaccaccatcataaccatcatccccattaccactacattattatcactgtcaccatcaccatcatcaccaccatcataaccatcaccttcatcaccaccatcatcttcgtcaccactgttacagcatcaccactatcaccatcgtcatcatttaactaaaagtgagagacactgcatataaggtctctttcctgctcttcctggggtctttgtcataaagagtacagagtcccttaatctctccctggtcaatggcagtcccagccctgagctatgtgagtgctgggtcttgttactttgaattgtatacctgagcaaggggaagaacacagagagagttctccagatgttttgtgtctccctctctccttccttctccaaaaacgatctcatctcggagctcacattggagagagctgtccttgtgaatttccccaccccttcctctggtcccttcagtccataaagtatgaaatctccatgccatgggctggtgtgtaggatgttcttcccagccagttggataaagacattttggttttttgcacgtgggagacatcacaaaagactgtgcatacatcctctgtgtccctctctggggaccatggcctggaagcagccaacacctgctcccttcctgcactggcgtcggaaaagttccatggcagataagcccgtgccattgcagggaagccttcactccaaagccacttgctgccccggagacctggcctgcgaggtccaaggttgtgccatctgaccccagatgcttcttctcctttctgtgctggccagtgggagacagcagagggaaca

SEQ ID NO: 18613 - DNA, 1070 bp, Homo sapiens
tccacagagccccaggcaccagctctgccctcccagcccagctgcaggctgtgctgctgaggtctgggcagcagagaagggtgcctggagggtctttctgtcgtcttgatgaacccatgacccctcctgggtccccaaggagagttgggtattgtaggcttggttgagattggcgagaggtggtgttgtgcctagcctggggggttggagggcggggggagtttctgctctgcagccctgtgatgcgcaggtgccatcgggtctctgaccccaggccatcaagagctgtgcgacctgcttgccatccatcatgtggagctggtcggtcaccccatgcaccaggccgactccaagccggagctttcctctccgctcttttcggagtaatccgtggatgatggaggagcttggcaagcatttcagcaaagctcttttttcttgttgaggcttgaaagtaatcgcctccgtgtattgagtgcccgccgaccacctggcgcgtctgggcattgagctcattggccgctggcacaaatggatcctcgcctcacccggtgcctgcctgtagcctctcccatctgctttctcacagctacactccctccctagcaccctcttgaggagtctgggggagggggcagcataatcatagttacctgtatcagatgctcacctgtgctgagcacgccacatgccctggcccattcaggtgctctctgcaaacacccttaaggcaggtacagtattccttcccttccctcttccctctacccttaccttccccctaccatacctttcctcctcctgctcctcctccccctcctccccctctttcctcctcttcctcccccccttctcctcctcctccccctccttctcctcctcctcttccccctccccctcttcccccgctcctcctcctcttcctccccctcctccccattctcccccctcctcccttttttgagacaagatctggctctgttgcatgggctggagcgcactggtgcaatatcggctcagtgcaacctccaactcctgggttcaagtgatcctcccacctcagcctccca

SEQ ID NO: 18614 - DNA, 1029 bp, Homo sapiens
gaaactgttgcagacactcttggcctgaccttatcccctcagcacacacctctgcacaccacaagccacttgctggaaacacctgtgactatgcctgagggcttctgctagcctgtggtgcaggataggctgggagtgctggggtgttagtgcctccaggggtggcatggctgggtggggaatcggcagatcaataccccagctccctcaccctcagtcaggacactcctggcttgttctgcactgactcccaggcttccccaatggacttcggctctatttactcacaggaataataagcttgatgacacagcctttatttgctgcgcttccttccctgtccaccaccccattccccttgcagtgattcctgggatagcccccaaataaactccttgtatgtacatccttgcctcagagtctgtttctgggggaacccagatgaagacagagacccacttagaccctgtgtcaggaaacacatggaccagacttgggccaccctgggacttgctgttttctctgttccctgcggtgtgtgagcctgtgtgtgcctatgcatgtgtctttctcctcttgcccctgattggctagccttgtcacttctgtcctgattctagagggagtgtctgatgtcccagttattgctgccctcagcagagtcaggattttttggccggggcggggggtggggtcagaaaccagctcaagcaaaaaaagagaatttactggaacgtgtggctgagatgcatactgtgtagctcacagcatccaagatgcaatgcctttcccatgctctcttcatctttctgccagtctttgtctgccaccatggttctctccttttttttttcttttttttgagatggagcctacctgtgtcaccaggctggagttcagtggcgtgatctcagctcactgcaacctcctcctcctgggttcaagtgattctcctgcctcagcctcctgagtaggtgggactacaggcactcaccaccacgcccagctaattttgtatttttagtagag

SEQ ID NO: 18615 - DNA, 1046 bp, Homo sapiens
aagctgaattgctggatcagttgctggattgctgtgtatatatccagaagctgaattgctggatttattttgccggattgctatactgttttctgtagcagctacaccttcccaaggcagtgcacaggtttctgttttcttcatatcctcaccaacacttacttcctttccctcctctgcccttgcccccttggcgtataacattggatttgcataagtagaatgtgcacttccctttgtcctttagccctggcagggacagaggaactactctaccaggaggtggcaaagggtgagggggttgcaggtggaaggcaggtgggtgagtccatttatctcattcagcgtgaatgcaaataggcttcctatttgagactccagaatgttagagtcacctggggaagctttggcagagccacggcagtagtgattcgggttttactgttctgggcatggcctctggcgttgcaaattttttaaataagattcttctgtgaagctggggttgaaaattagggctgtctagagggcaattttcaaatctgagcatgcaccggaatcccctggaggatttgtgaaagtggaggctgctgggctccatctcacagtggctgattgagtaggtggtgggcagggctcaagaatttgcatttcaaccaatccccaggtgatgtagatgctgctggtctgggagctacttagagaagcagaactctggggctgcgctgtccagcagggcacccctcaccacaggtggccatttcaacaaaacaaaacaaaatgaaataaaatacttagctcctcagtggaactagctgcatttcaggggctcagcagccccgtgtggctagcagctactacctcagacagcacagatgtctccatcattgttgaaagttctgtcagatggtgctgaggtttaaatctcagatctcacactaactcattgtgtgaattggggtaaatgatttaatttctgtgggcctcagtttcctcatgtgtaaaagataaaataatagttcccgcctcccagggcagatgtgagg

SEQ ID NO: 18616 - DNA, 1023 bp, Homo sapiens
cccgtgaatacaattggcagatggacttaagcccattcagaattgtctagcccaagcatgagacatcatacaagaattcctttttgctaattccccagagtgtcctgggttttccctcccagcatcctcctttcctggagaatgctgtgtgattctgtgtaggcagtgtaggaaagggtgccggtacttgtaagttccccatagtttcacttcagcaagagccaggccagatgatgccttcctagatagactcatcctttctggatgctttttggtgccagtgcatctttaggaatcctatcaaaaagtctgatagcctccaatcaagtagaatgaccataaattaatcaccccccaagctgagcatttagatggaatccatttacaaataaggcgatcatgcacagctttaggtgagtacctttttcctcctttacgccagaattctttccttaggatcaatactcagatatagaattagtgggatcaattaatttagctgaatggtaaaactgtaaaacctgggctttagcagaagccttaaaccagtgagcatgaagaccctttgcttagtgaagcagaccctttgcttagtgaagcttatccctccccagctcactgaagatctgggatttgtgcatctattgcccggggaaagggaaccagtgctgcttctctctatacataaaacccctccgcagacacttcacagaaaagtcaagtgataaaaatggttttagattgtggtagggcagcatttgcctaggcccgctgctctgcaaggctgttgtaaacaaccggaaacattataaataatttaagtgattaggtatcaccagcagcagagaaaattagtatatttaaaagaaaattgtgttgatgcagatttgacttccttgatgagggaagcttaatgccggggctgccactgtagggagccaggggcgttgtgtggggttctaaatggaaagtcgacgctcacaaatctgctttctgaaagttttctttagttcagctgctagg

SEQ ID NO: 18617 - DNA, 1025 bp, Homo sapiens
gtaggagagtggaaagggatttgtagttgataggtctatatgtcatttttacttgtgctcatataatgaaaaacatgttgatgatttttccttcttcaacaggttgctaataatttatactggaatctggcatttttccaagccaagagaagatcgaatggctttttgcagctaactactatgtgtagacaggttttatattataaagtatgcattcttatcacctagtatatagttagtttgtagagtgatttccccccagtttcttgaacatggtatcttcacatcttggaccttggtcagttgtgctattcattattaaacactaaaactttggcggttcttgcataacattgtcagattttttagtgtatttctgtgaagtcattttttttcttgtcattccttttgtagtagttgctgtttggataaaagttgatgtgtgattttttattaaacaaatagtaaacccttcaattatagttagtcttggtgaagtaagatgtttgtagactttagagttctttaattcttggcacaacgtgactgttgagctaacaccaaatagtgtgttggcaatacttttcaaatggctgaaaacacctaaaaattgttcattcagaaatatctgtcactgctctgttgccaaaactcagaatagaacttagacgtatgtctgagtccctgagatcacatgctaaagtcgatgaaaagtaaccactgccactgtcttgtgtcagaacttttacagtacagaaaataacagaatagccttctgtaatgaggcgtttgttagagttttgcatgagattctaatacttcagtaggaccctacctacgtggttcatctacaatggttaccataaaaaatctggcaggattttaaaactcaatcagtctttcctttgagctagtgacttgaaaagaaagagagaaggaaaagagaccatattaagtccatgccagttgcttggctagaatatgatcaacgacttgtagtagactcaagtttttaaaaaacacta

SEQ ID NO: 18618 - DNA, 1023 bp, Homo sapiens
gggagggacttgtgctccaggcagaaaagacagtttgtgcagaaggacagaaatggcgtgtcctcagaggacagtgggctttcagtacggctggaacatgaggtccaaggtgggaacgagtcagaggtccagctgaggagacccgcagggctgggggataggaggtctgtggctcagctgagtctaaacttttcctctgaaggccgggcagtcatcaaagcgctgtaagcaagggaggggcgtggcctgctttgcaggtagaaagcccgcttggtagcagggagcagggggcaggatgctgaaaggctgctgtggaaaccccggtgcagtgggggcagccctctggaaaagtgggtgcagtttctaatacacatcaccctcaccttccctgtggcctagaagtgccgcttctcagtcttcacccaaatgcccaaatgaaaacagatggcacacaaagactcccatgggaacggcccggcagcaagctggtgacagcgagcctccatcgccgggaaacagagctgcaggtgttcaggcaggggacgggttcagcagtgagaagggggaaccgctggtctgcacatcggtgtggtgaccagcagagacgcaatgtcgagccacagaagccaggcacaagagagaacgtcctgcgcggttccatctatgccaacatcgagaacaggcacaactgatgtatgggacggaagtcagaaaaggggttgactgctgagccgggcccggtggctcacgcttgtaatcccagcacgggaggccaaagcgggatgatcacttgagcccaggagtttgagaccagcctgggcaacgtgacacggggcacaccggcaggaatgccttctttttttttttttttttttttttttttgagaggcagtctcactctgttgcccaggctggagtgcaatggcacgatgtcggctcactgcagcctccacctcccaggatcaagcgattcttctgccctcagcctcccgagtagctgggattacaggcacacgccaccat

SEQ ID NO: 18619 - DNA, 1045 bp, Homo sapiens
agagttttaggcgtgaggaagggctagcttttttttttttttttttttttgtctgagatggagtcttgttctgtcacccaggcagtggcaagatctcagctcactgcaacctctgcctccggggctcaagtgattctctggcctcagcctcctgagtagctgggattacaggtgcgtgccaccatggctggctaatttttgtatttttagcagagacggggtttcaccatgttggccaggctggtcttgaactcttgacctgaagtgatccgcctgcctcagcctcccaatgtactggggttacaggcatgagccaccgcgcccggtggcttttgctttttaaggtggacagaaacaccttgcagctgtgcttcgttgcccttgctgcttttgggtggaaacatagacttaagttagcatattcatcagttgatctcttttctgtgagaagggaaagaaatcgcagtattttgtgtgtatggcaggctttgagggcccttatactttgattctgtagatgccctgtccttcctcaggaggcagtcagctgtgtacagaggcccttgtggtcctgtcctgagagtagcggaaggaagacatggctctgcctggggagactgtgccttatgcagaggccaacaccacatggatgagccggaagcagccgctggcctggctgctctttcgggtcaggaaggctttcttgagtctggtatggtctggctgccccagtgtccccactgcctagcacagtgggcactcaggtgtttgtctgttggatcggttaattggcagggaccagttgaagcaaacagagaacagctggttgtcattcactgttttcaggactgcttatggttgtttttggtgtttctataatagttctaggcatgaagttcaggaccacagcatgcaagaccccgaggggcagatttgccgtctatagaaatagtaatgagagctgatgaagaagaggtggctgcttcccacagtatcaccttgattgtcatttctgcatttagaatgcatgagtgacccctaagct

SEQ ID NO: 18620 - DNA, 1572 bp, Homo sapiens
caatctaaaatttctgaaggaaattttagctcggaatctccatgaaagcacttaatatacagccaacctgttaaaaaccatactttgagaggtaaaatgattactttttgatagcactttaatagtagaaatagaatatacaaacagggaagtagacactcaattgcagtactttgacatttgagtttcaaggagagaggctgcctgtgagagtgactttgtgatagtttgtctactttgttcgcttctcaggacctctttgccccaagaaagtaaagcaaaattttgctatagccctattagtgagggaacaaaacttctcttcctccttcttcctttgtctgcttctgccatttgtaacacttagttcagcttgcagttggcttgcactgtaataaaactgtaaatgtcaccatgccctgacccctgtgtgtgttgtgttcaaagttttactctcgtagtctcgcatagttgagtgtggattgttgatgctcagtgcatattgttaaattggcgaacttcctggtgtgcattcactagttgatgatagtgtcatctccagatgtcctcagaaccacccacaccaccttctgaagttgaaagcacacaatgattgttcagtagatatcagctagcacccataacttactgggctttgattcataaagcctagtaaagaaattaaaatttttattttgatataagtactgaccttttttaaaactttattgagatataattcacatgctgtggagtttgtgtatttgaataaatatgcatttcagtggtttttagtgtattcacaaagttttgcagctaacaccgtagtccattttagaacatttcatcatccccaaaagaaagctcatgttcattagcagtcaccgcctcccgctcccccattctcctctcctcccagcccttggcaaccatgatctttctgtgtctggtaatttgcctattcttggcatttcatatgaatggaagaaacaatttatggctctttgtgtgtggctttaacttagtataatgttttcaaagtcatcctgttgtagcatgcattagtctgatgacattttctttttctttttctctttcttttcttttttcttttttgagacggagttttgctcttgttacccgggctggagtgcaaatggcacgatttccgctcactgcaacctctgcctgctgggttcaagcaattctcctgcctcagcctcctgagtagctgagattagaggcgcctgccaccatgcccggctaatttttttttgtgtttttagtagagacagggtttcaccatgttggcagtctgttctctgactcctgacctcaggtgatccacccgcctcggccccccagagtgctgggattacaggtgtgagccaccgtgcccggcctgtctgacgacattttcaaacccgtgtttcttaatcctttttagatccaagagatccttttggagatgggaagaattttagaagttgtctggtccaacataccttcattttgtagatgagattaaggctttaatcatgccaaacagtctattgctcttttcatgtttcc

SEQ ID NO: 18621 - DNA, 1051 bp, Homo sapiens
tactcgtgctttttagtctcccgtgtgaactgaattgttctgtattttatcttgctctgttatgggcaaaactaattcatgtcatcagtggcatttccctcttcactaggttgtaaatcctgtgaagtcagacacagcgttattttcatctttattttacccaaacacctacaattttcccccctcatgtgacagcctttgaaataagttaatcttccagaggagagaaaacactaaacagtcaaacataaggagagggtaaaggttttcctcataacctcacaattttcagtgttagctttaaaaaaacaaacaaacaaacaaacaaacaaacaaaaactctttatttgcaaatagtttgaaacttgaaaagttgcggaaagaaaaatagtacaaagaatccccagatggtcctttacccagatccacctgttgttaagattaaatccatttgcttaatcatttgtgtgtgctggaattctctgtctgcaaatacacactcatacggatacacatacagacacacagacatgggctaacaaatgcaaatatacagacatacaatatttttccaaaccctttgagatttcagggaagattacatacactgtagccacttaatcctaaattcttgaatgtgtatttcctaagaataggcatattctcttaaataaccacagtaatacgttaccactttcacaaatttacattgatgcagtacttttttctaacctgtccatattctaattttgggagttgaccatataatgtcctttctagaattttcccttccagcacaggatccagtctagggtcaggaaatgtatttagttatcatgtctctagctttttgtagtctggaagtttcccacagcctttcaggatattgacttttttgaacagcagtttctcctcccctcttttgataacattcctcattttaccaaacacctaaaataacatttgattggaagttaggaaggcttttggagaaggagatggtgaaaccagaacattttaatagcagttggctgtcctgaatttctgtgat

SEQ ID NO: 18622 - DNA, 1043 bp, Homo sapiens
tatctatattattaacaaacacaaatatgttattatatagcaacacagatactctattttcctaccttttttacaccgagagtgctttcttcttttaatagtattttgaagatctctcgctgtctgtacctaaagttcttcctcattttcccctagttaattctgtaatttgattgaaggtacatatctgtggagaaattattgacatgaagttataataaaaacacgcttaaaatctataacattttctcagatactttaaaaataattaagtaaaactaataaatttgaaaataataggagaaaaaaaactcagtgaaccgtttctgagcgttccagctcatgacttgagggtgtttgccgctgactcatgctgaagccacttggtgtctgcgtttgaaacaggaagtgtgtgttagtggcttggaatcttgttttctcctcctctcctcctctgctgccaagatttttatcaaatcatttggatttgtagtgttcttactggattgaccagctctaaaaactttaggctgtatatgaactgaaataagaaagtgtgcttagaagtatgatttaaataaacatttttattttccattgtctaggaagaaaaccttcctaaagaaaatacctgataatcctgcagaacattctgatttcttatccttaggtatcttccccacattctgaagtaaaaggcctttcttgttagtcataagataaaatggataacttttaatatatagcatttctaccttttttttttttttttttttttgacacggaatctctctctgtcagcaggctggagtgcagtggctcattctcggcttgctgcaacctccacctcccgggttcaagcgattctcctgcatcagcctcctgagtagctgggactacaggtgcatgccaccatgcccggctaattttttgtatttttagtagagacggggtttcaccgtgttagccaggatggtctcgatcttctgacctcatgatccgcccacctcggcctcccagagtgctgggattacaggtgtgag

SEQ ID NO: 18623 - DNA, 1023 bp, Homo sapiens
gcccctctgtgggctcctccgggacacagacctgggaatggaattactgggttctgtggaccgagcctctttagtttcactagagactgctcgtttgctatctaggattttaacagtcttcattcccatcagcagtgcatgggagttttcttgctcgtattaaaaaaaaaatcttgctaactcttggtgttggcatatttaaaattttgtgaatctgatgtgtgtagtaaatggactctcattgttttaatttacatctcccagattacaaacagctgggtactatttcattctcttcacgtctgctggcaatacggatgtcctctgctgtgaattacttggtttatatcccttgtccatatttttaaatcaagtagcttgtctttttcttactgattttaggattaatctttggttttacaggcatctgttcctagcatgagggctttaagcttcacatgttaggtgaaccctttttggggttgggtttttttgttgttgttgttggataagaggagtacactttcaactttaatgtcaactgaattgatttttttttccttatagtttgtggatttttagttttaaaaatatctttaggaaattcttcccatcctttagataacgaagatatttgtctgttttcttctaaaagttttcagattttgttttcacgcttcagtgtgtaataagctgaaattgaggcactgaattttgtatatgtgtgaggtggcatcgaactccctgcccctgtggccctggcaggtgcctcctcaccattcattgggaactcggcccttagctgtcctgtcagccccgttgggcagtgcatctcccctggttccgagtgtgctattctgtgggcctattgcttatctctgtataaacaccacacgttttattttatttttttatttctattttttcttttcttttctttttttcgagacagggtctcactctgcccaggctggagtgcagagtgcaatcacaattcactgcaactttgaccccccgccccgc

SEQ ID NO: 18624 - DNA, 1079 bp, Homo sapiens
aggtgtgtgctgccaggcccgggtggtgtgtgtgtgtgtgtgtgtgtgtgtgtgtgtgtgtgtgtggtgtgtgtgtttttaagtaaggggattttgtattttttcccacatcacactgatgtaaccatacgttttagttgctacaggttttctcaagtgtgtacacatgtggatgggtgggtacctgtttgcaagtgagtagacaaaaacttgagttttcatgtgataggaaagtgaaaagtgcaccgtatttcaagtctgaaggcctggggtcgcttcagttctgccacttccacaggctcggagggtttgggcacgttctttccttttgggcctcccatttcttttctctttcttttgttttttaaattgaaaaaatgcagaatgcttattcacgtcacagaaatgttgggaaatcagctaatgtatggtccgataactagtgagtaacagatgttagtagaaatggatgaaaagggtacagatggtaagttatgccaaaccttttattcacagaagacgtgactgtgtctcatgaaaatgagctcaagcttcagaactcgtagtgtgtgtgggcttatttgggcttttctgtttttcttattttttaacatacggtgaagtttggaggggtataaaaagagtttatcaaaatcacagtaacctgcaaaagggaaatgcaggctaattaacataatcggatggagttgttttccccaatcttcaggaatctgaattataatagcacatgattacacaggaactcactttcatggggcggcatgtggttgggcctgtgggtgtgtgagtggcgagggcgtgtcacttggacctgtgggtgtgtgagtggcgagggcgtgtcacttggacctgtgggtgtgtgagtggcgagggcgtgtcacttggacctgtgggtgtgtgagtggcgaggggagggcgtgtcacttctacagcacagtttggccttttatctctcaggtaacataattgccgctcaaacatgcagtgtttctaccatgtggctgtggcatgagttacaatctagtcgaatttttcatatgctttttctccgttgttag

SEQ ID NO: 18625 - DNA, 1097 bp, Homo sapiens
aaattttgtgtaaaaatagagtgattcaaaacacttttcatgcctcaaaataacacagctttctgtcaccagggggcatcctagtgtcattaacagaaaaagagggcattctatgtatcagtttctaaactgtcttctttgaccacagagggttttgaacgagatggaggcttcctgagacacacatggccgctgtgtccactgcccttatagacccacctctctgctccaggtgcctgccagcatcaatgctggtgtgtggaatggtctttgccttgcgggtgccaaggctagtgtagcccatctcagcatacagaatgctttcttctgggtgtcaacgtgatgcgtactaggttgccccctggtggtggagataagtgcagctgtcaactcctgaaggtgttggcttcttttgaattgccctgtgttttcctgtttgtcataattctctgggaagagaacttactgcgttactagcagagagaagcttttattgctgtgattattgaattggtgtgctgagatctcattggagaactcagctgaggaagccaatcaagcagcagctctcatacagtattgggcatgagacttacctaggagcctctgaactttgcggccctagggccgttcctgcactggcctttgtactgcagtgaacagactttgggaagtgctgcaccagaatgtctttttgttcttttgttctgccctcaggtagcagtttatctctctgcttaccttaccccttttcttcctaaaccttttttttttttttgagacagagtcttgtgctgttgcccaggctggagtgcagtggcactatctcggctcactgcaagctccgcctcccgggttcacgccattctcctgcctcagcctcctgagtagctgggactacaggcacccaccaccatgcccggctaattttttgtattttttagtagagacagggtttgttttttttttgttttgttttgttttggtttttgagacaaagtcttgctctattgcccaggctggagtgcagtggcgcgatctcggctcactgcaacctccatcccccaggttcaaacgattctcctgccttagcctcc

SEQ ID NO: 18626 - DNA, 1075 bp, Homo sapiens
tcccatgcacatcacttctttgagttcaccctcctccctgtgcagtgggcaccaccagctcccccagcctctggagttctgcttccccctccctccttccagcctgcctgcccttttcagtgactgcttcttggccctttttctccattctttactctgttccctctaagtcctgccttttttctgccaaaaacacgactggaatcttgccaccagtttgcacagttagtgacaggcctgcttttctctgcagcctttctgggtatcttgtgtttccatgacattagtttctcttccagtgcctgttcgactgtacagagcctgtgggcactgtcatggacctgcctctctttccagcctgctcagctgctgatggcaggatccatttctctgtgtctgtcactgcgcctgtagtatctggaatgttgtaagccctcagtacatttgttggatgaatggtttaggatgctttattctgctccctcccactacctccagctgcagcaagccctttgcagaggcacctcatcgtggcttcccttttagatctcggccttttctatttttgtgttttttaatttttttatattttaatttttgtaggtacataataggtgtatatatgtatggggtacatgagatattttcatacaggcatacaacaagtaataatcacatcaaggtgaatggttgtccttcacctcaagcactgcctgttttagatgttcctaaagcttgagataccactccttcaccctgcccttagcaattcagtgatccatcaagttccactgacctctctagtttctgatagaagttgatcactgtttcctgcatccagaagaatcctttttctaaagctattcacagctttctctcccctccctccatgttttcattctcagttgtttgtatttgtctccctaataaatgtgaactctctgagcagggcccttgtgtcactaatctctgtatatttccctccctcgccccctgccttgtagtccagtcctctctactgcatgtactgcagtgagcagccttggagaaatgctgtgttaggattcgtggtttt

SEQ ID NO: 18627 - DNA, 2054 bp, Homo sapiens
tagatggtcgtgacttcatgcataaacttgctgttaggtgtaatcgtcatcagtgttcttttccaggaactttctcttgttggggcaggattgtgctgccaccacccttcaccccccacagtcgggggctgtgattctaaagcatacgaagattcaggaggcctcgggaggctgtgtagctccagcctcctgcacactcacttgcacgtaactggcccctctcagcgtctgtattttttcttctacaaaaagatttctaggggtcctttcaaggtaaaatatattcagttctccgcagtagaacaccgttctttgggtattagtttcttttcttaagatagatgccttgaaaaaaaaattggccccttaatgctagcctggaagaaatcttcatgcattaaagatgaaatataaggcatgtgtccttcccttaacttcaaaatgtgtaactttttatcaaatataaggtgacattgatgcttgatttctgttgaaagacacaattgattctaaaacttaacctgatttcagaggtgtaaactataaaaatacgtctgtcttagcaggaatgaattatgtggattgtggttaactgggaaggaagtattgaaggcttcccaagagatatttaaaagttcacaattctaactttttcttttggtatttttggaaggctttaccacccatggggttaatccagtgtgaatttatttagaggacgtttgcatgtgttcatgtcagggccatttttcagacttaattgaaggttaccagcggaggagaccaagagatagagaattcagaagagtgctctgaagtgcgcttttatatataggattctttgttgttgttgttgttgttgttgaatctttttttgacatcttttttttttgtttttaaatttatactttctaatttctcctatccagtatgtataggattctttgcgtagttcatgtttttggaattaatcaaatcacgttaactacagaagctgatttaaccatgttttaagtccctaagttagttgtcatgatcttttaaaatttaagttgtccaaaatacatattcctttatctcaggcataaggcagctataagaaagtcagattccactggggggtatttttaaaattggcaaaatattacttgctttttattacaaatttattttaatttctaccttctgaaagccttccttagctagaaagataagtacaggcttctgcttttcatatccccaaattaaataataattttatagttgtttcattttccgcaaattgttcagcgtaagtaaaggacgtaatagatttgttgattaggaagagaacttaaggtttttattttcaaagagaaagtgagtaattactggtacttagagtttgtagaactgggttcttaactaatagttttctttctaaacaggacaagaatatcagagaattgagtttggtgtcgatgaagtcattgaacccagtgacactttgccgagaacccccagctacagtatttcaagcacactgaaccctcaggcccctgaatttattctcggttgtacagcttccaaaataacccctgatggtatcactaaagaagcaagctatggctccatcgactgccagtacccaggctctgccctcgctttggatggaagttctaatgtggaggcggaagttttggaaaatgatggtgtctcaggtggtcttggacaaagggagcgtaaaaagaagaaaaagcggccacctggatattacagctatttgaaagatggtggcgatgatagtatctccacagaagccctggtcaatggccatgccaattcagcagtcccgaacagtgtcagtgcagaggatgcagaatttatgggtgacatgcccccgtcagttacgcccaggacttgtaacagcccccagaactccacagactctgtcagtgacattgtgcctgacagtcctttccccggagcactcggcagtgacaccaggactgcagggcagccagaggggggccccggggctgattttggtcagtcctgcttccctgcagaggctg

SEQ ID NO: 18628 - DNA, 1026 bp, Homo sapiens
tgaaataacatggttttttttttttggattgagtaaatggattttattcagaattttgatacaccaaggtcagctcttgaagagaaaaaaaatgttaagggttcagcccaaagttaatgttttattttagagtgctaaggctccaaagtagaaacaattcacaataaaaatagaaagctgcataattcacagattgtttttaaaaagttacagtaggaagtcagaaatgcagcagggtatgaaagaggtatgtgtcctcacatagccacgtgttgcttaactaagatggatatgtgttccgagatgtgcgtgttaacatcagagagtactacacaaatacaggtggtagagccttaggctggtggtgcagcctattactcccgggctgcaaacctgtccagcgtgttactactgaatactgtaggcagttgtaacacagtgctaagtatttgtgtgcctgaacacatttagacatagaaaaaatatagtacagatatggtataaaggatgaaaagtgcttcacctgtatagagcactcaccgtgaatggagcttgcaagactggagtggctctggatgggtcagtgatgagtgctgagtgaatgtgaaggcccaggacagtactgagcaaagccgagttttataaacagtcaacacttaggctgtactacgttgatttacaaatttttcctcaataagaaattaaccttaacctactgtaacttttttacgttttattttacttttaaattaaaaattctaaactttttgactctttcatgagaacatttagcttaaaacacacactacagctatacaaaaatattttcttcctttttattcttactttcctataagctttttcatattaaaaattgtttttaactttttaaacttaaaaagtaagacacaaacattagcctgggcctgcacagggtcaggagcatcaagacgccactaggcggcaggacgtttcagttccactagaatcttgtgggaccatcatacgtgcggctcattgttgacc

SEQ ID NO: 18629 - DNA, 1077 bp, Homo sapiens
gacctcaagtgatcctcctgcctcagcctctcaaagtgctgagattacaggcgtgagccaccgcgcccagctgagaatattatagtttcgtttctaaaattgctccacaaaggaaaacctcccatcttagggagattttctctatctttatttaaaataaccaagaaaagcttcatttaaaatgttttagaacattctacttagtcatatgactttaaatatagtttgataaatagtttgttatgttctgtatatgttaaagtctaattgaagtagctttgtcaaacactgaaagtaagggcctcttaatgactggtagtagaggaaagccttgccacacacagtccacgtaattatttttgtgtggacatattgtaaacccctaccaaacagattatttttttaatcctatttggttaggtcagttatgaagatgttttaattttctgagcaaaagtgtagtttctttaaaaatatataattcttttcagcctgtttgttgaggcttcgatagacagaacgtagttgttgacagtttcaggagtctcgtgagatagtagagcaatagagtcacattgaataacccttgggatcatatagggcttagggagaatggcattgtttgaaattttttttgttgttttattctcctacttagggatttactttataaaagtggtaaaacatactcagtttgttacaagtcagatccactaccacaaattccctttagtgggcacacttttaagtgtaggcccacttattttaagcagcgtttaactgagtgaaagtctagtttcattaaaagatctgttgatgtgggttataatagagtttgacttgcattagtatctaactgtttctactgagacagtggtatttgtgttattaacttttgggaaagagggagtagggaatgatttagacattaaatgtattcctttctgccaggcatgatagtgtggagattgaggcttgaggctcgataacttgagcccgggagttcgaggccagcctgggcaacatactgagaccccatctttaaaaaaaaaaaaaattatacacacacaaaatgct

SEQ ID NO: 18630 - DNA, 1052 bp, Homo sapiens
agagtttctgcagcccttggattgggctaagcatccttccccaccccccgccccccatctcccaacaccccttcagcttagcctgtacagtgtgtgtttggagccagggacatcacagttcgtcccttcactggtctgcgagcttgcctagggcaggaccaccttgcattcatctctgtgccttccttacccggtgcctaggcagggctcagcaggggtttactcgccttcagcgaaaggcagcatgttatttaacaaaggtttcagccacacaccatggctcatgcctgtaatccaagcactttgggagaccaaggcaggtggatcacttgaactcaggagttcaagaccagcctggccaacatggtgaaatcctgtctctcctaaaaatacaaaaattagccgggcgtggtggtgcacgtctgtaatcccagctacatgggaggctgaggcaggaaaatcacttgaacccaggacacagaggttgcagtgagccaagattgcaccactgcactccagcctgggtgacagagcaagacttgtctcaaaaaaacaaaggtttctatgttagaaagatagcaggctttgagtcttaaggttaggtttaaaaaaaaaagtcatttgatataaaaatactatggcaaagccttgttggaatcatgctggagttttcatttgagacactatgcctttacgtcattgatggttatttgaaaatgcacctttttaacactgcaatgacattagttgctgttctgtggcacacactagaaatgatagactgttgtgatgatatggtttaaagacaaatgtaaaaatccactgtcaatagactttaagcctgtggggaaaagtaagtatctgaaaccttggaataaaagggatttttaagtgaagccccttatatattgaggaaagggctcaacctcttgagtcaggtggacccaggttcacaggtcatttcagctgttatgtgacctcagttttctcatctgtaaaatggggttggtaactatctctgacagtagggttatgataattatgaataatat

SEQ ID NO: 18631 - DNA, 1026 bp, Homo sapiens
gaaatgatttgaatgttcttcactagatgtcatcaatttctgaaatatgcttcttcactctttcagagttgctggagaatgtaaccctaatccataaaccagtgtcgttgcaaccccgtgggctgatcaataaagggaactggtgctacattaatgctgtatccttcctggacgccgtccgcaaggccagcttgttgcagctgtccctcctttgggtgcatgtgacttagctcagcttccgtgggccatctagctctccatttgaatccctaagtctggtttattacttggtctgcctaccttgcttataaacaggattattcctgaccccagtccatctccctctaaaagagaggatatgttggcacgtgaatgagggctgcagacaagctggctctcattagaatagtcacaaataatagggcagagcaaccacttacaactggaaatttggttttaactgattgaactgtcttggttaggtcaagttcttgaatacaaacgactgactgcttcgtagatccttatatggacatcacaggacacttaccctagtaactatttggtttattccttttcgtggtgacatatctaagtagttcaacgtccttagcttccttgtgtttttataaacattcttgtgcttcatgtgccttcaggaaatgtggtgtgtctgttcatttcctttacgcttccttactgccactacatagacactgcaggcattggttgcttgcccgccgatgtaccacctgatgaagttcattcctctgtattccaaagtgcaaaggccttgtacgtcaacacccatgatagacagcttgtaagtaaggtggtgaaagatgtgttaagtggtggggtttttcccgtctgataattagaattgaaatagtttagtaaagctcttgatttcctgcaaatgagtcctataattctgtctttttttaaaaatagactgttggcgattttatatggaagttaaccagaaatggaattggagcattgatgatctgtgttctttagatt

SEQ ID NO: 18632 - DNA, 1004 bp, Homo sapiens
tttgtgataaaggtaatgtggccaggtgtggtggctcatgcctgtaatcccagcactttgggaagccaaggcaggcaggtcacctgaggtcaggagtttgagaccagcctggccgacatggtgaaaccccgtctctactaaaaatacaaagattagccaggcatggtggcacacacctggagtcccagctactcgggaggctgaggcaggagaatcgcttgaacccgggagctggaggttgcactgagctgagattgcaccactgcactccagcctgggtgacggaatgagactttgtctcaaaaaaaaaaaaaagtatatttattgaagaaaatttcaaaaatacagaaagtataaataataaaaatccccattagtccacccatttagagatatgtgtttagtcagtttctccttttcctcctactcttgggatttcagctatgcaagggaaacccatgtcatcatgtcattgtttggaaatactttacatcttccatttcagaggaggcatggttggactttgcaagtactgcatgtcctgcaggcctttgacagtgatcagttcacagtaacgtgattatatttgaccttttcagggtcgacaagaagatgctgaggaatacttaggcttcattctaaatggacttcatgaggaaatgttgaacctaaagaagcttctctcaccaagtaatgaaagtaggttatggtccacttgccgcagagttgtgcaagagttcgctgtaaacaggtgttgcatactcatatgttatgttgcttccctgcccctcagtcgttttcctttcaaatagcatttattccctacgataacttacaccatcgagaaggttatatttaggtaaattacagtttatcccgaacctctgccattttcctttaacttttaattaggaaaatgatcaagcctataaaaaagctgaaagaatcgtttgatgaatacctttataattgccgagtgtacagttttaaacatattttctgat

SEQ ID NO: 18633 - DNA, 1050 bp, Homo sapiens
tgtctcctgttgttctgtggtcaggatacgggatcatttgctaggcactgatttgctgaacacagtagtatttcgttgagtggcccttccttggaaacaactggcaagtaagcaaacctggaaatcactgttctgtgctgtattttcagtaaagggaatttacacagcgcttgctgctgtgggatttgcaaactattttattttgactctaggatttcacacagtgatatgcttaagatattttttataattttttttttttttttttttttttgacagagtcccactctgtagcccaggctggagtgcggtggtgtggtcttggctcactgcaacctccgcctaccgggttcaagcgattctccctcctcagcctccctagtagccgggattagaggtgcacgccaccacacccagctaatttttgtattgttagtagagatagggtttcaccatgttggccaggatggtcttgaacacctggcctcaagggatccacccacctcgaattcccaaagtgctgggatcacaggtgtgagccaccgcggacgacctataaaaacttttatccctttcattttctcatagactcccgtttaagttcttgctctgttttgggggaaagtgtttattgtttgattttctaataacgaaaacattagagtagcttcatttatgctgcctgtttcaagccaatacactgctcagttgtgtttgtgtatttgaaaagtcccctgataggaactttctgaggggtgcctgtgttgttggcacatttgagaactagacaaaatctaactctgtgtcttttttctttctttttcccctattatttggttttgtttttttaacaacccctctggagtgtgttttggttcatgggatcaggccacgtgccctggttttcgaggtatagccttggctttcttgggtcgggtctaataaccctgaccttggacttcccacgtgtccttcaaagaaagcaattatttttgcctattttctgagtatgatggtattctccatttgatttaacaaaaaaattcttcc

SEQ ID NO: 18634 - DNA, 1240 bp, Homo sapiens
agcagtgcagcccctgggagtcagaagagctgcagttcccaaaagggctgaaactgggagaagagaacaagttttggagcaagactgaccccagttcatttgttccttaccatggcgctgcgaggccttctcatctcattttatagatgagtcaaccaagactcagataagtcagacaacactcagtcagtaggtatctgaggcagatttcgaaattctgccctttctcttgctaagtacctgtgagttagtttcttatcctggtggaatgtcagtttccttggttgagaagtggaaacataccacttgctttgtagggacatggtgagagttcaatggattgggggaaatgtaagttcccccagagggtcagatgcttgacatatagtgggaccctcgtgtcctccaccctggtgcataggagcaaattcttcttggatgtgggttggttctgtgtgcgaggtgctggcttgcaggctgggtgccagttttatacctggcagtggtgtttcaaggggcagtcagaactctctgcaaatcctcaaacacagggttttgtgcaaagtatccaaattctggtgtattttctcatgtggatttgctcacgtgtcaggagttgatgggatgctgcccgtcggccttgactgataagaacgccaggaaacaagaagccgccgtttcccaggcagctgggaagggggagtggacagtagtctggtgtggacgggaacgcaggctggtgtctgcccagaaggggtcagcatgggtttggtgaggtttcatgtggtatggatgtgtgctctgttccctagaacaagttagtgcattcactccttatcatggctcttgaggccttcttatatcattttatagacgagtcaaccaagactcagagaagtcagacgacacaaagccagtgggtatctgaggtgggttttgaacctgcttctgctccctacgccctcttccaccagctgcctggaggaggtggagcttgagtcaagcctcagaaaagaggtagaatttgttggaatgaggcaggcaaacaggcccagaagcaggggtgacctgttcagcctccgtgggcgggaggtgcctgttggggatgagaggaaataaggttggagtgaactccaggccttgaaatcaggaataggaggttggatttgaagttgaaggctcaggggagcaataacaatttcttgaaagaaagtggaacggactgagaagagatctgctc

SEQ ID NO: 18635 - DNA, 1077 bp, Homo sapiens
gggagactgaccctccacccatcgtgagattttgtcctgatttcacatttcacatacattaacatgtaaaacaggttgggtacagtggctcacgtctgtaatcccggcagtttgagaggcaaggcaggagaattgcttgagcccaggagctcgagaccagcctgaacaacatagtgagaccccatatgtacaaataattaaaaaattgtccgggtgcggtcgctcacacctgtaatcccagcattttacgaggccgaggcaggtggatcatgaggtcagaagatcaagaccatcctggccaacatggtgaaaccccatctctactaaaaatacaaaaattaactgggtgtggtggcgcatgcctgtagtcccagctactagagaggctgaggcaggagaattgcttgaaccttggaggagtaggttgcagtgagccgagatcgtgccactgtactccagcctgggcgacagagtgagactctgtctcaagaaaaaaaaaaaaaaaatttagccgtgtgtggtggcgcatgtctgtggtcccagctagtcaggaggctgagaatggcctgagctcagaagtttgaggctgcagtgagctatgatcatgccactgcactccagcctgggtgacagagtaagaccctatatcaaaacaacaaaagacaaaaaaatctaaacagtctgagtcttcaaatcagtgaaatacagtaaggatgatgatgatggtggtggtgataaagaaatagcagcgatggttgccatgtatcgattacaagacattatctcactgaccctgtaaacaggaccctctgacgggtgtaccagggaagttgacttcctctttcccaccagcccctcagggtgatttggtggggtctggatgaggccagccctgctgagcatgtgctgggccagcactggggttggtgcagtgacgcagccacgcttggtgtctctggggagtggtcctccttgaggtgcctcttgtttctgtcgcctccaggtctggagccggccagtgggagcgactcagctgcctggcaggctctgtggtgtccaggtgcctggagcttgggg

SEQ ID NO: 18636 - DNA, 2142 bp, Homo sapiens
ggctgcagtgagctatgatcacaccactgcactccagcctgggtgttagagtgggaccttatctctatcttaaaaaaaaaaaaaacaaaacaaaaaaacacaggagtttacaaagatccatcatcctcatcactacctctgttcttacattcacctttcttaaccctcaaaatttaatgcaaaatctggtgcatatgtgcattttctggagagaggatcagtggcttttatcagacttgctgtgggggacatgtgactcccagaatgtaaacaaccattgttatagacacatttccctgcacacgctccagtgctgccggaagcctattcctcaccattccttgaagagccaagcttgttcccaccattaagtcttgacacatgctctttctttcacatttctgcctattttcctgctccggggagccttctttgctggctcctgccagctgaagtttctcttccctctcctggctgacctagacacttatctgtatgtagcatttttgacatttgataataacctagcactttattctatttgacttcatgttgtcttctgattgactcatatgtgtaagccctgtttctccaactagatagaaaaaatagctaaaatttgaatttttacccattgaccctctattgtttttcttttgtgcattgtacacagtgattccttgccagctgtgggagtggcattcctgaaaagcactgcacttggcaaaatcacagctggcaagatcaaagtctcagtgaaaatgggaggttagggaaaaacaataaaaatggcattaagtatatgtctttaaaaaccacagtaaataaaagttctaagagacatcactgccaaaacaaaccagatttgtccacatttaaaaacctgttccagttggtaatctttttctgaattaccttcttaagtagatgggaaacttggccaatgtcttgatgtactgacaatgagaattctcccatgaggtttatttcttcttaagtcagttttggtgatttattgttttcaaagagcttattcattttgtctaggtagtcaaattagttgataaaactttgttcttaatatttctttattatctttctaatgcctgtaggttctgtaatgatgtcccccctttcattcctgatattggtgcctactcttttcttaaccagtataggaattttattaatctcccaaaaggtttatattttagagatttacctctttaaagtttttgaaccagttttttggggggcttaagatgtatcatcttttgcacttgtcacctatcttgttctgtttttgcaaatctagaagaaatgtgtatgaaaacaccgggactgttccaagttatctaggtctaagggcacacttcccaagcctgatcttctctctatgcattgagccagtggaggctaaagcaatttctctctatcacctgcccctgtgatggacattggtgaagtccagatggtgtgtcctttggcttgagtggattttatgaaaacttggataagtaagaaagatactaaactgaaatattttttaatgcagaaaagagaactactttatctcagaatcacagatcataaagaattgctggctctctcatatattagtggctgtgttatttggagcatatgcatttaataatattgtgtttcatttcttatacaaagtatccaccatttaaagtatttgtgaccttctgtgcttttgctacaaagtatggtttatccataaccttgattgaaattccagtttcacttgtctttgtatttttaacaaatatgagtgtctgttgagaatcacaaaactgggtgaagttgagtctaacactcttcactttaacaggactccaaggcccaggaagggaaagggacttgcccaccaatacggaggacttgcctccaacttagcctgtcagaggctgaggcagaatgccagtgccctgggaatttctgcttcatcagccaagactgtccctctggcaatagatatcctggtatttttacattagcaatttgaggggccatgggaggtcagccccagctgccaagcctgtgtgggattcctggcccagggcacaaagggcggactcaccagggtggggctgatggtgagcagcatcctgcagaccc

SEQ ID NO: 18637 - DNA, 1152 bp, Homo sapiens
gcgtgtttgtgtgtgcgtacatctgtgtgtagcctgcttcatttttgaaaaaggaaatgaggctctgggaggtgaaggccttgcccaggctcatgcggccagtatgtggcagagctcgactctgactcaacgacgtagcagagcttcactctgactccacgcccctgaatccgttcaggagaatggtcaccttctctctttgctgctgttcttggactccgtgtccgggcgcccttgtggtctctgctgcagctctgggctgagacccctggccctggatagactagaacccaaaaatcctagtcctgggatgctggttctttcatttcatagatgaaggagactgtggcttagggaggccagtggattcgcttaacgtcacccaggaggtcagaggctggtctgggactatttcttctagatgtgcacaaggcagtaaccacaatgagcttctttttctaagaggtaaaaagaggttgattgcaaacaatcaggattcagactggttaccagggagacaggggccattctggaaggtttttgagcaggagatgactctggaagtatgggaggtgaccgtggacccttagcagggccccatgtgtgtgccaggaagactaatgactcgagtgttgggattttttttcccccttgctcaaatgcatttgggaaacagttagattaaagacagttaaccaggagctttggctgcaggacttatcagtgcctttaatgcacggatgtctactgtgttggacttctgttctgtgcagtgtgtttcaggaaatggctgaaaagaccttctctccagggtgcgaatctgaagttctgctgccaaggttggggtggacacaagtgtctacagagcaggatccaaggtgcctaggtctgtgtatttttttttaagaagaggctaaaagtgagtggctaaaaatggctaacagtgagtgttcggggcagtcatagctcagccagggccggtcgtgaggccagtagctttcagatcatcataaagacttgttcccggtacaggaatcactcaggagatttgtgaggtgggaaaagggagaaacagacctgttcagactccaccatccaatcgcaggcatgtacctctgcctacgtgtgaggggagaggaggaacaggcatag

SEQ ID NO: 18638 - DNA, 1051 bp, Homo sapiens
tcccccagggagaatgacaaagggatctgcccttcttggggactcctgtttccccagcagcaagctgagctcacagggtggggctcacatgtctctgaattccctgctatgccaggcctgccccccagtcccccacacccagccagccaagggtgctgtgtgctcacagctgtttacagggtcgtccgcctagggcctgggactggggacagaccacaagctcagagttctggagtccatgcagttgaagcccctgggccaggacactccaaaagggaatcccttaaaccccctagaatgttcctgaaaggtaacttgcccaaatcctaaaagctctcatttgctgggcatgtacacgtacgtcttggctcactggatctccccgcagcccctgaagaggtgaatgctgtcatcgttgtctcctttaatttttatttatttatttattttttatttttttgagacagagtctcgctctgtcacccaggctggagtacagtggcatgatctcggctcactgcaacctccgcctcctgggggttcaagctgttctcctgcctcaacctcccgagtagctggaattacaggtgcccaccaccatgcccagctaatttttgtatttttggtagagacggggtttcgccatgttggccaggctggtcttgaactcctggcttccagtgatccgcctgccttggcctcccaaagtgctaggattacaggcatgagccaccgcgcccagccttgtctctgttttgctgataaggaaagtgaagtgcagagaggttagaccactggcctgaggcgacccagcagaaacaggagttgaggtcacagcaggctgggctttgtgtcttcactgccttactttttttttccttccctagtttccctcaaacacactcatcccccacagcccctctttggctccagggctctacactgggggtaagaggcagctgtggaggcccctgcccatctcccctgccctgggcagcatgcggtgtcccctcctcagtgtgagtgggtgtcccatgggcctgccttgtgg

SEQ ID NO: 18639 - DNA, 1069 bp, Homo sapiens
gtcacagttgccttgagacagtaatacccgggcccttctgaggcctccctctctggcctctgtggccccgcccggtcccctctcacagaccgcgtggggtgcaggcgactagagcctcctctgcatggcctggtatcctaggcagggttggcaggcctggcaaaacataggtctgcagtgagtgagaggatgcaggggccctcgtggatggacaggtgggtgggggtggggcaggaggagaagggcagggctgactctgagagcggaccctgtggccacaggagggctggccccttccctccccatgtccattcacccctccttgcccggtcttggcctctgcgggtggcgggtgggtggagacacaatgccaggcgcaaggcccagctagagtgcccagagaagaaagagctgagtgtccagagccttggggagtaggccaccgttaacactgacccctgacacaggctacacagacatgggattgtggccagaagttaagtggttaaagagctttgactccgaattctattctgtggagtcagatccctgctcctcagctctgaaaccctgtgatttgggtcatttaactgctgcaagcctcacttgtgtcatctttaaaatggaggtgcgaaataatatctgccaaccattattctaagtgaagtaacataggaatggaaaccccaaaaccatacgttctcacttgtaggtgggagctaagctatgagtccacacgggcaggcggagtgatatcatggacttcagacactcagaaggggaagggttgtgggggggccagggataaaaactacaccttagatacagtgtacgctacccagttggcaggtgcactgaaatttcagaattcaccactgtataactcattcatgcaacaaaaaaccatgtgtatcccaaaagcaattgaaataaacattttaaaaaataataatatctgccttatagagctgtggtggcagtcccatagatgcctgttagagaagtgcctgacacgcggctgttgtttgttcactcagcaaacattcacagagtgcctgctgtgtgcccc

SEQ ID NO: 18640 - DNA, 1050 bp, Homo sapiens
aaatcccaaaacattttcccctctgggccagaagcagctcggcgttaccccgcacctgggatttcaagagctcttcctggtccgctttccagtgggtggctgtgaaaatggcacttggtttcagttaggagctgggggcaggcgggggtctggtttccctgctcctggaggaattaccggaccacatgttgccaggagccttggctgggagaggcaagcgaggctccaagccggcgagcgggcggcggcgcagatggaaactcgatcacccccggctcagcagactgtttgatttattttaaaatcaagcagatggctgcaacaggggtttgtttaagttcagctcagagccgggcccgcggccaggagcctggggcagctgtgccaaaaatttttcaatgactttggtcgtcaaaccacctcttcccctcccttttgaacttcagcctccccacacaggcgggcttctcgggcctgcccgctgctgcccgctgctgcccgcttgccctggcccgtctcgctttgtctctgtcttgctgcctggagtccctggctttgccactctcgtgctctctcgcgctctctgcacctctggtgtctgcctctatccctttctctctccttgcttcggtttctctttttttgtctctccatctctctcagtatgtgtctctgtctctgattcactctctcccaccacttcctccccatcccttttccgttgcaggaaaccttcccaaatcgtgccccccactgcttcctccagcttcctcctaccttgccccccacccctcctgcccaccccctcctccagtggcccctctccccctccctggcccagcaaggcacatgggagaacagccaagcctttgtggggattcagcgtcctccgggctgccccctctccgagaccctgcggctgggaaaaccaggcccccagccgtaaaatcctggagtcgaccagacctccgaggtcaagcggtgcagcccccgcccagaggcagggaggccaggggcacaggcctcatggtcacagggtcggcatctgca

SEQ ID NO: 18641 - DNA, 1073 bp, Homo sapiens
gcctccgtgccagcatccagatgggggctgaggacatctgttgacctaccccagcccagctgcagggagaaagggctggatggtgaccactcaagcacacagaggcggggcccgacacagcttcctggaggaggaggcctaccgcaaggctcagggctccatctggccagcacttaccagaaagggacggagatgaggcagtggaggagggggctggtgtccccgtgtgagccccacaggacatagggggccctgcggggcatgggcagcccccccgcagcagtgctggtcatctttggtggcgcttccagactggggctcacggcagcccactgccctcccatggtacctggacacctgacagtctagttgcctctggtcttgggtcacaccacggctttaatttcagtgaccttgactcttgtcaggtgaaacatttcttttttatttttcctttttctttttcttttcttttttttttttttttttttttgagatggagtctcgttctgttgcccaggctggagtgctgtggtgctatcttggctcactgcaattctacctcctgggttcaagtgattctcctgcttcagcgtcccaagtcgctgggattacaggtgcccgcaaccacacctggctaatttttgtatttttaatagagacggggcttcactatgttggccaggctagtctcgaactgctgacctcaggtgatccacctgcctcggcctcccaaagtgctgggattataggcatgagccaccgcacccagccaggtcaaacatttcaactcagcgactactctggtaggagctgttcccagggcaatgggggctacgccacagggccctttctggccccccgtgctccctactccagggagctgctgttcccctgcccatgtgcccaccatctactctctgcttccctgttgcccctgcactgtactgggagcccccacccctgcatgacatctgcagtgatgagcgcatggggcgtggcactgagggctcagggagtccatgggtggcctctgtgccagcatccagatgggggctaaggacatctgttga

SEQ ID NO: 18642 - DNA, 1789 bp, Homo sapiens
ttgaggccactgactttcggcagtgtccacagggcccagcagatgctttcggacagatcatcccacggtggatggctgttcaggtgcacgctaagcactttgtatgccagagccgccatcgtccccagtctacagacaaggaagctgagggggttgagaatgtgcctgtgtttctgcagctgggcagcagtggggcgtatcagcacctgtgatttggtgcccgctttggctgtccctggggggctaaaccctcgtgtgtatcctgagatatgtgtattttctcataggctctcccccatgccttatgtcgggatgtttgtctcccccactttacagatgggcagactgaggccgagcaggtgaggtgacttgccccaggtcacacaggttgcaaaggacagagcctgttttgaatccagagcccagactcttaaccacttcactggcatctccccggcgggtgcttggaatgccccaaacaagaagcctgctcttcaagaatgacttctttctgaaaactgacgatgacaaattatttatttaatggttttaatttatccccctttcctcagagagtgtcagaggcaatctgcttccttctgcctctcagagcctccccgtctcttgttagtggttctgctttgaacatatttccttttatcatgtggtgacacgcggtggcagagggcgattctgggagagattgtcggggagggggccagctagagtttgcatcgcttttgacagctaattagctgtgtgtctttgcaccggggggcctctcagatggcaggcatcatcgtcacggccctgaagccgcatgccgggacttcagaggaagcatgccttggcctccctcctccagccccacatcggtgatttctagggtaacggtttccattttggccatgccattagactgtgggcttgtcagcaggagaaggacgcaaggccagaacgcctgatccctagagcctgaatttgccaacagatcacagggttctggatttagcaatcagaccagagtgggagtccgagactccatgtgtgaccttgcacaagttctgatcctccccacagcccagtttcctcatccgaaattgggtatgggagtgatgcttgctccgtctctcacaagcttgccgcgggcaccagttggaaaatgtgttgcaatgggagctgaaaagaactcggcgagcctctgggttcctccattctgcaattcagtgttaattgactaccgactgtatgccaggccccgttctaggctcagaggatagagcagtggacaaagtggacagagatccctgcccttagggagctgagcttctagcagggaaggagacagtacaggaatagataaataacacacggatcccacagatcgcgggagggcgggggccgggctcgcttacagcactcctgacagctaattagcgacgcgtagtgattagaggcttccagaagaaggaagctcacgcttggagagtgcgggagggaagagggttgtagcttcaaagagtgtggtcagaataggcctccctgagatcatcatcatcatgatgttagcatcatgcttgtttagcaaagatcatcaaaccttttttttttggcttgttagaaatacacagcctattaatttacaatttttagggcagggattgtgacgctggagtgtgcatcagaggcccccagagagccggggaatcaggctgctggcagtactgggagtttctcactcagaatctgcgtctctaacaagtttccagttggtatttgcgctgctggc

SEQ ID NO: 18643 - DNA, 1050 bp, Homo sapiens
ggtgtcccagtgtgtgtagagtcaggaaaacgatgtgaaattggcccgtcccctgtggagacccctggtgtcaggtgtgtgtagagtgtgggtaaccaggaccgggaggggtgagggggttgggctgagtcctcgcatttggagatcagacgccctgggtccttacaggggttcccctacttccaagctgtgtgaggccaggcaggtgacttggcctctccgtgcctcagttttctcctctgagaaatgggacagtcacatcacgacagcctgagagagctgcggtgaagagtaaacgagcaggcaccactgtgacacccggagcagcgtctggcatgttgtaagtacgcagtaaacgcgcactcttatcactgcaatggcgggggccgcttccctgcattggtgagttgggagagttgcaagggggaatataattttgttattcttaagggcaaacaagtagcagaattagaatgagggcctgcgggtaaaggcctggagtgtggacaggacgctgagaccagcctgtttgcaaagggagagcttgtcaccaatcctgactgcctgcctgcaagccagtttcataaacggaacagaaaggagttggcggccacctccgctgggtggaggcagacatgactgctgctaaggaaggctgattgctcagagttgctgtcctccccctgttgagtctcgaccgccccagacccgcgctaatgcaccctgtggacctcactgctgacatcgttgccccagttcaggccaattcctggccttttctagaatatgtccggactatatctcataactgggcagacccctcctttgtcccctggtcaaactcctcatctcgggcataacctccttcaggaagccttccctgattgcctccaaatcagctgactccagaggctgatgcctaccctgctattgctgggagcaggcactgaaagaccatgtgtttggggcaggttctggttttcatgagggaggaatgttttgatcaggccattggggggctctctgctgtgctcaggacctggggtgccc

SEQ ID NO: 18644 - DNA, 1059 bp, Homo sapiens
catggtgcagcatggatcaaccatgaaaacgtgacgctgagtgacagaagccagtctgcagaggccacagtgtatgagtccattcgtatgggatgcccagaacaggccagtccatagggtcggaaagcagactggtgctgccaggggctgggaggaggaagaagaggagtgactgctcatgggcatggggtctcctttttggttttttttgagatggagtttagcccttgtcgcccagtctggagtgcagtggtgcgatctcggctcactgcaacctctgcctcctgggttcaagtgattctcctgcctcagactcccaagtagctgggattacaggtacctgccacgacactcggctaattttgtatttttttttttttagtagagatggggtttcaccatgttggccaggctggtctcgaactcctgacctcaggtgatccacccacctcggcctcccaaagtgctgggattacaggtgtgagccaccacacccatccagggtctctttttggggtgatgaaaaagttctggaagtagatagaggtagtggctgcacaacattgggaatgccactgaattgtacacttgaaaatgggcaattgtaggctgggcacggaggctcactcctgtaatcccagcacttcgggaggctgaagcggctggatcacgaggttaggagttcgagaccagcctgaccaacatgatgaaaccccatctctactaaaaatatacaatcagctgggcgtggcagcagccacccctgtaatcccagctactcgggaggctgaggcaggagaatcgcttgaacctgggaggcggaggttgcagtgagctgagatcacgccactgcactccagcctgggtgacgagaaactccatctcaaaaataaatacataaataaataaaataaaataaataaaagagggaaagagtgtattgatgtatttatcgagcactcggccagatggctttggtggctctcctaaaacctggctcaggcatcccagtggctgtgcactttgctacctgtcaggtttaggaatggcctcaggagt

SEQ ID NO: 18645 - DNA, 1006 bp, Homo sapiens
ggcgctgagccccatgtccccagcagatggcgccctcggcctgggaagggaagggcttggctgggaggagggctggtgatggaggaagccctccctgcctgttggcggtctctgctctctggccccgttcacttctgcacaggtgggtggaatgcctcatgctgcagagctataggcaaagtcagagggggtgctttctatgtccttggcctcagggtccccctcccagcgatgggcaaacagggactgataagcagttgagtcctgtgctagcacagtgccacagaaaagatggtcctggtagatttccttggggtttgcctccccactttacagatggggaaactgaagcccagagaggttgagtgacttgcctaaggtcacacagctgggagcagcaggccaggcctgttgtttccgccttgcggcgcagctggaagaccctcctggtggctgccagcccatgctgagcattgctttctgaactgtttgagcacctgacttgaatctccccgcttgttacaacgggtactgctgcagaaggggaaactgaggtaggaggacttcaggaaggtgtgccccaggagcctcagagctggtacgcactggaccaggaagtctggcttacagcttggccaggtcagcgatttgttcacccagcggttttctgagcaccgcctgtgtacactgcctgctgccccagtgtatattgggtgaatgaaatgaatggaatcggctcctaagtcactgagcaggttcagccaaggcagggcctcagggagcaatattaaggatgtttaatccagaaagggcccgggttcggggtgacctccccgtgatgaccatgaggggctagtagaggcaagtggccgggaagggcgtggaggatgcttcggtggcgggagacaggatggacccaccacgctgctctcagcgtgggccagggcaggggccggggaggtgtgtggggtgggacctcgctcgtggcccagcagcaggatgtcac

SEQ ID NO: 18646 - DNA, 1064 bp, Homo sapiens
tcacctccacaaagccttagagctggacatgatcttccaggctgtcagttctgaacctttactggggaggacatccgaggcctgcagaagccctgtggcttgtcccaggtcccaattagctggggacacaagaggccctcttgacagcaggcaggtgacggctcctctgagaacagcactctggatggtgacgttcacaccctccaaaccccggccaccagcagctccaagcagttccaggcacgagttaattaaccctcacagcagctctccaaaggagataattattactcatatcccctctgtaggtggctaaaccgaggcccacagggatggggtgagtgtcttaaatgccagatgagaagttaccttgcatcggagcgccgtctaacctgcctcttaattagttggggctaagaggccccagtgactttcaaggattccatttttgttattttcctctaaaaacgatatgcaatgctccagaaagagaaaaccctagaagaatgtaaaactcaagttccctcctacctggtcaccgtgggcaaaaccaaggtgcatggacgtggttttcagggtgtcagcccacttcaggttataggtggtgtccagtgatggggtgggaggatggagagcatgtgcacggggttagtgttgcttccaagcttatcattgccactcttgatttcaggagctctggaagcaaagcggaatagattcacgttatctgagcaggacacgcccaccacagcatgccagcattattttgccagaaacctcacagtccccaggtttgccacccacatgcagagccctgtgtagggtcttagatggcacagatggtgccgggtgccacagccggggttatcctgtgagttgctatgttttcttttcttttttttttttttgagacagaggctcactctgtcacccaggctgtagtgcagtggcacgatttcagcccactgcaacctctgcctcctgggttcaagtgattctcctgcctcagcctctcgagtagctgggactacaggcgtgcaccaccatgcccagttaatgtttgt

SEQ ID NO: 18647 - DNA, 1719 bp, Homo sapiens
aaggccccgcccgcacttccctgcacaggcctgccctgcctcagcagacccgggcccctgccatcttctcatcacaaggccatgtccacgtcacccccaggcccccaacctggagtgcggcagccttcaaggatccctccccatgacctccagtgagctccgttccattgggtactgatcccatcaaatgacatgtaagcagttctctttctgcaacctcgatagacactaggcctctagggggcaaggagcatgccttaaaccctccgtcacttgcttggccttctgtgtgttcattccacagctgccctgtgcagttgtgcagattacacactgcccaaggaccaaggacgcagaccaaaatccaggccacacagcacacaccatgccaggtgttctggagcaagggagcacctttttccaacatacaccgctgtttgtaataatctgtaataataactaactcttcatagagcctttgttgtcaccgagacacacaaagataggagatggccacccacgagctgtccggtagattctgagttgtttcaccttgtcatgctgaccagatggccggccagtgccatgtcctgcattctctcctgctcctcagcctcaccagctcgtgcagtcccctcgtccctgagcaggccagtgtgggagccccacccagcctcccctgagagcaagcagttggggagtgtctgccgggtccccaagcagggagcagggaagtgcccgttctcagtgtcagagccgtagcagacagacatgggagggggctgcaggcctggaataatcacgagaacagcaaagcctgattcaggcagacactgtccacacatgtgacatccagcatttcatggaatccttacagcagccctgggaggttggcactgtcattatccccattttacagaaggggaaactgaggcatgtagtgggtatgtccctcacccagggtctctcagcagagctggacaccaggctgcagatccaagctgaggtctcctgatcaccttgagcctgctcagagcttgagtaggagccaggcgtccctcctcaccctcctcctccctgtcccaagggtggcaccagcccccctgggcagcccgctctgcagaagggcgcctttgtgcccatctggcttgtgctggattttttccttcctgaatccagcagcattttctggatccttctcttccactggacctgctaccaccctcggaggggacgccgccctccccagcctcctcccccggcccccgcgtgagccctggtgtcccatggggtcgaataaagggctgtcggccctggcagggcagacttccccacagggctcagggccggcttgtgcgcagtgtgtggccaccgcctggtaaggaggctgggcctcgtccccgcccttttccgcccggccagccgcagctgctgacagagcccagctgggcccctgaccccggggagaccctccctacactgccctcaccctgtgggggttaggggtgaaggtcaggctgggggcagaggcccagaggccagaggccacctcccaggcctctccgtggggcccataacctcctggttgtctgccttcctccccatccccccgccagcacaaaacactcgtccctctcaccacaaagggcccttatttccctcctgcttttattagagccggctttgggttgaccgggtcaggctatggggacttacata

SEQ ID NO: 18648 - DNA, 1406 bp, Homo sapiens
tggctaattcgtaactttttttttttttttttgtagagatggggtctctctgtgttgcccaggctgatctggaactcctgggctcaagtgatcctcccaccttggcctcccaaagtgctgggactacaggtgtgagccaccgcacccagcctaacttgggactttaatggtcccttgctttgggcccttatttgtaaaaggaagggcgaccgtcactgctgcactgcaatccagccttttggagcacccatccaggaagccggcaccacagctctcctcggagccagtttggatcagctttgcaggctgagaaccaggaggccggcttgggaaatgtagggatgaaagctgtttcaaggctgaggggggatgtgggagcggagaggaggtgatttctgaactgcacaaggtacgaaaggcacgctagggaaggggacagcctgtgcgaacactgcccgtccctccccgtggccagtctctaaccacctcccacgcacggctcatcatgtgtgagcacggacacccaggcacaaagcggggtcaggtagtttcattaaaacaaaacaaagggccgggtgcagtggctcccgcctataatcccagcactttgggaggccgagctgggtggactgcctgagctcaggagttcaagatcagcctgggcaacatggtgaaaccccgactctgctaaaatacaaaaaaaattagccggatgtggtggtgcacacctgtaatcccagctactcgggatgctgaggcactagaatcgtttgagcccaggaggtggaggttgcagtgagccaagatcgcaccactgcactccagccggagtgacagagcaagattccttctccaaacaaacaaaaaccaaaaacaaacaaacaaaaagtgtgcagcatgaacccatttctgagcgcccttcaacttcttcctctgtgcaaacgacctgggctaacgctgactgtgcaccgattctttcagagccttggcttccctccctttcatgtcctaactccttccattcttacagagaccctgggaggaagggactgtcacttgctgcatgtaacagtcggggagactgaggcatgggccagtccacagcttgcctggagtcttgcagtctgtgagggcgggggtggggtctgaacccagggggtctgtcggcacgcccaggctgctcccccggcgcttccccggccagtgcccgatctttcctcctttgacctcactctgtgcctgctgggtgtggactgcatctttattgacttatggggcttgggaagtcccaagccttcagaacagtgtggggcaagggggattgagtggggaggttggggggtgcagtgatgccagtgaatcctgctgcccgccctctacccggccaggctggcaccctccagggt

SEQ ID NO: 18649 - DNA, 1069 bp, Homo sapiens
gccgtggaggacggcagaggggagggcagcctgctccgtgggctggtcccaaattccagaggcccatcggatgcccctggttcccagggtgcccccagcagaagagctgagacttgaatcccatggcactgatgtgggcacaaaggggcagagcctagccacggagagagggtgtgccatcctctctgccaggcagcgggctccctggacagggtgggcgtcgttagagcagaaacggtggtggcaggacccaagactgtgcagttctaaaccagctctggtgcagacagcccaggtcagcagcagcatcggaggcaacctgccctcgtggcaccacaagagagctgctggggacaggacgtgggcggagccctcggctgcctcccaccgtgggacattggggagggagggagggagggaaggaggtgccggggtgctcaccttccccgaggctttgtttccggattcttctcttccctccttggggtactccatgggcttctgcttcggtgcccctgggggtccttctccagggccccttgggctgtgtacctgggcctggtggctctgtctgtggctctcttggggccctggatacctcctgcctgcttcatttcccagatgtcttaggacctgaggtggtgcaggctctccagggacatctgtcccacctgccgatgcccacataccaccttgcagtcctggtgatggggacccactgtctgacctgtggccccagccgcgagtccttctcaccccagaccccagcgtctgtgtttcatgagggttgtgaagtccctgccttcccgggttccctccgccggcccagcactgcccagccccagccccgcaccactgtcctcatgtctggagatgtgggcggtgtccgtgcacactgctggagcagctgggccagctcgacctctgggaccagggtggcccaggctggcttggcctctctgccttgcacccccagagccctggggcaagaacaggacgctcagactctcctgctggccccctcgcccaccgcttccatcccctcccgtgtgcccagctcagagaacat

SEQ ID NO: 18650 - DNA, 1029 bp, Homo sapiens
gggccattgcgcttgctgttccttgttccaggaacactcttccccagctatctctgtggctagtgtcctcgtttccttcaggtcttttcacaaacatcctcttctcagtgtggccagcctatggaaaatgatatctctaccattgcccacccatccgttactttctccacccacccgcccttctctccatcctgttcttgtgctgtttgtccttatggcacttcctactgatggacagatgaacagtttgtttattcatactcatgttaaaatactgtgtgtctccccagccagaatgtcagcagggatttttagctgtttttcttgctgctacatcccaggcacagagcctagcacatagttggtactcagtaaatgtttactggatgaatggattgatggatgatgagcaaatggacaggtggatgagtggatgaacagtggatatgtggatgggtggatggatgactggatggacagatagatagatggtggacacatggacacgtcaatgaatggacagatggatgggtggatggatagatgcatggacagagggacaggcagtggacagatggacaagtggatgaatggatgggtggatgaacaatggataggtggatggatgcatagatggaggggcgggcgggtggatgatggatggatggatgaacaatggatgggtagatggatggatagatggaggggcgggtgggtggatgaatggatggatggatgaacaatggatgggaagatggatgcatagatggaggggcgggtgggtggatgatggatggatggatgatggatgggtggatagatgatggacagatggatgaatagtggatgggtggatggatgatggatggatggatgatgggcaggtagatggatggtggacgagtggatggatggtgggcaggtgggtggatgatggatggatggatgatgggcgggtggatgggtgatggacaggtggatggtggatgagtggatggatgggctgatgggtggatgatggatggatgg

SEQ ID NO: 18651 - DNA, 1019 bp, Homo sapiens
cattgtcggggaggaatggctaagagccttggacaagtgagtttccctgctccgtgcctcagtttcctcatttgggaaatgggaagaaagctaatgggagtgcctggctcacggggcagatgtggggattaactcagccaggacccgagcgtgtttgtgacaggccttggcaccctcagtgttcagggtgcaggctggggccagggagttatgatttgtttgcgatttctcacgctcagctctgggtggcagctcaggctgggtccacacccacctgtcactcaggacatccccaggggaggctcaggcagaggaggacaccagtgttcccctgtgcctagggcaggccgggtgcccctgtttggcgatgcgtcctcctgggcctggcggctcacgggtcagtggagggctccgaggaggaggcagcttgcctggttctcaccgtttctctcccacagctttgggcagagccctgccccaggaaaccagagtcctccggagcagaacaaggcccagatggacccctaggcggagtttggctgtggtttggggagcaggcccacccacttcttatctgagggacctttggcaaatgaatgagtcatcctgagcctctgtcctcacatctgtaagagggagccctaatagtaggtgttggtagaggtttcgtggcaacctcgtgagctgatgcttgtaagctgcttgaagagggctgggcaccgaggaagaaccaagtctgcctttttcccactcatgttgggacacatgtcctcctccatcagtgaaacagtgtcctgcaggccagagaggctgagcaatctgcctccactcacacagtagtgagcgagggggatggggcacgaaccccgacgtctggctcccgcgccgaactcaccctcggcacaccaggctgcttccctgagtgctgggaggccgaggagtttgagaccagcctgggcaacccccaggcgaaactctgtctctacaaaaaaatacaaaaattagccgggcatggtggc

SEQ ID NO: 18652 - DNA, 1095 bp, Homo sapiens
gcagccagtgactggcagctgtggggtgggaagccccttacttctggagagaggagccacccaccctccagagctcctctgggacagggctggggtcggggctgtgtctgaagtcacgcttgcatcctcacacccgcccccagtatccccgggagaccagccttagagatcacggcgtcctggtctccctgtctgcttctgagaaacctgcctgagacagcacacgcccagggccatggcctcagtctggtctatgcagacagcacttcagacgcaccactccttcactcctgcactccgcctccaccttcactcttctcttttccctgtggacaaaggggcagctggttcacctggctcctcccaggtcaagctgggaacacgaaagaaggaagccagcagagggcaagtacagacaggttcattgcagagcgtagccttggggttcagcccctcaacctgaggctgaggatctcttggagcttggggagcgtccttggggaccacattcagtagatggaaccacagggccgtaagggtgcgtccatgtgcattgcctggaaggtgaagcttgtagaaagcaaaggtttgtagaaggcgaaggtttgtagaaggcgaaggtttatagaaggtgaaggtttatagtagcctacagcgacttcatttccactctctctcttctagccatgtgttgaaatcagttattcgttgggaatgactaggctgtggatggctttcagtgtgcatacctggactccctctccctgagttccaaacctggctctgctcctttggagcttctgctatgtggcagatcgcctccctgtgcctcagtttccccatgtgtcaaacggggatgacggggtttcaagaatcagagtccacatcagatgcttgcctggcacacgggaatgtgtgagctgggcctgccctggcagcgacagagagctggtgaccaccagaaaccctggccctgggacggcttttgtctcttttttgttgggcaaatgggctcccagccgggcttgggcctccaccgccgggaaggcgggactgcgctcgggtactgggctccggcctcccgaagtccttggt

SEQ ID NO: 18653 - DNA, 1060 bp, Homo sapiens
ggcaggggacagagagacctgagggcgtggctttagacgggtggtcgcagaggcctaaggaggtggcatttggcagagagttccagaccaagcgaagagcatatgcaagggccccggggcagccagtgcctggcatgcttaccctcaccatgaaggcggggaccgtggctccctgtcctcgtgatctctccagtgcgtggcacagtgcacataataggtgctcagtaaacttttgttgagtgaatgtgagctttttagtcagctgttgctgggagacatgaccaggggagggcaaatgtaaagaggaaataagattcttttttttttttttttttttccgagatggagtttcactcttgttgcccaggctagagtgcaatggcatgatctcggctcactgcaacctctgcctcctgggttcaagtgattctcctgcctcagcctcccaagtagctgggattacaggcatgtgccaccaagcccggctaattgtgttttgtatttttagtagagacggggttactccatgttggtcgggctggtctcgaactctcgacctcaggtgatccacccgcctcagcctcccaaagtgctgggattacaggcgtgagccaccggaaataagattcttacaagcacggagggtgcgcgtcttcccgagtttcctgggtcaagagctgatgttccaagcaggttcttactgcattccagaagcttcattctctctccaggacccagggtggagtcaaccatctggcctctctgggcagaactctttgtgctgggagagttctgaaggtcactggagcatcggaggagagccttggctctcctgccgcctgtttcacaactgattagatcagccctaaatgccttctctaaaagatacaattctgaccaggcacggtggctcctgcctgtaatcccagctctttgggaggctgaggcaggaggatcgcttgagcccaggagttgtagatcaacctgggcaagataatgagaccacatctctacaaaaaattttaaaattagctgggcgtggtggtgcacacctgtagtc

SEQ ID NO: 18654 - DNA, 1036 bp, Homo sapiens
cattagatgcccctcgccaccctggacagtccaggatactctccccatctcaagattccaactcatgtctgcaaagtcccttctgccatagaaggtgacattttcatagactccggggattagatgtggacgtcttttggggctgttatgcagcctaacacactctccctggctgggctgagctggctgagcctgaggggcgtggtgtccatgctcacaattagtcatttattgagcgccgactgtgtgccaggcactgttgtaggtgctttgctgggactggtccctcagcctcacggtcattctgcaggggcaaactgggccccactgcctggctcaaccccaagggtgcattctgcgtcaccccgggtcagtcccctccttgggaacacggggctgatgacggagcccccttgagagggtggcctcagttagtaactcccgagtttagagctgggagggcagccctctaggtggtccctgcgccacccttgcggggcaggggctggatactggccggacccaggaggttctgggtgcagtttagcgttttcccaggaggtggcgcagtgaagccctggatgcacagccaaagccaagccctggggctgcccccaccctgtccctgggcactgggaatggcactcaccctagagacccagccaggctctgcccctcccctagcctctgagcaacgcaccccaggagatggccaactgaccccaccttccagtgcactgggcgtccctctgcctctgcctgcccctcaagcagctaagccatggtcctcacctctggtcactgctcaacccgtctatccccaaatacactaagatgggctctcacaagacgcagagaacacagcacggtgcaacccaggagggctccagggaggaggcgcactacttgaactgggcacccagaccctaggagggcaaaggaggcccctcaggggaaaagaacctgaaagtggatacagcaatgatggtgggcttcctcctttcccctccctcttctcttccctccctccttctct

SEQ ID NO: 18655 - DNA, 1050 bp, Homo sapiens
ctgtgtacctgtgtctgtgtgcacatgtggttctcagtgtgtatgtgtgtggtgctgtatgtgttggtgtgtgcacgcgtggccctcagtgtgtagtgtgtgtcagtgtgcatgtgcgtggttgcatgtggccctcggtgtgcagtgtgtgtcagtgtgcctctgtgtgttcacgcgtggccctcggtgtgcagtgtgtgtcattgtgcctgtgcatggtcgtgcgtggtcctcggtgtgcagtgtgtgtcagtgtgtatgtgcgtggttgtgtgtggccctcggtgtgcagtgtgtgtcagtgtgcctctgtgtggtcgcgcgtggccctcggtgtgcagtgtgtgtcattgtgtatgtgtgtggttgtgtgtggccctccgtgtgcagtgtgtgtcagtgtgcatgtctgtgtctgtgtccatgtgcatttttgtgtgcacatgtatgattgtgtgtgggtgtgtggctctcagtgtataatgtgtgtcagtgtgtgcgtgtgtgtgtgtgtgtgtgcgcgcgcgcgtgcacaggtagctcctagcgtgttgtgtggtgtgatgtacaggtctcagggtgtgtggctgccatggccaggctgagggcagtagcgtggaggcaatagctttggcagccagccaggcccatgaccctggagggggtagggggtggatgggcccagtggatgcgttcgagctgctggtttggtgagggctgtggaggagggaggcgcccacgcagtttcgggaccctcgccaacctcctcttgggctgccttctgcctcactgaggacggacagcccccatcctctgtggggtgaagacaaatgagggacgaagacagtccttcctctcgtcactcctcctggtgatggtgacattgtgccttccctttggggccgaggccatcccaattgggcacccctttgcccccgagtgtcatggtagaaaacagggctgcggccccagcgttctgggttttgatcctggcgcagccactcgctgctgtgtgacctggatgagccacctaatctctctgcactgctg

SEQ ID NO: 18656 - DNA, 1031 bp, Homo sapiens
cctactgcatgccagctctcgtgcgcatgtcaactccaccatcagccccattttataggtgaagaaacaggctcagagacgtgtgaggtttgccccaggtgtgccgggggcctggctgcagcccagcagttctgaagctggaattcccacagggaaccagaccccacactccaacttggcctcccttctgctatgtggatttctccttgggcctgagcaactgcccccaaccctcacggtcctcacccccgccaaagaaggtacagactccaggcttctctcttttcatccccagcccaaacaagctctgcacccgctgttctgcctcccctggcaagcagaacatggtgagatggccgcagagaggcccaggaaccagaccccacaggcacatctgagcctgagtttctctctccgggaaatggggatgatcgaggagctcgacctcggttagtcctggggaggtgcctgggtgcctggcacagtgcccctgcccgttaggattactgcaactgttggaaccctgcccttctgctcccggcccattagggctgggctggggtgagttcggtggctgcgcgggctggtctggccacctcctggctccttgatggcagatttgggcacagaaagagcctgtggccgggtggtgtgggcagagtgggctgggggctctgccctccctgcctgcctgccgggcgtgtggtcctggctggagacacaggaacacagccctggctctgttctcgaagtcgtgggaggcgggctgtcaccacagtggctgggagctggaggccagcccagagggagagaggacgccatgtctgtgccctcacccttcagcacaggccctgccaagccacaggtgcctctgctgcacagggagtgagagggggctttgctgggcagagagcagggggctggggctgggagatggaggtgggggctgtgaaggggaggacaggacagcaaggattgctgggaaaagaggctgtgtccgtggtgccataggcctctctgcacacccctcc

SEQ ID NO: 18657 - DNA, 1058 bp, Homo sapiens
ggaccaaggatagccccaatcccagaccttgccagatgtgtcagagggtcctgcagtgtgtgcagcaccaggcctgtacacatggtgccgactggcatcatgagggaggtttcctttactgttccttgcccctgggcctcactttcccttctcctgcaagctgggacctgtgcaggcggtggctcagcctacagaagggctgggaactcacggccaggcgtgtgggtggattgttctggatgcctcagagccctgttcttcagggaccttgatgagctccagctaatgaagcccaggctctcctgaggggacaagatgttgatggaggcgtggaggactggaaacaggtcctccagcgccaggatccaggagggaacacacaggaggggacagagcaggcctgtccgagtcttgctgggcttttctgcaccctgggggccctcaggcaagcagccaagcaggtaggagatccggccttgcatccggcctgccgcagacccagcaggttagcgtgctgtgcacacctgccccgcccgccctggcctcggattggctcggccagatgctttcagaaacacttcccatcataaaagtctcactggctccgccacctgccccgggccctgttgctccgccagtcaggagacaagtctgttctcgccaaggaagccctttgtgccaccctgggccgagccacatggggcttgggatgggtgcctggggcagggcacccgcagcaggtgttttggggtgggtgcctccagcctgtggctgcttgtccggggcaggaggctgggaggagaaggggagtcacatcagctgtgcgtctctggcccaggtgcaggcagggctcctctcaactgccccttgcccctgacgccatctgtgtgtgaggccagggctcccagaagagtgtggtatggcccccactattggagtcaccatgcagagggggccagacgcctggacagagactcaaagccacacagagaccgggctgggtgggacatacttgcctcccaccactacccgtggcagacagctccttctcgggggcc

SEQ ID NO: 18658 - DNA, 1022 bp, Homo sapiens
ccagccaggtcctggggagaggagggactggccagcaatgggggccaggcagcatctgaggcattctgatagagcagaacctcattaagaagctgctaggggccggggcagtggctcatgcctgttatcccagcactttgggaggccaaggcgggtggatcacttgaggtcaggagatcgagaccatcctggccaacatggtgaaaccccgtctctactaaaaatacaaaaattagctgggtgtggtggcaggcacctgtaatcccagccactcgggaggctgaagcaggagaatcacttgaacccgggcgggggaggttgcggtgagccgagattgcaccactgcactccagcctgggtgacagagcgagactctgtctccaaaaaaaaaaaaaaaaaaaaagtggctgctagggtcataccaggggctgagggtgggggtcacattattttcatctggtttgcatgcaggtggtgcaaaccaggatgtgcaaagcatcttcccgtggccatgtctctgcttctgtcctccatccctcccaccatttgtcactgtcctagaaagcctcaagcagagagaacctcctgctctcacggctgagcccccaaggtcttctcttccatatacagaagaataatcctaacaaatcactgaagcccttcctgcttggagccctttacctgaactaacccattgaatccccacgagcctgcaaggcaggtgctagtattgcccccatttaatagataagcaaactgaggcccagagaggggcgtcacttgcaaacagctgcatggcaggtgggcccacgcttagcggatctgggcaatgaggccttacacagaccccgtggagtcaggctcttcgtctcgttttaccccaggggaaagtgaggcatgactgaagcttgagaagggacagagaaagcgaagaaagcacaagcagctgacctcggggcctaggctgggattcagctgcagatcaggcctagaaagtacagattatttctttatctatttat

SEQ ID NO: 18659 - DNA, 1050 bp, Homo sapiens
ctctgacaggcagagctgtctccttaagcaaaggttattggactgcgaatgttatgacattacatttttgtgtctgcactttggagatgcgtcatgctggcagaatgacaagctctgggcagggctgagcagaggggccgggcaacgcggggaactgatagcggtccactttattgcagtgccttcacggctccgccgctgcgccctgggagttgacaggacaaggcgccagcctccttggctggggctgcttagctggtttgatgctgtcagctcccaggcaccgcccccccaccgccccagctggcagccccagcacctccaagagagggctaggatggagcaacaggatggagcaaggcagacccacagcagcaatgagaatggtcccagcagcccacgtggcacagagctgtgacattccaggtagtgtgcaaacacattcgggcattaatgcatgtcccacgcacccacccgaagaagcaggcatttttatcccttttgtcaattgagtaaactgaggcacagagtggtagtgacttgtgatatctgtcccctgcggctgccgtaacaaagtaccacaaactggggagctgaaagatttcttctcccacagttctggaggccagaagtccaaaatcaaggggttggcagggccacactctgcctggcaggtccagccggcgatgcttcctgcctcttccagtctctggtgacttcagcattccttggcttgcggcagcatcactccagtgtctgcggtcatcacgtggccgcctttcctctgtgtctatgtcccaattcccctctttttataaggacgcaggtcgtaatttaatatgcccacattttaacttgatgacatctgcaaagaccctgtttccaagcaagacctcatttacaggttccgggtggacatgaattgggggtggggacattattcaagctgacatgtgtgcccaaggtcactggagtagatgcttgtggggcctcactggcatgtcccccaccaatctccgagctcacctgcagatggctctatagaaccct

SEQ ID NO: 18660 - DNA, 1088 bp, Homo sapiens
cagaacagctggcacacacagcattgattctgcacaggcggccgactccttcaggactacagcaggcctggcagagagcgtcaccagatccagaaagaaaaacacaggacacccagtgaaacttaaatttcagataaacaacaaataccttttagtataagtatgtctcatgcaatatttgggctatacttatgctcttaaaacatccattgcttcgggctggggaggggatggagagtgattgctaatggttatggggtttctccctggagtggtgaacatattctgaaattgactgtggtgagtagctgcccacttttgtgagtattctaaagcccatcaaactgtgtgctttaaatgggatcatatgggatgcaggttatgtataataaagctgttatattgaaaaagtatttgttgtttatctgaaatttaagtttcactgggagtcctatattttatcaggcaatcctatttgggggtaggttctcccactatctctgtatcacagatgaggaaactgagagccagccgcatatcacagccaggacttgtggaagggactggaacccagaagtccagcctccttgacccttagggagcgttgcctcagtgaagatggagcctgaggctggagaggcggctggggccaggttggctgaccccgaatgtgcggggatgccctccgaggtctctccatccacccagaggcagagtgcatgcctctgagcaaggggtcccaatgtggctgaggttcctctcatcctctccctgcctctttgggctcggcctcctccctcacataaggaccgcaggctggtcagagggaggaggatcagatagaggccctgtcaaggctgctggtgcagggcctgcagtcgttgcttctcacaggcagctgcctcttggaggtcggaagagaaactgcgctgggcacggtggtgcgcacttgtaatcccagcactttgggaggctgaagtgggaagatcacttgaggccagcaggtcaagactgcaatgaactgtgattacgccacttcactccagcctgggcaacatagcaagaccctgtctcaagaaaagggaggc

SEQ ID NO: 18661 - DNA, 1008 bp, Homo sapiens
tcgttctgttcccaagtttgagaaccactggcccagagagggtagcatcctgtgccgtttgtcccggaacgcagcttacggcacactctgggtgccctgcgatgtctgggctgtgtccataggaaccttgcggcctggcgggaggtgagataagctggtgggtactgaagccagagcggcctgtccaccgggccaccgtgttttccatcctgaacccaagacgctgagaagctcgggggagaggagtcgccagtgggatgtctggttggagaagctgccaggaagggggactcgagagagcctgggaggaggaggtttgcagaagggagcgcacagcctcaagaacggggctgagcgaatagggaaggtcatggtggtttctctgagggccggggccatgctgagtcccaaagctgaggctggagatgggagagtggacccagagagagtggcctgcaagccatgtggagccggggctgggacatcacagggcggcactttgaagagagcttgtcgggagcgcggcgctgggcctgccagttacctctggctgcctaacagattgccccaaggccaggcatggtggctcacacctgtaatcctagcatttcaggaggctgaggcgggaggttcacttgagcccaggagttcaagaccagcctggacaacatagtgaaaccctgtctctacaaaaaatacaaaagttatccgggtgtggctcctgtagtcccagttacttgggaggctggggcgggaggatcacctgagccaggggagatggggcctgcagtgagctttgattgtgccactgcatgtcagcctaggtgacagtgaaagaccctgactcaaaaaaaaaaaaaattgccccaaaacttcgtggctccagacgccatttattatcccacagcatgtgcgggtcagggatccggatccagcttagccgggcctcctgggtatcagccttccccagctgaaggcttggctggggaaggatctactcccaagccc

SEQ ID NO: 18662 - DNA, 1068 bp, Homo sapiens
tagacattagtatgactttattctagttatttatttatttcttgagatggagtcttgctctgtcacccaggctgcagtgcaatgttgcgatcttggctcactgaaacctctgcctcctgggttcaagcaattctcctgcctcagcctcctgaataactgggattacaggcacctgccaccatgcctgactaattttttgtatttttagtagagacggggtttcaccatgttggcaaggctggtcttgaactcctgacctcaggcgatccacctgcctcggcctcccaaagtgctgggatcacaggcatgagccaccgtgcccagcctgattttatttttatttatttacttttgatacagggtctcactctgttgcctaggctagagtgcagtggtccaatcatagctcacagcagcctctacctcctggggtcaagctatcctcttgcctcagcctcctgactagctgggaccttgggtgtgcaccaccatgctaatttttgtattttctgtagagacagggtctccctatgttgcccagactggtcttgaacccccgtactcaaacgattctcccaccttggcctctcagagtacttggattacaggtgtgagccactgtgtctggccaggacttaattttatatttgtgtaccttgttttctcatcttttgggtccccctggggagggagtgtgtcctcttcatgtctacagaggacctacagcagacgaagtgctaaataggacatgatgatgaatgaatgaatgaacaaatgaatgactatataatgactgttactggtggcttccaggtgctgagggcgtcctggggtttgctacggcaaacttgccatcctagagatgcagagctggcaaaccgggtcctcaccctgagatccctggctctgctccccgaaggcaaggcagatggccgccttctcagcccccgtcccctaccagccagggccccgagcaaacccttctacagcagctggcctctgctgaccccgtgatcgggatctgctctgtttggaagaagattcattccctgtacagttgacggcccc

SEQ ID NO: 18663 - DNA, 1034 bp, Homo sapiens
gggtgcagtggcacgatcatggtcgctgcagcctcaacctcccaggctcaagtcatcctcccatctcagcctcctgggtggctgggagtacaggcacaagccaccatgcccggctaatttttttgtatttttttgtagagcaggtctcaccatgttgcccaggctggtctcaaacttatgggctcaatcggtcccccggccttggcctcccaaaattacaaattatagttcaaattacaggtgtgagccaccatgcccagcagccctgtggatatttgggtgagataattttgggtggtgggggccatcctgtgcactgttgggtgtttgccacattcccagcctcaaccccactagatgccagtagcactcactccccgagttgtgacaaccaaaacatcttttgatattgccagatgtccccctgggggcaacatcacccccggctgaccacctgcacagcctgtcaggccgctagtctgctggaagacccgagctggaagaagatccttggcctctgtgttctccctgcagcctggagagggtcagagcacacggtttcggactccctctggctctaagtgcctgtggttttagaagggccgcccaggtgtgtgtgcagcatagcggtaggaagctcacctctaccactgcctccagagtgtctgcatcagcgggttaggtggctctgttgccccatgggtggcccaggccgctttggctgccagatgtccctgggtatggaaggctggggcccaaggccagtgggagaggagggggcgctgggcccaggctattcccaaggctagagcagaggatctcagtgtcccagggcatcagcatccgtcgcaggacgtgttacagtcctgaatgctgggctgcacccacagcatttctgattccatgggtctgaggcagggctgaaggctgcatttcttttttctttttcttttgagatggagtctcactctgtcggccgggctggagggcaggggctcgatctcggctcactgcaacctccgcctcccgagttc

SEQ ID NO: 18664 - DNA, 1047 bp, Homo sapiens
caggctgggctggactggactgggctgggggccccgggccactcacccaggactccggtcggccctccctgggcgccctggggcggggggttgtcccagcagccacttgcatccctggctgtccctgcattgtcccagctgcctgttctgtaccatctcagttaggggccagccacgatagaagctgcttgaggcatttcaacagagaggatttgactcttggcactgctgagcaggtgctggaggacccagaaggcaggaggggatgcacgggtgatgtgaggtggtgacagcaggaagcagccccacccccagggccaagggaaagggtggagttgctggacccagaggcttggtggaggatggatctgggactgaccttggaggcaggtgtgctgccgggctggagctgcgagtgtcaggggaagggaagtcgcccgtgatgctcatgagacaaaacccatcttgtggtggcaaaaaggggctggtctcctcctagcgggatttggagcggagccacaccgatgcacgctttggcggagactgagccgcagggaagaggcgcagtaaaggatgttgtcacccaaacatggccaccccacccaccctccaaggcaagcctgccctgcccacccagaaagtcatgcagccccgcttacccatcgcactgagcagtcttatctcctgaccacttaccactaggaagaagcaattttgttcccattttacaggagactgaggctgagagacgaagtaacttttactttggttaaaaatccatggcaagtaaaaggcaaggaagaatctgaacatcctagactgagacctcacaatatcatccctttcttttagatggggaaactaaggcatggagcggtggagtttcctgcccacagttgttcagcttgtcagtggcgaggccgggattcaaactttagacagtcatgctctggaatccacacttttaaccaccactctctaagaatgaatggaaaatggatggatggatggatggatggatggatggatggatggatggatgggtag

SEQ ID NO: 18665 - DNA, 1096 bp, Homo sapiens
catatatcctgttactatttcagcacatggacaatattaaaaaatatcagtgagatattccatatccttatttttgtcctaaatcttcaaaagccagtgtgaatttgaacctagagcacattacagttggacccagccacatttcaagtgctccatggccatgcgtggcccgtggctgctgtattggacaggacctgctgcattggacaggacccagatagaccccttgttcaaggggcttcggtgctgggaactggtgcatctcgcccacccttgtctctttgagcctctccagatcccaggcaggagggagagcaggggctggcccctcattagcagggcaggctgagggcccgagacaaggtccagccccggccctgggctcctgacctgggcttcctgcaccacccaggattccctcgtgccttggtgagagctgtgaggggcaacgatgggcagaggcaggtaggtgtcaggcatggcatggctctaacttcggagccgaccgtctggcttcagagctcagctctgccacctgctggccctgtaacgctgtgtaagtgattgaaccttaccaagcctcagcttgcttagctgtaaaatggggcgataatcgcccctgcctcacggggtgctgaggcagtgacgtagcgcttggaaccagcactgctagcagtttattcccctgcctcactaagacaaggtgttttgggtccctgtggggtttctggagtgggcaggtgagtgaggctgcaggccagcccctgagggcggtcctctgatggggacacctggctgaaaggtaagccctcccctgaactggactgtccacagccccagaagatgaatttcactgttggctcctgtttgaattcacctcccaccccccattctagttaccaggggtccagtgggtgggagcgggctgggggatccttggcagttaggggaaaatcgattctgcttccagtagacaaacgcctggggggtccctggtgttgacagcagaccagtaaactgtctttgtcactggccggtgagctgtggccaccgtcctgggcagctggagtgagcagtaacatttgtaaggtactcc

SEQ ID NO: 18666 - DNA, 1030 bp, Homo sapiens
taatcttcataagaaccccaaagaaacatctcttatgcccattttacaggcaaaggaactgaggcacagagaggttaagtcacctgggtccagttaccagattataaaagtagagttgtgatttgacttcaatcctttactttcccacaaattactttccctgccctcggccagccttagagagagaagcaggagtgcacaccactggccgtgatccctggccacccccagggacctctgctgcccactcactgtagcgtcctgacaactctgggccctgctgtttggcattggtgtctgtatctctgaccagatgaaggctgtgtagatggatggatgaagagaaggatcctggatggatggatggatggatggatggatggatggatggatggagagatgattgggtgaatgttgaatggatagatacttgcatgggattggatgagcagaaggatagatgggccagtggatgttggatagatggtggatggagggtcagatggatcaatggatgctggatggatggatgctggatagatggatgttggatagatggatggattttggatgggtagagaatggatgaatggatggtggatagatgttggttgtacagatggatggaagtggtttggatggatggatggatgttggttagatgactagatggaaggatggaaatctctggctctgggaggggaagcaagagccataattcctcatatccctagtggaaagggggactaactagctccagccctaggcctgctcagctgggcacaacccaaacctgagggcctgtgggcaccaatctcccacccaaaggggcagcagaaattctccagtatcaaagtctgaaggactgtggcccaactcctcaccaggaaagaaactgagactcaaagatgggaggagacttgccatggtcccaggatttatttcccacagggctggggactgcagcctcatttctgtgacatactaagggtcccaaggaacgccttacagcccctcctgccccatgagc

SEQ ID NO: 18667 - DNA, 1023 bp, Homo sapiens
gcacacacacagacacacacacaaaagtgagtgcacacatgtgcacagagattacagatccacaggcacagatgcatgcatgcacacacagacacataaactcacaggcatgcacacatatgtgtacacaggtacacacaggcatgcacacccacagatacatacatgcatgcacacaggcatacgcagagacactcaggtacacagacacacattattacatatgtgcacatgcatgcatatgcaaatatgcacagtacacagactgcacagagctccacagacatacacttgcaccttcgggtttaagccctgagcaaattgacatcccgtgtcttgttctccacagtgtctccagtgccaagcatggggctgggtgtggtaaatgtttgtcgagtcagtgaatgcatggatggctcgaaccgtgtcttgactcagcaacaccgggaccagtggggtctggaggtgaggatcaggagacagtcagccctctgctttgctggagactggggaacacctttaggacattcagagaaggacagctgcaggcacaacttgctctagcaaatcacaagcctggattgaggcctcaggattccttgtaccgtgttcctttccactgcccagagatagccagctgctggactaagcacttgccatctgggggaggcgcttccttgggttccagaagtttcacgtgcatctgagatgaacctgctgcagcaggagacggacagctggccagtcctaaacatcgtctttctcacacccaccccagaatgaggactcggctgctgatcttcagccgacactgggaggacctggggttaactttgccaagggccacaccagattccctggctggggtcagtggtcactggtcagctggatgctaacctgactgggtctcattccctgcagcttttacttttttcaggttgggtaagttctggtgctgaggccccaggaaccatcacgggggcacagcgcggcctggaatatgcccgtggaggtggggccttg

SEQ ID NO: 18668 - DNA, 1025 bp, Homo sapiens
gggagcagaagctcaggattgctgaccctggggtgtcccgcccatgccccttcccgcggcgctggctgtgcctcccccgcctccccactgcccacgttgtcacaggaggcccaggtgtgtcgccggctccgcagcagccagatcttgagccgcttttcatgcttcaggtttcccgccgcacgcaggcaggggagcgggggctgtcttttctgcacgccttgcccttgatcttccctggctttatcttccagcctgaatcgctggtggcaccccacagggcccccttgttctgagccacctgagactgggcatcggggtgccacacacctgactgccctcccccatggggccccttgctgcttgctctcctctcccgggagcagctgccacgtgcggtaattagaggctgacaccaggtgtggccgccactgctgctagcacagtggagaggcgagtgtgctgctacctgctccagcgaacccccccactctgcaaaggaggcagaccgtgaacatggggggcgggagaggctgaggaaaggtgggctggaccagccctcagagtgctcgctggcggccacgcacagcgagggggggcggccagtccccagacccctcacaggtgcaggcccagattctgttgagctaagctttgcgtggcgggcggctggcagcgatctgctgagccttccaaaggtagcagccatctgcactgtgataaaaagccctgaggatgataaatagacaagtcgcacttttattggattgcagtttgggagcagccactttgggtttggcactgtgttaacgacagatttctgcttcccttgcaaggcctggcctctcggggagcgcgccagcagcagcagccctctcctggctcgagggagagctccccccagccgccctggtgggtggctggcctgctcccattggcccctgcagccatgctgcccttgtgggatttctgctgggggcccgccttgcagctcgctggggtcaggctgatgagttcacatcccggca

SEQ ID NO: 18669 - DNA, 1050 bp, Homo sapiens
agtaactgtgtgtcttcaggcgggtgtcctaacctctctgtgctgccagtgccccatctgtgaaatgggcaaataatggcatttacctaacaggcttgggaggttccacgggtaacggctgtgcgtgtagcatttggaagagtgcctgggtgcacacacagtgagcgttctgtaaacattagctgctggtatcagcgccatgagcagcctgattggtagtatgattgcttccagagagccccgcctggccctggcatcccaccaggcagggagctgtttggcctcagctctgcgacgtcggggcctgttccccggaggacctgtatttcccaggacaacaaggcctctgctgtgtcctccactcatcagttgaacgtgggagctctgggaccagatggtctgactacctcatggtctctcagctgtgagaccttgggcggtagctgcaatgctctctgcctcggtttccccttctgtcaagcagggataaaaacagaactgaacctcatagtgctggagacgatctgctgtaagctcttggaccaacgcctggcacgtgataggcatgggtgggtgatgtccccccactcggcattgctggtggctctcctgtttgccaggagcccccggtgggcccagcgttggctctgggttctgcgatgaccgggctcatgtggaaggacggcagcaggagtggagagcagagggtagcccggggtggggctcgacccctatggggtgtgggtggctcagtagacgccatcgagcgggttctctgcctgcatggcagggagacctaccgtgtgttggagctcagccctggggaacggaggaacaagggaagagcgggcatggtggaggcggtagcctgcgtcctgttccgcttggcttcctgggtgcgttgggcaggttggctcatctgtcttaggctccgtttcctcactggagcttcccgaggttcctcccagggcccgcaaccccgctcccgctgtccccatctggccttccgttccctctgcacgggcacaccctcctcctgctctgtgtgcc

SEQ ID NO: 18670 - DNA, 1232 bp, Homo sapiens
cgctggtggtggttggtgtgtgtgctggtggttggtgcgtgcgctggtggtggttggtgtgtgtgctggtggttggtgcgtgcgctggtggtggttggtgtgtgtgctggtggttggtgcgtgcgcttgtggtggttggtgtgtgtgctggtggttggtgcgtgcgctggtggtggttggtgtgtgtgctggtggttggtgcgtgcgctggtggtggttggtgtgtgtgctggtggttggtgcgtgcgctggtggtggttggtgcgtgcgctggtggtggttggtgcctgcgctggtggttggttccttcctgttttagagcagtgcaccactgtatggatgcaccacaaatggtttgcccggtggagacactgaagcccacagtcacactgctaggctcctcataacaggccacctggcttgagaggccacccaagaggcccgtctctgcctgcctccccccctcaccgagtttctggttccagggagactgggtccatgtgctgtaagcaagaagcgtccccacccaaggtccgtgtctcggtgtcaggttagaccatggctgaagatgcatctttgtccccgccagagagacccgtgtccggcgcgaataattggattttaatgaaacgaatgggagtgctgaagccgtttgccaccctggcctgcatcggggccccgcaattaagccgattatgttttgagagtcaagctgtctgactcctcgcgtccctaatgtgatgatgtttgatggccctgccagcgcggttatttatttatttacccaaccctcatgagctgggacgtgccagtgggccccggtaattaacagcgggtgctgagcctgtgtgttcccactctggcccccacctctccctctgtctggcagctcagggcatcacctagggacagactctaacaaatgcagatggccaggccatactcacgcagacttttaagttggttgatctgggactgtggcaaggccactgggatttttcaaagctaccccggcggggcccagaagcccctggtctaaaggacgcagattctcctggaagcctggggtgctgctgcatctcaaagggcctccttcctcggaatcccctgccccagtgggcccaggctgttcccacctgtgggaggcctgtggtcttctcctccttaaggcctcactgaaattcagggaaggatttgaacccagagaccctcagcacaggtcctgggagaga

SEQ ID NO: 18671 - DNA, 1044 bp, Homo sapiens
cgcccagtccctgctgccctgaagaagaggctgggctctcagcatttctggtgggggcaggtccccagctccaggggtggctgagtgtagggatctgccagtcccaatgccaccttatttcatgtgaggatttcgtagctccaacctcatttagtcacagtttaagatgaagatagtaaatgttggttgcatggtaccataggtcaggctcataggcctttcagcccacatttatttagttttctttctttattacttgttgaggcaaagtctcactccatcacccaggctggagtgcagtggtgagaccatagctcactgcagcctccattccctgtctcagatgatcctcctacctcagcctcccagagtagctgggactacaggcacaccaccatgcccagataatttttttgcattttttgtagacacagggtctcgctatgttgcccagactggtcttgaactcttgggcttaagcaatctgccctaccaaagtacaaggattacagacatgagccactgcacccagcccatttatttcttaatttactttttttcgatgatctcgctctgttgcccagggtggagtacagtggtgtgatcatagctcactgcagccttgaactcctggggccccaatgatcttcccgcctcagcctcccgagcagctgggactgcagacacacactgtcgtgcctggctaagcccacatttgttaagtgcccacttgtggctggcacctgtggtggcccctcatgggggaaatctgatgagtgtttacaccttaaggcaccgtaagaccgttgaggtttggggccagatacttctttgtcctgggagctgtcctgtgctttgtaggttggccttgtcctctgctcacgagataccagtaatactggttgtcccagtgtgacaaccagacacctgcccagacattgccaggtgtctcctgggggatctcagaccatccaaatgtccctgttgagaaatccttgcttaaggtgtgtgtatgtttcctggggctgccatgataaatgacca

SEQ ID NO: 18672 - DNA, 1647 bp, Homo sapiens
caggcggatctcctgaggtcgggagttcaagaccagcctgaccaacatggagaaaccccgtctctactaaaaattcaaaattagccgggcgtggtggcacatgcctgtcatcccagctacttgggaggctgaggcaggagaatcgcttgaacccgggaggcggaggtggaggtggagaatcgcttgaacccgggaggtagaggttgtggtaagccgagatcatgccattgcactctagcctgggcaacgagagtgagactccgtctcaaaaaaaaaaaaaaaaaaagccagctgtggtggtacacatctgtagtcccagctacttgggagctcctcgcttgagctcaggagttcaaaaccagcctgcgcaatataagtgagaccttgtctctacaaaaagaaaaaaaaaattagcttgacatggtagtggttgcctgtagtcccagctaccttgggaggctgaggtgggaggatcgcttgggcccaggagtttgaggctacagtcacaacattgcactcccgcctgggcgataaagtaagactctgtctcaaacaaaaaagtcagtgtattcgttccctaaagctgccattaagaacttaccccgaacagaggggcttataacaacagaagcatattctctcccagttctggaggccacaagtctgaagtcaaggcatcagcagggccgtgctccctgtgcaggctctaggggaatagtttccctgcgcctcccaacttctggtggcttctggtggctcctggtgacctttggcttgtggccgcttcactacagtctcttcctctggctttgagtgtcttcttgtaaggaccccagtcatgttggacttggggcccaccctattccaaaatgaccttatccttagtaactaataacatctgcaaagatcccatttccaaataaggtcacctttttttttttttttccaagacagggtctcactctgttgcccaggctggagttcagtggtgcaatcccagctcactgcagcctccacttccaggcatgccccaccacgcccagctaattttttgtatttttgtagagagagggttttgccatgttgcccaaactggtctcaaactcctggactcaagcaaccctccctccttggcctcccaaagtgctgggactgcaggtatgagcaactacacctggccccaaataaggtcacattctgagattctgggtggatataaatttggggggaactctattaaatctagtgcagactcaggagctagaaggggctttacagctcaccaagtgtgaccccctgttcttctgatgaggaagccaagcccagaagggcgaggtgcctctgtggcagcccccacacagaaaggaggtgccgggccctgtcccctgcctctgccggtgcaggctttctgcatcggactcctgctgcttggaaacaggtgggctgtggagaggtcaaccactgggcacaggggcagagccctgctgggtccggcccggcccaggagtttctaggtcaggctggtagccttcctatgggctatgatcatgctgggctgtttccagcactaaattatttaacgtgtggttattctagtgttctttgtccttcgggaggaggggagaaagggagagaaaagctcaggat

SEQ ID NO: 18673 - DNA, 1979 bp, Homo sapiens
tgggaaaggccccatgaggagaccacactgagcttgtatttgaggaaagacagtggcaggaaaccctgttgacattgaggggtgccccgggcagagggcacggccagtgccaaggccctgaggtctgagctcacccagaccattggtagaacagcaggaggccagagtgggtgggagccactgacgggattaagtgagacgctgaagccaggatttccattccccgtgactttctccagcatccaggggtcaccacacgggtgtctcacggagggtcagctgccaaaatgacctggtggagaggcagcccccaggagggaagggtgtgggcaggtgcagtccttcctgccctaactccccagcctccacctgccctcagctgccgctcctcctcctcctcctcacaaatcatgaccacctagtgaaggacctcggccttgagagaactctggggcctcttgctctgagccaggtcagagcctccacaaaattacagctgtgagacacggcgaggggagcggggcctctggccctgctggtaattacggcccacggagctctgattgccgcagtccaattaattaaacaccgcagcgacccaaattatgatctcttgccttgtaccaagcagtatttttaaccttaactgtcggggctgaacttaaatttcctatctggacagaagtgtcacccgagggagaaaaaggcagtgtcgaagcaaacctcgccgatgacagaccctgtaattagaaactgtagtgtccccgagactggtctttaaaactgtcagaagccaagcggccgtcatttgatacaagactatcatcacccgtgaacccattagctgcaggtaaataacatattatgccagggacggaaagcagccaggctggggaattcgccggcgcttaattaggaccggcagtgcggaagatagatggtcatcctttttgctcccttcattaggagggagggtcaggtgtggcggtggtcaccggagcccgggctgccgaccctgcagaaaagcgccatcctccgcccgccctctgcctcccacggtgctgcccgcacctctcttccaggcctgtgtttactgctgatccctaccagctggtagtgttctgcaggagtccatgtgtgaagagaggttgcgtggaacaggtaccccgctcagcagagggaatcttggtgaagtgggctgaggagggtgggtgtggaccgtccctgagggccacccccaaagcccacgatgtaagatgggcacttgaaggtttgcaaagcctattgtgagcaggtgggtttggactcgtgctgcgggccacacactttccccttagaggcagaattgtggagccctgatctggaaagatcttttgagacccagaggtctggctttccaaagctgggtgtgaggacagctgcagcccgcagagcggtgacaggggcacacacgtgtgtgtcttctgactcaccagccacctgatggctattttaaggtgtttccaggtagcatacggttagtgtgaagccgacgagtctttggggtctgggctcagggacaattgggttaaatagtgagtgattgccacatagttagaattgggaaataaagagatgaaagaaaacaatttttaaacacaaataagaaatttaaggaaaaaaatggcaagtgagccaatttagataaatattaagtaaatttatttgtcgggatgtctggggctgcaggttacagaaaacgttgactcaaattggcttaacccatctgggaatttttaatatcccagaacaagggggtacagagctagggtggatggggggtgctccaggccggtggctctggccttggctctgcccctctatgtgagcattgtccttggccttgcttgttggtgcatgaataatttataggaagatgaaggtctgaaaggaagttatgacgatgaagtcgctgcatcgagagttccttctgttcccaa

SEQ ID NO: 18674 - DNA, 1005 bp, Homo sapiens
gttggccaggctggtctgcaactcctgacctcaggtgatccacccgcttcggcctcccaaagtgctgggattacaggcaggagccaccacgcccggcctccctcacttatttttcggaacaggtgatgttccagagtgacatacgcaggtagcttctacctagcccctgctctgtttccacaccaccaggggcgagaggtgagttgggacaggatggaggagaagccagcagctccaggaggagcacacgccatggagggtagggagccaggaggggctgcctgcatgggtgagaggtggttgagcttcagcctgggcctccagccgtccaccccctcagctgtggcctggatgggtgtcagggcagggcccgcggcctctaaaacatcctcggggaggtgcctcgtggacacgtggcaatagttacccagatacagcctcggaggggaggctgctgcttgtgctcagtatgctggtggagactggtgtgctggtctgtttttctgtagagactgaaattagcaggaagctaatcacgctttgtcttttacctgaactggggtccttgaacttcacatccaggagaaaggttcgtaactgtgtgcccagcctggtgtcaggtcctgggggatgtacaaacgtgtgtgtcagggtctttccccctcagcgtatgtgcactgggcaggcacacatggttcgttggacaacagcgctgctggtcactggcgactggctggctgggtcacagtggatatgtctggtagggctgggcaaaggtgggaacagcagggagagggacttgaaccaggacctgaggaagaggagggatccaggtggcctctgtagagaagaaacgctcacctggtgaggggcgagacacggacaaaggctggaaggccgggcagagcggggttatcgtgtgacggagaaagtggcctgcccacctgatgggcgtgtgggtatgtgtgggtgcacgtggacgcaagggggcaggaagggttggat

SEQ ID NO: 18675 - DNA, 1494 bp, Homo sapiens
caaccgactcacccccgcgtttctcgtgagagtgattggatccagccagtggtgctgttctgagaactgcctgtgtctccggccttagctcatctgtggctcacaaagtggggataatttgcatcctactgatggggaaactgagtcacctggcggtgacatctcttgccccaggttcacagcaggccggctccgagtccgtgagtgtgagggcgtgagtgggtgctcgtgtgggtgtctgtgatggttgcgcagagtgttggagtttactgtgtgtatgtgtgttgtgctgtgtggtgtaaatgggtgtgtgcatgtgttgggtgtgaatgtgtgttggatatatgtataagtgtcaggagtgagtatgttgtgtatgggtgtgtgttgtgtgtgactttgttgtgtgcatggctgtgtgttgtatgtgtgactttgtgtttgtgtatgtatgttgtatgtgcatgtgactctgcatgacctgtgtgggtgtatgttgtgtgtatgattgtgcattgtgtatgaatgtgactatgtgggcacgtgttgtgtgtatgcgtgtgtgtcttttgtgtgctgtgtggctatgtgtgcatgtgactgtgttgtgtgtggcctgtgtgtgttgtgtgcgtgtggttgtggttgtgtgtggcctgtgtgtgtgtggctgtgagacctgtgtgtgttgtgtgtatgtggctgtggttgtgtctgccctgtgtgtgtgcacgtgtgcctgtggctgtgtgtcccctgtgtgttgtgtgcgtgtgactgtgttgtgtgtgccctgtgtgtgtgagacctctgtgtgttgtatgcgtgtgcctgtggttgtgcgtgccctgtgtgtgcgtgcgtgcatggggcatcctgcctgtccagcagagctccctctcccactttcgttaaaccccatctccatcctccatgctcaggaaggtgctgggtaaatacattgccatctggctgatggaacagcgtcctggttgggaggagttggccacactccccagatcagggagagtctccagggactgtggaaggagccagggctggggccaggaaggaagcagggctaaggaacccctgggagccgcctcccactccactcctggccccagccgtgggggctggagctgatgcagttccagggggctgagggacagagggggtccctcctcgtgcctgcctccacccccaaaccttccctgggttccagtgtcactgcaggcggcctccccgaacactgggagacactgagagtcttagctgcctggcctggtagctcagtctaggtgtcacgttttccccaggagaggggctggccctcaggcgcagcggtctggttcagagccagcaacaccacggggctcttgcctggagggcagtgctgcgggaggcggggtcaacaggcccaggctgagcagaggtgggagggcgcaggagggggcagcttactccctcggtttctggcccactgaggaacgc

SEQ ID NO: 18676 - DNA, 1023 bp, Homo sapiens
tccgtggcaagcgagcagcggcccaggagacaggggcagagtctctgggttgcagctggtggaaggcctcagcaggcctcagcctgcagccatgttttcttagctcctacacagtattttatttatttttttaagatgtattgccaatatttacaattaaaaacaaagaaatttcttccccacatttaaaccccagagttccagcttctctttaaaactcctggtaccctgggtctgtgctcccccttggcacctgttgggggcagctgagcagcccctgctatgccgagagggcaggcaccctcctatttgctctagccccccacccccactacggggccccttttccttgcctaactggccctcccagcacgtgagtttctaagccctggctttaggtgtccctggctggaatatggaggcctgtttgggggtaggctaggggagggtaggtggagacggaacagggaggcttccggaacctcaccgattagactgtctagctagaggaggtttgccagaaaggctgtcttcctgattactgggaaacaggacccagaatgctaggcagctgggagccacgaaacacctctgtcctttgccagcaggaccagccgtggcctgtagggcaccttgctgcacattagaaaaggggttcctcctgtgtgtggacaggcactggcaagatgagtgaaaggtcagctagacttcagcctgctgttcccctttgcccagccccttgtgcagtgcacaacctgcccgcatgtacccagcgttcctgccctgattggaaccagctcttgaagcctggtaggaaatggcaggactgtctggaaatccgtgagggtagcgcctgccgtcctgcctcctccggcccccgatttccagctcagccgtctgccttggctccctgaagcctgtggaaccatttaaaaagctcctaacgatattgatcaatctctctaaaatggattatcctgtttgcctcccagcctgactggatgccctgggtaagatcagaaa

SEQ ID NO: 18677 - DNA, 1042 bp, Homo sapiens
ttcgcttctgtgcctgggatcagagtgggcctgaggtcctgtttctgagttgtcacataagaggcaaagccacggggcacggtgaagggctgtctggaggacagagcggcagggatggtgttgatgagcagtacagggggaaggggccctgcatggcacagaacattccacatgcgtgtactctgtcaggggccacgtccctgcctcgctgcttgtccttggtgtgaccttgggctgactttctccatctgcagaaggggagagcagtctccctccccagcactgggaacgggctgagcatgagggaaggctgtctgggcatcaggggagttgtgaagtttggagatgtgtggttttcaaaatgcatccttgccctcggggtagagaaggcagtataaagggtgggaggcccagaagacatcagtcatttcagggttttattagggcaggcctctgccttcagctgccctgccccacccccaccccatccggttttgaccttctgggttggaggagggggagcccgctctgcgtgtgattgtgtgtgtgcatgttggaatttgtagagtcagggctgggatgcggggagggtgtgaacccacatttggatcagcaggcgaaggcggggagcaggctgcacagggcagctttctctttggaaacccgttctgtttcttaaatgtcagagtgagcagatggtgtgtctgagttttattaatcatgggcttaccgagctggagggcctgggggatcatttcgtccaagtgtcctacagaggaggagactgaaggccagagccacactgcacctgccacaggggcagaaccgtgctgggacccagcatcctctcccacacccataagcctccgctgtgcagaacttaacaggtgtgtctcgctctgcccaggcgcagcaagcctacctcccaatgaagagctgaagcggagatgcttctgggttgctccaccccacaaacaaccggaaaggctgtctttgggacacatgggttgggactgtgactgctaactaagagtgctctggc

SEQ ID NO: 18678 - DNA, 1032 bp, Homo sapiens
ccaacagctcttgccaggcccccattggctctgcacaatgcagaatgtggacaaccagggctgtctgagattaccaatggactccctccaaaagtggcccgtctgcgtcccaggaggcgttccgaggacaggcagagggtcccttcacagggatgagctatgtggcctgggcagtccccaacacagtcgctgtctgatttctctggcatctccgtagtcataggaaggaaggccttttgtcatattgctgcctctatcttgtaaaaccattattttaaagagttcccaaatactgagcttgctggcagcttgctccaggggcagccccaaaatggaggtcggacacacagttctgcatgtagactgcagatgcggtgttcttgcccttcctgttttttgtttgttttgcttttaattaagaagggtttctgggtaaagcgtctttgccagctcctaccacagagagatgagagagttgaaaatacagggcctggcttccgacttctctgagttccagtctgagcattgcttcttactggctgtgtgaccttgggcaagtcacttcacttttctagggcttttcagtttcctcatctgaaaaatggagataataatagacttgctcttgttgtgaagatgtaacaagataatgtacttaaagcatgtagcacagtattcggcagaaagtcagcatccggaaaggagacctagagacctatgggtatgtgttgttagtttgtttttttggtttgtttgtttgtttgtttgtttgtttttggagacagagtctcactgtcgcccaggctggagtacagtggcgtgatctcggctcactgcaagctccgcctcccgggttcacgccattcttctgtctcagcctcccgagtagctgggactacaggcgcccgccaccacactcggctaattgttttttgtatttttagtagagacggggtttcactgtgttagccaggatggtctcgatctcctgacctcgtgatctgcccacctcggcctcccaaagtgctggga

SEQ ID NO: 18679 - DNA, 1067 bp, Homo sapiens
ctgtccatgaaatggggaagtgagttgggcgtgggggcacaaaccaccaagtggcagtttcatgaaggaaggagtggtttccattgtcaagtggtattggatgtggggaccaggtggaccctggaggacatcagtactagtgtctagtgatgcatacgtagaacacatagcacacacacacacgtacaacacataccacacaccatacacacaaccacacccccccacaccccacataccacacacacaccacacacaacgcacacacacacaccacataccacacacaacacaccacacacacactgaatactacacacacaccacatactacacacacaacacacacagcacgcacacaccacataccacacgtacaaaacacaccacaccacacacaaccacacacacaccaacacaccacatacccccacacacaacacacaccacataccacacaacacaccacacacaccacatacccctccacacacaacacacaatcacacaccacacacaccacatacccccacacacaaacacaccacacacactacacaccacacacacacagcacatacaacacacagcacataccacacacacaacacacatcacacacaccacatgcacacaaccacataccacacacaccacacacacaccgcacacacatacacgtgcacacaacacacaacacgacatacacacacacaccaggctgtgtgtgagcacagtgtgccttgccttcttttccagagcaggttaaatgatgtgcctgggatgggctgcttagaacccagcaggggctgctccggaacccagttctcctccctcggtttccgagggctcccccaaccctaggggcccctgctgctccaggacctcatccgggaaaggggagccaaggggtcattgtgggctttctggaagaggtgtggggccttgtctattacctaaaggaaggcccactttggagaacctgcagatgatcaagtcagggcattgcaagagaggaatcacacatgcagagggccggcagccctctgtcgcccagactggagtgc

SEQ ID NO: 18680 - DNA, 1033 bp, Homo sapiens
tgaattttcattatattttggcatttggtatgctgcctcgtttctgttttttttttttttttccccttcctgttttttaatgtgtctgacagctgtctttgggagcatttggttttgaaggtgctcctggtgttagagcagtgacgggggagtattacctggaagaggtttcttatcctgggccctgcttaacacattctgtgccaggccagaggcccacaggagcaaggccaggaataccggtgccctttgatttatctgatctctctctgggtaatagtatggaattagacatttaaccctggagctaaggttgtctgttaagaggccagcttttacaatgcaatttatttttatggtgcgtccttaatacacaatattaccaaatgcttcggagtctcttggattccagagggaaaggcacatttaaagggacatggtctccgatgtaactggaatttgaaaataaatgggttttccagactctacgaggaaatagtttatctcttaacgaaggactttgaaatgagcatagaggtgggcttgcttttgaaaagcgaagggaagccaaacgctgccccttccacacttttggagcctagacgtccttattggtctctgctagaggcctggggtagatgctggagctcggatcacctgacatctgggccgcatgtcttcctctagcaagtcccgaattgactgtctgctctcccgggagaagctgtccccagaccctttcttcctaactaagccctgccaagagcaggggtatgttatgggtattacggggcattttttgaagggtcacctattcttgatgtagagttttagaaacgcttttctttcccaagtgtccaggagggactaaaagcagttgtgtcctggggttgcaaatctgggttccaggcttgcttggggactgatgccctggtgtgtccttggggatcatggtgcttctgtcttgctttgccactgcaaagcctgtggattagacacggggaccctgggtcatcactgggctctcacagct

SEQ ID NO: 18681 - DNA, 1662 bp, Homo sapiens
tgtcacggtaatgggatgcgccagagatggccagggaagtccgaagacctcgtcttccaaggccaaatccagcgtatggggcaggagctttcactgacgggaaagaaaagttgcgaggacattttctaaaaggtgaaaaaaaaaggcgtgatcagctgctgagccgtttgccgctttccacctgctgttgtctctggcgaggccacagaggatgggacaataaaaacgtgctggcctgcaggaacccctgctgcagccctgcctgccctgctgtgtgtcaccggcgtcctggggtccagaggcttctacccattggtccccaagggctccaggaaccagaggcccatccaggatggctccaagccctgccctggggctttccttctctcttccctttttggcggttcttctgtatggcagccgagagggcattttcagggtgcccaggcatgacccctgagcttggaggcccgtgccgtgagaccccatggagtacgcccaggacagcaggactctcctctgtgtcgcctacgtttctccaaacactcgctttggcacgtggttgcctttggggtgtctttctgcccagctgggtctccatgtggggaggagggagggagactttcctgccctgtcccagccccagtctagacccctcccatcattgcagtctgctgcagggcccaaggggcccatcctggttctggaactcttcctgcatggccatgggcaagtgccgtcccttctctgggcctcactttccttgtttatagagctgacggcgatgacacgagcatcatcccactctgagagcttcccagccagtgtcttaagtgtctgatccacatacatttcctttggctgcagggtgcgacttgggacctgtgtgaggagtgtggacttggagccagcctgcctagggtcacttcctgcctctgacaattgttagctgtgtgaccttgggcaagttactcaacctctctgtgcctcagttccctcacttgtaaatgggggtaatagaagagcctgcatcttggtgggaggtgcaggttcaccccaaggctggctccctttgagggctgggagggaagggtctgtccaggcaggcctctctcccctacttggccgtccgttccctgtgtctcttcgcatcatcattctgctgtctgcatctgtctctgtgtccagatttccccttgttagaaggactccagtcagtgggttcaggcccaccctaccccagtgtgacctcatctgaactaattaattacatctgcaatttccagatgagggcacattttgtggcactgggggttaggacttcagcgtaagaatttgggggacacagtttagcccatgacataggtgttgcctcggacggcggagccctggcctggatgcctttgtccgtgaggttcccgagtgccgagtgccgggagggacagcccctctcctccagccccatctctctgatctcgccttcccatgggctcagcccgaaggctgtttcatgagcgtcatcatcggtcggccctggtatgtttgttcttccaggggctcccaggatggatccagtccctcccgggagccgggccacaccagctgtcccactgccaggccgcatggccaagagtcgcagctgctcctacaacgtgctcacgg

SEQ ID NO: 18682 - DNA, 1854 bp, Homo sapiens
ggttgagtttccctggcatctctggaaggtggggcggggggtccctggtatttgtttaccagctctccaagtgaataacatttctgaagcatcgtgcctgagcatgtgtgacccagtgtgtgtgtgtatgcgcatatgtgtgaatgtcagtgaatgtgtatgtgtgacgtgtgcaaatgtatggcggtgtatggaatgtgaacgtgagatattgtgtgtgtgtgaacgtgtgaatgtgactgtgtgaatgtggatgactgaacatgtgtgaacttgtgtgacattgtgaatgtatgtgtgaatatgtgtgagacgtgtgtgaatgtgagtgtgaatatgtgtgaatgtgtgtgaacatgtgtgagatattgtgaacatgtgacagagacattgtgtgtgaaggaatgtgtgtgatgtgaacctgagtgattgagcatgaatgtgaacgtgtgtgacattgtgggaatgtgagagtgatcgtgtggtgtgtgaatgcatgtgtgaatgtgagactgtgtgacctgtgtgaatgaacatgagacgtgagtgtgaatgtgtgaactgtgtgtttatgaatgtatctgattgtgaaggtgtgtgtgaggcgtgtgattgaacatttgtgcaattgaacgtgtgtgatcatgaccctgtgattgtgagcgtgtgagtgaatgtgtgtgacattgtgtatgtcactgaatgaatgtgtgtgattgtgtgaacatgtgtgaccttgtgtgcgtgtgtgaacgtgtgggcccgcgtgtgaatgagtgtgaacttgtgtgaacatgtgtgactgtgtgtgtgaacgcatgggcccatgtgtgaatgtgagtgtgtgtgattaacgcgtgggcctgcttgtgaatgagtgtgagtgtgtgagattgtgtgaacatgtgtgacattgtgtgtgtgaacatgtgggcccgcgtgtgaatgagtgtgagcatgtgtgattgtgtgagcgtgtgtgacatcttgtgcatgtgtgaacgcatgggcctgtgtgtgaatgagtgtgtgtgtgattgtgtgagcatgtgtgacattgcgtgtgtgactgggcccgcgtgtgaatgagtatgaacatgtgtgattgagcatgtgtgacattgtgtgcatgtgtgaatgcgtgggcctgtgtgtgagcgtgtgtgattgagcatgtgtgatatgtgaatgtgtttgagacagcgtgtgcgtgtgggagggatggagtgtgtgtggagcatgtgtggcgggccctttgtgggagaagtgggtgttgggctcccgcccggccacgctgcaccaccatttggctctgtgaccctccgcagctcactctgcctcttgggacccctcttttccgtcctgtaaaatgggaaccccgttttccccagggctagccgagaatccctgggatgaagcttgggccgcactcggtgctgacatgcggtgggggggaccagacgtgctctcggagctggaccagggacagcccacagctgtgtgccctcctggggagcagggcacagggcatttgaggtgcctgtgtcccgagggccaccctgccctttcctccttactcttgttcgtgtgggaagagatgctagggcagaggccatcgggacttacagaccccctgacattggtggcaaaattggggtccttccctgtagtcctagcagaaggtccacggctttcatcggatccagagaacagcgcctgaccctggggttgaggtgtaggggcctctgtcgggccctcctggtttatttccagggcccctggaggtacccaggagtttaattgtttaactctagtttcccctccagttgctaccctgtcacccccagcctgaat

SEQ ID NO: 18683 - DNA, 1637 bp, Homo sapiens
ccttttcaaaatcaactgttgttctttgtagaagaggcgtttcatttcttcattcattccataaatggacagccagggacggttctgggtgctaggaattcatcaccaacaaaagacaaaaatcccgtgttcctggagctgactttccggagcagcgctgtctgctggaacattctacactgatggaatgttctagatccgcgatgcccaaatcggaagcctccagccacatgtggctatagagtgctcagaatgtggctggagcaatgaggatcggatgcactcgttgtatttaattttaattcacgtcagtttaaggctaagtagcacctgcggccaggggcaccccccgccccccgctcccgtcagtacagagctagtgggaagagctccgtgtgaggaggagcttttctgtgcagattttttctttttctttttttcttcgggtttttttgtttgtttgtttttgttttttttttgagacggagtctctctctgttgcccaggctggagtgccgtggcatgatcttggctcaccgcaacttccgcttcctgggttcaagtgatcctcctgtctcagcctcccaagtagctgggaccaccatgcccagctaatttttgtattttttgtagagacagggtttctccatgttgcccaagttggtctcaaactcctgacctcaagtgatccacccaccttggcctcccaaactgctgggattacaggcgtgagccactctgcccggcctgtgcatattttcttcactgacgctgtttccaagtcacagaggccttcacacgtgtctgggagggttttgcccgggcacttgcaggggtggggtgggaggagcatttctacccgtggccccttcttctgcttaaacacacggcagatccagaaatttctctccagcagaatgcagcccctcaaggatgggggccttggttacatcggtttttatgtttaacttccacccagagcttggcgtttcaggggagcctgagttgaaggcacaaatgcgtgacagttcctgctctgccctttacaagctgtgtgaccttgggcaagttactgaacctctctgtgcctcagtcaatagggatgatgacggcaccccttgcagaccttttggaaggcttaactggatgagtcaccctaagcattcggagcagtgtgggtgggggcgctctgggtggaggagaccagctctaggcgagggtgcctggactccctcatggctgcctctctctccaggccccgccacctctgttcagccagctctgggagacttggattgcatttggctattggagagtgtcaccccatcttttaaagctgcagggaagtgaaggaatcatcctctctagtccttttgtttggaaactgagcccagagaccacaagcaaactggctggggtcacacagctgctgggtcagtcacagagctgggggcaaccgtgggcatcctggtctatcgagtgggtcattgtggtggctgccgcctacctaaccaaacctggtcccacgggccagctctcactgtggggcagccagctggagggacggggccagcttgccccaccccgcccctcccctccacagcagagagtgccctggctccatggggcccagcaca

SEQ ID NO: 18684 - DNA, 1084 bp, Homo sapiens
gggaggatttctgggccagtgatagcagggcaggaaacagaaagaggagggtggaatctaagtggtgggggcttgcaccttcaccgatgcgtagggcagggctgggggctgagggcagatggggtagctgggcagccttccacccctcagctcttcgtgccccccggattcagtgcactctgtggacttagccccccgccccttgcccctgcaccggggctggtagccttggggagggtggactgtgcatacaggggagctgggtgaatcccagggtgctcagctctaggcagctaacggctccctcccccggcccccaaccaaaatggttttcaggcactggacagctgcccagaggtaagagcgtagacctgaaaccgcttgagacctgtcgtacccctgcaggtgtatctttcttaataatcagagtgaccatggcaggtggttaccgagaagtgctgccaggtgtaagagccacgtctggatgagactcgtgctggaatgtgtgtgcctgaggcaggccaattaaccttctcaggtctccccactcgggctgtgtaatggaggtcactgcctgccttgcagggccgggagggcttccagtgacatgcgctgagcagcgctggctcttgttaggtgcttggtgaatggcacaggtgatctttacctcctggcccacggacatccaggtccctgatacttattggcggatccaggcgctgaacaaggtgcccaggcaacataatgaaggtgacatgcagttcctacgtgctaggagcaactggccaggatggagaaggaccttgggttaggctgtgtgctgtcctgctgagccctagaagaagcaagaaccagaaagaacgtgtccgggatccatcctccgccagggctaggccgtgtgctcagacttagtgaggttgtgacagtcacgggtggcgcccgcacccctgagcacctgacgtggcccaggttgatgcccaggcagtggtggtggtggtctgtgctgtcatcctgcccccttgccttccaaatttccttgctgccttgaagtgtcccctctgtcagcatctgccctctgctgtct

SEQ ID NO: 18685 - DNA, 1733 bp, Homo sapiens
tgccctgttggggaacccgtttagatggtctcggccctggatctctgcactgttggggaacccgtgtagatggtcttggccctgggtctctgctgtgttggggaacccgtttagatggtttcggccctgggtctgtgctctgttggggaacccgtttagatggtcttggccttgggtctctgcggtgttgggggaacccgcttagatcgtctcttgaaaaaggtttgtgtccaccgccccccgtgctggggtgtgcagggagtggagtgtgcgctgagatcgtatctattttaaatcaagccgatgtcctggcgtccttttttgaatacagtcttatcgttttacaacgtgttgtttccacctaaatgtacatcttataagactttataggactaaggaagttaatccatccttagcagggatgccagacccctggagcctgtcacctgggcacagggaggacattttaactaagcagctggtttccaggttgagactggttgggatcctgcggagtgactctgaatccactaacagcaggactgtgtctgcttggatgctggagctggggtttctccagccacggctggcagagtggaccctggggttttgtgtcatccgtgtctcttatccactggagagactgttgtgttccttctgccagattacccttgaagaagcaggggaggggagggcgctccggcccacctctgcttacctgcccacctcgggctcattcttcccaccccatactccccatgcagccttcaggacaggagacatagcctggactacttctcatggcgcaacaagaactttgttaccagtcttggtggcagagactgccagctcccaacagccaggtctgcacctgactgggaaatttactagttcctcactgggattctggaggggcgtgtgtgtgtgcatgttgagaattacagaatcatttagacttaagcagtcagccattcagcagttgacaggatgattgtggccggaaaaggtgaccagtttgtcctgtttggtggctgggttggatgagggagtccaggactcctggcgcatgactgttatgggagcttttcctggacagctccattccaaagtccatcttggctgagggtgcttgttggttttttccagtgaggcatttagtgatgtctgggcacagcacttggggctttgaagatgggagacgagtctggacgaggaaacgccattagaacgtggatggttctgggccctttctttttccaccctgtatttcctctgtccaggcaggtcatattggggagggtgttcatactcgtgggttgccacttagggaactctgtgctgtaggagtttgtagcctgggttcatggatgctacacatcttcaaacacacgctcccacagggtttacagataggctcttcgaacttggtaaaactgtatgtaacatgcagtaggtgtattttcctggggagagggtctggtccgccactttgaaccatcttgagagtggacctttttgcaaaggcggatgtaactgttttatgacttgaggggcaagtcctgacttggtgagcttgctttgattcaggggagacctaccttggggttgacacacgccagaattgtggccttcataggcgtcccctgaagctgagcctgggaaggggttgacctctttctgttacaccctcatggagttaccgtgtcgatgacatctgagtggagtgtctgtgc

SEQ ID NO: 18686 - DNA, 1073 bp, Homo sapiens
gagggcctccctggtcaccagggaagggctggggagctgtgggtgagggctcaggttcagactcctgcagggacaccccagttccctccacctctgccctgtggctggacagccccacgcttttgttggcggtgctgacttcgtgccgtcgagccgccatccctttgaatgtccgccttttaaaagcctggttcactgcagaaaaattagaacatacagagagagaaaaaggatgaaagtgaaagacatagctcttctcgttgccatctgaagacactgccagtagcctcaaggtgtgtgcgccatctggggtctggtctgggactcgcgccatggcctctgtgtaccactgatagggtttggatgtgtgtcccctccgaatctcatgtggaaatgtgtcctccagttttggaggtggggcccagtggcagtgattggatcatgggggtggatctctcatgaaggggttatcaccgtcaccttagtggtgagcacgctctcgcaagatctgggtgtttaaaagcctgggacctccccactcttgctccctctctcaccactggatgtgctggcttccctcgccttccgccatgattagaagcctcctgaggcctccccagaagcagatgccagcaccacgcttcctgtacaccccacagagtcaggagccaaaataagcctcttttctttatgaattacacagcctcgggtatttctttatagcaacacagacagcctagttcagccacccagcccgtgcctgtggctggtggtcatagcacatctgcccgggtggccagccagcctcatgaaggccacaggagagagaattggcatctgctcccagaccttcagggcgggtcacctggaggtgaaatgaccatacggtgccccacgttccccttttgcggtagcatgtggtgtggtttgcagggcatagtcagccacccagcctgcaccggagatcggcccctcctgcggccctggagcaggtcgagctgggccctggctggcttgtcacatgggcactgtgctgaggtcatctcagccctgctctgcactggacctgggct

SEQ ID NO: 18687 - DNA, 1054 bp, Homo sapiens
tcctggaggccctgtgcgggtgagtacatcggcccacgcatcagtctgtcagaagaaaccacccgctgggggtgtcccgttattttctcctgttctggaggccacaagttcacaatccgggggccggcagggctggtttccccagaggcctctcctgggttgccggtggctgccttctccctgggtcgtctgtggtgtctccatgtctgggtcctgatctcctcttctcataaggacaccagtcagctggtttagcgcccaccctaatgtccttattctcattcggtcacctctttaaagaccgtgtctccaaatgcagttccgttctgaggccctgggcatcagggctctaacacggatttgggcgggggtggcagtccagttcaagctgtgaaagtggtgtttgcacgctgagcacccggcacactagctgtgactgtcatagtctgtgaactgaacaaagaattgaggtaggaaagatcccagcccagacgctatcagaacaagacatctggtgggttttgtgtttctgtcttacttttggggctcccagcggaggcccctccccaagttttcggggctccttatgtctgtgggcccctcgctctgcactgactggggcctgcctgtgtggaaggagctggcactgggagctgctcttctgccgctgcctggggcctgtgcgccctcaggtgggtacctgcagctctcccggccccccacccctggcgcgcagcctggagtgggcccttcctaattaagagcgattctcaggggctgctgtcacctggacttttctgctgagttcccagagggacagccccacttggaaatactaattaaaccacaaagaaggtggggaggaggggagagtcactcttgcctgaagctccctctcccccaggggaggacatgggtattggagccacctgctcatcatcagggcctgtctgccctctatccccagaggtgtgggaagggagccagcctcagtccacaggtgacagcccccgggcaggccctgatccagggtcccagtgggaatccctgggag

SEQ ID NO: 18688 - DNA, 1057 bp, Homo sapiens
aagtgcgtctcgagccgaggagcccctctgccctccctgtcccttgatggcagctgggcagaaagcctgggctggaacctgactggactccttggccatgcctgtcctcacagtttgtccacctgccaaatgggacaatgatcgttcaggctctgctctgaaatagcgcctgtctcggtagccgtggtctcctgcagtaaacctgcaggccgaggagctctcgggcgtgcttgggcattttgtaagccgctttgattgtatggaccttaagttcttcctgcaccagtgaaacccggctcacctcccgtcactgttcagattagcgccctggctcgttcctggttatgctttttaagggcctgccccaggtccgtctcttgttcctggtgcagcagagcccccaactctttccatgtgctgcaggctgcagatggacgaggagctaaggcgggagagggagcgcgagcgcgagcgcgagcgtgagcgtgaggctgaccgcgagcgggagaaggaacgtgagcgcgaacgcgagaaggagcgcgagcaagagaaggagcgtgagcgtgagaaggagcgcgagcgcgagctggagcgccagcgggagcagcgggcccgggagaaggagctgctggccgccaaggccctggagcccagcttcctgcccgtggccgagctgcatgggctgcgtggccatgccactgaggagcggggcaagccctcggagcagctgaccccaacccgagcaggtacctgggcgtgggtgggctgtgctgggcaaggtctcagccacccgcggggaggagccctgaatcgcagcacctgccggttgccgtggtgtaaatgttccccagctgagttcgccctaaaagcgtggtgtggctgaacatggagtagggagcagaggcacgttggcacacgatgtagacacagtggatatagctgaccccaggaggacagttgtgaaatgtagccggggcattaggaagggatgttttgagtgcttcgttgattttatttctctgtaagtttacgaaacaattgtccagtaataacaacc

SEQ ID NO: 18689 - DNA, 1028 bp, Homo sapiens
gaggagaagtggctggcgcggcagcggcggctgcggcaggagaaggaggaccggcagtctcaggtgtccgagttccggcagcaggtgctggagcagcacctggatatgggccggcccccggtgccggcggaggcagagcacaggccggagagcaccaccaggtgagtgagccccaggaaggaaggagggatgagccttcacgttccgatttgttcagcgtgtattgagcacctcctgtttgcccaacatcctgccccagcgtttctgcctgcctctttcatttctgttctttcatcttcacgttataatgcctgtcttgcctatggggaagctgagactgaggaagaaaatggattgctcaaaggtatccccaccagtaagtaaagagaccaatcaagtccatgttgagagccagggcactgcacacgcagcctgacctagttcccaggaggccattcacagcagatgaagagtgcaaggtagaagctttaattactaataatacctgttctctccatcttcctctgcttttgagcctggacttctttttttaacaagaaggggacagcttttgattttaaggaaaaaaatgagttttattgcttttgtattaatagtaaaaacacatgcccgttttctagccctttatgaaagcatttcccaggaaactgtgtggtggtcccttggaccccggctgcagacacaggtcttatgagctgggccccagtgcccccagtcctccctgcccctgcctgccctgggattcctgccttggggctgtgctggtcccaggcccccacgtcatatacccccagggctcactctgaagggctgagctaagatcctcagccagagttggtgggaatgacctgccagccttccatagctctgctccaggcccagctcagggacctagggacactgattctgttccctgagcctcactttcctcaactgtccacaaaggagggtgggtaggatgatttctgagcatctttccagctctcaaggctgtgatgctgtcctgg

SEQ ID NO: 18690 - DNA, 1057 bp, Homo sapiens
gaagcagggcctggcctcccctggctgcggtggttcccctgtggccggctgcacacgtggccttacagcattgtgaacttgggggcctgacagggccctcatgctccaagctagaaaactgttcagtgcttggtgtggcgcatgaaatatttattctcctgcaggtttcattcccttgctgtttacttaaggacacagcttcttcctgtggttccctgttgtattctgctaagagggacagcagcgtcggatttgtcccttggcctggagtctggaataactagggagagccttggtggctgtgtttaaacagggctcccggggcaggctagagatccctgagcccggccgtgtgcctgctgtggcctctgcctctttcttcccctcaagctttgcccagggtctctgcacagtattggtccagacatcctgtgagtatatctccctttaaaaaaaagaaagatagccaggcacagtgacacatgcctgtaggcccaactactctggaggctgagatgggatgatcgcttgagcccgggagttctcggctgtagtgtactatacccactaggtgtcccagctaagtccagcacaaatatggtgacctcctgggagcgggggaccaccaggttgcctaaggaggggtgaaccagggcaggtcggaaatggagcatgtcaaaactcccgcgctgatcagtagtgggattgctcctgtaaatagccactgcactccagcctgggtaacacagcgagacccatctcttaaaaataagctggaaaaacaatactaaaaatagccctgtgagtagattaaatcttgttttaattgcactgaggaaacaagccatttagtgtaactaaggggcagcttcttgtttaatggaagggttctgatgttagaaatcccttctttccctccctgcctcagcaggccttagcctgggtccttgaagacactttgaggcctctgccacaggccacttgggcagtggggtcgctgcagttgtgacaggggccactggggggcagtctcggcacaggccccatcctgactggg

SEQ ID NO: 18691 - DNA, 1063 bp, Homo sapiens
gtttcctctagattttagtcactctgccataccagtttgagccaagtcactccattgactgggctggtctcaggccccaccaggggctgccatccccacgggaggccaggtgtgctcctgaggatgtcacccaccaggccacgccatgagacagggcatgccctcttgaaacggggcacaatgaggctgattcctgggggagggcagagccccattatgcctagggatcaaaacagccacgccttgtgagaggatgggctggtgtctgctgagggctgactatagaccaagctcaaagagatggaggcagccgggcgcagtggctcacgcttgtaattccagcactttaggaggccaaggcgggcagatcacctgaggtccggagtttgaaaccagcctgggccaacatggcgaaaccctgtttctactaaaaatgcaaaaattagctgggcatggtggcacatgcgtgtaattccagccactccggaggctgaggcaggagaattgcttgaacctgggaggggaagttgcagtgagccgagatcacgccatttctctccagcctgctacccagaggactgagggcagccaaaacaaaaaatggagtctcagagatgaattccaacaaaaatggtccacgtaccagaatcaactagcactcagggctgcgttgtctcctggctgtctcggactttctcaagtggcccagaggccttgggctaggtccctcctctctacgcgatgtcatcttggtccccggagccctgcagtcatgttgactctgcaccaagggcagagcagagctcccttctgagacagcaccctgtgtcccttcccccaacacactgatgcaagccctgtcccctccacagggagcgtggctgtgctgtctgcagagcagaaccacaaggttgacacgtccgtccactacaacattcctgagctgcagtcctccagccgcgcccctccaccccagcacaatgggcagcaggagccccccactgcaaggaagggccccccaacccaggagttggaccgggactcggaggaggaggaagaggag

SEQ ID NO: 18692 - DNA, 1027 bp, Homo sapiens
aggtgttcagagggagtctgctacaaactatcagggcaaaatctcactggatttctccactgaaaacctacttgaggtttctggtctgaaggcttaagagtcacatcttagcacttccgctctcaggcctcctcctccatcacagatgtctggatgcttttggaaatggccttggctaaagtaaaagggaaaagtagatccgataacttaaaaacgtagctcatcccttaccatccaaggggcactcccttggttggattttctatgacagcacaggggacaggtggcacaccatgagaggtctgcccagggtgggagcagtgtcactgtgctagcaatagttggcttctcccctgtcagtggaaaccccacttctgcccggcccttgagcttcttgcccactgtctccccatccttccacctacttgtggcgatctgagtactctactcttgctcaagaagtaatacgacaatcagaatacaaaccagtaaggcaacacgaataaactaagaaaaaggtaagaactgtctcaaaaacgaaagcacaccacccaagacacagtacccagtcatggtttccccatccaactattagtttcatactttgaaaacttactttcagattattctcaaagaacacagtagcacctaaatctgttttcaattgggcttaaaaattgacatgcaatctcttaagttttttgttcagctacttcacactgagtacctcaaatctgctctggagtcgattatgccacctgtgtgtcaggatgcacctgaaagccctcggctcggtccttagaccatcttcctacattacctggaagggagctgccatctgtccctctgcagagggataccttccaatagtaaattatctggttcctcactgaaacaagttatttttgcttcatatagtcagagtcagactgacatgataaaatatcatgttcctaatctgttgtctcagataagtgaccaagacgggactttccacattttagtctacattctaatcttaaaggaa

SEQ ID NO: 18693 - DNA, 1051 bp, Homo sapiens
cttggttctagattaagaagtgtttataagtcaaattgaatctcttctggatctttggttatactgatacttccccacttacccttcccttccgttccacttttttaagcttcgagatctacccctttcaaaagatcttctgcaccataactgactgaccttaatgacctccctccccaccttgcccccacaactcccaaccatttgcatcacctctgtttacattatagaggcaatggaaacgaaagagcctggacttcctagcctgagctgggttttcatctcatttctatcaaggactagctactgaagctcaggaatctctttgctcacctgaagtatatggacagagcttagttctgtgtctggcatacagcacatttacttttgcatgtatctggcgtctatctactttgtaccagacactgttaggcaccgagaagaaaaagaatatgaaatacacacactttccaggaggctgtttgcaatctgaagagggacggatgggtgaagacagtgttttattaagagatggctcctgggtagaagcatttagcccgatgtgggtttcagggaaggcttctggaggaaactctccagggtcttttcattgccttagtagagtctacaccctgcctggttagagctggtcttgcctgcctttccgatcttattactgactgttgtactcaaaacccaaaaactaccatcagaaccacccatccccacttgctcactgccccagccccctggccttactccattcctcccgtagagccccgagttgtgggtggtcgctcctgtctaatcattcaccctcgatacaaatgtgcttttagaacggcctctcctgaccatcctttctcaggaagctccctgtcacctcaccttgctgtgcttttccttataacactggatgcctcatgaatgcatgtctatttgagtattgctgtctcagcctcttagagtgtaagccttttgaggccagggagcctgcctgtcttactcattgccgtatctccagcacataggaggcagatgaagacgaact

SEQ ID NO: 18694 - DNA, 1853 bp, Homo sapiens
aagcgaactgtatgcattttcttctttccttgccctgtcacatgcctgcgtgggcacgtgtgtgcacgtacgtgcgtgaacatgatgtggcctgggttggtgtatccttcagctctgtgtttcctccttcacaagtgtggttttggggagaagtggttgaatgttgcagaggagggagctgctgacctttgtgcctgtaaatggctgtcctctctgcccccagtgtatcgcattaagttcaaggagagctttgctgagatgaacaggggctcgaacgagtggaagacggttgtgggcggtgccatgttcttcatcggtttcaccgcgctcgttatcatgtggcagaagcactatggtgagtagagagggaggaaggcatgggcgcctggactggggctccagcctgcagtgcccattggtgggctgtcggggacctccataccttgaggctatgagatagggactgcattccagagttcatctcaggattgtttccaggccttggtgacctggagaactgaagtcgtgggaggttagtttataagccagcatctgattattcatagccatgcttgttgggtggtgaaataccttaactactttgtacagcacaccacgttttcagtagcaatttatgtgctcaccagtcacttagcgaaagatgacttcgtgaaggttcgagcaaggataaggggactcattcattgaatgactgtctggactgttgtgaggactgcatctcaacagccagcatctgggggtcccgacctgatagtttgtgtgtgggcattgccgggttgctcgctcgtggtaatgactcttccccgaggttctttctgtccaggcagaacaggcatttttgcattctgaataggtatattctcgtacttttggtttgaatgtggatgtgggttaataacagacccgaatctatttgatcttccaggtcaccttgggctctgtttgtcagatcctgttatccatagcctttagagaggaccttctgcttttagcttattttgttgctaactttttacaaacaaagggctaattttaaaatgtcagtgttgtcagtggtcagaaaccgtgtgtttgagcgggtgttgagtggcaggtggctctgctgacctggtggctggtgtgtcgggaggatttaacctgtgtgagggattggcctagaaacaacctgttgagatagtcttgccccataacctgtctcacaccgtagtgtacggccccctcccgcaaagctttgacaaagagtgggtggccaagcagaccaagaggatgctggacatgaaggtgaaccccatccagggcttagcctccaagtgggactacgaaaagaacgagtggaagaagtgagagatgctggcctgcgcctgcacctgcgcctggctctgtcaccgccatgcaactccatgcctatttactggaaacctgttatgccaaacagttgtaccactgctaataaatgaccagtttacctgaaaccctttgtgatcagttctttaatgatacctaaatgaaagctaattaaaacaataggtttctcccaagggtctggagtaaatatattttgggtgcaaatgaaatggcaaaaatctagtatcttaaattgtataaggggacattatataaaaactgaaaatatagaattccttgatgtaggaaatttgaggtttttggcaagagatctttatataagtaaaatcccattatcgtaggcacaccggcaggagttaccacaaccctttttttttgttttgggagacggagtcttgctcttgtcacccaggctggagtgcagccgcacaatcttgggtcactgccacctccacttctcgggttca

SEQ ID NO: 18695 - DNA, 1030 bp, Homo sapiens
acaggaattctgctgaggtcccccctccttccggccaatggcagaagtgggggaaaatttttagaagaaaagcaaacatgtgagaccaatcattatcaaatacttttattttttggttgagtatttatctttttattttttattttttttttgaaagaatgtcttggaatgcgcaagtctccctttagagccgtcttttgcagggagcgggaagtgacaagagctcagatctccctcccgatctccctccccacctccgaagtctcctccgtggaccacaggtggatctttgtgcgaacaacttgcatttcggaagccactgtccgtctttaaacagaaagtcaaaggagccacgaagcaagcggccgtccgggcgtccgcctccgtccccttccatgttcctcctcttccttcgcttcagcctcttctgttatgttttgtcttgaattttatttagactttttcagtgggtatttttctgtctcccaacctctactgtaaactttctggtccgagaacgagccgaacacagcgcgacgcagggactaggacggcccggtgaccgcgcggattcaggattgcggggacgcagaaaggttaaggcacttttaaaaactatagcaaggctcctgtttatttattctactttctttccctaataatcaaaacaccgcgtaggctcctccgtttatcagtattaatggtgtaactttgttggcaatatttgccgtgtagaattttttttagatatccattgtaaatttgaaacaaagaccgatctgtgtaaaaacaaatttccatatgttttatataaatatatatataatatgaaggactaccctccttttttttttttgtattttggctgctagagtgcagcatttgtgacacgtatttgaaatttgaaatttccttctgcactgtataaaaggaccatttgaggatgttttgccttttgtgtattttttcctaaaaaaagaacaaaaataaaaatgtataacatttgtacatggcctttaaaattgtatca

SEQ ID NO: 18696 - DNA, 1077 bp, Homo sapiens
ttaatgttaaatgtgtaactcagtattactgaaaaggtacccacattttgaatagtagttatcactcttaggtcagacagccatcagaattctcccacaccaagtgcatgtcagttgtggagaaaacatagcaaaaagagccgtacgctctttacagatactaatgtcaagagttaaacctcctcaggttcaacctgtgataaaagactagtgcttcccagtacttgcatggggttcactatttatagttttcttgggagtatcacaggaaaatcacaattacaccactttagaccctatgtgtagcaggtcacaacttacccttgtgtgtttagatgtgtatgaaatacctgtatacgttagtgaaagctgtttactgtaacggggaaaaccagattctttgcatctgggccctctactgattgttaaaggagttcctgtcacctgctccccccacccccgcatgcgtctgtccacttggctaacttttaatatgtgtatttttacattatgtatattcttaactggactgtctcgtttagactgtatacatcatatctgacattattgtaactaccgtgtgatcagtaagattcctgtaagaaatactgctttttaagaaaaaaaataacatgctgaggggtgacctatatcccatgtgagtggtcactttatttataggatctttaaaacatttttaatgaactaagttgaataaaggcacaattaaaaactgtcatcaaagcccagtttaatgggattccgtatttgagacttggatcccacactgtttgtactttccaaagccaagcgggtccttgtatttccaaggaggggcatccaggctggtcctctcgtgcagagggggcactcacgtggatgagcattgccctccgagggcctctgccttgtcaagggcaccctccaccttggccaaggccctgccaccaggtctggcctttacaaagccaagtcctcttgagaactcacgtgccacgggctatcaggatggatgcgaattgacctacatgttttgtgggactataacacccaacaacctactgctgtaaaccaccc

SEQ ID NO: 18697 - DNA, 1030 bp, Homo sapiens
ggggcggggggcgggcgggggcgcgcgggcgggcggggtgcgggcgcgcgccgcgcggcccgagcgcgcgagccgggcccggagcgcacgccgccgccgccaccgccgccgccgccgcccgagccgccgcattgctgctgctgctgccgccgccgccccgcgcccggcccgcggcccccaatatggtgcagccgccagcgccgccgcccgtgccgccgccgccgcccgcgggccccgccgccgccctcgggcgcccgcagcgcggcagccgcaggtggggggccgcggcccgggcctgagctgccccccgcccggcctcggcgcggcgccctccccgcggggctgccggcgaggggccctctcgccgctgaggtggagccgcgggccccgccgccgccgctcctgccccctccctccctcctcccctccccctcccctccggtcctgtctccagcgggagcgcgagacgctggtcaggctccgcggcgcagctcgaaaaggaataatcgcccccgattgactgaaattcctccggagccggcgccgcggccgcccgcgcccgagaccgcgctccggggccgcgtcctcctctcctccggaaaacgctcgcgacccagggccgccggcggccgcgactctgctgtgtcgatcgcctgagtccgttttcaccgtttgcgggatctggaaccgagttacatgcatgtccagtgggggcaggtttaattttgacgacggagggtcctactgtggaggctgggaggacggcaaggcgcacggccatggcgtctgcaccggccccaagggccaaggcgaatacaccggctcgtggagccacggcttcgaggtgctgggcgtctacacctggcccagcggcaacacgtaccagggcacctgggcgcagggcaagcgccacggcatcggcctggagagcaaggggaagtgggtgtacaagggcgagtggacgcacggattcaaggggcgctacggggtgcgggagtgcgcgggcaacggggccaaatacgaagggacc

SEQ ID NO: 18698 - DNA, 1066 bp, Homo sapiens
accactgggcatggtgaggtctgcgtttggaggaagtggggtgacagtgacagctgtgactattggagcacacagtcggtgctgggcaggtgggtcattcctgaaccctcagtgtttccctcctcgggggtcctggccagtcactctcctcctccacaccagcccccagcagctcgcaggctgcctgggcccagccccatcatcagccgctgggcacccacctgagaggtctgaaccctgcccttggtgctgcacggtcacttgccattttcgcagaggggccccctgagcaggaggagcagggccagcatgcacactgcagccaaggtcccaagaaggaagtggcgaggaggaggaggaggactggccccacctgttgccctatgtctcacagcgcagactgggggagacgtgaggatctaacaggggttcctggggggccttcatcaagctgtaatgaatgttgtgccaaacccctgtcaacaccagtgggtacagcacagggttcaagggctgaagaagtgacccagggctagcaaaggagacccggggtttactgcgagccgtggggtggggagggaagtgcagggacgggagaaccgcagcggcttgtagacagcgcaaagttcctatggcatgttcaccccataccctcccctgatgacctccacctgccaaccttcattcaacccaaaactcagggcctcaagcccctgcacagcgcacgttccacgggacaggccaggggctcagaagttcctcatagccaaggaggcaatctccagattggccactcctggattccttagctcaggttgttcttggagtatgcgtaagttactgctatcgggggtgtttaccctccaacaggtgtttggtgggggaggagcctccttgggggtgccaagagcaacagcggccggggtctcatgtctgtggggccactcccattgctttgtgcttagtaactgggtcttcaaggcagccctgtggggtgggaatcatttttatcctgtgatatttcattgtgcacacgtgcagactgaggttgcttaactaccccagg

SEQ ID NO: 18699 - DNA, 1052 bp, Homo sapiens
tgtcaggccgcgtgaagtgagaaacggtttgcggtgtcctccgcggagtgccgggcccttccccggagagcagctctgcagggaagggaagtgggttttcctggaaaacggggcgggaggtgtggagctcggagagactgaggtcctgcactgctaaggggactggccccggccctgggctgggagagggggagctgggactcagcccagggtggagtcaccatgggttctaaggcacaggatggataccctcctcggccatgtgacatcattgtttgggatgcgcccagtgttcggagccttcgaggctctccaggtgcctggagggcttgtagaaatggtggtcaggccccacgccccagactttgtctcatcatgtctaggtgggggccccagcacctgcatgctgacctggtccccaggacgcagatgctgctggcctgagcgtccccggctgtctcctgtctggtgtgggtgctgccgccgggaggccttggccccacggggagatgaggcatcacacacgcagccacaacacgggtcggaggcagagtccagcccagcaagggtgtggcagtggagacgagggaggggtgaagctggtggttccaggaggttccgtctgggtgagaccctctgctgcagagaggggcgggagccagtggccccgcggagctgaggtcatgtgagaaggggctgcagtctcttctgtgtcattctcctgtggggtcagcctcaccccagtgggaactcccactagtgaaagtctgagatggccccatcctgccgtgtcgcctagcagtgcaccacagggcattcggcccctcctgccttcacacactcaagacgttttcatgactcatctcctgccaggagggcacacacagggcacctttgcacggcgctgcctgtcctgaatgcctcgctgtccccgggtggacataggaattcatcacagtcctcctcgaagcccgggttgctctagaagatgaaactcaattgctgtccttgatctgctgctcactagaggccctgggttgggaatcggaatg

SEQ ID NO: 18700 - DNA, 1057 bp, Homo sapiens
ttaattatttgcccagcagggcagcttgactggctggtgtcttgctgagcaataagcagctgaataagggtgcaattgctggaggcggggtcgcagctgcagacctgggcggtcacttagtctgggacagctgcggcggccacagcgaaagccatgcagcctgccccatgcctggctttgtcgcgacggctgctggaacagacgggtgtggtggctcatgcttgtaatctcagccctttgggaggccaaagcaggcggatcacttgaggtcaggagttagagaccagcctggccaacatggcaagatcccctctctactgaaaatacaaaaaaattcagccgggtatggtggcaggcacctgtaatcccagctactcaggaagctgaggcatgagaatcacttgaacccaggaggcggaggttgcactgagccaagatcaagccactgcactccagcctgggtgacagagtaagactgtctcaaaaaaaaaaaagaaaaaaaaaaagaaaactacacacacatacacacaacataaaatgtatgattttggccaggcacagtggctcacgcctataatcccagcactgggaggttgaggtgggtgaatcacttgaggtcaggagttctggaccagtctgggccaacatggtgaaattccatctctactaaaaatacaaaaattagtagtgtattagtgggtgtggtgacaggtgcctgtaatcccagttactcaggaggttgaggcaggagaattgcttgaacgcaggagacgaaggttgcagtaagccgagatagcaccactgcactccagcctgggcaacaaagcaagactccatttcaaaaaaaaaaaggatgatttttaaccatttttaagtgtaccgtaagtggcattaagcatgtggtgcaaccatgaccaccatctatctccagaactcctttcaccttgcagaaatgacaccctggacccttgaaacactaactccccctcccaggttccctcccccagcctggggattaggcatctagcagctgctgtctggagagggatagcatggc

SEQ ID NO: 18701 - DNA, 1126 bp, Homo sapiens
gaattgtgtaaacgaggtaaagccggaggcctgagattgtggggatggggattgaggtcaggactgtcttaccaaggagtgacatttggcctgggattgaaaagtcacgaaggaactgaacattaagaccctgtatgtaaggctgggtgtggtggctcccactgtaatcccagcactttgggaggccaaggtggaggaatgcttgaggccatgagttcggaatcagcctgggcaacatagtgagaccccatctctacaaaaataaacaaaattagccaggcgtagtgtcttcctgcccacttgggtggctgaagtggaaggactgcttgagcccaggagttcaagactgtggtgagcagtgattgtgccactgcactccagcctgggtgacaaagggagaccctgtctctaaaaaataagattataaaccagccaggcgtggtggctcacatctgtaatcccagcactttgggaggctgaggcggttggatcacctgagggttttgagaccagcctggccaacatgacaaaaccctgtctctactaaaagtagaaaaattagccgggcttggtggcacatacctgtagtcccagctacttgggaggctgaggaaggagaatttcttgaacctgtgagaaagaggttgcagtgagccgagatcatgccactgcactccagtgtggacagcagagccagactccatcacacacacacacacaatatatatatatgtgtgtgtctgtgtatacacactcacatactcacactctctgtagtgggctgaatggtgtccccaaaagctaggtctgcctggcaactcacttccaacttcttggaataagggtctctgcaaatggaattagttaaggatctgcagatgagattctcctggatcaggctgggccccaatccaacgaagagtgccctcgtgaggcagaagaggagagagacacgtgccggagaaggccacatgagggcagaggccgagaggcgggagtaaggccaccacgagcctgggaacgccgagggcgccagcagccgccagcagctggagagaggatggatgggaggattttctaaagccttccgataggggtgtgacttcttgattttggactccgggac

SEQ ID NO: 18702 - DNA, 1050 bp, Homo sapiens
atccatcaaagtaaaacagttaaaaaactcaaacactgaaagggtgagttgtagcagtggttgaaataggatcattgctgttcttgtccagcaagtgactaaaagcatgagaaatacttagttttgaacacaggttctgtcaccaataaatggtgagacctgggacagatcctgatctttctgagcatcagtgtcttcatggtaaagtgggtaaaatagccaggatggctgggagtgagaccatgtgttcctggtaaagtgggtgaaatagccaggatggctgggagtgagaccatgtgttcgtggtaaagtgggtaaaatagccaggatggctgggagtgagaccatgtcttcatggtaaagtgggtgaagtagccaggatggctgggagtgagaccatgtgttcgtggtaaagtgggtgaaatagccaggatagctgggtgagaccatgtgttcgtggtaaagtgggtgaaatagccaggatggctgggagtgagaccatgcacacgaagcactcagtactccttgagctcagcagaatcaggactgttacttcctggtgagtccctgagtgcccactcttggctgggtctcatggtggctgctggctcccaccagtcagccctcagactttaagtcacctttagtttagcacttcctggtggaattcagaactgaccccgcacagtggatgagaacattctaggctgtcttttggcatcctgctcggtggattctgctctgggtcgggattctcagtctttgctttcggcacgcagagcagcagcatgtgaaccagcgggtcgagaggcatttccctccaaaatgggaagctcactcttgaattcctccgtgtcccaaacagtcttcacccatgtcctgtgcattcttctagggactttgggagacatcattggacgaacagaaggacccctgtacaggggaaggccacacggaaaactaaagcatagtaaggacgtggcaaaatagatgaaaaagtgctgagggttgtgggggcagtgagtggttttggttaggaatgtcagctgt

SEQ ID NO: 18703 - DNA, 1050 bp, Homo sapiens
cagacacgtctccatgcacgcatgtgcgcggctgtacttacctgtccttccagacacgtctccatgcccgcacgtgcgcggctgtacttaccaggccttccagacacgtctccatgcacgcacgtgcgcggctgtacttacctgtccttccagacacgtctccatgcacgcacttgcacggctgtacttaccaggccttccagacacgtctccatgcacgcacgtgcgcggctgtacttacctgtccttccagacacatctccatgcacgcacgtgtgcggctgtacttacctgtccttccagacacccagacacgtctccatgcacgcacgtgcgcggctggacttacctgtccttccagacacccagacacgtcaacatgcacgcacgtgcgcggctagacttacctgtccttccagatacccagacacgtctccatgcacgcacgtgcgtggctggacttacctgtccttccagacacatctccatgcacatacatgcgcagctggacttagctgtgttttttgtcacttagtattgttgtggcactttttccacatcggtccttagatagggactgcatcctccttaatgtgataaagatgttccataatttaaaaaaagtattcttttgtgcaatttgaggttgatttaaatcgcgttagttgaaagcgtgtagtttctggcattttttaaacattaaaataatttacttttacagcatattataatattgatctttaaaaacaaaactggtttatttatttttttaatttttccattataatctaaatatcatgatggattttgaacgtctcaccaatgagcttttggcagtcgaatgttatgtcacttttcttttctttgaattttcgtttccatttcatttccctcacaaaattttatcctgttagcctggctgtcgtatgcatttgcaacagaaatagggatgtagatcgaagctgaaaaaatttatgttcctaaccataaggccctaagtgctaaaaaaaaacaaaaaaacaaaaaaaaaaaaaccttctggattgaagg

SEQ ID NO: 18704 - DNA, 1090 bp, Homo sapiens
gcctttaggtttgaattctgtgtgggtttgctctgtgttatccattgttggaaccatgtatttcattttatgcagagttgcttttgaaattcataaacagcttgagtaagcctttgcaaaagccagatgaaaattaatttttggcgtggatggcatatctaatgtgaatctgttctctgaagacttacctggagatggtgaggctgaccttgaactgaattgacatggagttggttgtgttgtggaacgtaacaccatgctctaaggctctgaacaaccgtgcagcccagtgactcgcaaaggatggccttctgatttgttcactatcctgctggagatggaaatctggcattcgtcacctctgtgactgcaggggactaacgtgtggaatcccagggacaggaacactctgagccatcgcctgaaaagtgaccgtggagctacatttcccaggacattcatggaagttagggcttcggtcttggacaacacacagataacatttgtcggaattattctttcatctgttcttggaaagtcagcattcaaatgaaagtaggagagagagggatcttaaaaagattgtgtttcaattattggttaattcctttctatagacggcctaagaaaaaaggataaattaataactattcactgtggtctgacagtacaaattccaggctgggatttttaaatcatcgttttgtttccctttttcccgacagtagggaattctgaatatataaaaagttgagtaatacagcaaattatatcaggaagcagatatgagacagtgccttccatttcagtgtagaaaaggcatcatttaaactcagagtctttgaggatcggcagctttctaggaagagacactagaaatgtgtgaatcactggttgttaataggcagggactctcatggcctagagcgtttgcctccattcccagtctgcctctcacttggcctgcgacctcgatcagggtcattcacttctggagacgtctgagcgcctctcccgtgagatggatcatgggctggcttagctgctggggttactgtgaggactgaggaaatgaggcctctgaagtggt

SEQ ID NO: 18705 - DNA, 1044 bp, Homo sapiens
cacacctgaatgcgctgctctgggcggctgcattgtaactgccctgagaatgctggcgtcaagggcatgctgtgacttacactgtgcagaggcaaggactggcattgtgtgcacgggggcgacgccaggccggctgctgatgctagagcccctcacctctgcgtctttcttggtgggagtggctggccagtgggagagcatggctggcagtgaggtgtgagggaccccggggagggttccgctctgcaggtggctggggcaggtaccaactgtgtgcaaggatatcggtattgctggggtcccgggtccagggtgagcagagtgtgtgaccgtgttggcgctcaggtcccgaggccctgcagccccacaggcacgtggccgcttctcgggggtggtgggatcgtgtctgttccgcgtcagttctttcttgggcagcagtcggaggctccagcgctcttggtgactgcctcacaagttacgagggatttgcccagccctgcgtggagcatctttcccgactgtgcctgagcagagcgctctgctgtcctgaatgtgagcttatttgagccttggccatctgaggacctgtcttctgtttttcagaggactaccccaatggcacctggctgggcgacgagaacaaccccgagatgcgggtacgctgcgccatcatcccctccgacatgctgcacatcagcaccaactgccgcacggccgagaagatggcgctcacgctgctggactacctcttccaccgcgaggtgcaggctgtgtccaacctctcggggcagggcaagcacgggaagaagcagctggacccgctcaccatctacggcatccggtgtaagtcgggccccgccttgggggactggggtgtgcggggagctgggtcaggacccacatttcaatgctgaggacgctggcatcagtagcaccggcacggggctgcgtttctccaggcggtttgaaatctcagcccgaggatcagtgctcgaggggatggatgagctgttgaccctgatgtgcttattacgcacggcatgc

SEQ ID NO: 18706 - DNA, 1032 bp, Homo sapiens
ccaaaagcttaatttaaagaagtgaccacagactatattgcactattcaggatttagttatctttttgaattgtaaacagataatcaagaacaaacattccggaagatgtttcttgtttcctttgcttttgattttcttctgatgcttcttggtgtcttttcttgctgcggatcccacagggacacctccacatcgcccaggtgccgcagggggagcaagtccagatcacgcaggacagcgaggtgagtcagctctcgctgcagcactgtccctgcaggcaccgtgcccacatgctcccgaccttcatcggtgtcacagtgcgagggcagcagggagcccccaggacagggaacgtgggcaagggctgcaggactccgcttccagggtgcacatagcgggcctgcagtctctgtggcctctctgcctccccctcctgtccgttggtctccacagcttctggtctgtcttggtaaagatctcctgggtagatgtttctactgctggctggaagtgccctctgagtacccttctctccctgtctggccctgcccttcctgccaggggaggcccccagtgtggccgagatggggtctgcccctgcgtaggtgacctgacataccccctcacctgccatgtggccccagcttcctagtggcctctacgggattagtgccgatttcatgggatggtggggaatcccacaaggtgatgctgccagtcctgagagctgctcatagcccttgacgcacctgctgggtctgtgattgtctcagtttctggagctctacccggccacgcactcagaagtgcgggctcagctgctgttggggtctggaatgtgaaggcggcagtgacagtctgagttcttggaaagccgaggccagcctgttgcgatgctccatgtttgcatgccagagcaggactgtctcccgggtgaccgtccttcgactctgggctgtttcctgcagcacaggcagcagcaggcacagggcactaagcagcacacacgtgttgtactcagtgaccgtggt

SEQ ID NO: 18707 - DNA, 1045 bp, Homo sapiens
gccttcgaagggctcgctgttagctgaagctgaaatgtctttatcacaacccctgagatgctcccactgctctggtcacgcttcacgctggcccctgcactcctggcccttttgtttagccccgcatcagactctgtgatgtcagacagtggtggcaggcctgatgattcgaagattgtttttgatcaattttaccattttcaaatatatatttaaaaggttattcatttcttttacctgtcatacccagtgtagtatacttagcaacactgagtgatcattgagtgaatgaatacaatggcaactgttgccaagttagcagttagttatatgatgcacacattgaagacatttggaaatactcttgtttgagccatttaaaactacggcttacgttcaccagatctttaatcatgaaaacatatagaacagtactgatttaaaactctgtaactcaaaaagcagaaaaagtgtgatttctgaataactttacaaatccttttggtgggatccaaatgtgagaactttttctgaataagggagttttggtgattctttgggtgttctgagacttttctgttgccgttgttgagctgtgtctgccttttctggtgggcgggcctgccgtgttgtggtggggagcgacttcacacagctggcacgggatgcttcgaagtggggtacgggccagccgccaagagctcacccagcgcgcctgttgctttgggtgcctctgtggggagcagctaatggatgtgtagactcttttgccccaagaattatcttctggaaggctaccagagtagctgcctgcgaaaggaaacctgggcgttactgctgcaccaggattcctggcctccagaggaaggatggtggctgaaggtgagccttctccagggggatgccctggagactcttgcggtcccctccacgtgttcacctcgtcagagtcaagaaacgaggagtgaaaaacacccctcaggtcgcttcatgctgattctgtttaggccccggcttttccctcatgcaaaatgcaggcactctg

SEQ ID NO: 18708 - DNA, 1046 bp, Homo sapiens
gtaaagaaaccccagagtccagcagaacatctgactctggccatattccttcttgtatagcatctgtttgagacaacaaaatcccgaggcagaaggtcgaccgctccttaggttcattctgatggctcagctattcgcccgaggctggtccccgaggctggtgtgctcgcaagtcgtggctggcagggttgccaggcttgtctgcaaaggaccaggggggatgggttttcagctttggggggcacacctggtctcatcacagctgctcaccacggcccttgggtcatgacaggccagcacgtggggggcctgcaggcctgtagatgctcactgaagatggaggttcctagatttgtcatgtggcacaaaatatttttttgcatttttttctgtcattaaaaatcatttaaaagccattctcagttcacagctgtacaaaagcagccagcaggtttgctctgggcgccgtactttgctaacctcaatgtagagtgaattatacttcgtatctttaaaaggcttgtcttctagcattgcaggtgaactttgcttagaaacataactatttttaaaagcacatgtaggtgaagtctagtctttaaaagcacttgcaggtgaaagccctggtccggcgctgtctctgcagtgtgtttgcgggggccaagtttgctctgtgcagtgctgctgttgtccagggcaggtcccacggaggggatgctgcggccaggctccgtggggtggggcaccctgcgacgggctgctcctcttcccagggccaccggtgagactctcagtgcacagagtgcggttctgtgtggaggtgtgggatgcatctcctggccctcccgtagtggggtgcaaccccaagtgaagaccccgtggctcatgtcaagtgccctcagggctggggctgcccacccgcctgcctgggccgtcttgacaccggagctgcctgcctggatgttggagcgcccagtggattgagtgggaagtgggcctgggtgcttacaggcgatggggtcaccagagcccacccaggggcctcg

SEQ ID NO: 18709 - DNA, 1033 bp, Homo sapiens
tcgtaacagccaaggaagacggcgtgcttaaggggccgctttccctgcagaaaaccccagcgtggttggacttggtggtgagcgggtttgcccatctgaggccagacaactgcagggtgcgttagcttgtcaccaagggcccagctctctgccttaccatctcagcttgtcctcaggctagctctgccccactgggaagtgaccgaaggccttcatggtgactctgcaggcgtgactgcacccaacagagacaggtttctggttgagcctccttatccacatgaagcccccaccccagtcatgcttgggaatggtcttgcatcttgcatgggtcagagcagggtcacgcgcttgagctcgttctaggaaaacctgtggctcagctgtgagggcctggctctgagaagatgggttcccttaggagggaaggcaggtagctggcctgtgggggtggccaatcctcaaagtggagagtggggcctgttccctggagcagtgggttgggagggtaggggggtgccatttgcaggggaagacacttgtcttaatgcgcggtggcctgtgggtgtcacaggctccctgaaccatctgtagcagaggcagcacctccaccagcctctgcccagaacacaggtctggccactgtccttggagggcaagtgagtcccagccagcccagacctgtgccccactgtccccacccacccaagtccccagctgcctttccagctgtctgggggaaggggctttgcatcccaggcggtggcccccctaccccaacctcccatggccttcagccacccaccccagggccctggtgtggctcctccattccagctgaggttcaccccttcccgttaggccttcccagctgtggccgggctcgcaggagacagtcctcatactgacccctcatcctaccctggaaggcccctcctccatccagggaacagtatatcgagtgtcatttgacatttgtcttgaaaaagcacaacctggaccaggtgcagtgtttcatgcctgtaatcccagt

SEQ ID NO: 18710 - DNA, 1108 bp, Homo sapiens
tctggcagctcatggtcagcagttccgaaagacccgacccaggcagctgcccacaccacaggcccgggtgaatggcccgcgtcattctctccaaatcaggctgctgtcctggcgatgggaccagctccggctgccgtccgcccatgtcatgcaattgcatttgggaggtgtgatatagaatcccactgtgccagctgctgcccgggagactgtggccaagtcccccgcagcctcagtttccccacctgttcagtggagtgataagatgtggagagcacctcaatggtgctgaggcagcacagggcaccatgtgcagggtctgggtgccagcaccccgtggagaaaggaaagagccgggcagcacacagggctgggattcaaagctgccacctcttgcttggcagaagggacagagccaggacagttgctccatgtgactgtgcttggctggctgcgttccccaggtcccagcatccacaggctcaagtctgatcctgggcaaagccctggggaacagcgaattcagggccatcgttttggacagactgtaagggttggctgtctctgccacccaaggcaagggtgtccctctctggctttggtgtcctcttcatcaagtggagggctgagtggtccccacaggcacaggcccaatgcctcgggatcgggagcctctgacctgtgtaggtgggaaggctcttgggacaggtggggccgggggacaggaggcggcggggagcagtgcggtctgtggcccacggcaagcacccgacacatcttcaggagatgcgaggggacaggcttatggcggccacatctcatcggctttcaagagaagcctgactgaacttttctgtaacatctcttggctggaaatttttatgagcattttgaaccctgtgcaggcaggctgggtttgcagtctgtgggtcagagctcaccaatagaaatagctagaaaaatttagtataatatgatatacaacataatgtaataaagtataatgtaatctaaagatatgatgtatgacaacctgtcatataacacataacatgatacggtatcctattatgatgcagatacattatatcacataacatcatacaat

SEQ ID NO: 18711 - DNA, 1075 bp, Homo sapiens
gcccatggatcccacaggccagatagaaccctaggccatctgggtagggccttccggaaggagccggggagggagggtccctgagcccctcctattccagcccaggcagctgctgcagctcagaacaaggtgtttttcacacactctcagagtttgattaaacaaattattggtaaccacaggatgactaattcactccaagcttcaaagtcacccacctgctctccccagcagcccaacgcccacccgtggggctggcagtgccatctggcaagggccatttccagttccagagagggctgggttgggcccagagggagatggggtggtttctgtgatgtgttatgaacatgagtgggatgtcagcacagagccatccacactggccttccatgcgtgggaggcacccgggtgttgaggctgtcagaggccaccttaccatgctcatgacccagagtggtggcagagcatccaggaaagaaggggctttggcagcctggctgaccctggtgctgaaccacaggggacaagttactgtgctttccacagctctcagtttccccctgttggaaacatggatatgatagtgtctgccatccaggggctgcaggtcctgctctcagcttacctggtccttggcccagttgcctcgtccccagtcaccatcctgaggggaacggtgcctgcagcctgcttgatgcttaggctgcgaagccatcattgtcatctcagagtcctgatcccagccacgtttttctctctttctctctcttttttttttccttagttaaaatttttttacaaaatagacatggagtctcactacgttgcccaggctggtcttgaactcctgggcacaagctatactcccagctcagcctcccaaagcactggggttccagacacgaggcaccgcacctgccctcaagccacatttagcagagggaattagagatcgggaggtactctcaaggccccccacccctaaacctggactccagcagggtctggcggaccccggagtccacgccgtcacccagctctgggccgattgtggtttaccccctttcctggg

SEQ ID NO: 18712 - DNA, 1030 bp, Homo sapiens
acgcccccgcgagcccaccgccccgacccacccgcgagcccaccggccgctgacgcacctgcgagcccaccgcccctcacgcacccgcgagcccactgcccctgacccacccgcgagcccacaggccctgacgcacccgcgagcccaccgcccctcaagcacccgcgagcccaccgcccctcaagcacccgcgagcccaccgtcccgacgcacccgcgagcccactgcctgcggcgcacagagccaccagatctagagggagagctgagcactcggggtgctctgaaagtcatcatcatcatcattttgcaaagaaagcccccaaatagccctccctgaaacaaggcagccaaaaataagaagtcgctctcaacaggcccccacaggagaaaagaggccggccttggagaggggttgggacttggggccaggtcccagctgtgccggcctcttggctgtacgaccttggaccagtatctttcccactcagagtcatccctgaatggatgtcagggagccttcgaggaaaggggagagcctgcactgtaactgaagccccccaccagccccatgcagctttctgaccctagacttggggctgggaccagtcacccagaatctgatacccccagggccccgccccccagagccccacccccatggccagggcaccactgtcctaaccagcctgttggcagccaatggaaatggggtatgcaaatgagcaggggtgaggcccagggattggctgagctgctgtgtgggggcagggcctcctccaggggctgcccttgacctgggggagtagttcccatcctggaccctgccccaggacgggagacctctgccaccaccaccaccggctctggaagggcccgccttttaggggcctcgctgtctgggcacaggcggatggacaggctggcctctggatgacctgccaaccgtcagagcccagacccacgtggcctcagttggggaccaggacccaggagttcccgagaggagtgcagccagcagccactcccag

SEQ ID NO: 18713 - DNA, 1057 bp, Homo sapiens
cccctgggacccagcacctgcccggcccctgccattcaccccaggcccccaggactgccaccctccactgccccttgggccaaccctagcgggaggtgggctggacaggccccagaccgggcacgcctcatgcctgcgatgtctctctgcagacgagctggagccggtggtgcaggatgggcagaggcgcatacgggcccgactcagcctcgccacgggcctgtcctggggcccgttccatgggagtgtccagaccagagcctcatcccccaggcaggcggagccggtaagaagcccccatccccgcccctgcccgcccaccccaatgcagggcaacatggacccaggggacaggcccagcttagatgccagctccggggctctggccacttgaagatgtgggcctgagatattgggacctggaggatagggagggattcgctgccttggggcccagggagggcttcctgtaggaggtgatatggggcctttggtgccccagggaggacttcctggaggaggggttctttaagcaggaccttgacagatgactgggcattgaagcagaggagaagagcattcaaggggagggaggaacaaaccaatggcccaggccttggggtactgggacggtggggatgctacagcagagagcgagagggtagttctgtgtctgtccccgcggactcttctgacgacaggcacggccgtcaggcccatggtctccatggcctcggcacgtgtgctcatctccttggtgacagcccctgcctggcagagccttccaaggcagccccttgctgctagacacaaaggcctgtgtcgtttgtcttggatgtacttctggggctacctccaacttatgacaagtcagttcggtttcctccgaagagggtataatggtttcttttaaaccacgtctcagctaagaaagggcactggtatatagaaacctgtaagtacgtgtggggctgcatcatgggcggcatagggtctggggcctcctgggccattcacacagccttttgcagctgagcgggcagacgcatgtcccagg

SEQ ID NO: 18714 - DNA, 1034 bp, Homo sapiens
cctctgcgtgtggtgcaaagtgtccgttctagaagacatttttctcgttgctttcaagtagagccctggtgtcacgtctactacccagatgtttctctgtggaagaattactctctttggcctgtaccttcgcaaatggatgtttctgaggcctcatagcattccaggtcccagcagggtcttaccggcccagtcaggagagggactgattcgcctagaggctttccctgcatgcctgcagcctcgtggcctaccccttggcaccctggtctactggatacctggaaggattgaatggcaaagtctagagagccgtttgatttggcattcttttctctttttcttagttttgatttttaatttttgttgcttttaatttaaaaaacagatggggtctcactatgttgcccaggctggtcttgaactcttggcctcaagtgatcctcctacctgggcctcccaaagtgccaagccactgtccctggcctgatttatcattctttttcagaagcgctttctcttctctcagggcacatgtcccttttagattttgggtcactgggacaggtgaactgattatggggtacactttccttgatcgggacatcaatttgtacaataagcccttgaaattgtttaaaccacatagcttgtgcctaaggccttgaatctgtgtttggtatgctgccagaacaccccctgatgcaagtatcttctggaagtgccgctggcctgcgtggtggggtggaaagtttccgtacagggctgggaccagcagtttgcagcacctggctcatttgtggtgtgggtgagggcgtccctgacaccagctgaccttcagtcaccggtctcttacctgttcaggaagcggcatggaagagagctgggtgcagcaggccttgtttttatgctcctgccgtccaaagagtgcgtggagcccaccctgacccactcatgccatgtggcagcctctcctttctcctgcacgtctagtctctccccagaaccacctttcctgctgggagatgacaagc

SEQ ID NO: 18715 - DNA, 1044 bp, Homo sapiens
ggtgtcagcttgtctggctccttaaagaagctcattggtgtttttgctgggattgtgttaaatttatcagtcagtgtaggaaggactgacttgtgggcgattccgagctgcgctctcccagtgcaagaggcgtctccccattattcatgcacgctttgtgtcaggtttcaaaacccccatttattcatgcacactttgtatcaggcgtctccccatttattcacacgcttcatgtctctcaggcgtctccccatttattcacaggcttcatgtcacgtgtctccccatttattcacacacgcttcatgtctctcaggcgtctccccatttattcacacacacttcatgtctctcaggcatctccccatttattcacacacacttcatgtctctcaggcatctccccattcacatgcttcatgtcaggcgtctccccatttattcacgcacgcttcatgtctctcaggcgtctccccacttattcacacacactttgtgtctctcaggaatcagctctgcacatttctggtgaaatgtgttgatattttattcctaagtacttttttcttctttcttgctattgtaaatgcggttttctccactctgcctcctaactggttataatctgtgtctgtgaagacactgatttctatgttaatttttttatcctctgcctttccaagtttcttcattgtttgtttgaattggctttatcaagtctctgggtttttcatgtatagtatcatatcattttgcaaatctgagctcgttttgctccttgttttcgtgttcttgtgcctctagtgggctccccttgtccagtcagggggtgcctccacacagggacaggtggttgcggagactcctgggggagctcctcctattccccagtgagtaaggtgctgacttttgttccaaagtgtgtcagtatatttttatcatgctaaagtatcacttcctattttctttccttttttttttttcttatttaattttcaagacggagtttcactcttgttgcccaggccggagtgcaatggcaca

SEQ ID NO: 18716 - DNA, 1096 bp, Homo sapiens
cgagcgtcacaggcatgcagtgtcgttccccgagctgtgggtccattgaaaggggatgtaggccagcggggccccgtccaccagccctgccctgctcgagcctccctgtctcacagagagaagtcagtgaagaagccggccccgcctccagccccaccacaggccaccaaaaccactgctcctgtccccgagcccaccaagccaggagaccctcgggaagccaggaggaaggagcggccagccaggaccccccccaggaggtgagcactccggcgtccggggccctcaggctttccgtgttcttggtgccactgtgatgctggcactgctggaaatccagagtgccagggtccagagccaggtggtgggaagcgccccctagccgagcagcacccagtgagcccttacccgggaacctgccctgtcccctccctgagcctgtgtttctggagcgtgaaggggaagggacagcgtggcacggagcacaggccttcccgccatggccccgtctgcactggaaggtgctgcccccgagagactgtactttttatcttgacaaaacactgagcctaaaggaagacaggcccaggccctgttccaaggtggtagcaaggccagtctggaggctcacctcacagggctgctggtggggaggggaggccgcgaggggctgtggaggccacgccccctgagccccgctgttgcttgtattacaggcggacgctaagcggcagcggcagtggcagtggtagcagctatagtggttccagctcccgatccaggtcatccccatcaccctgtgcctctgtttctccctccccgtcggggccaggaagtcccagaagcagccagtgtgggttgggctgtctcccacaggtgggctggggcccttctggatctgagtcaccctggggctgtggaaggctgcggttgaagctttgacacaggagaaaatgggccaggactcgtgataggaagaccccctccccccaccaaaaaaagattcacaaactcgggggcactcaggtcaggaggaggtgcctctgccctgctgacttgatgcccagcaccctgagagagcacctgcacctgggga

SEQ ID NO: 18717 - DNA, 1028 bp, Homo sapiens
ggtgacttttgtcattaagaaagactggggtgggtgtggtggctcacgcctgtaaccccagcactttgggaggccaaggtgggcagatcacgaggtcaagagatcgagaccatcctggcgaacatggtgaaaccccatctctactaaaaatacaaaaaattagccgggtgtggtggtgggcacctgtcgtcccagctactagggaggctgaggcaggagaatggtgtgaacccaggaggcacagcttgcagtgagcgaagatcgcaccactgcacgcactccagcctgggtgacagagcgagactccgtctcaaaaaaaaaaatttcaagactggagaggtgatcctgaattgtccagctacgccccatgtcatcacagggccttcatgacagggccagagccagccagctttgaagacgcggccctgccccgacacaggcagcctggagaagctgggcaggacaagtaggacatccctggagcctccagaagggactggcctctgcccacaccttgacttcagtatttctgacctcctaaactctaataaagtcatgcttacagccactagatctgcagaagagccctcgcttgctcccctagaagatgggcccacatggcctcttcctgcagtgcctggagggttctagctcctgaggtgagaaccaggacaggttctgctgggcatcacgccaagcagcacatgcccacagtacagctgaagtctggtgttgtcctggggctccctgccctggggaacaggaggacaggagacggctcttgtgggaaagctgtttactgcgttctcccgctgtgtgtaattgggttcagtgtggctgaaacacagctttgccccaggctttggcacttccagccccaggagaggcgctgaaccccagcaaaggaatgtgttccctgtgggcagccggtgcccctggtcactgcagttgcccaaggctgatatttccctgggatccagctggagatgttgggctgggaggccctgtggtcactcatactgcaggag

SEQ ID NO: 18718 - DNA, 1041 bp, Homo sapiens
accgtcgagccggcggggtccgtgttcaggcatcctcagaacgaatcgtctttggttgtgtttggaataaattcacttccatttctcattgggcttcagaagtcacccttgaagtactccccgttttagttgtttgctgcgtgcaccttgctgggcgcgtggggcacaggttcacagccggcctagcccctgagggcatgtagatctatgagcaagcaatggagacgtgcggccggccgtgaagtatttggaaggtactgcaggcagcccattccctggagagagggaaggtttaaaggggtgaggcccggtgcagtcaggagttgatgttgctgtcctgagtctaaattccaccaggcaggccaggtgcagtggctcatgcctgtaatcccagcgctttgggcagcagaggcaggaggatcacttgtggccaggagttcaaagccagcctgggcaacatggtgagacccctatctctacaaaaaaatgtaaaaattagctgggtgtggtggcgtacacctgcacttccagctactggttaggctgaggcacgaggatttcttgagcccaggaatcggaggctgcagtgagccatgacagcaccattgcactccagcctaggtggcagagcaagacactgtctcaataaataataaaactgaaaaagaagaggtgatatttgaactgggcttggaagaatgattaggaatttgctagaaagggaacacgtttagagataggaacacgaattgtgtctggggcatagttgttgctttcccatcctgggaggacagacattcgtgttagggcccaaggctgagaccttgttgaggagggggttcacatggtggacccaggagcacgggtgttactaccggtggaccctggggaccctgcgagctttgtagcgtgaagcctggctcaggctggtgtcctctccgcaggtgttggaggacataagatgaggcttcccttgctcttgctcctttggctctgaaccatctcctcaaggcagacagaaatggcggattaaactgtggg

SEQ ID NO: 18719 - DNA, 1065 bp, Homo sapiens
tgaggaggccaagcgcccacgaaccgcattccctgccttgctagttagttctccaacacgcgaaaaaggtagacgaggactggttttctttgcagctaaaatgaatcaagcctctggtaagtgtggatcctgttctaagtgcacctgtgttctcctccagaactaaaccaaaaagcaaggtgaacaaaatcggtgctccttcagtttcttctttagttctgcatgttactggggactaagacaacgggtaagcaaactatttataggcctcaatttacgaaataacggaattgcaaagtccggagtggataggaccgtgaggacggtcttttttcttgggcaacacgcattatggtcgagagatcagttgttaaaccgcccctgttcaaatcccagccctaccagtgactagcggtcaccctgtaggctttgtctctcagatcttcagtttcttggtgggtaaaatgggaactacaagtagcacctattcttttttttttttttttttgagtcagggtctcactctgtcgcccatgctggagtgcagtgctaactgcagcctcagcttcccgggctcagaggatcctcccaccttagcctactaagtaggtgggaccacagtcaggcatcaccacacccggctaattttttaaattttcgtagagataggctctctgtgtgtttcccaggctggtcttgaaatcctggactcaagcgaccctccctcctcagcttcccaaagtgctgggattagaggcatgagccacggtgcgggccaggagcacctatttcataggcccatcgggaagattaaatgaaggggctgtggaggctgtagcacggtgcttggcacgtatgtgagctctggggaaacattagttatgctataactggaccttcagccttctctaggcagccagatttcgggctccacccacaactagtcacgccattggatgaggggtgagcgcctgataaaaacagccggcgtatgcgctgatgtgcgttcacgaagaggtgatccaagtgtttccatatttgcctcactggacgaagtatttggta

SEQ ID NO: 18720 - DNA, 1096 bp, Homo sapiens
gcaggcggatcacctgcaccctggccaacatggtgaaaccccgtctttactaaaaatagaaaattagccgggcgtgatggcacacgcctgtaatcccagctactcgggaggctgaggcaggagaattgcttgaacctgggaggtggaggttgctgtgagtggagatcatgccattgcactccagcctgagcaacaagagcaaaactccatctcaaaaaaaaaaaaatttaaatttaaatttaaaaagaccctatctatacagaaagaaaagaagaaaataattggccaggcgtggtggtgtgcacctgtagtcatagctcaggagttggaggagcttgagcccaggagttggaggctcagcttcagactcacagccccagggggcagaagggttgaactcagcttcaggaatgctttgcttttggatccttgaggcctctcgctggaaatcagcgttgttaagatggacgccctgctcagcagagctcatctttctagaaaggcacctggccttggaaggcgagtgaggaactgtcataaggactttttcttcccatgttgcttttcaggaaagctttcaggatgtggaaatgatggttcagctattggatgaggggattattattgtgaattcgagtttagcaggagtttgtttcaggagtgacgtccttcttgattgattttgtgtgagacgctgcatttgccaaggccagggacagctttactctgtgagagaggagctctgactctccctactgagctctcgaggggaggtcataactgcgggaagggacaccagtgtttcgcaggtggattcagtttaggcgtttctggctttaggctcatcttcagcttactgttggttttacggtaagtgtcaatgcttacagccactcagaactatcttctaaaagacttctgaatcttcatacaaaattgttctgaattgatttcagggctctttccctgtatacttcaacatttcaataaagtgtgtcctttgacttttttttttttttttttttttttttttttttgccagaatctcactctgttgccccggctggagtgcagtggtgcgatctcagctcaatgc

SEQ ID NO: 18721 - DNA, 1290 bp, Homo sapiens
aggactgctgacttgatcagacaggcacaacacagtcccggccctcaggcaggccttctccctggtctgatgctgaactgcatggcgtctgttcagatgaagattcttttgccacctccttaaatgaaagaacgatactgaatgtggcttagaaacagctttgccagccgtgcagaatgattgtaagtagtggttgcccgaaaagtatttgcttggaataccactcactgataacactggtgaacctggaaggaattatacggagtgaaaaaaggcaccactcactgataacacgaatgaacctggaaggaattatacggagtgaaaaaaggctccgctcactgataacgcgggtgaacctggaaggaattacacggagtgaaaaaagaccctgctcactggtaaggcgggtgaacccagaaggaattacacagagtggaaaaaagactccgctcactgataacgcgggtgaacccagaaggaattacacggagtggaaaaaaggccccgctcactgataacgcgggtgaacccagaaggaattatacggagtgaaaaaaggccgagctgaaagatcacatgccgtatgattttttttttatacagcattctctaaagacaaaaattaaagagatggaacacagattcgtggttgctaggggttaaggatgggggaaggagacagccggagggagcctgtggttggattgcctcagctgcggtgggcacacactgcgcgtgtgtcatgggatgaccccggggagcttggtggaccgtcgtggtgggagagcctggctgtgatactgttcatagttttgtgagatggaacccctggaagcagggggacaaggtattgctctgcgtcatttatttttatttatttatttttttttgagatggggtctggctctgtcacccaggatggagtgcagtggctcgatctctgctcactgcaacctccacctcccgggttcaagcgattctcctgcctcagcctcctgagtagctgggattacaggcgcgtgccaccacacccagctaattttgtttgtttttagtagagatggggtttcagtatgttggtcaggctggtctcgaactcctgacctcatcatctgcctgcctcggtccccacaaagtgctgggattacaggtgtgagccactgcgcccagcctgctctgtgccatttcttacaactacatgtgaaggtacagttacttcacggttgctaactagaactagaaaactagaaaaaaagcagttgctaacattttttttttctttttttg

SEQ ID NO: 18722 - DNA, 1208 bp, Homo sapiens
cctgggtgcgcaggcacaaatgaccacaacactgaaggcgtggcgggaagaggtgcatcgggcagcgcagtggaagggacgcgctgggcgtttgggttgaacagaagttaaggacttcatgggaaggagatggggggtcttgcaggcagaggaagttccttttatacctagagtgcttttgtttgtttgtttgtttgtttgtttgttttgagatggagtttcactcttcgttgcccaggcaggagtgaagtggcgcgatctcagcccactgcaacctccgcccgccatgtttaagcgattctcctgcgttagcctccctagtagctgggcttacaggcgcgtggtaccacgcccagctaatttttgtatttttagtagagacagggtttcaccatgttggccaggctggtgttgaactcctgacctcaggtgatccactcacctcagcctcccaaagtgcctggatgacagtcgtaagccactgcgcccagccccagctacgttgtgttttttttttccccctgtagagatgggttttcgctatgttgcccaggctggtttctaactcctggactcaagtgatccacctgtctcgactcccaaagtgctgggatgacaggtgtgagccattgcgtccggctggaatttcttatggttcgtttccttaggttaaagtttcagaagtaggatttttgaattaaagaaactaaatactgtctatggcgcttgatacatcttgccaggcagttatcagacagggttgtactggtttgcgccaccccagaacgtgtgcaaggcctgtttgtggaccctccttggcctggctctctaggtcatccacctgcgtgtgctcacagagcatatggatttttccctgcggtgccttcacttgtggctggaagagccttctctgtgatcctgtgtcctgggtgctctgttggcctccttcttgccaccgaggaagacacggaggctagagagggctcactgaacagtgaaatgattggaacctaaggagcttcagcagaaggtgtcatgatggggctaggctctcccgagggctgtgtggcctcagcgtcttgttgggcagatcctgctccctgacacagcggggctaagagccagcctgtgtcacacacctgtgaattaacatgcctggctgaccctcactggagaagggctacacgtttgtgacgaaagcagaagag

SEQ ID NO: 18723 - DNA, 1033 bp, Homo sapiens
cacttgagcccaggaggtggaggctgcagtgagcccagatatgctcatgaagcactgtgggtttctcctgcagtgcaccaccgcactccagcctgggtgacggagagagaccccatctcaacaaaaataaaaaagaaaagaaaatgggacactgttgatacagtcacagagctgaaggagcagcatgggtcgtgattctggatcgtccctccagggcagctagagtagctgctgggaagtatttctctcagtttcccgggagcagtgtgggtcgtgattctggattggccctccagggcagctagagtagctgctgggaagtatttctcagtttcccagtgcaccccatgtttctagtagaaaacacaattggtaattaaatattggaagtagtttctaacaattggatactcacctgagaacataaatttgctctctgaaataagcggtgggctttaaataattgcctttgtgaatatgaaatttaagtattagatgcacgattaggatcgattgtaacaaaacagtgatatctaaaatataccttcatgttttcaaagtaattattttgccacctttttagtgggtttcattttgtgtttttaagccgatttaaaaattgtttgaattcgtctaaaatgattgttggaaaggaaggtggtacatgggacgtgcccaggccaggctttgatcccagcatgaagcccccgcaagacaatgcaggaggagaagagctgtgaatctcaagaagacgtgagcctctcgtcccggctgctgggtccgtggcggtttgtccgcaggcgcaggtgttctggaaatgacgtcgttaccaccgctgggtctgtggcggtttgtccgcaggcgctggtgttctggaaatgacgtcgttcccgccgctgggtccgtggcgctgtgtccgcaggcgcaggggcgcaggtgttctggagatgatgtcgttcccgctgctgtgtccgtggtggtttgtccgcaggcgcaggtgttctgcagatgacgcccttcccagaactggagg

SEQ ID NO: 18724 - DNA, 1515 bp, Homo sapiens
ctacagatgcacaccaccacatccagctaagtttttttgtatttttagtagacacagggtttattcttacatttttcttttctttttgagatggagtcttgctctgtagctcaggctggagttcagtggcacgatcttgactcactgcagccttcacctcctaggttcaagcatttctcctgcctcagcctcccaagtagctgggattgcagacgcatgccaccatgtccagctaatttttgtatttttttagtagatatggggttttaccatgttggccaggctggtctcaaactcctgaccttgtgattcacccgccacggcctcccaaagtgctaggattacaggcgtgagccaccgcgcccggcctgagatttgctttttactcttaggctgatcttgcctgcctgattgaagctgatcgcttacatttgaaaacaaaatatactgaaaatagaaaaacctgaacgttgttattgtcacaaggctggctagatctccggcatctgcacactcagtctgaccatttgggaagctttcatgaaaaagcacagtcagcgagaatgagacgagagaacccatttccacaaccattttaatctgcgcatcggtcccagacgtagggattcctcgtctcatcttggaaacattgccagcagtggttctgatttggaagcctgcgtctgtcacgtgacaccgtctgagcctgtgcctgcctctctttcttccggcagtgccctgtactctgtggggatgacggcagtgggcctggccatcctgtggtatgttttccgtctggccgggatgactggaagggaaggtggattcagtgcttttgtaagttctgtaaatcagagctctctgaactctttctggtttgtgtttgctgaatacttttcccataagctatacgatgaatacacagggaaaacctgttgcagagagtagcctgaagccacaattagacagcagctcaccttcctttcccatggtccggctgtaaggcgtgtagtaaccaatgttgcctgagggcctctcacccctaactctggggtgcctgagccttgtgagattacagggcagttgaatctgcgtttttcttttctttttttttgagacggagtttcgcccttcttgcccaggctggagtgcagccgtgcgatctcagctcaccgcaacttgcacctcccgcattcaagcaattctcctgcctcagcttcccgagtagctgggattacaggcacgcgccaccacgtccagctaattttgtatttttggtagagacggggtttctccatgttgttcaggctggtctcgaactcccgacctcaggtgatcctcccgcctcagcctcccaaagtgctgggattataggcatgagccactgcacctggcctttcttttttgtgtgtgtgtgtgtgtgacagagtctggctctgttgcccaggctggagtgcagtggtgcgatctcagctcactgcaacctctgcctcctgggttcaagcgattctcctg

SEQ ID NO: 18725 - DNA, 1048 bp, Homo sapiens
tgtagttgggggtctcaccttgttgcccagcctgctcttgaactcctgggctcaaatgatcttttcacctcagctcctcaaagtgtggggaatacaggtgtgagcccccatgcctggcctctcatgggtatcttatagaagttttatatttaatccatgatcttattttaagttaacgtctacatgaagtgggaggtttggtcaggttcattttctgcctgtggaaaagtgctccagccccactggtctgaaatgctgtcttctttccaccaagttgtgcttgcacctttgccggagctcaggtgcatgtgggggtctgtgctggctctgtgagtctgtccttccgcacacaactggtctctcgcttctgtgagacgagagcaggtggagtgattcctcccactttgttctttaccagaattgtttcagctattcctttgccttttcctgtaatttttagaatacgcttgttcctatctaccaaagtatcttgctgagattttgataggaacacacacctcttaggagagctagagtaaagagcagtgaccggcccagatctgggccatacgtgtgatcccagcattttgcgcgtctgagttggaagcattactttagcccgggagtttgaaaccagcctgagcaacatagtgagattctgtctctaaaaaaatacaaaaattagctggcagtggtggtgcgcacctgtagtcttagctgctcagaagattgaggtgggaggatcacttgagcctggcagttcgaggctacagggagccgtggtcaccccactgcactccagcctgggcaacagggcgagaccccatctcaaaaacaaaacaaaactcaaaaaacagtgacaacaccacacgctgctgaggatgcaaagaaaccagatcccttgtacgctgctgatgggggtgtgacgtggtgcagcctcactgggaaacagtttggcagcttcttaaaaaactaaacgtgtgctcaccatgtgaccccgtgtccacatgcgctcaccacatgaccccgcatccaccctcctgggtgc

SEQ ID NO: 18726 - DNA, 1044 bp, Homo sapiens
tgatctcccttgtagaaatgtgactgggacttagcatcccagcttatcacattctgacgtgtggaaccagggagaatggttgtgtctttcaaagtttctttgaaattcgggagcgatttgcttgggagtggggtgtgtcttggactgagctgctgtccagacctggcggctacggcttagtgaggctcaggacagtggccctggagaagctggtcaggcccctcagcctcctcagagcgttcaaggtcctgtcctaagaacatggggttgctggagccagggtctcactccattgcccaggctggagtataggggcatgatcatagctcactgcagccttcacctcctaggctcacatggtcctcccaccttggcctcccaacgtgctgggattattaagggtttcttacattagtcacggtagatcctgctcttacattagtcatggtagatcctgttcttttttttttttttttttttttttgagacggagtcttgctctgtcgcccaggctggagtgcagtggcgtgatctcggctccctgcaagctccacccttcaggttcacgccattctcctgcttcagcctccggagtagctgggactacaggcgcccgccaccacgcccagctaattttctgtatttttagtagagatggggtttcactgtgttagccaggatgctctccatctgctgaccttgtgatccgccctcctcggcctcccaaagtgctgggattacaggcgtgagccaccgcgcctggctatatcctgttcttacattagtcacgggtcctgttcttacattagtcaaggtaggtcttgtcgtatctttacttttaacactgtttattgtggaccttttcctttttttttttttttttgagagtcttgctctgtcgcccaggctggagtacagtgacacaatctcggttcactgtaacctctgcttcctggttcaagcgattctcctgcctcagtctcccgagtagccaggattacaggcatgcgccacacccagctaatttttgtattttagtagaaa

SEQ ID NO: 18727 - DNA, 1049 bp, Homo sapiens
actctgaccgatgtgaattctacccagctcaactgaaacttacgtgttccatactttttatcctgaactcgtcaagtgtgttcccccgaggtagaaagaaggctgccacagtctcctgtgcctcttcctgccattagcaattaccaatgttttgtcagttttgtttaatcttttcccaagtcttacacttttttcttgaacatttttttaaaacaaagctttaattttagagtaggaatttttttttctttttttttttgagacaaagtcttgctctgtcacccaggctggagtgcgatggcgacatcttggctcactgcaacctctgcctcccgggttccagtgattctcctgcctcagcctcccgagtagctgcgactgcaggcatgcaccaacacactcggcttttcttttttttttttttttgagatggagtctctctctgtcacgaggctggagtgcagtggtgcaatctcagcttactgccacctccacctccccagttcaagcattctcctgtctcagcctcccaagtgtctgggattacaggcacgcgtcaccatgcccagctaatttttgtatttttagtagaggtggggttttaccacattggccaggctggtcttgaactcctgacctcaggtgatccgcctgcctcggcctccccaagtgttgggattacaggcgtgagccacagccccacgctgattatagtgttagatgtagaaaagttgcaggcgcggtgcagagagctccctgccaccctgcctcgctcccgtggaggcccccatggggcagtcctcccacctgaggagcccccgccgacccgcggtgttgggtccacacgtgattcagatgtgctgagtctccccagtgtcctttccggtcttgggagtccacatggcgtttgatcgcccatcttcttaggctcctctggggtgacagttcctcagacctcccttgttttgagggctctggcagttttgaggattggtctcatgttttgtaggacgttcctcagttgcgattgtctgatgtgtttctcacag

SEQ ID NO: 18728 - DNA, 2018 bp, Homo sapiens
tctcgtccgcagccgcagggccgtaggcagccatggcgcccagccggaatggcatggtcttgaagccccacttccacaaggactggcagcggcgcgtggccacgtggttcaaccagccggcccgtaagatccgcaggtgagccctgcgctcggggctgcccctggggctcgtgcccgcggctgcgccttggcttgcgggtggccgatgccagggcggggggcgctgtctgcaaccgtcgcggagcgctggcctggcggccttaggcaagggtgaccgccgctgcgcttctctccaccagacgtaaggcccggcaagccaaggcgcgccgcatcgccccgcgccccgcgtcgggtcccatccggcccatcgtgcgctgccccacggttcggtaccacacgaaggtgcgcgccggccgcggcttcagcctggaggagctcagggtgagtactggcagcgctgcggtgtcaggaaggccccgaagtcccctctgttggcctcagtcgcgtgatgacattctccggaatcgctgtacggccttgatgaaagcacatttgaacccttttccatctgattgctgaggcttttcatccaggcctcggggctggagaaagcccgggcctgtctccatctctctctggttctggggcaggtggccggcattcacaagaaggtggcccggaccatcggcatttctgtggatccgaggaggcggaacaagtccacggagtccctgcaggccaacgtgcagcggctgaaggagtaccgctccaaactcatcctcttccccaggaagccctcggcccccaagaagggagacagttctgtgagtacacggctctctggccgtcctggtgcgcggggacagtgaggcttggctcctttatcagtgacaccggtccctgggtcttgctggggtgagaagaaccaaaacattgtgggtgatgagctaagcgggactgctaaggttcacctgtgcgtttccgcagagataaccttaatggacatggcaaggctgtgtgacttggaggcagctttttccattgacgttgctctccctaaaatgcttcgtattccaaaatatttctagaaagaccttgtaggataaggttgataaagagtccattgtatacgtttccgggtagttaaattagggaacagttttctctgccccgcccgtggttcacaggtagataactgtctcgtgcgtgttgcgtcaactcagtaagatatagtcacctaactaataaggactgttcttaacattggggccacaaagtgtgttgtagaaaaggctcagacactggtcctgaacacggaatccccaggggaaagtttggggccaggtgagggtggagtccttgcagcagtgcggccaaccccacttaactcttctcattcaccaacaggctgaagaactgaaactggccacccagctgaccggaccggtcatgcccgtccggaacgtaagtgaacacttactcaaatccaggcttcagacgagatcagtgggtgaacacgtgggtatctgagatgcgggtgatgggggtcaggcttaagaacgttaatagtggcagttgtgggtgtggaggtttgcggaaaggaacatttcttcttagtttttacttcttgcaaccatgaagccatacattgggaagtatttttgtttgttttgtgtttttttgttgttgttggaaagagagtttctctatgctgcttacattggttttgaattgctgggtttacaggcttgagccgccatgtccagctcagggagggtttttctttttttttttaaatcccagggaaggtgattgactcagggttgcttttcagcagtacttatggcagcgaacctgacccccaatccccgggaggtcctccaggttctcctgacgcttggttgttcccttgccctttggtgcatgtgggtttaacaacctgtctttctcttctaggtctataagaaggagaaagctcgagtcatcactgaggaagagaagaatttcaaagccttcgc

SEQ ID NO: 18729 - DNA, 1053 bp, Homo sapiens
cgtggggggtgcaggggtctccagcgctctgccctccagcctgcttcctccctgcccacaccgcactaggggaagggcctttcctgctgcctgcggggccgcacctggagtaggtaatgccatgtggtgacgtgaatggagcagaggtctgtgccccatcacaccgccttgctgtttttactgtgggacaaaagcactctgatctgcgtgttccgggggccctcctaccagccgacttgacgggaagtcagggttcaggtatcatctgtgcacctggggcggggtagtctgcactgaacctgccagagtcccctcctcatttcactgaaagtcacagtctccagggctgtgttgctaaccttacgttctctccgtttgcttaatctattaagagccctaacaggagaggatgggctttctctgttgtctggggccctgctgttggccggtgctcttagcaagaggtcatttttctaggttgcgctgggacattgtgagtttggtgagggtcatggatgtgggctgggctgggctgggctgggccgggctgcctgctgcctgctgctcccctacctgaaatgcagctagtgcggctctgcccttcctggggctgaggaaggcttctgcaggatagctggggggctgggcaggtgggtgaggcagcctccctgctgacactcagtccttgtagctggagcaagatctcctgatccaggtacgggcctgtctgctccaagaaagactctgccaccagatgcaaaggggccctttgttttaacttagtccctggggaccgcctgattcagcacctgtcggcccaggataccccgctggtggggacaagtgcctgagtgtgggccgtgcccgagtgtggccatccctgagtggggccgtcctgactaggaagtggcttttcagttgtgatgtgtgggcctgacctagggggcgctgtggaacccgggctggaaccagccctctgtgccaggccgcagacaggttccgccggccctgaggggcagctgccatggcgtgggtcactgggagctgagagga

SEQ ID NO: 18730 - DNA, 1017 bp, Homo sapiens
ccatcacacggaacatcccatcacctgcagacacagaacatctcacccatcacacggaacatcccgtcacccgctgacacagaacatctcacccgtcacacggaacatcccatcacccgtcacacggaacatcccatcacccgtcacatggaacatcccatcacccgtcacacggaacatcccatcacccatcacacagaacatctcacccatcacacggaacatctcacccatcacacggaacatcccgtcacccgctgacacagaacatctcacccgtcacacggaacatcccatcacccgtcacatggaacatcccatcacccatcacacggaacatctcacccatcacacggaacatcccgtcacccgctgacacggaacatctcacctgtcacacggaacatcccatcacccgtcacatggaacatcccatcacccatcacacggaacatctcacctgtcacacggaacatcccgtcacccgctgacacagaacatctcacccatcacacggaacatcccatcacccgctgacacagaacatctcacccgtcacacggaacatcccgtcacctgtaacacggaacatcccgtcacccatcacacggaacatcccatcacccgtcacacggaacatgccatcacccgtcacacggaacatcccatcacccgtcacatggaacatctcacccatcacacggaacatcccgtcacccgctgacatggaacatctcacccatcacacggaacatcccatcacctgtcacacggaacatcccgtcacccgtcacacggaacatcccgtaacccatcacatggaacatcccgtcacctgtcacacggaacatcccatcacccgtcacatggaacatctcaccaatcacacagaacatctcacccatcacatggaacatcccgtcacccgtcacacggaacattccgtctcccgctgacacggaatatctgatcacccatcacatggaacatcccatcacccactcacacggaacatcc

SEQ ID NO: 18731 - DNA, 1088 bp, Homo sapiens
cgagactcagtctcaaaaaaagaaaaaaaaagcccaaacgtgtggttgcctttctgtttggtgagcaagacgtgagtgggctccctggtacaaattccatttgaaatttcctcagttgttccatcagctgccaaatttccacactggcaacacccttctgtttcagctgggacgatgccggagtgtgaaggagtttgagaagctgaaccgcattggagagggtacctacggcattgtgtgtgagtggccaaggctaggacatgtggccgcagctcgtggctgtgacagtgtgggacgagactgtcgaagcagcagccgcgttggggctggaagggactcagaccctgtgctctgaaacagggcagaaacctgttcaggaacttcaattcctgatgtagttatcacaaacattgtaccatttctgggtaaacgtaagcatccggttgctaatgcccataatccaaacgtgtcactgcagagtacacagaactgttagagaaataaaatacagaactttccagaagcagcaggagctggacatggtgctcatgtctatcacctcagcaactctggaggagtcacctgagcccaggtgttttttctttttgtttgtttttgagatgggtcttgctctattgcccagactggagtgcagtggcatgatcatagctcactgcggcctcgacctcctaggctcaagtgatcctcccacctcagcctcctgagtatctgggaccacaagagtacataagcacacccagctaatttttaaatttttggtagagatgggatctccctatgttgcccaggctggtcttgaacttctgggctcaaatgatcctcctgcctcggcctcccaaagcactgggattacaggtgtgagccactgcacccggccaagcctaggagtttgaggctgcagtgagctgtgatcacgccactgcaccccagccttggcaacagagtgagaccctgtctcaaaaaaaccaaaaacaccacacacaactaaaggttataacagatgtgaaattggcgtaggtcattctggaagctgcacacattagcaggatgttttgtagagccatctt

SEQ ID NO: 18732 - DNA, 1033 bp, Homo sapiens
gcctgcgtcatccgaacatcgtggagctgaaggaggtggttgtggggaaccacctggagaggtacgtggtctcctggtctgcacattgggccctagggagcatgtgtcttgggctagaggtgttgcacagagcgaggactgagtgtcactgggcatgaggttgtcagagaagagatgaccccacctcaccgcctggctcagcccattgtctgagggggacacaggttgtcctgcccatgtcccctcctgcagcaggggaggctccacttccaccccttaggagaaggccggagagtggcatgcatcttctgtttcttccagcatcttcctggtgatgggttactgtgagcaggacctggccagcctcctggagaatatgccaacacccttctcggaggctcaggtgcgtggcagaggggcctggggtgggggaatgggcttcatgggcccttgtggtgcacatttataacgaaacagggcacttggggacttgaagagctgctgctgcctctgcctccacctcccagtgtttcagcgagcttcagtgaggtggaattcctgtggtgggggcatctgctgggagcgggcagccccagggccgagagccttatgagggcactggtttcctgggctgttgggagcaggcagccccggggctgagagccttctgagggcactggtttcctgggctgctgggagcggggagccctgggcggagagccttctgagggcactggttttctgggctgctgggagagtgcagccccggggccaagagccttgtgagggcactggtttcctgggctgctgggagcgtgcagccccggggccgagagccttctgagggcactggtttcctgggctattgggactgctagtcctgctggccagtgtgggtgtggcagggcccagctgggcttccctgcaggctcaccctgactggtacctctgaccctctgcacaggtcaagtgcatcgtgctgcaggtgctccggggcctccagtatctgcacaggaacttcattatccacagg

SEQ ID NO: 18733 - DNA, 1047 bp, Homo sapiens
gaatccagagctcctcatttgtcctagctgtgcgggagcccagccgcctgcttcctgttggtgctgtgcaaggcgtcctcagagcagtgatctgattctctccacctccatccctgggtggtgtggccccttcctggtcctcacagccccggcagcagttcctggctggggttcaaagttcaggtagggcactgtgttgaccttagggggtggtacccacctgtggtccagttcattttttatttgataacgatctttgttttctgttcataaccctgtctcatgaaggcgaatgagttttatgacttgctctctcttgaaggtttaagaaaaatctattaccctgaactttctgtgccatccttgtggtgcttctgagtcagctgagacatcaggccagctgtctcctcaaaggtggctaacccagcctttctctgggacttaagtgataagtaaatacattaaaagatgcatacttatttctccctgtagatatcaataggaaaacatccaatctcacttgttggcattgtagtctcagttttttgctccagttgaatttctcaacctgtaaccttgggtcttcagtacccaccctctcacacaaactgaatatgggcagtaggtgtgtaaaaccactttgaaaaaaaccaacaacaaactagaccatacttaggaggatgaataatattatcttagcacacaagtagtaatacttctcatttccaagccaagattaggaaaaaaatgactagaagagacttcctaatctttactctgaagactttgtaactgcttagaatctttttttttttttttttttgagagggagtctcgctctgttgcccaggctggagtgcagcggcacaatctctgctcactgcaagctccacctcccgggttcacgccattctcctgcctcagcctcccgagtagctgggactacaggcgcccgccaccacgcccggctaattttttgtatttttagtagagacggggtttcaccgtgttagccaggatggtctcgatctcctgacctcgtgatct

SEQ ID NO: 18734 - DNA, 1316 bp, Homo sapiens
aggtggtatcaggggcaggttcagctcagcccctacgccctgctgggctcaggggcaggttcagctcaggcctacggcctgctgggcttgagaagcttcgcctttgtgcctcggtttccttctccgtgaaatgggaggtgcagcgtggtgctaacgtctgtgcagccctgggcacgcctggctccggaagcactggccagtggaggtggcagcaagggatctgcacctgtgcactcgctggacctgccttggggagcagcacgtgtgggtccaggctgcgaatcccgaccggattctcagggaggggttctgcaaggtgcacccggtgggggctgggagctcctccggggcgtgtttccctgtgacgtaaaatgacctctatccctgagccctcccatgtagaaagcgggaaggaggctggccgctgtgtgtgggtgtgggtgtgagctgggtgtgtctctgtgtgagctggggtttgtttgtagatggcattcccgatatagtctcacctctgagcaagggttacctcacaggaaggcagtcctgcagcaagactcttctctttacggagacatctgtgaacctgcctgcgctcgcggttggccgtcgtagaagcatggataagcatagcccgtgtgaatctgtgaacctgcctgcgctcgcggttggccgtcgtagaagcctggataagcatagcccgtgtgaatctgtgaacctgcctgtgctcacggttggccgtcgtagaagcatggataagcatagcccgtgtgaatctgtgaacctgcccgcgctcgcggttggccgtcgtagaaggccccataagcatagcccgtgtgaatctgtgaacctgcctgtgctcacggttggccgtcgtagaagcctggataagcatagcccgtgtgaatctgtgaacctgcccgcactcgcggttggccatcgtagaagcctggataagcatagcccgtgtgaatctgtgaacctgcccgcactcgcggttggccatcgtagaagtgtggataagcatagcccatgtgaatctgtgaacctgcccgcattcgcggttggccgtcgtagaaggccccataagcatagcccgtgtgaatctgtgaacctgcccgcactcgcggttggccgttgtagaagcctggataagcatagcccgtgtgaatctgtgaacctgcccgcactcgcggttggccgtcgtagaagcctggataagcatagcccgtgtgaatctgtgaacctgcccgcactcgcggttggccatcgtagaagtgtggataagcatagcccatgtgaatctgtgaacctgcccg

SEQ ID NO: 18735 - DNA, 1043 bp, Homo sapiens
gggctgctgcgtggggcactgggggtctgtccacaagctgaccatcatccttctgcaagtaggggttgccttgctctcccggcccctgtacctgggtgtcctgcttagagccagctcgagccgggcctcatgggtgttcgtccaaatgaccaagtggctgggcctgctgtgagctttctggtgttccggcggagagtggggctgtggtgtgtgtccccgagggggaggtggggggacagcagtgtttattggggtcccggggatgctgacaaataacttaactccctcttctcttacagaacctgcaaccatggtcgtgccactagccagctcggaagcccaggtactttttaaaaaattccaagtattacttgatgtgtgttaaaacgtacctgcatcttaaaatgtaaatcataaaacatatatagttacacagttgtttcagggaggcagggtgcagatgaagtacccaacaggcttagttgcagggactggatgaaacgctgttcacagagagcagacgtggaggagaccgccggggtggggagggtccccgtggtgcttccggcctggaggaggcagtggtgttacttccttccacagctgcacagatgaggggcacagctgacgtctgcagggccggcctcccagacacagagccggggtcagggagacgacttcaggtgcaaacaggaaaaatcagcctggtgaccagtgccccgaaaccccacccgaccaaaactggaacctcaccgcagggcagggccttcctctcccattcacctgccctgaagtcatgtctggaacgtcatgtttccactttctactgcctttttagttttctttctttgttttttttgcttttgttcattttattttattttattgttttgagatggagtcgcgctctgtcgcccaggctggagtgcagtggtgtgatctcggcttactgcaagctccgcctcccgggttcacacctttctcctgcctcagcctcccaagtagctgggactactggtgcccgccaccacgcccggctaatt

SEQ ID NO: 18736 - DNA, 1023 bp, Homo sapiens
accgaagtctatgtcaccacaaacagcacttaacaattcagtgataaggcacctgccaccgtggagaacctcggggcggggatgtttagactgcatgcgctcaggttgcctggcagctctgtgtgtggagatgccattgtgctatacgtagtgtcctgggacgtgagtgggggcctgtctgtgtggctgtgtccggttgtcgtgtgtctcactgttgcgttgtacacgggacagtttacctttctgaagtccaggactccagggctgggaggccggctggccctgctgtcccgagtctccaaacagagcagctgctgcctaccgcctggaagaccttccaaagggggcctgccgtggtacatcttaaacgttttacagagagcttggtatgcagggacgcagcctggactgtttgtctcagaggcgcatacgttaacctgatcgccctgtccccaggaaagacggcaaaggagttccttaacgtctcgctcctggattccatgaaatgactgcacagcccctcagttactgggcaggtgtcctgggctggcagtactgcccacctgctgccccaggcctgcacctgctgtgggcgggtggaggtgggaggccctgagactggctgcctgcccagaattttccttatgggaaagcaagttttttgcttttcagagaaagttgccagtgacctgggcacagaagagcttttatggacgcagccttcagataagaggctcgggttggagttaaccctttcagtaatgtgatcaggaaaagcagggagtggcctagaggggctgggtgctgctgtggaccgtgtgggggttgggggctttgctgcttcctccctctgtctgtcctgtgccacgaggcacaatcggagccacgcgaccagggacagcacgagctgaggccagccccacccggagcaggtgggaaacacatttcccgctacgctgtccttccctgcccttccctctgggaatttgtgtgaacagcggctcttccagtcggcttcctcac

SEQ ID NO: 18737 - DNA, 1047 bp, Homo sapiens
agctgagagaggggccatgagcagccgcccgtcctgatccagcttgggcagtcgagactgtgttcaaggggaccgacctctccatgcctccgtccctgtccccacgtcagtgtggctcgaggtgaggttggtacgtgatgtgcagggcccggcacagcatctgacataaggagtgctgtcgttatatttgtgtgtgtgggtctttctttccttgttgtaaagcgaaactatgagaaccctttaagacatggaacacagcactgtgcagctgagagtgtccgtgtaattgtccatcgacctcctgtgtccgactgtgctgcctctgcctgcctgtcccagcagacctggccacctggggaccacctgggcctgtgggcctggaagtcggtgcagacgatggtgactagggtgggcaggtcggcacccccatatcactccacagaaccactggtgcccttcgtggtagattatgaaagtcagggtccctgtcaagtaaaatcgagaaatgctgagttaagaggtcgctactgtgaagcttcactaatttttaatgtgcttttaaaaaaacttctttttttttttgagacagagtcttgctttgtcacccaggctggagtgcagaggcccgatctcggttcactgcaacctccacctcccaggttcaagcgattctcctgcctcagcctcccaagtaaatgggatttcaggcgtgcaccaccacgcccagctaatttttgtatttttagtagagacggggtttcatcatgttggtcaggctggtcttgaactcctgacctcgtgatccgcccgcctcggcctcccaaagtgctgggattacaggtgtgggccaccgcgcccggccgggaacatccttttcatccggtccatgtcttgcttgtgccttggtctcttgtggaccgacagctgctgtctccctggccgggtgctgggccctctgcacccaccagccgcgttctccccgccccacccccctgcagtaccgcccagtgaccgcgcccctgtcccgcagaccgtgcagtccctcgg

SEQ ID NO: 18738 - DNA, 1055 bp, Homo sapiens
cccgcgtgctgctcaaggcgcctaccttggctgaaatggaagagatgaatacatctgaggtcagaacccatggggattcctgaaaagagaccaggaatgggaggatgggggccaaggaagtgagaagggctaagctaagccgggggcagcagcaattgcggtgtctcctgtccaggagccctcccttgaaactgacatcctgccgtaggaggaggcctgtggggatcggggaccctgccatcttggccgctcagaagggtgactgggagagggcctgggctgcctcctcccacagacgatggaaggctgacagcggaagtgcctcgctgtcccaggccccggaaactgagcccctggctagttgatgtgaaaaggtggacccagcgaggctccctgcccaccctggctgccctgtgaatgggacgctcctctcttcacaggaagggctggtgatggccttgttgggggccatcccagagggctctgcctccgtctgacactagacctgtccctttccggaaggcctggggaagggcttggttactcgggtgcttgccacgaactgtccagaggcgggcaggctgggaagtgggtggaggctgccccacatcgcagcagaccctgcggcacccctgggtcctctgcttcattccaggcatgggcaggaggcactggcgggcattgtcagggcagggccgcgtctggtgtgtccacaggaagaagagtctccgtgtggggaggtgacgctgaaacgggaccgctccttctcagagcatgacctggcccagctccgaagtgaggtggcctctggcctgcagtcggccacccaccccccaggagggacggagccaccacggccccgagctggcagtgcgcatgtgtggaggcccggctcccgagaccagggcaagtgctgcttctcacccccgtaccctccttcgcccccaccccgatccatcctgtgggcaccatccctccacctcagcccacatcttcctgagcaggcagctcccagggacccagggagctcgtgcctgcaagacggcaccacctca

SEQ ID NO: 18739 - DNA, 1007 bp, Homo sapiens
cctgacgccctctccctctgcctgacgccctctccctctgcctgacgcccctctccctctgcctgacgccctctccctctgcctgacgccctctccctctgcctgacgccctctccctctgcctgacgctctctccattctcttctggctgttttccaaggtggtgttgaaagaagcttacttagtatttttattccttcctattaggagtataactaagagatcagggaaaaagaaaagggaaagttactttctaaatgctgcttcttgtttttacccttgttcctcgactggttggcgctctgctctgtgtctctgtgggaatgtgtgatctgatggggacatcccttctagttctggtgctcctgtgacccgtgggacacttgctgtttgccctgacatctgtcccatgcttatgggttaattgcatggtgggtacagaaccctccactggagctagtctgtcatcagaaaaaaatatgttttcatcattgcccttcgtcctcgtctgactgtgtcctgagacaagggtgtagctttgttgccgtttagttggagccacaagtcccaaccctgtttgcctgaggaggtgagcacaccagtgtgatgtggaatgcccagttttttctagggtccttctggttctgtgattctgtctatgctgagcgcttcttaggaaacatctcttcttttttctaaatgtgtggatggtacatagtgtttgacttatgctgtcctttaggaagtaaatacagtgtaataggtctcttttaagataaataattttgttattgttacaatatttaaaataatgtcagtgtggtgattaagaggttgttttggggcttttaggaaaacggactagaagatatcgatcgcatcctagagaggattgaggacagcactgggttgaaccgtcccggcccagctcccctgagctccaggaagcacgttctctacgtggagcacaggtgtggcccccgcccttctctgcggctgcccttctc

SEQ ID NO: 18740 - DNA, 1022 bp, Homo sapiens
ggtgtgatcatagcccactgcagcctcgacctcctgggctcaggagattctcttgcctcagtctcccaaaatgctggaattacaggtgtgaaccaccacgtctggtcaaaaagttcctccttaccctgtcatccttggatgattaattcatctcttggtcttacagatgcttaatgaatcgctgtccctacttcagaaattattgccagcttaaaaaaaaaaaagctccgtggagtcagttaagacgcagtagtgtagtcccagggtgcgtgcactgccccgactcagcctcagaaacagacgtgtgccacacacagtgcctcttgacacagcactcaccgagcgccctcacggcacagtgacggcagcttccccatggtgcccgcagtggcgaggcctcagctgtggttggggtggtgattttagagaaaggcctggaagctgcctttcaaaccaaaaatccgtgttctctccttgactattaggtggctttctgaagcttttggaatcgtcttagaacataatttcatgttttttttctacaattttcaattccccagacacttgaatccagacacagaactgaaaaggtattttggtgcccgggcaatcctgggggagcaaaggtaaggtccacagtgagctgcattctcacagctgcttcattccttcttagactcttggccgggggtggtgttcctgaagctagtttacccttgagggagagtatttaaagccagagtgcacacgtaacccttagaattggggtctgaatgggagtccacagattgtctgtgtataaccttgtctgtgaccgtgggttgtagagatgctcagagtagctggtctccatccctcacactgccttgtccagcatgaggtttcaaaagccatgccgagtgcagtgctcacgcctgtaatcccagcactttgggaggctgaggcggacagatcacctgaagtcaggagtttgagaccagctgggcaacatagtgaaaccccgtctctactgaaaatacaaa

SEQ ID NO: 18741 - DNA, 1039 bp, Homo sapiens
cctgggttcaggcaattctgcctcagcctcccgagtagctgggattgcaggtgcacgccaccacgcccagctaattttttttttttttttttttttttttagtagagacggggcttcaccatgtcggccaggctggtctcgaactcctgacctcaggtgatccacttgccttggcctcccaaagtgctgggattacaggcgtgagccatggcgcccggcccagataaatttcatctgtgtccattcagtagttcttagcagttgggcagccccagatgaggatggctggctgcgatggggagcacagggtctttcagctccttagaggaggaagagcagggggggtgtctgcttctgggactttatgtaggaggtatattccacctctggactctccatcgaagtgtccagaaggctttgtcttttttttatttatttatttttatttttttattttttagagacagggtcttgctgggttgtccagtctggttttgaactcgtggcctcaagtgatcctcccatctcagtctcccaaatagctgggactaccggcacatgccaccgctaatttattttattttattttttatagaaacaaggtcttactttgttgcccagggtgatgtcaaactcctggcttcaagcgattctcctccctctacctcctaaagtgctaggattacaggcatgagccaccacgcccagccagacacatcctgttttattggaccatggagagtattgctggtctataacatgccctgggtttgcacgtctgagttcttttttttttttttcgagacagaattttgctcttgttgcccaggctggagtgcaatggctcaatcttggctcaccacaacctccgcctcccgggttcaagtgattctcctgcctcagcctcctgagtagctgggattacaggcatgtgccaccatgtccagctaattttgtgtttttagtagagatggggtttctccatgttggtcaggctcgtctcgaactcccaacctcaggtgatccacccgcctcagcc

SEQ ID NO: 18742 - DNA, 1191 bp, Homo sapiens
gagatgtgttcggaggctctaggccaagcgagctccatccatactcagaggagaggctggagcgctgctctctcagccgttcctggggaccgtcgcagtagtgccgtgtgatgcaggcccaggactctggggcttctcactgctgcccttgcctcctgcggctcagtgcaggcgagcagctcagattcccggcccccgtgcagcccccggacggcccccacacggccccggacggcccccgcgcagccccagacagccccggacctggacagtccccgtacagccccggtgcaaccctggacagccctcatgcagcccctggacagctccccttgcagccccggacggcccccgcgcagccccagacagcccccgggcggccctcacgcagccgccggacagctccccttgcaaccccggacagcctccgcagagctccccgtcatctccctgtgggaaaagcaggctgctgctttccattcctctttcttggggcttagtggggagttaggtggcccctggcctgggcatgtcaggttctgagttcttgctttaagtcatataattggttcagcttagcaataataactagcctattttgagttggggggacgttgtgagtgtcgacccggtaattcccccgtttttgtttttgtttttggagtcggaatctcactctgtcgcctaagctagagtgcattggcgcagtctcggcccgggttcaagcgattcgcctgcctcagccttccgagtaactggaattacaggcacacgccaccacacccggctaatttttgtatttttattagagaccaggttttgccacgttggccaggctggtcttgaactcctgatatcaagtgatcctcctgcctcagcctcccaaagtggtgggattacaggcgtgagccactgcgcccagcctccgctggttttaaatgtctgaaaaaaaggcatgcctgggagctggggccttgctgagtgcctttcctccagggctgtcctcccttctggtaggttctgctccagacgagcccttaccacgttgactcactcctgcagctcagcgatgcctgccgctttcaagaggatcaggagatggctcgagacctcgtaggtaaggcagagcccccaccccattcccctcagctgtgggagcacctcaagctatcaagacagatgcgatggtgt

SEQ ID NO: 18743 - DNA, 1026 bp, Homo sapiens
caagtcagagggtcgcaggaccgtggaccgtccactggggacagcttagtgcctcctggtttaacttcagctgctctgcgggcccttatgaccggcatggctggctttgtctggggctgtgagcttctgactctcctcagtagagtggcagcacgtggcactgtgcaacccgagggcagctcagggtccctgtagcctgcatttgctgaagtgggagcttctgacacgtggtgaagatgttggcaggcttgagcggcacgtgacccccttccttccccaccacacactctggtgtgcagggcagacgccgtgcaggttcatctcgactcccgtgagtgtcctggtggcagaaggactgtcccaccctcacccaaagctcgttggtacaaaaagcacagccgtttctgtcagactctgtggctatctctcagcagatgcatccagtccatgctggagtcgacagaaggactctgctgggagaggtagaggccccctggcagcatctgtagcatcttcgttttatgtccctttctgaaggacgtgaccacgcagtctgtgatggggtttgatcctctgcctccttcggacacaatctactcctacgtcaggccagagaggtacctccctccttccagttcccacctcccagctcccacctccctcctcccagttcccagctcccagctcccacctcccagctccaaccttccagctcccagctcccacctagcagctcccggctcctggctcccacctccctcctcccacctcccacctcccagctcccacctccctcctcccacctcccacctccctcctcccagttcctacctcccatctcccagctcccagctgccacctcccagcttctgcctccctcctcccagttcccacctcccagctcccacctcccagctcccgcctccctcatcctagttcccacctcccagctcccagctccctcctcccacctcccacctccctcctttcacctcccacctgccacctcccgcctcccaccttcca

SEQ ID NO: 18744 - DNA, 2021 bp, Homo sapiens
gagttttgctgtgttgcctaggctggagtgcagtggcacaatctcggctcactgcaacctccacctcccgtgttcaagtgattctcctgcctcagcttcccaagtagctggattacaggcatgcaccaccatgcccagctaatttgtttgtgtttttagtacagacggggtttcaccatgttggtcaggctggtttgaactcttgacctcaaatgatccacccgcctcagcctcccaaagtgagccaccacacaccggccatgattcttaaaaataacagtaataggccaggcatggtagctcacacctataatcccagcaatttgggaggcagaggcaggagggttgcttgaagccaggagtttgagaccagcctgggcatcagagtgagactccgtctctacaaaaagttaaaaaaaattagctgagtgtggtggcacacactggagttccagctacttgggaggctaatatgggaggaccccttcagcccaggagtttgaggctgcagtgagctgtgatcgcaccactgcactccagctcgggtgacagagcaacaccctgtctcaaaaaaaagtaataatgataaattataatcaatatttattgggtgcttactatgtgccggccagtgttctctgaacttagtattaactactttaatcttgacaataaccctgtatggtactattgtaatccccatttgagacatgggagaatggaggcagagaaacgtttatccacttacccaaggtcacacagctaggagctagcagagttgggattcaagctggacgtgtctgtcttgttaccatgaaactattgggatcatcagtcagaatcttttcttttttttttttctgagatggagtctcactctgtcacccaagctggagtgcagtggctcaatctcggctcacctcctgggttcaagcgattctcctgcctcagcctcccaagtagctgggattacagatgcccaccaccacgcccggctaatttttgtatttttggtagagacggggtttcaccaggttggccaggctggtctcgaactgctcacctcaggtgatcagcccacttctgcttcccaaagtgctgggattacaggcgtgagccaccgagctgggtctttcagtcagaatctactttggccgcaagagacaaaaacctcccctataacactggtgggaatatcgtatttctctcacttgaatgaagtctggctgtgagcagcttagggctcaggtgcagtcccctgcaatcacgtcactctccccagtgtggctattccagctgcagcctttacatctgcattccaggcagcaggaggcagggatggctgaagaggggcagcccctacctttaaggacaattctcagaagtcttttcttttttctcatatgtatgtatacacacacacacatatatatgtatatacacacacatacatatttatgtaaaaaagattttttttttttttgatatggagtctcgctctgttgcccaggctggagtgcagtggtgcgttctcggctcactgcaagctccgcttcctgggttcacgctattctgctgcctcagcctcccgagtagctggggctacaggcgcctgccaccacacctggctaattttttgtatttctagtagagacagggtttcaatgtgttagccaggatggtttcgatctcctgacctggtgatccgcccgcctcggcctcccaatgtgctgggattacaggcgtgagccacggcgcccagcccatatttgtataaaatttaatagagatagggcctcattgcattgggcctggccggatgccgtcctcctgccttggccttccagagtgctgggattataggtgtgagctaccacgcccggcccattactgttgttttcagatagccctgatttagtctctggttctcccttttcttgcctataaatcagggagaacacgtacttcctggggtggatggaagggctaagcacttgggtatgtcagtgaagccaggagcc

SEQ ID NO: 18745 - DNA, 1043 bp, Homo sapiens
tttctcctgtgtcctgggtgctccctgggagactggggaggtgctggcatcgggtggccgcctctgactctgtgacccacccacagtcatcaggtaataagagaaggaggtgggactggggcccactcacgttccctgtgtcttccccgtgcctccctgttggggtccacgggcagcctgtccatgggtgctttgtcctttcaggctggcgtgcaggtgcccaacccacactcctgccccacaggcacaacaggcaggacaggccccataggtggtgtggagtcttgcccagttgcagggcagccatgtggggttggggtggcctccttatcccactgccagtgaggcaattagttcaaatcccagttcttccaggccacagtgtgaccctgagcagggccgtcccctctgggctcagctctctttcttttgggagaagagacagaggataaatcataggattgattattataattgtgaattatttcagactgtagcaggtgtagtgaaagcataactaacactgtagcaggtgtagtgaaagcataactaacactgttgcagttactgaacaactttaaaaagacatctccgactttctataacatcaacagaccttacagcgagcttactttgtgctcagtctctgttaactcatttcaccctcacaatggcccattacggatggggaaatggaggcagagaggctaaggaatgtggcccaggaagttaagtgggagggctggatgccaactgcctctactcccaccccaaccaaagtcccttcctccctgccaggagccatcagccctgtgtgttctgcagtgttctgagcctccgggtggggaaagagcaattcttgatcctgagcttctgccacgtggagaactaggcccttccggcctgtttcctgggttcctgaggcacagagccgtgggcctggttcaggtcgtgttgctcatcacaggatcagaacccaggccagagagcctggatgcatttgtagggggcttctctgtgtgctggcagggaatcctcccaag

SEQ ID NO: 18746 - DNA, 1442 bp, Homo sapiens
cacctgtaatcccagctacttgggaggctgaggcaggagaatcgcttagaacctgggaggcggaggtggcagtgagccaaggtcgcaccattgcactccagcctgggagtgagactctgtctcaaaaaaaaaaaaaaagaaacaaaacaaaaaacaccctaacagctctcctcatggaagcttatgctgtggaggcttccatgcagtcatctttcattcattgagctacctactctgtccttgttctcgtagagtttacgtgctgtgcaaggaggaaccagacaatggataagcaagtattaggcatgttaggaaaaggaagcagaataaaggaaatagaaaatgaagaaagggaatggaggagggataaaccctgttatttgttgtgtcccctgcaggaagtgagggattgagatgagcttgctaggaagatggaatagaaaatgcactgccctagggtgggtccagccttgagttctgtgtgatcagtatgaggaagaggttagtgatagacaggtcaaggaggggcagggcctcataggcctgctgacgttgcacctgtgtgctgtgtgtgtctgtgggacccggaataagggtcaactcatttatggcctgactggaaagaggacagcagcacttggccctgtttaagggagtttgtgttttgcctaccttcacatcttggctttacatatacaaaaactaatttagcaaggttatttactgtgagctgtgaactgacttgcagaaaactccaagaaggaatggtaaactcctatcttagtgtttacatttactgtgagaactgcatcaggcttaaccagattgtctcctaaccaaatcacaaaaggactaaattgcgaattaaagcaaaggaattggatgttttatcaagttttggaagcctgaagagtcatactttgtaccttcagggctgtaggctacctggtatctacccagccaccagtaccagtgccacactgtctttgaggtggtcctggggtagtcatggaaaagctctggaagattggggcatcagaattctcattgcacactttcagctaccagctgtcttcaggcactcacattacctctcaggttctactttctcagatgggcaatggggatcaagtgaggtaagaggcacctggcaccctacaacgtgcagtatggccaccttctgttgtttgtgtaggtctcctgttgacccacaccttgggttccaaacccccatcggggaaacattcatgggatccttcgagagtcattgctagctctgtgtcaggtactgtgtgccattggtgctgggatggctgctgcagatcgatttcgttcacgatgtggaatcgtttgttagccccacagcctttactgtcagcattctctttctgagctgcttttttttttttttatgattttaataattttttcatagtatgtct

SEQ ID NO: 18747 - DNA, 1022 bp, Homo sapiens
ttcagcaacttccacaagggggtggggttagaaggttctctcccatccttgtcaaagttgctaaaaccacgcacgacgccatgtgcagttccgtctggcagcccatttacagggctctcgtggtgggtgctgtctgcccaagctttcttgaccaggcttctctgaaggaagtttctctttgaaagaaaggaaacttgtggttgtcacaaccgatcgtggttatggaggcatttctccctaagcttactgaatggtgtcttgcaggtcttttccatggtggtcaccaatgttgccgccagcatggtaacatttggcagtgtggtattgagggtctttcctctgttttgcatccacagcagaggtctttactttttaccaaggagtgagtgggtttggaatgggttcccccctctcttagtttttggagacggggtctcgttctactgcccaggctggagtgcggtggtgcaccatagctcactgcagccttaaacttctaggctcaagtgattgtcctgccttggcctcccaaagtgctgggatgacacgtgtgagccactgcgcctggtcaccgtataccaaggaatgagtgggtttggaatgagttccctctcttttctttttttttttttttaagttacagtttgctttttgagatggagtctcactttgttgcccaggctggagtgcaatggtgggatcttggctcactgcagcctctgcctcccgggttcaagcgattcttctgcctcagcctcccgagtaactgggactataggcacacaccagcacacctggctaggtttcctctcttttttttttttttgagatggagtctcactctgtcgtcctggctggagtgcagtggtgtgatctcggctcactgcaaactccatgccccaggttcaagccattctcctgcctcagcctcccgagtagctgggactacaggcgcccaccggcacgcccggctaatttttttttgtatttttagtagagatggggtttcactgtgttagccg

SEQ ID NO: 18748 - DNA, 1038 bp, Homo sapiens
ggtgaccaggtgtgtacaggtatggacaggtgaggaggtgtggtacaggtgtggtgtgggtgagcaggagtgtacaggtatgtacaggtgaggaggtgtggtacaggtgaccaggtgtgtacgggtacggacaggtgaggaggtgtggtacaggtgtggtatgggtgaccaggtgtgtacaggtatggacaggtgaggaggtgtggtacaggtgaccaggtgtgtacgggtacggacaggtgaggaggtgtggtgcaggtgtggtatgggtgaccaggtgtgtacaggtatggatggacaggtaaggaggtgtggtacaggtgaccaggtgtgtacaggtatggacaggtgaggaggtgtggtacaggtgtgctatgggtgaccaggtgtgcacaggtacggaaaggtgaggaggtgtggtgcaggtgagcagatggtactcccattgccctgcaggtgtacaagcagaaagtgaagcacctgctatatgagcaccagaacaacctgacagagatgaaggctgagggcactgtagtcatgaagctggcacagaaagagcaccgcatacaggagagtgtgctgcgcaaggacatgcgggcactgaaggtggagctcaaggagcaggagctggccagtgaggtggtggtgaagaacctgcggctggtaggtgtggcgggggcacctggaggctgacaggttgttgggacggcaagcctagtgctgcatgaactcctgtttattcaacagcaactgggaattcatatttctgcataagactttctgcatttttgcaatttgttgaaaaaaaattttttaaagcatgcatccaaacaaaccccattttgggaccaagtacacaattctgtctcagacctgagcaaaaaattgacgtcaccgaagagaaaaaatccagcttaggatctttcatgtgctgctgacacctgacacccagagacttttcctagggaatagcatcatatgcatttagtagaatgcaaaccaaccattaaaatatccagtgtgttgactcctgggcac

SEQ ID NO: 18749 - DNA, 1058 bp, Homo sapiens
gcagacgaaacccctcagacacagagttaaagaaggaagcggtttattcggccaggagcatcagcaagactgctgtctcaagagccgagctccccgagtgagcaattcctgtcccttttaagggctcacaactctaagggggtccacgtgagagggtcgtgatcgattgagcaagcagggggtaggtgacaggggctgcatgcaccgatggtcagagtggaacagaacagaccgggaagtttcacaatgtctttctataatctatagataacatcagttgctaggtcaggggtcgaattttaactaccaggcttaggtcaggccggcccaggcctggtttcgggtctggttccttggtttcaggtctggttcctaggcgccaggctacctgcctttagttttgcttctttttccttttctgagtataaaacaatataaaacagtatgagagggtctgtctctcttctctcagagtattcaatttccttaggattttgagcgttattcctaatacacccttgaaacccccacactcacacagatacgtacacagagggcacatacccccacacccatgcatgcaggcttaacacacatagcacacgtgaacacatatatacacacatgcgtgttcctgtctggcgttcacttctggggctacagagattggaggaaatcaggagaggagacagggggagccaagggggagtatggcagcagaggagaggggtccattagaagaggtcacacttcccaggagaccagggagctctctttcctgctgcgactctgtaaaaccctacatttctcttcctggacttgggaatcgattctccaataattaaaccagatggactccaagtttatgtctttctggggttgaattcctgtggagacttgaactgaacgtttgagttctctgtggcccttctggactcttccttccttcagtgataagggaagaatgaggtacacacttggggttcagatatgtatggagacaaaattaattagaacaggaggcaaaacacaaaaaatggaggggatcagtgcgggaa

SEQ ID NO: 18750 - DNA, 1052 bp, Homo sapiens
gctccgagcctgtcagaggctgcagctctttaaagaggctgaggaatttggggttttctgtccaaaattgcttcagctctggccagccccccactatctgtctcgtgtcatgctcaggggcccttctcaatctgggtctccactggaatcgccgtgtggtccccctgggttggggacagctgcaggtctgccaggaaggtgtaagggggaaatggagtcgtagtcatatggccaggcagtggtggccagaatcgaaccctggcctatctgctctggggccttccgtggggccctggccccgtgcctggcatgtcatggtagagccaagcttgcaatgccccgcagccccggcaccgagccgcctcactgctgtttctgggcgcgtggcgtcacctggtggtcactacggtgtctgcgcccgggtggtttctggaaagtcatttgtgcccaggagcctggggccactagctgctgctgtgtcaccctctttcctgaatgtggtgactctatgcactggaccgatcacacacctcttgcaggctgtcatgtgcatagtgggccctttgtccctggagtggaagtctgggtgggtaagagggtgaggcctggtaagacaggtgtgagatttgccctgggcacagactagggtgagcctcctgtcactgagacctcagatcggctgtcccctgtgtgtggaaacccctgcaaccccagctgtgctcactcccctccttcaagcctttgctcagctgttacttcatggggaggcctcactgcctcctgtcaagcaaccctagtttgcttcccccgctcccatcatacttagcatcttttaaccagtacattcactcatttaaaaatattgtctagactgtaagctccaggagggcagggattttgtctcgtttctccaccaatgtgcctcaagcacctagagcagtatcctgaccatagtgtgtgctcagatagttgtcccatggacttatgttgtctgaggacctaggctgtgcccagcactgtctgctgggatgaacaaggcaggcacagagaaa

SEQ ID NO: 18751 - DNA, 1089 bp, Homo sapiens
tgccttgtgctgtgcccagggatccaggccaaggaccgcctttgggtagtagggcagcctgaggctgcaggtcctcccacacaggggagggtgggcagagcgcatttgcagggctctgagatgggagggagtcaggtgtgaggagcagcggagagcaggagccagggaagtcatggatgtgtgtgagcccatcagctggcaacggtctctgttggcaaaggtcactcacactcctgagtgaagaaccagctggatgtcgcctagtgctgctgggcacaggtggagactcctggagaggctggccccctggattcagcctgctgattcctggcagtggccccagtctctacgctgggccctgctcctctctggcccccataatggcctcactaagagcattcgtccattttctgggtgagaacatgctgggagtgtactcagaatgctgtcccagcactgtgggttccggaagccccttgccgagcaccacctgccttcccaacgtgtctgatgctgtctgaaattccacccttagtgtctgagactcagaggtggcccctcctggctattccttaccagcagggtgatggtactgcagtccatataccctgtggagggagggctgggggacgatgaggaagtctagctgtgaccccttcacgctgtggctgggccgtatccaggacacgcaggtctgggctgggtttgggtcacgagtcagatgcagaggggtctcctggtgcagttcccagagggaccttgacccacccagttctcagttaggatgcctttctgtccgaccctgttgcactctggggctctgcatgggtgaggggccctggagggatttcccagtgatgtggagttgctgcccttggctcgtgcccctgattccaggccaagtatgggccagggacaggaactcagccttagggggccatgtggatggaatgatccctgggcaccatgcctggggagtgccccaaagctttgccccccagctctcacctgggacctgaagtgcacagtcagctcagataaggggctggagcgtgaggggtggggtaagagccagcagaaggcatccct

SEQ ID NO: 18752 - DNA, 2043 bp, Homo sapiens
ggtgagaccctgtctcttaaaaatttgtttaaataaaaaccaaaccattgactttatatttctttttcttcttcttttttttttttttttttgagatggaatatccttctgttgcccaggctggagtgcattcttctgcctcagcctcccgagtagctgggactacaggtgcacatcaccatgcctggctaatttttgtatttttagtagagatggggtttcaccatattggccaggctggtctcgaactcctgaccttgtagatccgcccggctcggcctcccaaaatgctgggatgacaggcgtgagcaccgtgcccggctcgttgactttatatttctaaaggaagaatggactatgatttcttaggtttgaatcgtgctggaaagttgaaaggagacaaaaccttggactgcctgttgtgtgatctgcaggctgcggaggagctcagaacttgaggcaacccagcgccacctagtggatattaaaggaggacaggaatctgagttttgctgaaaaaggctcctaagctgttgttcagcatgtagcattctttcctgacctacgcattctgtttgttagtgcccaggatcacatttcctccatccaaactcccaccctaacagtcttgggtcctggagcttgccccagggatgctggcagctatgtttctctggcaggagtccaggcagtagtaccctccctgtacccatccttgtctggcactggcatggctctgcagccacccaggagcccctctgggctgtggcctctcgtctgtcctcatcccatcaggtccatggttggcctcaagggtctggtctgctgctgctcactcttctgcactgagaggaggagactgagtttccattactgatcaggtgacctaggacagagcgcctttctcctgatggtgactgactgccagatctgggggaatctcagaacagaactgaaagaccagaagctgtgagattaatgaggttggagattggggtgggatttttcaaaggaattgttcctggttctttttttttttttttttttttttttttttaatttaaggcagggtctcactctattgccaggctggagcgcaatcttggctcactgcaacatctgtctcccaggctcaggtgatccttccatctcggcctcccgagtagctgggactataggcacccgcccccacgcctgaatagtttttgtatttttttgtggaaatgggattttgccatgttaccctggctgatcttgaattcctggactcaagcaatctacccaccttagcctcccaaagtgctgggattataggcgtgagccaccatgccctgcccccagttgctattttatttatttatttatttatttgtttgtttgagacggagtcttgcttcgtcacccaggctggagtgcaatggcacaatctcagttcactgcaacctccgtctcccgggcttaagtgattctcctgcctcagcctcctgagcagctgggattacggcgcctgccaccaggcctggctaatttttgtatttttagtagagatggagtttcaccatgttggccagcctggtcttgaactcctgacctcgtgatctgccaacctcgacctcccaaagtgctaggactacaggcgtgagccaccacgtccggtccccagttgctattttaattaaagctagggttatggtgtggctgaatagcctggtggccctgtcctgcaggacctaacatctgtgaatataggctgggaatgtgaatcgctcaggaggccaccccaacacttgtgccatacctagcacttgtgtctccctgtggatcccagtggccctcagtgacagcatgtcactcattcatatgaccattgaattgtgtctcccaggagggcagggatgtctcttcactttctgcaacacagcccctacactcagcctgtggaggagcacagctcatccgctaggggtcgacggaatgtgtgggtgggaataacagcagtgtagattccatggagtgtgaagaagtgatttgctgaatggttct

SEQ ID NO: 18753 - DNA, 1035 bp, Homo sapiens
ctccatgaacagccactaagtcaatgtgactgtttttttttttgagacggagtttcgctctgtcacccaggctggagtgcagtggcacgatctccgctcactgcaacctctgccgcccaggttcaagcgattctcctgcctcagcctcccgactagctgggactacaggcttcactgcgcccggctaatttttgtatttttagtagagacgggggtttcattatgttggccatgctggtctcgaactcctgacctcgggtgatccacccacttcagcctcccaaagtgctgggatgacaggtgtgagccaccacgcctggcccagtgtgcctttttacttcagctcacagatttccagttggccgtctctgcagaccctggcctctagcagggaaagagccttttatttggctgttgtgagggcgccttgaagtttaggtatttataaacgcgaactgggctaccactgcttgcctctgagaatcccagggaccatctcacagccaaactaaatttggtccctggactggtgcctgagggctgaggctgagacatggctgtgactctttatgacagagcagcagtttttagtggagattttgggctgtcagagcaagggacctttctggagtggtggtggttatttttctgttacctctgtgtcccctgagtcactgggtggcagagtggaggggcactgtttagataggatgtgaggcgttggccctgggtcagttgctagagcagaagtgtttggtggcgttttaatacctcaaaccctccttcaacattaccatgtcccacagatgggagttatagaacagagtgagccatttagggtttttgaagaaagcatattatgcctgtggtgtaaggcacttgaatcctccatctctgcaggagagacctgcagtgggctgctgaggacttggctgtgggtcctgcgtttcccaggataactctaacaagattgatttcagaaggtccaactgcaacctgactgggttgagaggctatttccaaatggcacaaata

SEQ ID NO: 18754 - DNA, 1034 bp, Homo sapiens
gcatttcttaggatttatgcaattgctaatttgaccaacggtgctattttgtttcagaaggtaaatcctagtaattaggtattttggttacagcttaaatctgtacatttaaacctaggcattttattaccatacccagaagaaaaagtcataaagagagacagcctagacaatgaccaatctgtgatgatccttggaagcatgtcggaagtgacaaaggtgccactggtttcattggaacataggactcgtttatggttacagtctcaatgctggcagtaaggatgccttcattgttaagtgtggatctttagctcttccacttattttcagactggaaatggagcaggagaaacccttgttgcctttgcattcactttcattttcagatgtctgcttacctcattctttctcctcacaggcagaaaaagtacatgagttaaatgaagaaataggaaaactccttgctaaagccgaacagctaggggctgaaggtaatgtggatgaatcccagaagattcttatggaagtggaaaaagttcgtgcgaagaaaaaagaagctgaggttggtgagataagtgccttagggcaagagaaatcttagtaatttggcagcgttgaccgttggaattaattgagcccatgcttgctcccattttttaaaaaatttatacattttgggcccagcacagtggctcacgcctgtcatcccagcactttggaaggccgaggcgggcggatcacgaggtcaggagataagaccatcctggctaacacagcgaatccccgtctctactaaaaatacaaaaaaattagccgggcatggcgccaggcacctgtagtcccagctgctccggaggctgaggaaggagaatggcgtgaacccgggaggcggagcttgcagtgagctgagattgcgccactgcactccagcctgggcgacagagcgagactctgtctcaaaaaaatttataaacgctgtttttgcaagcagttttagcttcatagctaaattgagaggaaagtacagagat

SEQ ID NO: 18755 - DNA, 1029 bp, Homo sapiens
gatggagtttcgctcttgttgcccaggttggagtgcaatggcacgatctcagctcactgcaacctccgcctcccgagttcaagtgattctcctgcctcagcctcctgagtagttgggattacaggcatgcaccaccacgcctgggtaattttgtatttttagtagagatggggtttctccttgttggtcaggctgatctcaaactcctgacctcaggtgatccacccacctcagcctcccaaagtgctaggattacaggcgtgagccaccgcgcccggcccctctgcggctctttggaggtgtttagcgcacgtgcctagtgcagcacaagggcacctgtctgctgtgacagttctgactgacatcatgggcttttctcaggctcagtgaccaccggcctgtgtcagtgctgctgggccgggagagctggtaacagcaccaggcagtccgtgtgtggagggacagcctcctcagtggagatgacgtgtgctgatattgtccagttttgccatactgttaggacacaagtctttgtgctggtgctgtctgtgctcaggggcttttagggtttatgtttcataacgctactcagagatagagagagattgggtgactttctagtaagtggtaggttgtgattaggacttaatttttggaatcgaatgtcttttttttatcatttagatctgctcttttaagaaacaggctaaagttgagaaacactttgaagggagagggcagtagaacagaaagccaccttttaaagaacttggcagctcttggttggcttgttctctgttgtgaagtttaccatttatagttgttgttttctgtttgagccagtcttgctctgtcgcccaggctggagtgcagtggcgtgatcttggctcactgcaacctccgcctcccaggttcaagcgattctcctgcctcagcctcccttgtagctgggattcacctcgtaaggcgaattaaccttagcatatgatagttcttttagtgtttcccaccacccttttcagagtaagc

SEQ ID NO: 18756 - DNA, 1278 bp, Homo sapiens
ccccggaggcagaggttacagtaagctgaggtcgcgccactgtactccagcctgggtgacaggtgagactccttaaaaactggcaaaagccaattaatgtagttgtgatgattacagtccaattatctctgggtctaaaatagaaactttacactattaaatgcatcagtttcaagtatcacgtagtcacgatggtaaaagtgaaatgaggcttctcagccatatctcctttcttaattttcttattgcagtgtcagtgttccaaaagtgatcatttctgttggtgacagttgaaacaccaagtcgcgttgtgtgctttctacagtaggtaggcactgaggtctgcattttctgtttctttcccacagcgcatggatttaggagaatgtaccaaaatccacgacttggccctccgagcagattatgagattgcaagtaaagaaagagacctgttttttgaattagatgtaagttttatttaatgttgatttattcctactgcgaagaacccaatattgaactaacaagaaaaatgtaacatacgtaagttatgaagcaaaataataaggtagttgcttgttatcctgccactcaagctcagagctagaatacagccagtactgtttatatgttgtgtccagcgtcctgtcagtgtcctaaatgataatatgtgttatctcattttgttgcttttaaaaattttaattacatttttatgagtccttgaacagtgtttatttttgcttagttttgaatggtttcatagtgtagagtctttaaaattagatttttttggttcagtatcatgtttctgtttgcccaggttgttgcatatagttttcattgctgcttgaataattctcaaacgatctttgctttattcatagacatttagattgattctagttttgctactgcagacaatatgaatatttttgcataacttccttgtcacgtggataaggatttattttgggtatattcctaggagagggattgctggtttataggagatacccgtatttatcctcgcaagacaattttgtaatgttgtcttcttgtttctatttggtaaagtcccatagcagtgtctgcacgctcaccaacactttgtattatcagactgtttaatttttgcagtttagtggttgtaaaatggcatttctttctgatctcaatttgcatttttttagtactcagtagttgtgttattttatctacattagtaaattctttttttttttttgagacggagtttcactcttgttgctcaggctg

SEQ ID NO: 18757 - DNA, 2260 bp, Homo sapiens
gtgggctccaggtcgctggcagccgggtggcagaactcttccgaggctccttgggaagaagctacacccgagggagccggatgggcctcgaaaacctggcccgctctggttctgtaccattgcaaggggaaccgtaaactgagcttttctaacgtgggtttctgccaagtacttttccagctgcccccttccccccagcacacaggagagcctctgtgtagccagcgcttgacagtcgttaggtaggttgtactgtgtagggaggagctcaagatcatgatggttgtcacaggagaaagcggttgcatctttgcaaaactatatacctgctgtggtttgtgttttcttttctgctgagtaatgaagttgtaagttcacactggcacattctcagggctgtgcagattatttgcactttatttcataggtgaataagtgctttttagctttctttgtatattgagttgcttttgaattgcttcccatatttttatttcatacaaactgaacaattgtggcccctctattttatttataaaggttcagtgtatctttgcctgcctacatcaatctgcaagggagttgcagaaagcctcatgttcatcgagccgtgagtcacaaccaatttctaagctgttataacaaaaaagtgtttgctttttttcacaagtaactttaaaagtgtagtttagaaagaaaacattttcaataaaaagacactacattaatcctggatgcttgcaaatcctaaaatatattcctcctctagcgttgcacagctctgtgttgtatacacagactagctttaaaatttgtcacataccactttacctttacttttatgtatcattcccccgacttccttactgcaggtgtgggcaagaaaacttttcctttaacacttttcaacagcgggcataaaattctgcagctgaggtcttgaagaatgcagatgggtacagtatgtgttggagctcacagtgtgtattgactaacctagttccttttttgctttttttggtattgtcttgttaaaagtgactcccaggtagcaactctcttttttaagggtgggaacgaaagggacgtaggaagaatagatctagattatttaacagtcttcgatagagtttgaaagctttcttcttcattcaattttgggcaaaatactgcctctgcatttgttcataacaaaaagattagattaataagtagcttttgttggtggaaattaccagctctataagtcacccttggtggttcatggacctctgattagcttgggttttgcagtctcattgccacatgtatatgtggagccaatggccttttggtgctcagctgtttacgtctgactccttgacttctttggtacagtgatggagtcagatctcattaagtgtgattctccatgatataactagcctcaaaaaaatgtgtattccactccagttgtaaatatctttagatcagcttttcattgcatttgatggggagaacacagaaatgatagtctgcaaatcatccaggtgaattgttatactagttattttttggtggttaatgtgataatattgtcttatttaaaaccacaaatgaatttcaggagacgaaaccagacagagggtcaagtttacagatgaccgtgtctgcaagagtcaccttctggactgctgcccccatgacatcctggctgggacggtaggtgcattttgggggacctcatggaacactctgacatgagtgctgtataggcagtgacggtttttctatgttgaattttgttttaacttaagtctctttttctctaagtggcttaattatggcaggtgttcctccactcgtatgtatgtttgcatgcatgcatgcgatggagtgtcactctgtgttgcccaggctgaagtgcagtggtgtgatcacagctcactgcagccttgaactcctgggctccagcaatcctaccacctcagcctcttgagcagctggtactacaggcatgagccactgctcctttctcaatcctccactcttcaacaggcagaaatccctgatgcccttaaaatgatagattctattcatttggtaggattttatattatggaacaaatttcactgttgtaaaattctgtctgtaaagttaccagattttttgtaaagtcatttatactgagatattcacaactaaatagggcaagtattctaatttggctgtagcaaaaaatatgctttaggtcagcctgaagttctttgaagattctgc

SEQ ID NO: 18758 - DNA, 1045 bp, Homo sapiens
gccggggggccctcagcctccctgaggtgcagaccgagttgccacgcacgccccagagccagtgtccacgctatcggtggggaattcatgccaagagactgaaggacagactctcgggacgagatgtcatcccaccagaggggatgaggtggtgggatcccagcacccctgatcggaagctccccaaagtgcggtccagggaactcagggggttggtgccgggatcatgaatgtggggcgcgctgcagtatcgggtaccaccaaggcaggcctaggaggggactcggtgtcttgtctaccctgcaaactggagcctgcgcagggtgggttgttcgggcccttcacgctccgtccgtccctgcgcagcagcattggtcgaggctccctccccagggctggtggccgccggcacagccacctttgacgcgggttgttccctaggtatgtgcaggaggttatgcggcggggacgcgcctgcgtcaggccagcgtgcgcgccggtgctgcacgtggtaccagccgtgtcggacatggagctctccgagacagagtacgtgcgtcctgagggtcctcccggtcctgcccaccccagccctggcgtcccaagccaggtcccatcgtagagccgccgtcccggggcttgagctcgggtaccacgctcagaagcagctgtggcaggagagggtcccgtggcatcagactcgaagctgcccgagagccttctcctgtctccatcaaaggagacgctgactgtccagcatgatgacaagtgaccaaaaggcccggctggaggcctgggcacagccagcccctgcatccacacaggtgtcacggccaggcttcctgtggggcagagacctgcctgcgcctccacccggcttggaacgggccggtccctgccaggcctgacttgaccaggctcggggctgcaggtgctgaggtgcccggggtgcgtctgcttgcagtgtgggtctcagccatgcgtgtctgtccagcccgtgcagtcagtgagtcggggctctgctcccacctacaatgctgactgc

SEQ ID NO: 18759 - DNA, 1802 bp, Homo sapiens
tgaacccgggagacggaggttgcagtgagccgagatcgtgccactgcactccagcctgggtgacagagcgagactctgtctcaaaaaaatgaaaataaataggccggttgtggtggctcactcctgtaatcccagcactttgggaggccgagggtggtggattacctgaggttaggagtttgagaccagcctggccaacatggtgaaaccccgtctctactaaaaatacaaaaaaattaggcaggcatggtggcacactcctataatcccagctactcggtaggctgaggcaggaggattgcttgagcccgggaggtggaggttgcagtgagccaagatcgtgccactgcactccagcctggctgacagagcgactctgactctaaataaataaatacatacatagatacatggtaacttagttccctctctttcttttgtattgacaccagatttactcaatactgttttagtttgtcagtccaataagatgagaaaataagtatgagatgcaacttggaattaaagtgatcaaatgtttgctctgacagataagcttcagcacctgttaacttggagaatcaagtgaaactccaccggcttcatgtggaagctcgtcaggcagcatcacaacatgtacataacccaagagccgttctgtacaaggttctccttaaaatataatgggaggccgggcgcggcggctcatgcctgtcatcccaacactttgggaggccgaggtgggtggatcatgaggtcaggagttcgagaccagcctggccaacatagtgaaatcctgtctctactaaaaatacaaaaattagctgggtgtggtggcgcacacctgtagtctcagctacttgggaggctgaaggaggagaatcacttgaacccaggaggcagaggttgcagggagccgagatggcaccattgcactccagcctgggtaacagagcaagactctgtctcaaaaaatatatatatatacaggccaaggcaggcagattgcttgagctcaggcattcgagaccagcctggccaatatggtgagaatcgcatctgtccccaaagtacaaaaaaattagctgggcgtggtggcacacggctgtggtctccgctattctggaggctgaggtgggaggatcgcttgagcctaggaggcggaggctgcagtgagctgagatcacaccactgttctccagcctgggcaacagagcaagaacttgtctcaaaaaaagaataaaactaaactaaatctgtgcagagctctgcccacagccgatacatacgctgcattccttgaggccttgctgtctccgctccttctgtctatgccccgtcctgcctctccatcctcagggacaggaccggtggcgaggggcccccggccaccctgggctgggacggcatctgctggggctgctgggtcaggcctgatgctttttgttttccccaagtgtgcagctggtgctgagaggtgatggtgctgcttgtccccacacaggaggaggaaggtgaggacggcgatccatcgtcagggcccccagggccgtgtcacaagctgcctcccgcccccgcttggcaccacttcccgccccgctgtgtggacatgggctgtgccgggctccgggatgcacacgaggagaaccctgagagcatcctggacgagcacgtacagcgtgtgctgaggacacctggccgccagtcgcctgggcctggccatcgctccccggacagtgggcacgtggccaagatgccagtggcactggggggtgccgcctcggggcacgggaagcacgtac

SEQ ID NO: 18760 - DNA, 1028 bp, Homo sapiens
caccccatccttctcaggtttagatgctgtttctactctcattgtgtagatgagaaacgggtgcacagagccaggactgcgccagagcccacggcgggagggcaggaaggccacacacacggagggtcccacctcccatctgccaccctgcttgcttgtcacaggggagctgtccctggctgcatccctccgcggcttagacactggcggcctggattttaaaacatgttttgctatgaaggatgttattggagcagctggcaaaattggaataagatctgccacgtgatgttattgtatcagggtcagtttttttaaccatccatatttgtactgtggttaggtatgagagcgaccttgcttttgttaaatacactctaactggttcagaaaagtgagcgtgcctgtgtgtgtgcgtgtgtgtgtacgtgtgtgtgggtgtgtgtgcctgcgcatgtgtgggcatgtgtgtgtacgcatgtgcctgccggtaaggggatgataaagcagttatggcagaatgtgagcccttggggaatctgggtgaaggtggacgggaattccttgttctatttttgcagctgttttgaagtttgaaatttaaaatgaagtacccttgaaagttacacagggccaggcgtggtggctcacaccggtaatcccagtgctttgggaggcctaggtgggaggagtttgaggccagcctggacagcaagacccccatctctatttttaaaaaaagctataggggggccgggtgcagtggctcacgcctgtaatcccagcactttgggaggctgaggcaggcggatcacgaggtcaggagattgagaccatcctggctaacacggtgaaatcctgtctctactaaaaatacaaaaaaattagccgggcatggtggcaggcgcctgtagtcccagctactcgggaggctgaggcaggagaatggcgtgaacccgggaggcggagcttgcagtgagccgaaatcgcgccactacactccagcctgggtgacagagcgagaccct

SEQ ID NO: 18761 - DNA, 1050 bp, Homo sapiens
caacagaggcggcaggcacagacaggagcaggccctgctgcgttccgcacccccagagggcccttgtgtggtggggtgggggccgcagtgtgcgtttctgtgtgaacagtctgcagcaaacaacctcatcggaggctctgtaggaacctgcatcaggtccatgtggcctgtcaggtggggctgtggttggaaccttcggtgggaggtccctcagccagaggcccaagtgagaaacccacatcacgggcacagctgcccggggcctgctcactgctgctactgggaaactggacccgaggatggtggtgagcagaggcggggggaggcccaggaagccgataagctagcaggacgtgccgtggttgcactgcccacttctgctctgttgagggccttggttttgcaaaagctatgccgtttctctggtgagtccatggctctgcagcagggacagcaggaggggagtagcttagacgctcataggagcagaaccctgttgtggctgcacccacggaggcccaggctgtgtgcaccttgtgagactctttaacacctgcccatcagagttggagcaggttcatcccgaaaagccccctgcccccactgtccatggaaaaattgtcttctacaaaactggtccctggtgccaaaaggttgggggccgtggctttacagcatctggtaccagaatgcgtgccctgcggggaggggcctcttcatctttagcctttacaattacttggaagtttcacgttttcatttacttggctttttcctttatgatatttttttctgttcctctaaagctggagaggttgccattctctgtaaatctgatgactctgacagttttgctgttctcagaaccgtggtgacgcagcctgcaaggccacctggagtctttttatggagctcgcgtggcggcatgagtgctcctgttggcccctcagccgtgctgctctctgggcctgatgatgggcttttcatcctgcccttggtctctgtggtgctgactgttcagaccataagcgcgtctgtctgcgcctctgg

SEQ ID NO: 18762 - DNA, 1030 bp, Homo sapiens
agcagggtcactcctgaaggaaagtgggttctccacccagacagacggctgctccccagtggggagctgggggcagtcctccaaaggaaggctgcgggtaatgcaaagggaaaaggagagtgggtactgaacaggcggctggtgagcattgctaccacagcagggcctggagcttaggcctcacgtgttaggggatgcatatcctgtggagagccggttagtcgtcccggtgtgtccggaattggtgggttcttggtctcactgacttcaagaatgaagccgcggacccttgccgtgagtgttacagttcctaaaggcggcctgtccggagtttgttccttctgacgttcggaggtgttcggagtttcttccttctggtgggttcgtggtctcactggcttcaggagtgaagctgcagatcttcgcggtgagtgttacagctcataaaggcagtgtggacccaaagagtgagcagcagcaagacttactggaaagagagaaagaacaaagcttccacactatggaaggggacccgagcgagttaccactgctggctcccgcagccagcttttattctcttatctggccccacccacatcctgctgattggtagagtccagtggtctgttttgacagggcgctgattggtgcgtttacaatccctgagctagacacaaagcttctccacatcctcaccagattagctagatacagagtgtccacacaaaggttctccaagtccccaccagagtagctagatacagagtgtcgattggtgcattcacaaaccctgagctagacacagagtgctgattggtgtgtttacaaaccttgtgctagatacagagtgccgattggtgtatttacagtccctgagctagacataaaggttctccacgtccccaccagaatcaggagcccagctggcttcacccagtggatcccgcaccggggttgcaggtggagctgcctgccagtcccgtgccgtgcgcccgcactcctcagcccttgggtggtcaatgggaccggg

SEQ ID NO: 18763 - DNA, 1031 bp, Homo sapiens
cctcagtgtctttgagacggagccaggtggcggcggcatgcgctggtttgtggacacagctgagcgttatgcgctggctggccggccactggccgagctctgtgaccacaacgcaaaggtggctcgagagcttggccgcaaccaggtaggtaggtgctgagcctgggggtccctgggccacgacctcagggcaggggctggttcctccgtcagctgcgctcaccccacctcaagctccgcaatggactccagccagtcgcaccaacaggccttgccttggtagctgagggtgtcaggatcacacagggccagggctccagggtgggccagacccaggactgtcctctgaggggcgggggtctcgggagtcgtgtggctcaagctctctgttcttccccccttgcttctggagctctccaggcaccagcagcggtggagccgtgagctgccgttcccatgcccatctctagctgccccgcaagtccccactgcccaattctgttttcctctgtgctgctgtagggcggggaccggggtttttgtctttcccatgagcctcagctttcctacctggggtgggcctggacattgggtactgagggcagctgaatgctgagggcttgtgactgtccaggcagagagggacctgcatggggtgctgggtgtccaggacgcccacaagtgaccagtgcccgcccctaggtggcgcaaacgtggaccatgctgcggatcatctactgcagccctggcctagtgcccactgcaaacctcaaccacagtgtgggcaagggtggctcctgtggcctcccgctcatgaacaggtagatgccgggggcagctctccccaggggctggggctgctcgagcccacccacccatgggcccttcctgcccccagtttcaacctgaaggatatggccccagggttgggcagtgagacgcggctggaccgcagcaaaggagatgcacggagcgacacagttctgctcgactcctcggccacactcatcaccaatgagggtaggctgggg

SEQ ID NO: 18764 - DNA, 1035 bp, Homo sapiens
gggatctcccacccaggtggcactgttcagccacccgaagaccccatctccttgcatgtgggcacccactgctgtgcctcccatgactggattggcagtgaagggagctctgtgggtgagcaggtgactgagccttccccaccagtggtgcaggaggagtcaacggccaaactggctgcaatgtgtgggttcaggcctcattccttcactgggcaggaaagaggggtgatggttagtggcagctgcctggagcagtaggcactaggggcccaggcctcgcctctgagggtgctcatgctcttccgagcaggggctgagatgaggcctggatcccagcacccactccccagggtgtccagctttcaaggctgagctgccctgggcttgaccatgggccctcagtctgctggggcagcaacacgggtttctcttgaggccacgtgcctgctgcgccatggtgcccctcctcagagcccctggtgcacccccagaagcatctcaaactgggggcgggagaggagctctgccgctgtgccacgtgccaagtggcagggacgcgggtgtgcctgcgtcacggggctgccacggaatgtgtcagtctgcaccctgtccccaatccccagccaccccagctgtcagccaggctctggggctgccactgcagatggagcccgatgtgcatttctctggccaccagggccctgcccagctctaaggccctctgcaggcagggctcaatggtccctgaggttctatgagggctgagtggttggttaggctgtgccccagtctggtgctgacagagatgggggcaccagagatgggggaagagaccttcaaactgggggcgctgaggggtgaggaggtttcccaggcatgtgtccaaaaggatgtcccaggggtgggcacgcggtgtgcagcctctgcaaggaatgcagcgccgtggcagggaccctgcaggatgagggcagtacttggagagaccactagcccagggcccagcaggaaggcatcgagaccccatgaggcagaaca

SEQ ID NO: 18765 - DNA, 1027 bp, Homo sapiens
gggaaaccaaggcctgggttcacaggggatgccgaggcaacgtggctttaggaggtccccacagtggggctggggctttggcgcaacgtggctttaggaggtccccacggtggggccggggctttggcacggcaagcaggtgcgacacacgtgccctggcagcaccatggtggtccacacgccggcgtgtgctcgtgtgggcgtcccgcatggggttaaccaggcacccaccttcaccttccaggggtgcacttcgtcttcgacaccgccttctcaaggcacttcagcctcctggagagccagcgagagtttgtgcggcgattccgaggacaggccgactgcagacaggcgctgcccctgctggcctctgcctgcccaggtgtgctcatggtgcgggtggtgggagagtcaagttcaagtgcagttgaaacgtgaggtgatatggacacaaatgacaaggcgggggcatggggggtggagacgcaagcaggttttgcgggacgggttggaaatgttggcacaaatggccttttctggagaagaggctgccctcccgtgggagccacgcgcagtcacctcaggtccctaggcggtgtcgcctgcacgccgagctccgcgtggtggtggggagaacaggaatgagcactctttaatgtcatcatgatctcctgtatgagcgggcccgcccccagaatgtcgtgctgctgcctgtgggtgcgggggccgccgtgcgcccccgccagccccgtgtgccccctgtcacctcaggctggatctgctatgccgagaagactcacggcagcttcatcctcccccacatcagcaccgcccggtccccgcagcaggtcatgggctccctggtcaaggacttcttcgcccagcagcaggtaacggcgttgggccagccccagactcaggctggggagcggccagaagtgactttgctggcctcttgccatgaggctgcaggaaacagagtcctcgctgtgctgtgcggccttccccagcacacctccacccttgttcc

SEQ ID NO: 18766 - DNA, 1604 bp, Homo sapiens
ccaccttccagctctgccagcacctccagctcggccgcgaactggttgtggaaatcatcctcgacgccgcacagctcctgctcgtagtcctccataccgtccgcgagcccgagctcccgctccgaacctcccgcgccgccgccgccgtcgcgcactgcccgccccgagcgtgccgggcgccgccaatcagcagccggcgtgcccggcggcgcgcgccattggttggcgtggcggaggcggggctgcgcgaggggtgggcggggcgagttcctgctccgcagcccccgcgtcctgtcctggggagctcgccattggccgccgcagccgcccttccgcggcgggggcgggccgggggcgggccgggggggggggcggggctgcgcgcgcagcggtgcagggcggaagcgctgccaggcgtccggagcggagcttccagggtctctgggtcgccagcgcgcgggcgcgcggctggagccggcgccgggcacggcatcgggggcctggactgcacggcccggcagcaggttggtcttggcgtgggcgtgggcgcgggaggggctcggagccagggtcggcctgcccaccgggcctgtgcggggcgcgggtctgcgcggactgcggggagcgaggaggccccagccctaacccgcgctgcgggcagacctggctgccgggcctggtagtgctgcagcccctccccgcccccaccgtcgggcagaggcattcacgtgcatcccctggaggggagggtctgtggggaggatctgtggggcaggtttggaacgggctctttctccaggcttaggtcaggcagggcccttcaggtcagcccggagcaggctgactccttgactccccagctgacgccctggggactgatctcggggactgaggatgcaggtgcacagtagggctgcggacccggctcggtggcttcgcaccggagcccgggtggggcggtgcgggtacctctgtatgctgggctgggggcgcaccacgtgctcacagcacacgcacccacgcgtggctcggcaggccggccatggagccaggcagcgtggagaacctgtccatcgtgtaccggagccgcgacttcctggtggtcaacaagcactgggacgttcgcattgacagcaaggcgtggcgggagactctgaccctgcagaagcagctgcggtaccgctttcccgagctggccgaccctgacacctgctacgggttcaggtagggggggcggccggagccccacggtggcgtctgtggaggaaagtggctcagactctggactctgtcccactccaggttctgccaccagctggatttctccaccagcggggcgctgtgcgtggccctaaacaaggcagccgccggcagcgcgtacaggtgcttcaaggagcggcgcgtgaccaaggcttacctggcattggtaagacctggtcagtcctggggtggggcgtggggactcaggattcccaccccacttgggcagccctggctcagagcctcccaccacgctctacgtggttgcttggtgttaggtgggctccccggcagcactgggctgccccgtgaactgcgtgcgattctccctctcctgcagctgc

SEQ ID NO: 18767 - DNA, 1027 bp, Homo sapiens
aaaatgacccgagaaattgtcccacatgcagccacgtaccttccaatgagaacaacccgagaaatcatcccacacacggccacataccttccaacgagaacaaccagtaccttccgatgagaacaaccaggtaccttccgatgagaacaacccgagaaatcattccacacatgcaaccaggtaccttctgacaacaacgacccaagaaatcgtcccacacgcagccaggtaccttccaacgaggacaaccaggtgtcttccgacaagaacaaccaggcaccttccaacgagaacaaccaggtaccttccgatgagaatgacccaagaaattgtcccacacgtggcctggtaccttccgacaaaggctctgagaccattcaatgggaagaggacagccttttcagcaaatggtactgggaaagctttatctccacatgcaaaataatgaatgaagctggccccttacctaacagcatacacaaaaattaacccaaaaaacataggatgaaacacctaaatgtaagagctaaaactgtaagactcagaataaaacctgggaaaatcttaaggacattggatttggcagtgttttcttggatatgacaacaacagcaccggcaacaacacagaaaataaattggacttcatcaaaatttgacatttctggccgggtacagtggctcacacctgtaatcccagcactttgggaggccaaggcaggcggatcacctgaagtcaggagtttgagaccagcctggccaacatagtgaaaccccgtctgtgccaaaaatacaaaaattagcctggcgtggcaggcacctgtagtcccagctactcgggaggctgaggcagaagaatcgcttgaacccgggaggcagatgttgcagtgagctgagaccgtaccactgcactccagcctgggcaatagagtaatattctgtctttaaaaaaaaaaactgtggctataagtgagactgcagagctgccccgggctgctgtctgtggaagccctgccctgcgggagcag

SEQ ID NO: 18768 - DNA, 1075 bp, Homo sapiens
ccgtcctgggggcaggcacgccgccgagggcaagtggtgggtgcggaagaggatcggagcctacttccctccgctcagcctggaggagctgaggccctacttcagggaccgtgggtggcctctgcccgggcccctctagacgtgcaccagaaataaaggcgaagacccagcccctcggcggctcagcaacgtttgcccttccctgcgcccagcccaagctgggcatcgccaagagagacgtggagaggagagcggtgggacccagcccccagcacgggggtccagggtggggtctgttgtcacatactgtggcggctcccaggccctgcccacctggggccccacatccaggccaacccttgtcccaggcgccaggggctctgatctcccatccatcccaccctcctcccagaggcccagcctggggctgtgccgcccacaggagttgagacaatggccatcctgacaccttcctccactacagccctgaccatagacccagccaggtagctcttggggtctctagcgtcccagggcctggtttctgttccctcttcaatggtgtgttcccagccaggtcctgaccctcagagccaagtccctgtcacgtctggggcagccaaaccctcgccccacagggacctggacacgcccggccaggatgtggggttggatgggccattttctgtcctatccctcatctccacccccgccacagcctacacgcatcccacacatgcaggcacacacagcctgtgcacacatgtgttcttggcccggtttcatccccccatgactggtgtctgtgaggtgcagatggacacagcgcacacccagaccctccaccaggctgtgacctcgctgcctctgaggccttgacaaggcccctcaatcggaggacagccggccgtgcacactttcatcatcgtcggacaaacagcgtctactgcacatttttcttattcctattcttgagccatagctatggcatattcttctactattcctattataccacttaccagcttactcgaaaacacactgtttaaatgaagaagttcttgtacctccctcc

SEQ ID NO: 18769 - DNA, 1125 bp, Homo sapiens
attggcttcctcacagcttggtggcctcagagtagagggacctttaatggggttggagctgcctcttcaaggactgagcttgaaagttcagaacatcactcacgctgcattctcttggccaaagctgagtcccaaggtcggctgggattccaggggaggcgagccatgctcaggaggggcagtggccactacagctgagcctgatgctcttctctttttaacacagcattgggtcatgtcagccccatgtctgttacatttgtcaccgtctttatcactcagtgtcatttttctccatctgcagttgccttggtgggaagtgggggttccacgtccacaaaggcatcgcactgtgtccctgctgtggccctttcccaggtgaggttctgagagcccgtggcaattaccacttcgggacacaaacatccaagggccgcttcccacggggacgcttgtgattggcttgttcctggaacacatgggacctccttcttcatcccaagaccctcacctgataagcataagcagcccccgctcccctccccgtcagagctcagccgacacacgtcagcagccccagcatgcaagagggaaggagaggttaaagtcccccaccccaaaagccagaccaagagctgggacttcgggtgtgggcctagccctggagatgcttgttcccaacacctggccaagcctgctgcctcctgcatgggtctcgccgcaaccccaaacacacaacaagcagcctaaaagggaagtggcagaccaggcattccggttcttctctggcttttccctgtgggcactagggggtgggtcccacatggggcactcaagccctaacagacgacactcattctcccccaagatctgctgccttctaagtccctaaacaggtgtcatccccttcactctttcctcatgtttttcttatttaaaattgtctttttaggagaagtttgcaggctgtttcctgaggtctgggccagcagcaccgccatgccctgacccaccattcccctggccgcgggctgagtgtcccagctgcacgggaactcctggccttgcctgcagcatgcgacactgccacacccacctcacggctcacagccaagtttcaggtca

SEQ ID NO: 18770 - DNA, 1028 bp, Homo sapiens
tgcttcctccttcaggctctgatgacactgaagctccccggggagaacagcggtgtcctttgctgctggagatgcctgcagatgcttgctctgggcatgcaggggcccctggggaaggatccgcgcctggctccctctctccatctgtccctcgttttggacgggaagtcgactatcattcctgacgttccagtgtaacgtgttatgtttctctgatggctttggggattttatcttccgttgccagtttcttgactatgatatgcctactttttaccaaatttggataatttttgccaatatttgggggggttgccccatgttctttctcctctcctgtggctccacggacatggacatcaggcctctccctgccttccacgagctcctgggccctgtgcttctgtgtggtgttttctaaaagcctctcatctctagaatgagtcactgtggctgctatgtcttcgtgttcactgccttttctttcgttcttcactctgctgctgagctcagccaggggcatttgtgctctggagattttagttcttgctctggagtgggcctggccttcctccgaggctctgtgtctctgctcagctctccagcccgcctgcctggcaagcacgttttcctgtgctttccggtcctgatgctttcctgcgtccgtgtggagccagcgcttggggtgtggtgtgtagagaggggaatgtggacatgcagtgcgtgctgtgggggctgacgggctggggccggtgtggatgtcgtgtcgggggccgagccaacgggccagggccagtgtggatgtcatgttgggggacgacggactagggccagtgtgaatgtcttgttgggggcccagctgacgggccagggctggtgtggatgtcctgttgggagccgacaggctggggccattgtggatgtcgtgttgggggctaagccgacgggccagggccggtgcagatgttgtgctgggggccgacaggctggggccagtgtggatgtcctgtccagcaaggccctggagg

SEQ ID NO: 18771 - DNA, 1028 bp, Homo sapiens
gtaaatgcacgtggaaggtgtaaccccttggccgcatcccattctgtatgcacggactttgctttctgcacaggtttcctcttgtgtccagtctgcccgtctttccccattttcattgctgccttaggtgctttgtcgaaacggcctccagcactttttccttacacttttaagggctatttacatatttacatcctgttttaaattgcttacctgtagtgaatggactatgtactctgaggtcggttttcacacagtaatgggagcactgtccatccatcccttcgtctgtccatccatccatctgtccgtgggagccacacatgcacttggtgctccctgcgctgcctggcttcaacagcccgggtcctcccaacagccctgggacctggacttcctcttggcagctccagtaagaggcaacaggcgacagatgtttgcaaagacacctcttgttattaccattttattttctctgttgtatgaacttaaacattagggtggcagcagtcatgtcttcagtgaaccagttgcctcactggcactgccgaactggtatgtgtggtccagccccacccctgccatccccacgagctgccatccagccccatccctgctgtccccgcgagccgccgtccagccccatccctgccttccctgtgagccgccgtccagccccgtccctgctgtccccgcgagccaccatccagccctgtccctgcaagccactgtccagccccatccctgccgtccccacaagccactgttcagtctagcgcttccctgtgccaggcaggccatggccctgcacagcgggacccagcgtcccggccttgccagtgctagctggcaccccgttccgtgattgagtgggaggcacagtggtctggtgggtgctccaccccctctcctgcgaggcgggtagacatggaagccccccagctgctctcacccaaaggcgcccctctttttttgtggtattttttttttggtaacttctgtaaataaatccacgtttggccttcacc

SEQ ID NO: 18772 - DNA, 1059 bp, Homo sapiens
atttgaggagaaaatgaaaccaaaaagaatacttgaaaccctgctcagttggttttgttctgagctttcagtggctctaagagctcatgggaaatgagttctttttcttttctccgggccacttgagttctaatgaaatgcaccacttggttttacaagttcttctataaaatacttgcttgtttaaaaagcaaacagcactgccctacttcggagctctgcagcacatcccttaaagaaaaaatacttgaggtcactgtgctgaggcccagaatttaaccacggccagtaagaaccatcaacagagaacggcatttctgggatgactgttttaatcttacaacaatttatctgaaaggagaaaagagaaagctgattttttttttctgattctttttttttttttttttttgagacagagtttcactttttcgcccaggctgcagtgcagtggtgcaatctcctctcactacaacctccgccttccgatttcaagagattctcctgcctcagcctcccgagtagctggggctacgggcacaggctgccacgcccagctatttctttctgattctgaaacaaagtatttatcggccatgcctgctgttggctgctcgggcgacacggtatttcctcggtatttcctcgttgcagctcccaggtcaggctctgggtccctgtgagaggcgggtggccgccatggctctgctgcctcccgtgtggggtagtgacggggccttccgaagcttgactgcttggttagttttgttttgagagcctgtgatgtttcaagatttttactgcatctttttatgtagctatttttataacatgagtagaggttgaaatagtttttttctctctgaaatctcaattcagtctgtcttcctttttcctgataagcaggaagcatcctatgcttcttgccttagaattactgatttaggctattgctttggtgaggccacatcttgttttcctctgtggtcctggagtttgcgttgtggtgaggggtggagcacatccacccttcagctagcgccaattaggtccctgtgg

SEQ ID NO: 18773 - DNA, 1375 bp, Homo sapiens
ctcctttgatctccgcagggattctctgttcaattcagaaggaactgcttttaagccactgggtcaagcggatattttaagcctggtgcccagcattgaacatttctccttgacatatgcacgttcttctgtcttgtgagtacatttggggtagaatcagtgtttttctgctgtatcaaggaaccagtttcccatctttcagggacatggttttctggctgagctggcccagggcaagcaggcagtcatcctgcatttatctccttctagaaagttctggattttactgggactgtgcgctactccctgttcctcagaatcccagggtttttccaagttgccataggggctctccaaatatttcacttgatactgaattttacaatgtttatagctattgaaacacttgtaattaaacacataaccaaatgtattctgtggaaactccccttgttaaaagacattgaactgagggaggcttacccttaggcagattgtctcagcagacatgtagtaaagatgtacagatcaggagaacacagaaacgcctgccctgtcggggaagcttcgaagccagacctggagaggccggctgccagcgacaggcctctgcattcaacctgactttgcatccgtcctggggctggctccttcccaccgcgggcctgggcgtttccatgtgctgccaccgaggtgtgtaggtgctaggggtgtgctcactgcacacagacgtgcataccgcgggcgtcctggggtgtcgggcatgccctgctgtgctgtgggagccggagtgtgttagcggaaagcggcattttcacagggctcagagttgaagacacacctgtcttcctgacgtgtggactcgggtccctagtgtgattactgcgttgagcagatgctgaagtagcaccctgcccggtgctgacctcctggtgacaacgccactacccccagtggacagcgaggaagcagggtcagccactggcccggctgtgcagcgattgtccgtaggccctggagttcagccctgcccttcattcacgccactgtgcagcctgcgtatcctggacacccggttcacatctgggcagcggcgttctcgggccgtgacggctcctgggaggaccgaggctgcccgaggtggtcggggatgcctgacactgacactgagcttcccctcagcacagatgtcactcccaggaatggctgaaatctggacgagtaaaagcttatgtgacaggagtttccggcctaagcagcgggacctgggtgccatgttcttggtgtgtaggggcagtgccggccgcccatgggtgccggtgcctcctgcagtcaggcctgctgctgtctgtgtgcgcaataaggaaaccgaacc

SEQ ID NO: 18774 - DNA, 1060 bp, Homo sapiens
cgccgccgccgccgccgccgaggctcgggtcccgctgcgggacccgcaacaagtttctttaagcggcggccccgcggccccgccccgcgcccggctacccattggcggagcgcgccccgatcccccggaggcggagcccggccgcccccgcccccccacccataaagaaagctccgcggctctcgccgcgcccccgcctgccccgcccggcgccgcaccacgtgggccaggcgccccacgcctggagctcccctctctggagccccgggaaaggaagcggggcagggaggccgggtgggagcaggggggtctccggcgcttcctctcctctgcgggcgccgcgcggctcctgagagtccgccccccgtcctgacgctcagctaggaagcgggtcctcgggcccctcccccgacacacacacacacacacacacacacacacacacacacacacactctctctctctctctctctctctctctctctctctctctctctcacacacacacacacacacacagcccgtctcgcgcctgaggtctcgcccgcaggccggtggcgcggggtcagctgctgcctgcggtccaggacagggtcggttccgccgcgcagcgcccaggcccagctcgtccagagtctgcggacagcgcacgtccaggtaacgcgcttcaaggggccgcggctcggagctgggggaccccgggccgccctgcccatacgagtgcgagcgtggagagcgcgggcgggggcgcggtcccgggggccggccagctggagggggcgggagcgctgggcggggcctgcgctgaccccggcgctgagtccctggggccgccgggcggatggcgtggccggacgcgggggccccgggccttccgggcgtgacctagggctcgggggcggggaggcccctccggcggggcggccctgggtggtccggcagaggcggaggccgctccgagcctgtgagccctgggcgcctgcggaggcggggagagggcggggtgtgccgccctggtggggaccgcggggtcggagaggggacattgccccccccgag

SEQ ID NO: 18775 - DNA, 1035 bp, Homo sapiens
gggctcggggggtgtgaccgccgagcgccaggcctcgggcgaggggccacccgccaccctgtggttgctcccatggtccccgtggcgctgactggtgccagctgcttccagggaggagaagcggaggcctgggcagaggggtgaggtgcaggccacgtgccccacagctgtgttcccgacaaatctcatgtgcggctagggcagcgttcttcttcagaagtcaccctcctgcctttcctgctgattatgctgaaaatgtctggaaaggccccagctgtcttccccggcagagtggggttttgtccctctgcggccccttggctgccgagtccttgtttctccagctgttttttgggatgccccctgtgtggtgaacctgctgtcaccctgacatggccaccaagtcctgacgagtcagccctgcctggctcagccagctccctgctgggtggggtgggttgtggggagtgaggctgcaggaggtctgcgagggcgggactcgatgtcgggtaggtggggcagtgaccgcctctttgcttctgctgggccccagcttgtctgaaccgagcaccaggcaggggctggccaggctgtggaggttcccggcgcgccgacccccacggtcgggtctgacaggtttccccggggtgcggttgcctggggccatggagggaccatcggtcccaggtgaggacaggaggaagggggtctagggcccttcagggacaggcaggggtggctttgcctgtctcagagcaggcctcagcagcacactgtccagtaccaggcatcagtgagggtccaagaacttgcagccagcagggacgacagggcagggccccccaggagagaccccacacagcgcacatgggagagtggatgccaaaggtgggcagcggggagggcgcctgcgcaacagtccctgtgtggtgtgccccacgctgctgaggtctctgtgcggtgttggccggcagtccctgtgtggtgtgccccacgctgctgaggtctctgtgcggtgttggccggcagtccctg

SEQ ID NO: 18776 - DNA, 1032 bp, Homo sapiens
tccctccgtggggggctgggtgcggccccctgccgtgtatttcctccccagggagtggggcctccccgggagctgacgccaccaccctgcttagccctcacagggccccaaggtgtccgagtgtgttgggtctgaacgcgaaataaagaaatcctctcagcccgcctttgccagcgtcgtccctcccaccccacccagaccacgtccaacagcctgggactttcgggaccctggggtcggggcaccgtgtggagtgagaaaggcgtgaaagacagcggctgcggccacccagggcaccagccacatcctcttcctcgtccccgcccctcagcctccctcctctggctcctggctggtgggtctgggggcaaggcagaggcgctccaggtggaggggggcgggccggggtgcccacgctggggtgacgcaagaagaaaactcccgggcctcagagtcggcgccggaaacctaggtctgggtttccctcgtggtggttgtgtactgaggacctggaagtgatcatattttggatatattcggttaaataaaatcagcggttaggattcacatcgctgcttcttgccttttaatggggctgctgagcaagatgggttcccgtggagcccggctgtgcccctcaccccgatggcgctgcccaggcctcgggctccgctcggacgtgggcctggctgtgtccggggtgtcctggggctctcggcctccctgctcccagcgtccctcccggcgtgcccaggcctcgtcagggcctccttcccctccctcggcagctgaagaagtcccctttgccagaggacacgtgtctgcgccctctcgggagtggggcccctcagatccatccagaagcaggcagttggggggccctgcgggagtgggagagctgagggctagagttccattggcagttgggctgtgaagccgtgaggttctggggagagaaggaaggttctggaacggccccgctgccccacacctgcctccctggggaccctgagaaggcagccagacgagggc

SEQ ID NO: 18777 - DNA, 1048 bp, Homo sapiens
cccggagaagagcgtggtgagcctcttccacgacccgccaggtgtgtgtgggcagtgccgctgggcaggccctgggatcagggcctgggtgatgccttctggctgagtgtcccctgtgggctgaggttgcagccctgggctggggggtcatccctagcatggatcatagcagggactcactcctgtaatcccagcacttggagagaccaaggcaggaggatcacttgagcctaggaggttaagaccagcctgggcaacttagcgagactctgtctttgcaaaaaagcaacattatctggctacggtagtacacccacagtcccaggtacttgggaggctgggccgggaggattgcttgagcccagaaggttgaggccacaatgagctgtgattacatcactgcataccagcctgggtgacacagcgagaccctctctcaaaaaacaaaagaaaacccagcctggtgactcccacaccaagaccacggcctggcctcgctcgaccacaagtgtttcacggaagcgcagaccgcgaccttggagtgccggcctttcacctctgcagttgtgtccctggcggtctcacccgccctgcacgcagtacagtgctgcctgctccaggaaaggaaccccaggctgtggggggcaccctcttcccggagccaggctgcgagctgcaccacggtgcacacccatggagtgtagacctggcgctgctagacccagctgggccgccccgctggacgcggctcctgcttctgctggcatcagggccccgcagagcctcttcccctgtggcctccccatgggatccttttagcctttctgcttcccagggaggctgagaacagggagccttctggggaccgctgggctcgggagctcaggttgctgggctcctggaaggtgactgtgaggcccgagactgggcagcggggcagggcagtcctgcggaggcgggagtcgtggaggccccgtcagcccctcttctctcctaggctcctacaaccccctgaccctcggcctgttcacgctggtctacttcttcc

SEQ ID NO: 18778 - DNA, 1049 bp, Homo sapiens
ggggcctggtgccggccgggcctggggctgctcttctgccggggtgaggtgacgcacctcctccctcctcctctgactccgcctctgaggcctgtggttcgtctggtttctagagacagtgggagggtcacggtcaccgtaaccaagaaggctgctcttacggccgccagatgcggtgcccagcataacaaccgctggctgtgaagttgttgggaattcacccacctccccgagtcaccctcgggccccgggtgcgcctcagatgttggccagaaactgtcctttgtgggactcagcgcaccgtgcacactgggcccttcataatcccggggcctgcaggcggtctgggcggtcctgctgctgccagagtgactgcgccagggccctgcctgaccctcgccctgaccgcgccctgcaggccttccggacggtggagatcaagcgctgggtcatctgcgccctcattgggatcctcacgggcctcgtggcctgcttcattgacatcgtggtggaaaacctggctggcctcaagtacagggtcatcaagggcagtatccttcccagtgcggccgctgcagcttgggaggggggcgtggcctgggccgagtcccgggcagaagtcctgagcccagcgtgttccagtgcaggtggaggcggcccggccaggctggctgtgtccctgtcatggttgggccgtgagacgtctctgggatgtccagtgaacatcatggctccacccagcagggtggcatctgccaggctggtctgtggggcagggctgaggtctgggctgggtggtcatgacggggaagcagccagccctccttgatgagccccagatatcgacaagttcacagagaagggcggactgtccttctccctgttgctgtgggccacgctgaacgccgccttcgtgctcgtgggctctgtgattgtggctttcatagaggtgggtggcaggatgccgcagctatggcggaccccatgaaggattgggggtcttggtgaatgggcgggaacccctgcagctcacccacccccaccatcac

SEQ ID NO: 18779 - DNA, 1048 bp, Homo sapiens
tatggcttcctggtggagcactacgtgcggaaggaggaataccagacggtgaggcctgagtgctgctcactagcagcatcccgccacacaaggctcctgaaacgaaggcttaacggctcaaactgaggctgtgtgtggcggctcactcctgtaatcccagcactttgggaggctgaggcaggagaatgacttgagcccaggagttcaagagcagcctgggcgacatggtgaaaccccatctctacaaaaaggggaaaaattagccaggcatggtggctcacacctggggtcccagctgcttgggaggctgaggtgggaggatcccttgagcccaggaggttgaggctgcagtgagatctgatggcgccactgcactccagcctgggtgacagagcgagaccctgtctcaaaagaaaaaaaaaatctgtcggtagcaaaaagtaacagtctcacgctgttactggctgttactagcagtgtcgcaggaaagcgacagacttactttatttgtgaagaaatgtctgcatgtacccgagtctgaataaccacgatttctttttcagggattttcacaaaaaaagaaaatggtgttccattttttagtcgcttattttttaattttagagacagcgtgtagtcactttaaagtgaccagctaatcacttattcagccgcagtgttctagcgttttcctcatccccaccaacatttgatcattctttcgaactgtagccatcctagggggtgaacagtaccttgctgaggtttaaattcacattttctggatgagtagtgatgtgcagctccttctcatgtgcttattatccatttacacaccttctgtgaaggcttcaagtctcttctcatcattttattgggttttcttattattgtactttttttttttttttttggagacggagtctcactctgttgcccaggctggagcgcagtggcgcgatctcggctcactgcaagctccgcctcctgggttcacgccattctcctgcctcagcctcccaagtagctgggactacaggtgtgcatc

SEQ ID NO: 18780 - DNA, 1050 bp, Homo sapiens
accgcaattggatgtggacggaaggaaccagttgttttcaggacaagggagaggaaaggagccacgcggggcaggtagaggcaggtcccagccctgtccagccccacacctgggcctcgggagagggtgtgcacaatcgggagattttttaaagattccagttgtgggccgggcgcagtggctcacacctgtaatccaagcactttgggagaccgaggcgagcagatcacaaggtcaagagatcgagaccatcctggccaacatgatgaaaccccatctctactacaaatacaaaaattagctgggtgtggtggcgcatgcctgtagtcccaactactcgggaggctgaggcaggagaatcactcgggaggcagaggttgcagtgagccaagatcgtgccaccacactccagcctggtgacagagtgagactctgtctcaaaaaaaaaaaaaaaaaaaaaaaagattcccgtcgtgaagtcttttgggacaggagagtaaaaaagactgcatgtcttacaacgtggtgtttacgaagcggccatcacgcctcacgcactgaggccccagtgctgccaccacccagatgttagagaagtgagacgtctgtgaggagccgtggcatcccttccatccgatctgtagaactgactggaagctgtgcagtgaggacacagtgtttcttttgagattcagatgtgacccctgcactgcactccacgtgcatcatttgctgacggatgaggcccagcagcgttctggggagccctggacccccagtcttgaggcgtgtctcagcacggggcagctgtgtctgagccgtttataaactagttttacacgcatgggtccttccacgtggatttttacccaggacctcagcataaaggagaaagacaagccttggttttctgctgttagaaagaagtttcattgtaaagatgtgacttcctgcctggagctctagaggaccgagggcagcacagcctgaggggctggtgggccgggtgctcaggcctctccctgtgctgagttggtggcaagagttccg

SEQ ID NO: 18781 - DNA, 1040 bp, Homo sapiens
aggcagacattacctgaacacggaatcagtcggagaaaaagatgcttctgaggctagaggaccagtccaaacctgggcctgtctcctggatgcaccgcattcagtaagactctttaatttggcaaaggacacacacagcctcaggggtgacaggacctcagaacacactgcattcttcactgtgctttctcctctgaaacacatggtgcatggagaggttggcagttgcttttggttcattcaacagaaattctccactacggggctgggcactgtggctcacacctataatcctagcactttgggaggctgaagctggaggaccacttgagcccaggagtttgagacctgcctgggcaacatggtgaaacactgtctctacaaaaatttaaaaaatgtgtcaggcgtggtggcacgtgcctgtagtcccaacgactcaggaggctgagctgggaggattgcttgagccagggaggtcaaggctgcagtgagccgtgatcacaccagtgcgttccagcctgggtgacagagctagaccctgactcaaaaaaaacaaaaacaaaaaaattctttggtttacccagcccatttctggaggtgaccattgttaacttgctggttgtcttaccagacgcttcttctgccagtacaaacgcatactctttgttcacatatatgtgtgttaaaaaacaaacaaacagaaaaaccctgatccttgaaggtaaaaatttctgcacttgctcagggaggccaggaacctgaaggtattcagaacagctcaggtgtttgtctgtctgcagcccaggtgatctgacatgcttgtgggctttgcaggcagagctacctgcccccatggcccctgacccccaccttggcagaccctgagggcagctgcctggcctgacgggcgcagtgaggctgggaggggtgggggtccctgtggggggtgatttcccagtcggtttcctgagatctccctcggaccagagcaggagtgtggctgcgcctccctgccccacttccagctaccacaggtcatg

SEQ ID NO: 18782 - DNA, 1026 bp, Homo sapiens
tgcagccccagaaggtgcgcatggctgtgcctggctctccctgccctggtcacccagctcggagtcctcacccccgatgggtttcctaaccgcagtgtccttgcaactttgcctaagctaaatggaaattagtctccggccactctgttaacagggctccaagaagggtggaggcgagaggcagtgacacagaaagcgctgtgcagtacaatcctgggcacttgagtcttcttgggggctttctgcccctgcatgctgcctctgggggtggtgccctcagagctggaggggcttggagcggtcgtaggtggttgcaagagtgtcaggctgagcaggaaggagaaggtgctttcactggctctcctggagcagggcaagctggcagggtcaggacgggccatgtcagcggcccctcatggcgtgtcctgggttctgctgggcaccctaccatataggccagcaagccaggcctaggagtgtgacaggcctttgtccttccccggggccactgcaggtcgtggacgcggcgagaaagcacggggtgaaactgaccacagtgctcaccacccaccaccactggtaagtgccgcgtctcacctgggggtgtgggacctggctcacttctcgccccggtgggtttagggacatcaaggcctgtctccccccacggctctgtctgctttgtgaggacaagcccccagcagacttctgagaaagacccgggactcaccgtagcccccaaggggcaagtctggtgctcagtgactctgaggccccgagggtgaggggagaaggttacagccttaccctcaggccccaccccccggctctctcctgggccatgcgggtttgtgccctggcacgttggcctcaatgttggggaggaaatgagtctacaggtgagtggtttttaaaaaaaaaaaaaacaaaaaaacaaaaaaaaacaagcagccagccgggcacggtggctcatgcctataatcccagcactttgggaggctgaggtagttgggtcacttgaggtca

SEQ ID NO: 18783 - DNA, 2092 bp, Homo sapiens
tgacgccggtgcagcgggggggcccgggggccctggtggccctgggatggggaaccgcggtggcttccgcggaggtttcggcagtggcatccggggccggggtcgcggccgtggacggggccggggccgaggccgcggagctcgcggaggcaaggccgaggataaggaggtaggtatcagccacgctcggggtcgggcccctgggcggcgccggagagcggtcctggtcactggcgccttttctccctttagtggatgcccgtcaccaagttgggccgcttggtcaaggacatgaagatcaagtccctggaggagatctatctcttctccctgcctattaaggtacgcgtcggtcgttggggcgttgagcaagtgcgaccccggagtcatttgggctggggttggaggattagcatctgccattgactcgcattaaagggcccagcgtctcgcgtgagaggttgaggttgtgttgcgggctggctgaggagaggattccacttagaggttggatggatacctgagcgaagccagagccacaaaaggcatttcagcgcatcttcccacattcgcagcgaattcatttcgaaagaactgaaagagaagcagcgcttggttcatgccatccgagaggatgatgaagttcaggttgtgggaggacactgtaagggttagcaaactgtcatagtccgcgtgtacgggacagctgtcatctgcatccagcgggtgcagtggggaaaggctaatggcatatttgtcatgtgagcgttcgccctagcaaggtacggtggtcatggctaggccaaagctggacaaagcaaaaggaaatctgagtggaaagccacatctcaccaaacaagagaaaaagggcaaataggaagaaacgattgagatgcagaaatagggtaaccttacatacaagcttccaaaaacgaaacgaaggggacagatcggggggaagccaggtgagggggttcatgacttcttcggttttttttgggcggggtgggcggttacacagtttcgccctatcgcctaggctggcgtgatctcggctcactgcaacctccacctcccaggttcaagcgattctcctgcctcagcctcctgaatagctggggttacaggcgcactccaccatgcccggctaattttttgtgtctttaatagaggtggggtttcaccatgtggccaggctggtatcggactcctgaccttgtgatccgcccacctcagtctcccaaagtgctgggattacaggcttgagccaccgcccccggccgtgactttggttcttgaatatcataatggtattaagtttttttttaatgctctccctacaattttcttgtttgtttcaggaatcagagatcattgatttcttcctgggggcctctctcaaggatgaggttttgaagattatgccagtgcagaagcagacccgtgccggccagcgcaccaggttcaaggtacccggctgtcctggagggggctgcgctgggcttgccgggactctctcggctctgcatagttgcacttggcttcacccgtgtgactttcgtaacggggagagagagaaaagatctcctcaggacctcggatgggccttactgtggcctctctttccttgaggggtgcaacaggccctgggcggtgggcagtgattgggtgtagggccaccagctgcctcacacacatcttttcgcaggcatttgttgctatcggggactacaatggccacgtcggtctgggtgttaagtgctccaaggaggtggccaccgccatccgtggggccatcatcctggccaagctctccatcgtccccgtgcgcagaggctactgggggaacaagatcggcaagccccacactgtcccttgcaaggtaggctggtggcaggtgatgggcctgccgtggggcaggctccctcgggcccccgtctcctgactccttccctcaccaggtgacaggccgctgcggctctgtgctggtacgcctcatccctgcacccaggggcactggcatcgtctccgcacctgtgcctaagaagctgctcatgatggctggtatcgatgactgctacacctcagcccg

SEQ ID NO: 18784 - DNA, 1070 bp, Homo sapiens
gccaccaccaccaccacaaaagcgtaagtgtgggtgagctgcctggtgtccaccgggggtggaggaacggtaccctccccttgggccactgtgaaggctgaagcctccacctcctctttaccttctgacccccagacccaggctgctgcctgccccacgggcgtacctagtccccgagaacttccgggagaggaaccttcagctcatccagtccatcagggacttcctgcagagcgacgaggcccgcttcagcgagttcaagagccactcaggggagttcagacaggtcaggcgggcccggggagtccagatgggtcaggcgggcccggggcggggtgccagcccgtcttcatccagggcccgggccagaggggatgactgagtccggctctccggtggcagggcctgatctccgcagcccagtattacaagagttgccgggacctgctgggggagaatttccagaaggtctttaatgagctgctggtcctgctgcccgacacggccaagcagcaggagctcctgtctgcacacacggacttctgcaaccgcgagaagcctctgagcaccaagtccaagaagaacaagaagagcgcgtggcaggccaccacccagcaggcgggcctggactgccgtgtgtgccccacctgccagcaggtgctcgcgcatggcgatgccagcagccaccaggcgctgcatgctgcccgggacgacgacttcccctccctgcaagccatcgccaggatcatcacgtagctcccgccagcgtggccagagctgtcgcaccgtgagcgtccttcctccttcctctccgggctgccaggcagccaggtaaggcctggtgaggccacttggcctcttggttggccaggcccaccaggaagtcaccaggacagtccacccgccctgttggcacactcaagcgggagtccacccctgcctcagtggtgggccagtctcggtttgcattcttgtgcttttgggaggtgccaggggagggaagggctgggatgctgggacctgttgttgctggcaaagccagaggtcacagtggcctgatctgggccctc

SEQ ID NO: 18785 - DNA, 1070 bp, Homo sapiens
ctgccagcgactatgcctacctgcgtgagcacttccgggagaagcactttctgtgtgaggaaggccgctgcagcacggagcagttcacccacgccttccgcaccgagatcgacctcaaggcccacaggacggcctgccacagtcgcagccgcgccgaggcacgccagaaccgccacatcgacctgcagttcagctacgcgccacggcactcgcgccggaacgagggtgagcaggcacctggcctggatgcccccaggtggggccgcatgaccatgccctgctctggagcctgagatgagaccgagctgtgggtgcaggagctgacctcccaccctccggccaggctggagcgcccgagcaccccttgtgtgccaggagctcttgctccctcagggtctcgggtctgctgccctgggtgcccggggcccttccctggaccaggaggcttttactgagcatctgctgtatgcagatcccacctggggctcggggaccctcctcctctcccttcccactgctcctgtggcttggcacccaggtcgtagaggcccgtggctggcgtggaccctgcgaggctcctgtgccactcccgggctcatgtgcactgtgggtaggaaagcctctgccatccaggcctgagcattggccgggtgtggccttgacggcaggcctgttcctcctattgtcgtcccggggtcccgggaagtgacgggctgtctgctggccgcaggggtcgttggtggcgaagactacgaggaggtggacaggtacagccgccagggccgagtggcccgggctggcactcgcggagcccagcagagccgccgaggaagctggaggtacaaaaggtgggggaccttgcgtgccgctgacattctcctgtggtgaccgtggccagtggccaagctgggagtggggatggggtcagggattgtggccagagttcctggggtcctgagtggcagtagggtctgttgagggtccttggtgggcacaagtttctctctcttttctccagttctagccacagccacagatcccagggttggggtgggtgaaaggggcctgtg

SEQ ID NO: 18786 - DNA, 1009 bp, Homo sapiens
ccagccaccaagtcccaccccaggcatctcccccaggcccccaagtcccctacccatagccatcttcccctggcctccatgtcccctacgtcccctactcccagcctggctgtgctggaaccatcaggcgggggagggtcttgctgtttggctccttagtggaccgtgcctgactccaccctggccactgtgctgcggggcgcagccttgtccagccccctcctcaccctcagggagggcgatgctggccatgccaggctgcactgctgtcccactgcccgctcctgaggtctgggcagccagtcctggtctccctgcctgtctgaggatgggcagcctcaggcccccactatcaggtggtatttctcactccggccccaaacctgcacgccctcctgctccagtgattgtggccttgggcccaccttgctcacagccattgttctttcacaagcctcttcctgttcctgagcccacccagtgtctcctttcccctgtctcgttgctccgcttaggtgccctgcctaggtgacccctcccagctgttcaggagggacgaatactctgggtcttgctacccctggtgctcggagtacctgccttagctgctgtgcagatggatgcccatctagactccatatggggcatgtagccctcccgtgctggcccaccctgggtccttcatctgggtgctgtcagtgcacctgggatccgcccggcctggccctgcctctgcccagctccccgcagctcctccacccccagctgctccctggcctcagagaggctgccttgaccgagtccgccagccccaccagtgccgtcccacataggtttcttgggacttgcgatgtgctagcatcgcatggagcatgggtgcccccaggcggcaaggacagaggagtgtatgtgctcctcagcggggcctggccctgtgcccgcacacgggtggcactcgggggacgcaccagtggaggttggctgcgtgttaggggtgcctgggatgccc

SEQ ID NO: 18787 - DNA, 1359 bp, Homo sapiens
gctgacggcggggcgttggggcttggaggccggaggcggccgagcgggttgcaggagggggcaagccctgtggggacagcctggggacttcccccgtgtcccgggggttcctgccgggcctcaggaagggtcctgatcagatggagaactcggtgacctgctcgtcttcaggagtttattttccagggtcctccattcgaggaaacaaggcaagggggactctgcggaggccatccgtcctggaagcagggcgtcaaactctgggcattctcagcccagctgtgtttctgggcccccattggatgaccctgagcaaactccttccgagactgacgttttcctctgtggagtggaggtgacactagcctcggaaggagacctgcccgtcggaggggaaggccccctcgcgcttcttggcgggaagggagaaaagtgttaggaagttgtcctcctcctcgccgccgccccccgcctttggcgctcatctccgcagtgaatgggagacgtttttgactgtacagacttggaagccgtggaggggtcagagggtaccatgcagcgttcctccaccctcactgcactgccagctgctggctgtgggcacctggctggagcccgttggtttgctgagcttagagatttgtttgcttccagcattgtgaaattcccccggtttgttcatagaaggcttcggctggtgacatctgccaggaatctaactttcttctccccagaagtgatgcagagcagtattgaggtgtaggttctttctttttttccttttctttctttaagtagacgtttacatcaaaggagttgaagagatgctgcaattctctgagcaatttgtgggcttatagtctgtgccctttttggaaaaagacatttggagattctatcagtctgtcatgtgacaggaggaggccgacccagaccccggggagatctggggtgcaggaacagtcacagaggaccttggcccgtggcttcctcagggcgcttcctggctttgccagggcctgccttgccagccagtcctgcatagcatgacctcactctccaacagctaggtttcccagcacacctgtagcttccttccggaaagaagacgctaaggagttcttggcacgtgaggtcccgacccaggctgcaggtctgatgcaagacatgagtgaacatctgcgtatgcttactgtggcagcctctgcccgctctcattccttgtaggccccacgccctccaggagctctgtggctgggggctgcggacatgagctgtcagccggggtgtggtttggcactgggtgcccccagccggcttcctctagggcctaccccgccttactgggctgaaggaggg

SEQ ID NO: 18788 - DNA, 1034 bp, Homo sapiens
aagcagacagatttctcgtccgcaggctgcccagcagctacgcttcgtgcgccagtggtccgtctttggcaagacattatgccgagctctgccagagctcctgggggtcaccttgggcctggtggtgctcggggtagcctacgcccagctggccatcctggtaggtgactgcgcggccggggagggcgtcttagctcagctcagctcagctgtacgccctcactggtgtcgccttccccgcagctcgtgtcttcctgtgtggactccctctggagcgtggcccaggccctgttggtgctgtgccctgggactgggctctctaccctgtgtcctgccgagtcctggcacctgtcacccctgctgtgtgtggggctctgggcactgcggctgtggggcgccctacggctgggggctgttattctccgctggcgctaccacgccttgcgtggagagctgtaccggccggcctgggagccccaggactacgagatggtggagttgttcctgcgcaggctgcgcctctggatgggcctcagcaaggtcaaggaggtgggtacggcccagtgggggggagagggacacgccctgggctctgcccagggtgcagccggactgactgagcccctgtgccgcccccagttccgccacaaagtccgctttgaagggatggagccgctgccctctcgctcctccaggggctccaaggtatccccggatgtgcccccacccagcgctggctccgatgcctcgcacccctccacctcctccagccagctggatgggctgagcgtgagcctgggccggctggggacaaggtgtgagcctgagccctcccgcctccaagccgtgttcgaggccctgctcacccagtttgaccgactcaaccaggccacagaggacgtctaccagctggagcagcagctgcacagcctgcaaggccgcaggagcagccgggcgcccgccggatcttcccgtggcccatccccgggcctgcggccagcactgcccagccgccttgcccgggccagtcgggg

SEQ ID NO: 18789 - DNA, 1089 bp, Homo sapiens
cttcctgcagccacacctgccgcagccatggctccagccgttgccaaagccctgctgtcactgtgggctggggccaggctgaccacagggcccccccgtccaccagagcctcctggtgtacatgctttttctgctggtgaccctgctggccagctatggggatgcctcatgccatgggcacgcctaccgtctgcaaagcgccatcaagcaggagctgcacagccgggccttcctggccatcacgcggtacgggcatccggtgcactggtctgtcttctgggctttagttttgcctttagtccagccagaccctaggggacatgtggacatgtgtagatacctttgtggctgctagaactggaggtaggtgctgctggcatcagtaggcagaggggagggacacaggtccgtgtcttgcagtgcacaggacgggcccatgacagacaactgtctgccccagaacatccccaggataaggctgagaagcccaggtctagccgtggccagcagggcagtgggagccatgttccctgggtctctggtggccgctcactcgaggcgggcatggggcagtaggggctggagcgtgtgactgatgctgtggcaggtctgaggagctctggccatggatggcccacgtgctgctgccctacgtccacgggaaccagtccagcccagagctggggcccccacggctgcggcaggtgcggctgcaggaaggtgagctggcagggcgtgccccaagacttaaatcgttcctcttgttgagagagcagcctttagcggagctctggcatcagccctgctccctagctgtgtgacctttgccctcttaacaccgccgtttccttctctgtatatgagagatggtaacgttgtctaattgatggctgctgggagggttccctggggtggcgccgaaccagagctcaggcgagctggccagcaggaaacactcctgttgggttttgatgaggccctggccccggcctggggctctgtgtgtttcagcactctacccagaccctcccggccccagggtccacacgtgctcggccgcaggaggcttcagcaccagcgattacgacg

SEQ ID NO: 18790 - DNA, 1038 bp, Homo sapiens
gcttcaagtacgagatcctcgtcaagacaggctggggccggggctcaggtgaggggcgcagcggggtggcagggcctcccctgctctcactggctgtgctggttgcaccctctgggagtgagtctcgtcgcaggcgtcagaacaaggcagtttttgcagtgctgtgtgaagggctcgtgtgttcatcctgggaatgacctcgtgagcactcactgtccctgaggactaggacagctcctagctggaagtaggtgccagtcagtcagggtgggcagcccacgttctgcacagtagcgtggccccacaagtgacgtgagcatcgctaccactgtgggagactgtgcatccacccgcgatcctgactgcatagctcgtctctcagacggaggcgccagcaccctccccgtggctgtttcttcagtacctccattttcctttcattggaattgcccttctggcattccctttttgttttcgtttttctttttttagagacggagtctcactctgttgcccaggctggagtgcaatggcatgatcttggctcacagcaacttccagctcccgggtttaagccattccccttaagcgattctcctgagtagctgggagtacaggtgcacaccaccacacccagttaatttttcaccatgtcagccaggcgaactcctgacctcaggtgatccgcctgcctcggcctgccagagtgctgggatgacaggtgtgagccaccacacctggctgtgttcccattttttatctctgtgctgctttcctcttcattgcccagttctttcttttgattacctacttttaaaaactgtcggccgggcgcggtggctcacacctgtaatccgagcactttgggaggccaggcaggcaaatcacggggtcaggagatcgagaccatcctggctaacggtgaaaccctgtctctaataaaaagtacaaaaaaattagcccggcgtagtggcaggcgcctgtagtcccagctccttgggagactgaggcaggagaatggcgtgaacccgggaggcg

SEQ ID NO: 18791 - DNA, 1099 bp, Homo sapiens
gtcaccgcgtccaacaacatctctgctgccaatgactcagccctggtggaggtgcaggagcccgtgctggtcaccagcatcaaggtcaatggctcccttgggctggagctgcagcagccgtacctgttctctgctgtgggccgtgggcgccccgccagctacctgtgggatctgggggacggtgggtggctcgagggtccggaggtcacccacgcttacaacagcacaggtgacttcaccgttagggtggccggctggaatgaggtgagccgcagcgaggcctggctcaatgtgacggtgaagcggcgcgtgcgggggctcgtcgtcaatgcaagccgcacggtggtgcccctgaatgggagcgtgagcttcagcacgtcgctggaggccggcagtgatgtgcgctattcctgggtgctctgtgaccgctgcacgcccatccctgggggtcctaccatctcttacaccttccgctccgtgggcaccttcaatatcatcgtcacggctgagaacgaggtgggctccgcccaggacagcatcttcgtctatgtcctgcagctcatagaggggctgcaggtggtgggcggtggccgctacttccccaccaaccacacggtacagctgcaggccgtggttagggatggcaccaacgtctcctacagctggactgcctggagggacaggggcccggccctggccggcagcggcaaaggcttctcgctcaccgtgctcgaggccggcacctaccatgtgcagctgcgggccaccaacatgctgggcagcgcctgggccgactgcaccatggacttcgtggagcctgtggggtggctgatggtggccgcctccccgaacccagctgccgtcaacacaagcgtcaccctcagtgccgagctggctggtggcagtggtgtcgtatacacttggtccttggaggaggggctgagctgggagacctccgagccatttaccacccatagcttccccacacccggcctgcacttggtcaccatgacggcagggaacccgctgggctcagccaacgccaccgtggaagtggatgtgcaggtgcctgtgagtggcctcagcatcagggccagcg

SEQ ID NO: 18792 - DNA, 1042 bp, Homo sapiens
ttcagaacgtgcctgcgtgagaaacggtagtttctttattagacgcggatgcaaactcgccaaacttgtggacaaaaatgtggacaagaagtcacacgctcactcctgtacgcgattgccggcaggggtgggggaagggatggggaggctttggttgtgtctgcagcagttgggaatgtggggcacccgagctcccactgcagaggcgactgtggagacagagagcacctgcaggtcatccatgcagtatcggcttgcatccagatcatacagggaacactatgattcaacaacagacagggaccccgtttaaacatggacaaggggtcactcacgcctggaatcccagcagtttgggaggccagggtgggtggatcgcttgagcccaggagtttgacaccagcctgggcaacagggtgagaccccggtctctaaaaaataaaagaacattggccgggcgtggtggtatgcatctgtggtcccagctattcaggagactgaggtgggacatcacttgagccgaggaggtcaaggctgcagtgagctgtgatcacaccactgcactccaggctgggtcacagagcaagaccctgtctcaaaaaaaaaaaaaaaaaaaaaaaaaaatcacaggatctgaacagagatttctccaaagaagacgcacagatggccaacagcgtgtgagaagatggtcggcctcattagtcatgagggaaacgtaaatcaaaaccactgtccagccgggcgcggtgcctcacgcctgtaatcccagcactttaggagagcagatggcttgaggccaggagtttgaggccagcctgggcaacatagcgagaccaataaatagatattagtggtggcgcctgtagtcccagctagttgggaggctgaggggggaggattccctgagtctatgaggttgagactgcagttagctgtgatggtgccactgcactccagcctgggcgactaggaaacggtctttaaaaaaaaaaaaaaaaaacagggtgggcgcggtggttcacgcctgtaatctcagcac

SEQ ID NO: 18793 - DNA, 1083 bp, Homo sapiens
gaagtctgattggctttgttcatccgtcactcaccgttaggcttcacggactctgcataagggaggagcttcgggtctgggtctgagagaccgtctccaaaagaaatgccacggtacgattggtggaaacaacgcggcagggagcggagcgtaccagcggcgggggaaggcgggcacttccgccaggatagcccaatgacagaggtgggacagtttctataaaagcttgagcctcgcccgcccctgtcttttcggggtcgagtccgagggggaagaggtttgttaatacgttcgccatgtgctacgatcttgggacgaactgagccacgagcgtggctttgagggccgtccgaacgctgcaggccggccaggtccctgggcgtccaggcctggcctacgcaccactttgtcccttagcgtttaaaggtttcttcccgaatctcaggccctcagctacctgcaggtaagactgggccgggcttgggttcccttattctcccagtctgtgatgaattgctttgacttctgacacctcgtatgaaaactgcacgtgcagtctgattatttagcaagactgaggcttgagggtgcgcactcctgacggggagctgagagtggaaacaggtgttgcccgaaacgaaggagtggggacttaatgtctgtattttggcgctgactttcaggtttcgtcgcgagccggctgcaagttttgaacctaagtaaacctcaatccggagggcctagcggtaaggtgggcgctgtgtctattgaagtgcttagcaataaagaaaggtagtgagttgattcggttttctctcaagtgtctttattttcctattctggcaccccagaggtctggctgatccacaggcaatcttggaaaagggtacagacatgaaaacggaagctcgttaccagtgacttttcatctcttgggattgccttctccatttctgcccgtgattttttttttttttttttgagacggagttttgctcgtttcccaggcgggagtgcgatggcacaacctccacctcaagcgattttcctgcctgagcctcccaaatggctggaattacaggc

SEQ ID NO: 18794 - DNA, 1097 bp, Homo sapiens
ggcatggccggtggggtgccatttactgatgggagagcagaggcccaaggtcgcccagcccagggcaggctggactccaggcagggccggcctgggcgcaagggcttggggccctgctcaggcaggctccagcagagccgggtctccagcttccctgctgggaaaggaggccatgagggagtgggggaccaccactggccatccccagcttgccctatggccggccccaggaaagggctgggagcttggagccctggtcccagcactcatcctggctcagcgcgtagcctccctgggggccgccggagatggatggatgggcgtgtggaccagccgcgtgtgcggctgcgcacgtatagccgtgtcagtgtgtcagggcacctgtgcgggcacggacagggctctgcaggtcggcacgtggggtctgggcgtcctccctcctccctccacccccacagactgtaagccagagagtccccctccccttcctccagggggatgccgagaactgggactggcttctgggagattgttgggggcacctaggagtcccaggaggaccccctcccccgtacttcaccagcagcccatgactggctagctcctgtccactctgtgcagtaagagagagggggcaccggtgccttgcaggctggccccgagctgatttcaggtccgggggctcagaaagggagagcttgtgggcagaggcagcctcagctgagcctggagagcaggtgtagggattgagggaaggcaaggtaaaggtttccacctagtggccgcatgaccttggacacagacaactccagctcagtggacctcagtctcctcgtctgtaggatgggatgtcagcctcacggtggggtcctaagaccagtgagcctgggcacttgcagcccaggcattcagtaagtgctcagtaaatgccagcaatgaccgcagtcttggacggcccagggccaggggctggggaagtgggggcttcagctctggggaggttcctcctcccttctattgtggccattctggggaggtgtgggggcttccactctcacctgggtctctgcctgtcttgcctggcctctgggacagga

SEQ ID NO: 18795 - DNA, 1404 bp, Homo sapiens
gacacgctgctgttcgactgcgacggcgtgctgtggcgcggggagaccgccgtgcctggcgcgcccgaggccctgcgggcgctgcgagcccgcggcaagcgcctgggcttcatcaccaacaacagcagcaagacccgcgctgcctacgccgagaagctgcggcgcctgggcttcggcggccccgcggggcccggcgccagcctggaggtcttcggcacggcctactgcaccgcgctctacctgcgccagcgcctggccggcgcccccgcgcccaaggcctacgtgctgggcagcccagccctggccgcggagctggaggccgtgggcgtcgccagcgtgggcgtggggcccgagccactgcagggcgagggtcccggcgactggctgcacgcgccgctggagcccgacgtgcgcgcggtggtggtgggctttgacccgcacttcagctacatgaagctcaccaaggccctgcgctacctgcagcagcccggctgcctgctcgtgggcaccaacatggacaaccggcttccgcttgagaacggccgcttcatcgcgggtccgtgcgccctggggcgggaggctggggggcgggcggcgggccccctccctgccctttgacccggtcccctgtgccccgcaggtaccgggtgtctggtccgagccgtggagatggccgcccagcgccaggccgacatcatcgggaagcccagccgcttcattttcgactgcgtgtcccaggaatacggcatcaaccccgagcgcaccgtcatggtgggagaccgcctggacacagacatcctcctaggcgccacctgtggcctgaagaccatcctgaccctcaccggagtctccactctaggggatgtgaagaataatcaggaaagtgactgcgtgtctaagaagaaaatggtccctgacttctatgttgacagcatagccgaccttttgcctgcccttcaaggttaaagattgagtgtctttaatctgcagaataaaaaaaaagaaattgaaaaccagttacccaaattaataggtggggcttaagcatctgctcggctaagtggcttcaaagagtgtaattggagttaagcaaaggcattcattgttaaccttgtaagtacacgtttgggggacgattttgtttacagatgcttgtaatcgaagatgcacttttaggcttggaaggcgttgtgggctgggttctgggccttgggtggggttggcaggggcaggctctgcacctgtccgggattcaggtaaccagggcctgccgatgggactgaggcgggtctaggggtgtgtgtcctgtattttattgaaaaactcattcagggatccagcccctcagggggcagagggactgattattctgactgttgggagaggcttgcatggaccagagcc

SEQ ID NO: 18796 - DNA, 1077 bp, Homo sapiens
tactaaaaatacaaaaattagccgggcatggtaatgctcctgtaatcccagctactcaggaggctgaggcaggagaagtgcttgaacttgggaggcggaggttgcagtgagccaaggtcacgccactgtagtccagcctgggtggcagagacagactccatctcaaaaataaataaataaataatacaaaattagccaggatgtgtgtgcacgcctgtagtcccagctactcaggaggctgaggtgagaggatcacctgagcccagggattcaaggctgcagtgagtcgtgatcactagtgcactccagtatgggcgacagagaatatcctgtctctttaaaaacaaaacaaaacaaaaaaaaattagggccgggcgtgctggctcatgcctggaatcccagcacttggggaggccgagatgggtggatcacctgaggtcaggagttcgggaccagcctggccaacatgaggaaatcccatctctactaaaaatacaaaattagccgggtgtggtggcacacggttgtaatcccagctactcaagaggctgaggcaggagaatcacttgaactcgggaggcggaggttgcagtgagccaagatcccaccattgcactccagcctgggcgacagagcaagactccgtctcaaaaaataaaaataaaaaataagttgggaatcaccccactgcccctgaaagtgggatttcagtggcacgtcccattctctttagaccatgctcgacagctgaccaaggccatgatgcgaaaggccacggccagccgcctggtcacgcagcgcgatgcggacgtgcagaacttcgtcagcttcatctccaaagactccatccagaagtccctgcagatgtacttagagaggctcaaagaagaaaaaggctaacgattgggctgccacaggcttacggccacacgtgcccctgtgggtcccagggaggtcttaaacaaggtatttttcaacttaaaagtactgccagcgtttcattttgctgatgttacgtagaagttcctgttcctcatagcccagtggcccaaggcccagccacacacaaacacacat

SEQ ID NO: 18797 - DNA, 1054 bp, Homo sapiens
cttcattattatagagtcagtgctgtgaaatccctaatttgggctaacttaggctgagtttactgaagttaaacctcttaagtatgttctgaatacatagccacatgccggagttagtccccatgtgccttaaaggtagttgagaaaacaaaagagccctttaccccttagggcacagaaggggctgcgcttgggctcccagtatccccagctaccagacaattcttgaggtcggggtgcatgctcccctggggttcctgggtttgcacctctatttcctttcctctctccctggagcccacatcccacactgcctctcctcgcttcatgcacatggcgtgtgtttcagtgccatctacatgcagagccacctctctgagactgcttgtttccaaacacaaagtctttggcatctcctaaaatttccttcatgcagcttcccaccgcagccccacctctccgtcagtggaagttcacacctcaccacccccatcccatccatcaccaagctctggcaattttacttcccagctgtcccctgaatccttccgtttccctgccaaatcatttgatgttgattcaggcccctctcagtgctgcagagccctcctaagagaacttctcccacttctcttagccccagacccagcttcccttggttggaggagaaggaagcgcaaacgcggatactgcctgcatggtcctgcgaggaagccccaccctggccctggggccttctgtttgcctgtcactcgctctcgatgctaccttctctcaccagtgctttgggtccttcccagcacagggcccagcatagcccttctcttccacctagcagattccagcacattctttacttttcttttttttttcttgagacggagtctcagttgttgcccaggctagagtgccgtggcatgatgtcagctcactgcaacctcctcctcctgggttcaagagattgttttgcctcagcctcccgagtagctgcgattacaggcacacgccaccacgcccggctaatttttgtatttttagtagagatggggtttca

SEQ ID NO: 18798 - DNA, 1050 bp, Homo sapiens
acaattgtttatggatgacaaaaaggttttagggcagccatagttaaagacacaattgacgaaatttgttagctctgtggcacacaataatttaacataacaattataattattactgatcatgtacactaggatatattgcaattgtaggagttttacgtgattttgggacacatatcaataacatttatacaaatacagcccaaacaaagccaaacccaattttatatttggtagtgcttcctgtataatttttggtaccaaataagccaaatttcacttttacatcagtgtgctgttaatgttaaaacccaatcctttttttttttttttttgagacttttttctgctcttgttgcccaggctggagtacaatggtgcaatcttggctcactgcaacctccgcctcctgggttcaagcagttctcctgccttagcctcccgagtagctgggattacaggcaacctccactatatccagctaatttttgtatttttagtagagacatggtttcaccatgttggccaggttggtcttgaactccagacctcaggtgatccacccgccttggcctcccaaagcagctgggattacaggtgtgagccactgcgcccggcctaaacgtaattttaatgcttaatttacagaaaaactagatgatacccctttaactttagccagcatgtttacatacagaattttctttacaatcaacctcccacacctttttttgagacagagtcttgctctgtcgcccacgctggtgtgcagtggcatgattttggctcactgcaacttccacctcctgggttcaagcaattcttctgcttcagcctccccaagtagctgggattacaggctcccgccaccacacctggctaatttttgtgtttttagtagagatggggtttcaccatgttggccaggcctgtctcaaactgctgacttcaggtgatcctctcgcctcaacctcccaaagtgctgggattacaggcgtgagccaacgcgcccggcatggattccagttcttagtgggtgtgtgattaccg

SEQ ID NO: 18799 - DNA, 1041 bp, Homo sapiens
acctgcctcagtgtctgggcatctgtaacaaggaaccacagaccagcgcttagcacgaggagtgaatcccccatggctcaggggaggacccttcctgcttctcccatctcctggaggctccaggcatcctgagctcctggctgcacctactccccaccaccgcctccatcctcgcatggcagctcctgtctcctgtctcaaatctccttctgcatttctcttataaggacacttgctgttgggtttaaggcccacactaatccagtgtctcaccttaagatccttactaatcacatattcaaagaccctgtttctaagcaagatcacaaccccaggtccagggggacagaacttggacctgtcctgtggggcctcctcagcctcccacacacccctcggtgcttgtaacggtctctgtcctggtcaggaggcagcccaggattcacgcagagcctgtgcctctcaggcgggctgttgctgccctgggtctgccatgtcgctcatgggactgcattggattgttacgtgcctggcccctctctgagctgtggtgcctcgagaggcagctgtgacctactggccttcacatctccccatggaggggacattgttacaggcgccttgagcagcctggggaggggagtgggggccgggaacctggaaggggaggagggtgccccaggcctcggggcacagtgactccctcgccccacagacatccagtaccaggagaacttctatgcctggagcgccccgggggtcggccggtttgtggcctccatggccgcctcagggtgcgcctacctcatcctgctcttcctcatcgagaccaacctgcttcagagactcaggggcatcctctgcgccctccggaggaggcggacactggtgagtggctccgggagcccaggacactggcgagatgctccccacgtctctgcttgggcccagcacaacctggggcagctccacctccttctccaccaggcagctcctgcaccagatggtctcccactgtacggcctcagcaccagccggcac

SEQ ID NO: 18800 - DNA, 1935 bp, Homo sapiens
acaggcacacgtcaccacacctggctaatttttgtgtttttagtagagacagggttttgccatgttggctgggttggtcttaaactcctgacctcaggtgatccgcccagctcagtcttccaaagtgctggaattgttcaggcatgagccaccgtgcccggccaggtgtttattttctaaatccaaaattttttatcagatctgctcagttttaagtaacatcctcaaaatctattttgctcttctgttttctaacttggtaagaggtgttttataattattttccaaattacactcaaacaccttccatctgtccaaaggtgctggagagtcatgcctgtgagccctgggcacctcctgatgtcctgcgaggtcacggtgttcccaaacctcagggttgccctgccccactccagaggctctcaggccccaccccggagccctctgtgcggagccgcctcctcctggccagttccccagtagtcctgaagggagacctgctgtgtggagcctcttctgggacccaggtgagttccctggtactgccctgcagcctgtgtgggaaggggggtggtctatctttctgaccttctctcccagccctgggactggagaggacaagattaagcatggggatctttcctttcttggccagacttccagtaagggaggttgtctgttcctctaaccagaagacttctttgaactgtgacggttttatattcctcacttggtagaggcagaacgttcatctcagccaaccccacgcccatctggagtgtacttccccgggatgatggccccaaatggaggcaccggcctcttctttttgcctaaaccacttctagaaaccttttataaaccacaggccttaatgtgtatctttaagtcactgctgttttattcatcatcagcaactgactttgagacaggtcttctaccttattaattttaaaagaattgggataatttattaagttgccccttaatagcacttcatactattttagctttaatttcttcactttttaacaatatgattcattaaaagtcatattttaaattaatttttaactgtttgcagttgtatttcatgtaaatatttattgactaccctttaaagcataaattttgaatattattagatatcaacagccacatcttaaaaaaaaaaaaaagcaagagttttaatttaaaaagagccttgatataaatgattttcaatggactgaaaccaaaccaaaagtaaaatgggtcatttaaaaaaaaaaaaaaacccttccccgtgcgctggagtctcccgggtcattgtcggggagcgctagctcatggtgatctaggaatgactcgctaattgtttgcctttctatcccgtgcatcttaacctggctgatggatgatgttgggtttggatcagccatgagtgtggagctgagcaactgaacctgaaactcttccactgtgagtcaaggaggcttttccgcacatgaaggacgctgagcgggaaggactcctctctgcctgcagttgtagcgagtggaccagcaccaggggctctctagactgcccctcctccatcgccttccctgcctctccaggacagagcagccacgtctgcacacctcgccctctttacactcagttttcagagcacgtttctcctatttcctgcgggttgcagcgcctacttgaacttactcagaccacctacttctctagcaggttagcagctcatgaactcttgaagttcatgagatgaacttaactctgggttcagtgtctgtgttcctttttcttactttatttgtatagagatagggtcttgctatgttgcccaggctggtctcgaactcctgggcttaagggatcctcctgcctcggcctcccaaagtgctgggtttacaagcatgagccaccacacccagcctctgtttc

SEQ ID NO: 18801 - DNA, 1031 bp, Homo sapiens
acagattttatctcatcaaacagaaaaattcttaacagaaaaaggaatcccaaaaatgactggtaatataattctggctgcctttatggtagtcagtgcagcggtaagtataccaccggtcggggcaactcaaaattatacttattgggcatatgttccttttccccttctaattcggtctgtctcctggagggactctccagtagaagtttacactaataatagtgcattcatgccgatccctaatgatgatcggtttccagctcaaccggaagaagaaggtatgcactttaatctgtcaattggctataaatatccaccattatgtattgggaagtcgcctggttgtttagcttattcttaacagaattggatgtggactgtaccgtcctttacaaatgattcttatcaagtatataatgtgttcagtactaactcttttcaacttctcactgtcaaacgtaccccacatgaggcatggagagttcctctcactaccaaaactaataaaacaaaaggactgccggactgtccaaagaaacctacaaatgggccttttatagtgacttcaattttatgggataattgtaatgctcccaaggctgttgtactccaaactctagccatgggtattgttattgattgggctccaaaaggacattattggcaagattgctccagcaaaaataccttatgctcggagtttatttattccttagattatatagagcatgggtggcagtcttacacgatgagacaacgggtgtctccttacccatttaaatggatggacacaggtattgctcctcctagaccaaaaattattcatcccttttttaccccagaacatcctgaactatggaaattagctgcagctttgtcgggaataaagatatggaacactacctatcagctccttcgtactaaaaccaaaacacccacattcaacatcacccttatttctgaatgggtgatacccattaggagctgtgtcaaacccccttacatgctgttggttggaaatataatta

SEQ ID NO: 18802 - DNA, 1033 bp, Homo sapiens
aagtacttctttaaaaaaaaacacataaggccgggcgcggtggctcacgcctgtaatcccagcactttgggaggccgaggcgggcggatcacgaggtcaggagatcgagaccatcccggctaaaacggtgaaaccccgtctctactaaaaatacaaaaaattagccgggcgtagtggcgggcgcctgtagtcccagctacttgggaggctgaggcaggagaatggcgtgaacctgggaggcggagcttgcagtgagccgagatcccgccactgcactccatcctgggcgacagagcgagactccgtctcaaaaaaaaaaaaaaaaaaaaaaaaaaaaaaaaaaaaacacataaaagatgcatcagacaaacacatcacttaataattataaagtaatgaatatataaagacacacttcctcaagtgcctgacgtctcagcccactctgcagagcgcccggagccgtaacaggagcccctccagtgcagcctctgcagagtgtccctgcaggactggagccactcagagacgtccgtgttcaggcactattggcacaacttcatcagattttaaaaatgcaggctgggcacggtggctcacgcctgtaatcccagtactttgggaggccaaggcgggcggatcacctacggttgggggttcgataccagcctgaccaacatggagaaaccccatctctactaaaaatacaaaattagcttggcatggtggcgcatgcctataatcccagctactcaggaggctgaggcaggagaatcgcttgaacccgggaggttgcagtgagtcgaaatcatgccattacactccagtctgggcaacaagagcaaaactccgtcttaaaaaaaaaaaaaaatgcagcctggccaacatggcaaaaccctgtctctgctaaaaatacaaaagttactcgagcatggtggtatgcacctgtagtcccagctactcgggaggctgaggcaggaggatcacctgcgccttggggggttgaggctacagtgagccgtgatcgtgctgc

SEQ ID NO: 18803 - DNA, 1041 bp, Homo sapiens
tctccccagggagcctctgcgcaagcagtttctgtctgaggagaacatggccacccacttctctcaactcagcctgcacaatgaccacccctactgcagcccccccatgaccttctccccagccctgcccccactcaggtaggttcctccactggccaggccttctgcagaatcacaggcggtcctcacagctgacctcaggccctgcctcatcgtgccatttttagctctagctgacctctgggttgtttcccatcttggctctttggaaagtgctgggaacccaggagcccctggggacctggacctggtgggaggtgctcagctaggccagcctcagctccatgccctgacagtcatttcctcttctaggagcccttgctctgagctgcttctctggcgctatcctggcagcctcatccctgaggccctccgtctgctgaggctgggggacacccccagtcccccctaccctgcaaccccagctggggacataatggagctctgagtgctggtggacagtgcccctcccaccttccttcttccccacaacagaagagaccagcgactcccgcaaagggacaaggttcctccctctcctgcagagtaggcatctgggcaccaagaccttccctcaacagaggacactgagcccaacggagttctgggatgggaggggtgggagcatgggaagggaggcatcccacccccaagaagaactgaataaagattgctgagcaaaggaaggcttcagtctggaacctggggcttttggggatggtggagagggcagaggcgcgggatgctggggtttctcctcaagatcttccctggaaaactgttagggccagccaggtccttgccggctgagttccaggcattgagaatgtgtgagtcagagcctcacccccgcccccgcggctggctgactcactccctccctccagctcaggggagtcagtcggggatcactgcctctccaaaccatttaaagttaaagattcttttattaataaattctccctcccctccaaactctcc

SEQ ID NO: 18804 - DNA, 1044 bp, Homo sapiens
gattacagacgttagccagagcgcccagtctaagccctttatagcttaattctatatattaaattttcccagttcaaattactgtgtgcttcccttctcctgattggaccttgcttgatacaaaattagtacaaggagtggtctcaagagatagatgcacaaagaagggatatggggacggatttgggtatttgggcttgagtgcagactgagctccttgacaatgagaaataggatatgtattagggttctccagaaacagaataacagaatctatatatacatgtgtatgtgtgtgtatatatatatatatagagagagagagagagagcttttatgtgtgtgtatatgtatatatataaacacacacacactaaggtattgcctcacatgattatggcagtcgagaagccccacaatctgctatctgcaagctggagacccaaggtcagtggtgcagcatttttttttcagatggggtctccctctgttgcccaggctggactgcagtggcacaatcacagctcactgcagccttgacttccccagctcaagcaagcttcccatctcagcctcctgaacagctgggactacaggtggacaccaccatacccagctaatttgttctatatatatatttttatatagagatggcctctccctgtatgtcctaggctgatctcgaactcccctgggctcaagctatccgcctgcctccgcctcctaacagttttgtaattttaaggcctgagagccaaaggccaatggtgtagattccaattcaagactcaaggcctgagaatcaggagcacaagaccaggagatcaatgtcccagtacccaggtctcaagtactcaggcacagagagaattcagccttcctctgccttgctgttctgtttaattccatacggatggatgatgcccacccgtggtgagggccgtctgctttactcactcagccaattcaaacgttaatctcttcttgagaagccctcacagacacacccagaaagaatgtttaagcagctgtctgggcatgcct

SEQ ID NO: 18805 - DNA, 1035 bp, Homo sapiens
agtaaaaaggagggaaacttggaaacacgaaagagcccttcccctttcaattcaaggtggagactggacctcagaagagggagtgggtgccccgagaactcacagctagcggacagtggaaagggcaggagccggaccaaggtgaggacagtggaactgaaggccgctggttacctctcctgccctccgctggccacagtggagaagacagcccctccctcctgctctgacctgacagtgttcatccatcgccctgtattagcgaagaacaacatcaagctggctagcaaggaactgtatacagggtccagctgggtatcacactggatctcacccaaagcttagatgtgatccagctcagtatcacaaagcagaacgaaaaggatgtgtttgggctgagaggccatacattggtaagtggcacatgaactgtattttctattgagcattgctggtatatggcaaatttgcataaaattatattgaaattgactaccggattgcactttcttgttccttctgataatttttcacgtgttctttttctttcttactttagatggagtcttgctctgtcgcccaggctggagtccagtggcgcgatctcggttcactgcaagctctgcctcccgagttcatgccattctcctgcctcagcctcctgagtagctgggactacaggcacctgccaccacggctggctaatttttttttttttttttttgaaatggagtcttgctctgttgcccaggctggagtgcagtggcgcgatctcagctcactgcaaactccgcctcccgagttcatgccattctcttgcctcagcctcccgagtagctgggactacaggagcccaccaccatgcccggctaattttttgtatttttagtagagacggggtttcaccatgttagccagcatggtctctatctcctgacctcgtgatccacctgcctcggcctcttttttatatttttagtagagatttcactgtgttaaccaggatggcctcgctctcctgacctcatgatctgc

SEQ ID NO: 18806 - DNA, 1064 bp, Homo sapiens
ggaggggactccctctggctgttgggttgaaagtagaccgtagaaggtccagagtggaagcaagaagaccagataggctatggcagtgatccaggcatgaggtgatggtggctcagtgtggagaagagggggtgacaagaagaggctggtgcgcttcagagcatcatgaccagatgttggaatgcacttgctgggacagctctagtcaaatcggtcctcatgaactggcccagatgggcagcaggtgtgtgtggtgagggttatttagtagccagccatcctgaactgctcttctcagatgtttactacttattcttaccttggtgtgttaactgctgtcatttagtttcctgtatctacaaggatgacaggagatataaacagatagagatgggctggctgaggaggtattcctgtatcagggagggaacaggcagatatatcgttacaaccagctcctctgtcccctgaatctttgctttccttgagtatcacctgttcactgtgtcctcttatgtggccaccctcaggaagtcccacaactgtcaaggcaggcaagccactacccttattgccagccacctctccaggaggaatgagtaggattgaggataattaacgagaaattaaataggcagctttagtaaataaccctataagtcattatcagtggagggaatgtcttttgtattatactaaaagttttcatgttttagacaaaaagccacagtgagatttcttcctagaaataacaatagccagttgtggcacggtttgagaaaccaggatgtaactttttttttttttttttttatactttaagctttaaggtacatgtgcacaaagtgcaggttagttacatatgtatacatgtgccatgttggtgtgctgcacccatgaactcgtcatttaacattaggtatatctccaaatgctatccctcccctctctccccaccccacaacaggcctccgtgtgtgatgttcccctacctgtgtccatgtgttctcactgttcagttacaacctatgagtgacaacatgtggtatttggttttttgtcct

SEQ ID NO: 18807 - DNA, 1021 bp, Homo sapiens
cttgctcttttgtccagactggtcttgaactcctggcttcaggcaatcctccggcgtagccaggaccacaggtgcatgctaccatgctcagtttttttttttttttttttttttttttttttttttgaggcggaatcttgctctgctgcccagcctggagtgcagtaatactatctcggctcactgcaacctctgcttcctgggttcaagcaattcttctgcctcagcctcccgagtagctgggattacaggcacgcaccaccacacccggctaatttttgtatttttagtagagacagggtttcaccatgttggtcacactggtctcaaactcgtgaccttgtgatccgcctgcctcggcctcccaaagtgctgggattacaggcgtgagccatcgcacccagcctattttttaagtttctcacagacacaaggtctccaagtcctgagcccaagcaatcttcccgcaaatgctgggattacaagtgtgagccaccgcaccccgccactcatttcttggaatctttgactttccattcgtattcatttcctgagactggtgaaactaccacaagtttggttgcttaaaataacagaaatggatcctctcaaaattccggagactggacgtctgaagtcagggagtcagtaggaccttgcgcctcctggaggctccgggcggttgggggatgctccttgccctccagtttctgcaggctgccagcaatccttggctttccttagttgtggctgcatcaccccagtctctgcctcttcttcttaagatctgtgcacctgcatttggggtcctcccagagagcagggaggatgtccttatctcaacagcctttactcacatctgcaagtccttttttgctacaaaaatcaacattcagaggttccagggctagggcacagctatcttttgagccacccctgggtcttgcccacttggaaggggctgtgctggccctccaaggacagccctgcacgtagcatctgtggtccccctgggggagga

SEQ ID NO: 18808 - DNA, 1064 bp, Homo sapiens
aggtgggaggattgcttgggtccaggaggttaaagctgcaataagccgtgattgcagcctccagcctgagtgacagagtgagactctcaaagaaatcctgaaaggaaagtcagcaccttcagtcactttgtgaccggcccagaggaactgcctttgactaaagcagaaactctttatgctttgagaattgactattctcctctaccttttaacagttattggaagtgcagctgaccagatagatcctgcaggatgagtgtccttcattgtctgtgcctcccatttctattcctgtaggtgtttatacgggagctgatctccaatgccagcgatgccttggaaaaactgcgtcacaaactggtgtctgacggccaagcactgccagaaatggagattcacttgcagaccaatgccgagaaaggcaccatcaccatccaggtacctccctcagtgtccaggcgtgtggcaggcccggccatgcagcaaggacaggatccgccttctagtgatgtctcgggtcccagggacgtactggccgtccgtaccaccaggataactctggctataatttagtgttacagtagcactcattcattatagaaaattttggaaaagcaggtaagcagaaaagaagaaaatttgaaatcaccccatcatccagcaataactactggtaacatcttagcatatggccacacagggttttggtatatgcaggtattaacatatctaaacatatcttatttttaatgtactcttttcatatttttaactgcgttttcccctcaaaatgccgacgaagcagtgctgtggctgctgctgtagccttgtggaaattttaaggctgaaaagttaggccaaagaggatcaggtaggggccctgagagacattgcatccaaagacagctgcctcaggacctgtcatcccagggtcacggcgtcattgcgggggtgtctgtctctgtggagaggtggacagactggcctcggtgggatctgagtattcccttttagggtgctggcttgctctgaaggtcatgccacataaatgaatgcaggcacgc

SEQ ID NO: 18809 - DNA, 1063 bp, Homo sapiens
actccagtattcctggtatccgtataagaagagggaaatctggacacagccaggactcacatagagaagagcttgccatgtgacaagagacagagcctggagggtctgcaaagcatgaaacaccaaggatgccggctactgccagaagctggggagaggtgcgggatggactctccctcggcacctccagtgggaagcaccgctgcccagaacctgggacctttttttttttttttttgagacagagtctcgctgtctcacccagcctgaagtgcagaagtgcggtagtgtgatcttggctcactacagcctcaacatcctgggctcaagtgatcttcccacctcagcctcacaagtagctgggactacaggtgcacaccactacacctggctagtttttgtgttttttgcagagatggagtctcactttcttgcccaggctggtcttaaacccctgggctcaagcgattctcctgccttggcctcccaaagtgctgggattacaggtgtgaggttgtgtgcctggctcagaactgtggacctttttgaaactgcctagtttgtggtgctgtgtttcagtagtcctaggaaacaaaatacacagtcacatcagtttctggtttatcctttttgtgtttcttttacacaaatggtgagaaacactgatatgctctgtgggcaggtgttggcacttggacacttccctcctgtgcccccagggctggctgtgctttggaaggaggcacagagacttcagcaccctggtttgatgtagactgttcgcgaactcctctaatgccaaataccatttaattccagaagaaatgtcccgggattttttttttttttttaactgtacgaataaagtgaacaatgcaattacatgggcccaaataactggatgtttacatggtttggaatttgaatactttctgaattgtggtagatgtttttaaggtatctgcatagagataaagacaggctagggttggccgggcatggtggctcacgcctgtaatcccagcactttgggaggcctaggtgggtggatcacctgaggtca

SEQ ID NO: 18810 - DNA, 1023 bp, Homo sapiens
gcttcttccagcagtgtaggcacttacgctctaccattttctttgttcaaatgcagaaaaaacctaacttgtaagacaaacaaaccaaagtgactgaaattctacattttcaatttatttcccttgtcatcctaattctctttagtctagttgtgtgattaataattggattgttgcctgagcaacatagtgagaccccatctctacaaaaaattaaaaaaacttaacagggcgtggtggtttgtacctgtagtcccagctactcagaaccggggtgagtttgagttcagccttggcaacataatgagaccctcatctccacaaaaaatcaaaaaattagccagtcctggtggtgcatgcctatagtcccagctacccaggaggatcacttgagcctaggaggttaaggctgcagtgagccatggtcacgccactgcactccagcctgggcaacagagcaagaccttgtctctgaaaaaacagaaggaaaagaaatgatagtggaatatgtagaaaaagacattgtagtgttctacgaaattaaattttctgttcattccgttattacatgtacttgagattttaaggggccatcatgtctttttgtttgaagaactagttacaaaataacattccagagaccctatagtttatactcaacagataaattttagttaataaaacatgttttcttattttaaaacaaggacaatttcaaaggatcagtttgaaaagaagaaaaatgataccttagaccccgaaccgtaagtatatagctatttcttttttactttcagttttggtttgaaatcggtaaagttactccttatggagtgggttgtgggtaaaaacattggaaatatgttgccgtaagtggaatttctggtgtgaggttatcttttagatatagatttcttttaaacttaaacaaaatatgtatgtctctgtaacatgtactctagttactggattttaacaatgataagattaaatggatgttttagttctatgagaacctctcta

SEQ ID NO: 18811 - DNA, 1020 bp, Homo sapiens
caattaactgaatgattaacatgaaaaaaaaaaaaacaggaaaaaattaaaatcagttctgggtgctcagcattttcatacatttaaagatctggcttaataccggaaataaaatctctgaattgctgtcaagcataaattttccattttgaaaaataaagctatttcagtttaaattgcttttttaaggccttttgtcagactgttttgttcaagtaaatttttccatctcaaaccctggagttatatttgactttctctgagtaagaacaaaattcagattcctaaatttgggctccatgcaattctagtattaacaactccttgaaaacatttgcctcttggagccggaccgagcctgtcgttgttagtgatgatggcctgtgatgtgtgcaatgagaccgaatgctaatcaatgctttgccttggctttctgctctgtgttgtcttggtgtctgcgtcttacctctgtgtctgtgctatttgttcccttccctgttctctaatcctgcctttccccacctgccccctgttcctttcattgtcctcactgacccatcaatcaaccaacaacgcccccccttcgtcgtggtgctctgccctgctctgattggtggcttcgttgcttgggtggctgtgtgttatgatggaccagttcacccaagtatggccttcttgctgacaggtatcatttctgtgagaagtgtttcacagagatccagggcgagaatgtgaccctgggtgacgacccttcacagccccagacgtaagtaccgtcctgtcattttctctggggtgagggagggtgaccttaaattgttttttcctcttaccaatgactataaggaaggtaccggtgccattttgacttccttgcaatgttttttggttttttgtttttgagacaggttctcattctgtcacctgggtggtgtgcagtggcactatctcgactcactgcagccttgaccacttgggttcaagcgatcctcctttctcagcctctcaagtagctgggat

SEQ ID NO: 18812 - DNA, 1722 bp, Homo sapiens
attgttaagggtacttatggatgtatatatttatggtcaataacttttattcttatttttatttatttattttatagtccccagggaagaagcaacttaaaaaaaaaatacctttttctaagctaagcttagaaaatgttaaagaacattgggtacatgttatagaacatgaagcttataggctgggtcaatgtacagtagctcccccaatctgtcatttcactttctgaggtttcagttacctggggtcaactgtggtccaaaaatattaaatgggaaattctgggaataaacaattcataaattttaaattaattagctaggcatggtattgcacgcctgtaatcccagctactgaggaggctgaggcaggagaatcactggaacccgggagatggaggttgcagtgagccaagatcatgccattgcactccagactgggtgacagagcgagactctgtctttttttttttaaaaaaaaaaaaaaaaagttttaaattgagtgccattccaagttgcatgatgaattctgtcaccatcccactctgtgcccccagggatgtgaatcatttatttgtccagcatttccacactgtagacactacccacctcttagtcactgagtgtccaccttggttgtcagatccaaaaatcttggtaaatattgggttcagtactatccgcagtttcaggcgttccaagactgggggtcttggaatgtatccgagtggatatgaggggactgctgtagatgtgtgtgtttaagccataagtttcaatggttgttttaattatataaatcagactataagaaacgtgtgtagttttaccgttattgaggagtgcccattacaagtgtatagctcgatgaattttcacaagcagaacactcccaagaaaatgtgattaaattcccatacatttggctgggcgcggtggctcacgcctgtaatcccagcactttggaaggccgaggcgggaggatcacttgaggtcaggagtttgagaccagcctggacaacatggcaaaacccgatctctactaaaaacagaaaaattagctgggcgtggtgacgggcacctgtaatccctgctactcgagaagctgagacaggagaattgcttgaacccaggaggcggaggctgcagtgagccgagatcgcaccattgcattgcagcctgggcgacaagagtgaaactgtctcaaaaaaaaaaatttttttttcatacatttaatttttcaaatgtttcatcacattttcaaacgggggaaataattttaccatactctgtccatttctggtagggacaggtgcctggtgctgctcttcctaaccctctcaacatgctggggcctcaggccagccagctaccttgccctccagtgacacagtcaccactgcacccaacaccgcctcctgcttccacggctgctggcatgccatctctccagcacacgacaccacctgggatgactcctccccagccagcagctcccactcagccatcaactcctgtgtcgtcttccgggcagactcccaccccgactcctggctcagtgcccagtgctacccaaacccagagcacccctacagtccaggcagcagcccaggcccaggtgaccccgcagcctcaaaccccagttcagcccccgtctgtggctacccctcagtcatcgcagcaacagccgacgcctgtgcacgcccagcctcctggcacacc

SEQ ID NO: 18813 - DNA, 1067 bp, Homo sapiens
attatagactccctggaaagtcttcctggtctgcatcggcactccgttatttgagggtaccatttctaggtagccattgaaggtagtgctccgtgagtcatcctttgagccttctcatgactacagcagcgctaaggcagcaccttccagaaattctctaaagggttctgtcagattctagtgttggtcctaagactaatttgaactggtgcttctttagaactcagagtttacagagtattattggaaattggaaggaactagacaccgcagtctggagacacttactggctgtgaagtgtctttcagtgatgtggtgttcctgtaaactacaggaggctaaggttgaggacggctgacccttgggcacttcttaatgcttaaggtgcttgcaaaattaaaagaacatttggagacttagcacagattctaacaatgaatgtaaacccagcaaggagctgggaatcctcggatgatgggcgtcagctgctccagaggcattaggtatgggtgtgcacagaagcttgccctggtctctggaaacatctcttctgtagcttgtgagggtgctgtcctttcagggcacctcctcaccctctttgttgctatgacactttggtactgtgccctctggctcagctctaccacagcctcgtttaatgtctcacttgttcctgtcttacccaaccttatgccttcatgtcctcgtccttccctggtacccctcaccatgccaccgtcaccacccccacattgatgccgttttctctggatatggagaagtctgttccttcatcatcttcattgattaattgggtgatttcttttcagttttctgttgcctgtgcgttccatcttattttacttaagagtttatttagcaagttgtaattctgttttcctgtgggtgcttttcctaatgaaccgttgtgggtacatttacagggatgaattcatttaaccccatgtccttggggaacgtccagttgccacaagcacccatgggacctcgtgcagcctccccaatgaaccactctgtccagatgaacagcatgggctcagtgcca

SEQ ID NO: 18814 - DNA, 1027 bp, Homo sapiens
cattccagcaggaggaataacaacagatcagcagcccccaaacttgatttcagaatcagctcttccgacttccctgggggccacaaagtaagaccctgtttcagatctgagtgacagtccaacaggagcatggactgagaaccacacaaaactgattctttctaaatgtgtggcagagaaaatagtttaaatggggtggtgaggggtgaatgctgttttcctttttttctttaattataaatgtagagcagataatagattaaaacatagtttaagttttatttatttacatcacttggctctcctgacttaaacttttaaaagtcacatgtggtggcagaagaaccttactagacaaagtgtgtttgagtcacttcagtagatggatgaagtgtctttatttcctccttagcccactgatgaacgatggctccaactctggtaacattggaaccctcagcactataccaacagcagctcctccttctagcaccggtgtaaggaaaggctggcacgaacatgtcactcaggacctgcggagccatctagtgcataaactgtacgtaacagttttgcagtttcatagatgtttgattttattcctgtgttgcccattggctaccagatgacagtaccctaggagcctatacaagtcacgtgcttatttagggagccactctcactgctggtagagttctggcagccctaggcaggccagagattcccacactctatgtcctcggtgagcgggggtgacaaagagagcattggtggctctgtactgccgaggggcactgacttgcagcccctatcaccgaggcaaagaccctcagtgcagcccggccttaatgtgcttctgcactttaggctgcgtgagggggctggggttagctcaagagcctcaccttattttgtagttccagattctagttgtggagacccctcagaattggaaaagtttagagtatagatggcatgtcattatcaccttacagttagttaacataacggaaagttaacagttaac

SEQ ID NO: 18815 - DNA, 1090 bp, Homo sapiens
gaaaaataaactatcctaccactgttaactttgatttctataccatagtgcttcttaaaaatgtaggatgtcggtttcagaagtatggtggacacatgtttaaagttttggggagtagtaagtattagaatacttttaaaggtattgtgcgtgacttacttcagctacacacttgtcataaagtgcaccttgggagttgcttttcatttatgttaatgagtgcttggtgtatgtagttgtgtctgatgagtgttaatgagttgatctgaatatcattattagaaaagttaatagtatggaaagtataattaccaggaattttttttcacacattttagtttaattaagttgctctggtaggtattgggtttattataggtgtgctgatggttgaatgtgagaatattactgttacacatagtggttgggatttgaaagaaaggctttgtggtcgtgttttatgtatcaaaaatggtgtgttatagcaacaacactataagatgctatttttaacatgactctaaaatttgtggaagttagaaaggaactcaaaaataggaataaatggtatcatatagaacttctgccatatgataaattttcacacaacagcatttgggttgttgcgacagatgagggggcaggcaaacaggtaacaggtgggtaggtaggtgggtagatgaattgaccttgaaatgtccaagttgatgcaagtttggagttgtctctccattaccttggaagccctttgggatggagctccttatgttgacaccagtttttcctttagtctcctggggttagctagctggatggggcagcttccctgccagccagcagtgggcctcagtagcagaagctgactttggccacgtgaggcagagccacctcctgaatatcagaggtgctgaggtagcccctggataataagacccatgcagaattgcgaagcctcactccaaccttaatttcaaacagctcagtcagtcaatcaatcaagtacagtatttcttgaacagcttcatgtagccggagagctcagcatggtgctctgctgcataggaatcccatcagaaggatatgtccatgc

SEQ ID NO: 18816 - DNA, 1034 bp, Homo sapiens
agtgtcacttggcttctgaagaaagccttttgcttgagggcttgtggccgtgcctgataggaggctgagtctccagcctggcagtgcctgggttcccctcagtgcttctcttcactgtggtgccccacgcagtgcataggaaggtgccaggtaggaagtaggtcctggcccacacaatgcccgcaaggtacggtggtgccaccagcaactttgtagagatggctgcaggtctgaataaattcttttttttttttttttgagacgaagtctcactctgtcgcccaggctagagtgcagtggcgcgatcttagttcaccgcaacctccgtctccctagttcaagtgattcctgcctcagcctcccgagtagctgggattacaggcacatgccaccatgcctggctactttatgtatttttagcagagatggggtttcaccatgttgtccaggctggtcttgaactcctgacctcaggtgatctccccaccctcatactcccaaagtgctgggattacaggcgtgagccacctgaataaattctagcattgcttttttagtagaaatctaagtgtcttggtatccttgggaatttggttccaggacaccccaggtataccaaaaccaggtggactcaagccctacagctggccttccccatacacaagtttcgcctcccgcaagcactgtgtttctggcctgcgttgggtgaccccgtggctcactctcgtgctggtgaagcatcagctgtagcaactactgctctgcttcatggtctgtctccccctaccctcacaaagtttggagatttgattcatgtccgttttcactgaatttccaaatggagttcagttttattgaggatgattaggggcttaagttgtctgagtaactgagttctttgcatcagcaacatagactgtacagaaaacctcttagtggaacattccttttttcttttgttttttgagacagagtctctctgttgcccaggctggagtgtagtggcgcgatctcagctcactgcaacttctacc

SEQ ID NO: 18817 - DNA, 2130 bp, Homo sapiens
gtgccccgtatttgttcttttcctccttcctctgtcacggaagacattggtcacttcttgagcactgtctttgttgtgaatgtctagattgtggttttcttttggggcaatgaacatagcacaggcacgtgcaggcacacgcccttcctgcatcccaacatctgtcttggtggcctgcggccttgctcctctgtcctgtgtcttgaggcaagtgcggatgacagcgaagttgtcctgggtgactggcagtgacatggggaactatgcactgtatcatcccagggggggtggtgaactaggcacttcacgtgccctctgtctccccttttaccgcagacacctcatttctaccgaaggaagtgtttcttattaacagctgtactttcctttaatctttattctctttccttctctgcttatgctcataaacttaggggaatctccccctggtctccccgtctcccgttgtgacatttgtgagtccccagagtaaccctgttgtaacagagaagcagagaagggtaaggttagacctttagaagatgaagacggaataaccagggtcagttagcctctcgagtacttcttcaccaagtgcccagagtccctttcagaatctctacagacttctcatttgcttctctatctgtatttcttcactgtagtatttaggtggtttcatcttgaaacataattgaacatttttattttaaatagtgacatcacagaactattatttgttctacctttcattgcagttgttcgctattccaggttgaatagtttttgttttgttttgtgggctgccctttatcacccatccttcataacattgcttctaggggaagttttgtttggatttctcaacagtcaacttacaaactttttggaaaacagcctgtttgtaagttgaggactgcctatactgtgttatggttacacttgttaccattttcttatggaatctggcattataatttaggtataattgaaagtgtgacgatttggatagaaaaataacatctcgttgtttttctggtcatagttgcccattgtgcatcttcacgacaaatcatctctcattggaagaactgcacacgacatgactgtcctgtttgcctccctttgaaaaatgccagtgacaagcgaaaccaacaaagtaagtgagcacgggggcagagaagcttggagatgagaatagaagttgtttctaaagaaaattcagagagtaggtagggagtgggcaggggttatgagccatggagtgcagggtgaggtagggcggacagcagcccaaggtacagccaagctcagagggcaggcgggctctccgtgtcaggaacggctgtgataatgttggaccctgactcactcactgcctctccctctccctgccccctgcatacatgcacttgaagcagcatggaacagcagagtcactttgttcactgagccaacacgaagacatggtatttcctgacagttactccatacgtgagaatttaaattccatgtcgctataatggcagtgacgtcttagggagggggatagaggggatacttcttttggaattggaaagcccttatcctgaagtaaattttgaaggctctgtcagtcagtctgggtcagtataaaatcccacacagacatttatgaaggtttccctctacgtggagctatggtccccagaactctttgtataactaaacgttcactctgcttcacagtgagagcctctgccctagggctgctgcatcctgatcaccccagtcgttttgccgttgtctaggttgtctgtagccctcggcacggctggttacgcagcgatccctgcttgttgggaggtccgcctggggctctggggctccctgccatttgtaggcttcaggcagtaagaaggatgaacctccctcccgtttttcaaccatcttcctgtcattttagaggtaaaactgtggtctttgggtgtgtcattcagtttcggacagctaggaagtgcccttcagtctcctgtcccctctggctggagctgtacccttagcgacccttccagcacagcacagtcttcctcatcttcctccatctcgtctgtgccatcttgccaccctcccctgttttgtgtattacgt

SEQ ID NO: 18818 - DNA, 1030 bp, Homo sapiens
cctggcctcaagcaatcctcgtgcctgggaggatcttaacccaagaagacaaggaatgcttcttgaaagacattatccaaatgaaatacagtgagagttgctaaatactttgttactagtcttccagttaggacttatccttccagggcaaatgttcagacctgggggccgcacattttcctgaatgcattccaggttggcagcacataagacttcaattgagggggaaggtgggctgttcacctgcccaggtgctttagcccaactctcctgccccaggtgcaccctggacagccaagtgctgtctgtggcactgtaatcagtggcgtatttctccttactctatatttaccaagttgatatactggaaggattccaagagcaagcgagtgatagcagacaactgaatgcagtcatgtctttccatgaaaactgcttttcttggctttcttccaacaatggtaggttgccaagagaaaatgcttttggctttacaaatgatctggccgtagtctggggtggttctggttctttatgtcattgaaaatgataaatatttctggctattcaattatttagcaaacttttgctcttgatgtactgaactgtgttgtttttttacaccttatatgaatttgtggttttacatgtataccaacttgtggagaaagatgctaaaaaaactccagcttgaaaaatatgtcaggttaggctgaagccacatcaaatggaagtttgttgctgtgtcgtggctggcttatgagtggtagttgcatccatttcttttttcgtgggagtgttctttcatgttcagttcttctatgttttggtttaaattttaacccaagaatgttaggctagggtattttaatcatatgtcattattgcttatgatttaagtttgaaataaacaccctgagtttattgttcttaaagctaaaaaacaatgtagaatgaaaactggaaacgcttatgatttaccaggacaattagaaaataatggccttttcagagtatttctacaaatagc

SEQ ID NO: 18819 - DNA, 1033 bp, Homo sapiens
cctaagctgcagtccagtggcgcagtctgggctccctgcaacctctgccccccaccccgggtgaggtgatcctcccacctcagcctcctgagtagctggaaccacaggcacacactaccacgtctggctatttttttgtatttttagtagagacagggtttcaccatgtttcccaggctggtctcaaactcctgagctcaagcgatctgcccacctcgacctcccaaagtgctgggattacaggcatgagtcaccacacccagcccactcttaactttgtctcttaagtatgtctcttgtaagcagcgtagcattagatcttatttaatttattctgataaccttagtcttttaattgtagtgtttagtttatttatatttaatgttgataattgttgggtttaggtttctcatcttatttgttttctgtttgctgcttctgtgttttgttcctttttttctcccttcctgctcttcttgtagaggcaaattccaacatctctgtcatctctgtatctgtttcatttacagtcttgtttgtttaaatatagaattcctggttatgggtcacatcttcctgctccttggcatgtccagtacttttagactgtgtagtggaaatggtggatgataatgttgttgaatatgggttttattgtcctttattagtttgttttgttctggcaggctcttaattactcagatcagtttgattctctcaaagcttgtttttaaacttaacttagggcaggtcttgaagccctgttccttagacatggccttggggtctcagtttaattcctgggatgttcagcaagatcttgaaactccgactgatcagaacttctatgtctctagcactgtgccacctctggaatctgttcaattcacaattccttcgtagtcctgcacacttagttacagctccagtaagccctaggaggtgttggtgatgtgattgttgtgtgtggtcgcactgggagatactctccattttaatggtgtgaacgtaacattatgatatataatggtt

SEQ ID NO: 18820 - DNA, 1022 bp, Homo sapiens
actgcaacctccacctctggggctcaagcgattctcgtgcctcagcctcctgagtaactgggactacaggcttgcgccaccacacccagctaattttgtatttttagtagatacggggtttcaccatgttggtcaggctggtctcgaactcctcacctcaggtggtccgcccatctcagcctcccaaagtgctgggattataggtgtgagccaccgtgcctggccagcacaatgtttaataaaaccaatgacagtgttcttcccttgtcttattcatgatctgtgggaaaaaagcattcagcctttcgttaagtataatgttagttgtaggctttaggtatcattcattaggatgaggaattctgtttctagtttgctgagtcttttgatcataagcgattactgaattttgccacatcttttttcatttattgagatgaatcatagggtgttttttttttctttgaatgtgaattacgtctttctgagtgttgaaccagccttgcattcctgtgagataaccccacttgattgtggagtgttatcttttttatatgttactggatcagatttattaaaatattgttcaggatttatgcttccacagtaatgtgctacataacgaattttggtcagcagcagactacatatacaacagtggccccttaagactataatatatttttactgtgccttttctatgtttagatacacaaatacttacaattttgttacagttgcctccagtattcagcacagtaacaagctgtacaggtttgtagcctggaagcagtgggctataccatacagcctaggtgtgtagtaggctacaccatctaggtttgtttaagtacacccaaagtgtaagttcccacagtgaccagaatcacctaatgacacttttctcagaagatgtccttgtctttgggcgaagcatgattggtatattcatgagtgatatgggtctataactttctgtttttttggagtgttcttatttgtttttgataacaataatatac

SEQ ID NO: 18821 - DNA, 1026 bp, Homo sapiens
gatgggggtgaaatgcatcattaagtgattatgttatgctaggaacatcatagagtagttatgcaaacctagatggcatagcctgttacacacctaggctatatagtgtaccctgttgctcctggactataaatctgtacatcatgttactgtaatgcatacttgggcagttgtaacacggtgccacaatgctaagtgtttataaacctaaacatttctatacatagaaatggtatagtagaaaatactgtataaaagatttaaaatagtacacctgaccagacactcagtcccatgcctgcaatcccagcactttaggagggtgaggccggaggatcacttgagcctgtgagttggagaacagcctgggcagcatagatcctggtgtgtgtggcaggggtgggcgggtgtgtgtgtaaaacacacctgtataaggcatttactatgaatggtgtttgcaggactggaagttgctgtggatgagtgaatgagtggtgagtgaatgtgacagctgagaacgttgctgtacactgctatagactttataaacactatatacttaggccatgctaaatttatttatttttaaatttcagtaataaattagcttactgtaacttttcactttataaacttcagttttttaaaaacttttttattcttttgtattaacacttagcttaaaacactaaacacattgtacaggtgtacaaacgtatttgtacttattctataagctttttctattttaaaattttttattatttatttatttattattattattattttttttgagacagtcttgctgtgtatcccaggctggagtgcagtggtgcaatctctgctcactgcaacctccgcctcccgggttcaagcaattctcctgcctcagcctcccgagtagctgggactacaggtgcatgccgccacgcccacctgattttctgtatttcagtagagacgaggttttaccatgttgcccaggctggtcgtaaactcttgagctcaggcagtctgcccgcc

SEQ ID NO: 18822 - DNA, 1426 bp, Homo sapiens
cgacagagcaagcctgcctaccgtagtgaggcccttcccaccgtatggaacttgtacctaccctggggctcctgccatcttggagcttttcccttgaagttccccacagcagagcagccatctctgcctgcctgtcttgctgtcttctgtccctgcctctttggagttgtcagtgtccttttcctctaaacttctgctcagagcctcttatttgaagcctttcctacttttgttcactgccttattccacttggctgtaaaatatgacatacgtgttaatttaagtttgtggcttggtgtccattggctgtcttcctcaattagagtacagtcctctggggaggccgacttctattctatctcaaacccagccggtcctgcaccgagtgagggcccctgagcagtgactcgcttccttctcctggggaggagagggtgggggctgccggccgagctctctggctcttcagcagatcagtgattctgaggaggggcaagacttactcaagataagatcactgttcagaatgaagtacaacctcattgttctgttctaattagggattggtgtgtctgcataaaagaagcctgaattacggaagattttagaaggaggttgctttaattatttcctaatagtcattgtaaaaaaaaaaaaaaaagttagatgtcttttgggaacttgtttaaatgcctagataaaaattacttacgatggcataaatattaataaaacagcttttctctttcttttttttttttttttttggtatagagagttgttccattatatttatttgcataatccccaagaactttcaaagcaaagtaacctttaattctactagaattgccacagatcagcagggatgagtttattagcaagtcactaccattgataagtggcggctgttgagcgcctgctctgtaccaaccctggagtgccaggttcttaaaggctttggctggttcagccctcataggtgccttgggagatgggattgggacagtgatagtaatgactaatattttttgagtccttactgcatgccaagctcagtgctaaatgctgtatggtttaattctttcatcaacgatcctgcgaagcaggtgctactgtcctttattttattttatttatttatttttttgggacagagttttgcccttgttgcccaggctggagtgcaatggcgcgatctcggctcactgcaacctcccagtgattctcctgcctcagcttcccgagtagctggggttataggcacctgccaccacgcccagctaattttttgtaattttcagtatttttagtagagacagggtttcaccatgttggctaggctggtttcgaactcctgaccataggtgacccacctgtctgcctcccaaagtgctgggattacaggcatgagccactgcaccc

SEQ ID NO: 18823 - DNA, 1330 bp, Homo sapiens
taatcccagctattcaggaggctgtggcaggaggatcgcttgagcccaggaggtcgaggctgcagtgagctgtgatcatgccactgcactctggcctgggtgacagagtgagaccctgtctctgggggaaaaaggaaaagaaaaactacattctgaagattgaacatagctgtgtttcatcctgtgctgtataagtggctctaagcagttgtgattacattttatgacgtgaatccttttaaatgcaatagggaagcttatttaaagaaagctggtggcgaatatggttgtcaaccaaatggtctgttatgtatgtctggtactttatgtatcagagtgcttttctccacgtcacctcagtttgatccttacagcgtcctgtgaggaagggaagatgctgttactgctattttctaggtgaggaactggacttgagaggtgatacagggtcaaaaccagatccaaactagattgttaaagtccgtagctctatatatttattttctaagtctctatctgtaaacaatgcatttacttgaatcgacccaggaacctgccaagcttagtgagtttcagtagcggccttcccgcacatgaatgagatcactaagggggaggtttgtaaccacctgtggtgggggcagccaggagtgtattcttcctcctgggttagggcgtcccccttttccctctggttctggtgttatcctcagcgtgacgtgtgtgggctcgtgttcctgtttacctcagggagaatgagaaacggttatgttaccccatcagtgagttctggctaagtaggaataaaagttgtcatagagacttttaggactaggacatttcatgaccgtgcttcgtttttgaataactgagaggggtgagagcggtggccccattcaaaggtcgtcagggatgaaggtaggcaaggacaagtcatgtgcagggcgccttagagggccttcagaagatggaaagtcgctcctggctgaacattcagatttgattctgtaaacagaattgaacataacttacaaagagactgagtcctgcagttggaagttgatgcttagattagtcgcctgtgttttcacagcttctaagtagtgtgttgtaattgtgtggcaaagtatgtgattacctggggggtccataattgctgacttgtgtttttacttgatgtatttgaaaacagttaggaaaatgattttgccaaagtgtgtcttaccttagttaagatgaaatgtaccttattgtgagtttctgaagattgcaaaagcttgtcagtttagtttttggggtcccattagtgagggcacccctctttacctta

SEQ ID NO: 18824 - DNA, 1072 bp, Homo sapiens
caatctcagctcactgcaacgtctgcctctgggttcaagcagttctcctgcctcagcttcctgagtagctgggatcacagacacccgtcaccacgcctggctaatttttgtatgtttagtagagatgtggtttcaccatgttggccaggctggtctcgaactcctgatctcaagtgatccacttgcctcagccgcccaaattgctgggattacaggcatgagccactgctcctggccttctctgttcttttatctcatttttggctttgtttagtttggttgcatttttacattttcattttgttcctgtgttagtttgagagctattctggttttttaccatttttagcaattattctaaaaattacaataagcggctgggcgtggtggctcacacctataattctagcactttaggaggccgagacgggcagatcacttgaggtcaggagttcaagaccagcccggccaacatggtgaagccctgtctctactaaaaatataaaaattagtcgggcatggtggcacatgcttgtaatcccagctacttgggaggctgaggtgggaggatcatttgaacccaggaggcagaatttgaagtgagccaagatcgtgccactgtgggcaacagagtgagacatttttatcccttttcattccttcctctatccccaacctcctctctgggacaatttttccttctgcctgaagaacaccctagacttctctttactgaagaacttttccactgagtaaaattctagtttggcaagtttgctgttgttgtgttgtttagttttctttccaacagattgaagagattattctactacttctagcttccattgttgctgttgaaaagtgagcaaaagttgcacttttttttcttttttcttttttctttttttttttttttttgagacagagtcttgctctgtcccccaggctggagtgcggtggcacaatctgggctcacaccacctcctgggttcaggtgattctcctgccccagcctcctgagcactaggattacaggcacgcgccaccatgcctggctaattttttttttttt

SEQ ID NO: 18825 - DNA, 1050 bp, Homo sapiens
gtggggattgtggtcacatgaagctctttctgcatcagtattaaggtgtatatttgaatgtcctcccctcccctttcccctccaggctgtgtagctttgaggggctgggcgtttgctcacgaccttgctgtctcgctcagaacatgctccgcaaagttctccgcacacacttcttccccatcaagcccatttccttccccaaccacaaaggtgtttgtgattcctcaccccgggaaaccaaggagctgcaaagtggagtctggttcagccccgtgcagactcacccagagcttaacgttgtctttcaaacaccctgagccttcctaaacagccagtgcagacgttctctctgggccacgaagcccctcgggtcctccccgtcccctgctccgatgcatacctcagtgcagaaccacagaatctctgcagcggaaacgccgtgcatctcttgtctgttggcagcgagcacatcgtgctggagacacgagtttctaagcagctggcacgagggctgctgacggcatgggtcgtgcttcagggtggcaatacctcttaggaacttagggcaggaagcaatacttcagcattgaatgtgtgtaaatagttgctttgagttgcaattgctattttcttctcagtcccagctcagatcgaattatatatccatatatatatatatatatatatatatatatatatatatatatatatggtaaacaagcacacacaattttatccaatgcaaacaaatgtagagcatcagttacaaaaccctcgaatagcttgagagccccacaggctctgccacacccgtgacttcatccacactgacgtcacccgcgggggctccccctgcacatttgcacacgatccggagagccgaaggccgcgtgcttcctgtcacatgggctgtaatcatttgtagtttccaaagacacgtctgcatttgaatttctagattttcgaggtaaggagttttttttaattggttgtttggaaaatcacatcatgcctagaatctgaaattgaattagcaagaaccgactgttt

SEQ ID NO: 18826 - DNA, 1034 bp, Homo sapiens
tttatctacttgttttctatgtgtcaagtcattatgagtaggctcagttggcccaatttgaggaagtaaggggcttttcattcgttatagaaattgaaaaaatgatttcatattttatagacacatacatatataaatatatatagcttagaaattaaataggtatttattataagtggtagtctgaattgatagtggtgatgcttgcacatccctgtgaatatgctataaaccctggagttatatactttaaatgggtgcattatatgctttgcaaatgacatcttaagaaagctgttgtaaaactaaagggtagtctccgccaggtgaggtggtcacacctgtaattccagcactttgggaggccaaggcagatggatcacctgaggtcaagagttcgagaccagcctggccaacatggtgaaaccccatgtctactaaaaatttaaaaattagccgggtgtggtggctggtgcctgtagtcccagctacttgggagactgaggcaggagaatctcttgaacctggaggcggaggttgcagtgagctgagatcatgtcactgccctctagcctgggcaacagagtgagattccatctcaaaaaaaaaaaacaataaaaaaaaaaaaccatctctacaaaaactataaaagttagccaggcatgttggtatccacctgtaatcccagctacctgggaggctgaggtgggaggatcgcttgagtctgggaggcagaggctgcagtgagccaagattgcaccattgcactctagcctgggcactagaatgagaccccatctcaaaaaagaaaggtggggggcggggtaggaataggaacttcacagtggacaaaccgggcagatgccaccttcaccaaatgatccaggtgagcctccctgctcactgccatccggtaccctagtgtggtgtgctgagaagggcatgtcacctctgcggcattctttccgcaaaccccaaacctcagtctgctctgagaaagcaccaggcaggtccagatctggacatttgacaaa

SEQ ID NO: 18827 - DNA, 1047 bp, Homo sapiens
tcacgggaagttcatagaaagttctttttctttttctttttctttttttgagatggagtctgctgtgttgcccaggctggagtgcagtggcgcgatctcagctcactgcagccttcacccactgggttcaagtgattcttatgcctcagcctcccgagtagctgggattacaggctcccgccaccacgcccggttaatttttgtatttttagtggagacagggtttcaccatgttggccaggctggtctcaaactcttgacctcacgtgatccttccaccttggcctcccaaagtgctgggattataggcatgagctaccatgcctggcatgtatctcttcttctctaagtactcagctgtcttgtttgaggctagtacctccactagtctggaaccctccttcctgggctttctgcccacttccatctctcctttgacaacagtggtttttccagggtctgtgcagagctcagctttctgccataagacaggggagtttctgaagactcctcaccccttttgggagtgagggctgctgactgaagctccaggtcactgttttatgagctagctctccgtttgttgatggccggggacccagcctttgtcccctcctctcgtgcttgggcactcactactcactgcctcggttttgctttcagttttgattgtgcattgagtccacaacttcaatgggattttcttaaggcataaatgacagttgcatggtgtgcagtgggagaacaaatcgcccagcctgggacatccctgggtggcagagtggacctgctctcaacttatggaatgtgcagcaacaccttgaggttattaataaatacctgagtctgggcatggtggttcatgcctgtaattccagcactttggcaggctgaggccggaggatcacttcaggccaggagttcaagcccagcctgggcaacatagtgagattccatctttaaaaaaaaatttttttttaaaagaaggtgggcttggtggtgcacacctgtcatcccagctacttgggaagatgaggtgggaggatc

SEQ ID NO: 18828 - DNA, 1050 bp, Homo sapiens
tggatctctggccctgagctcccttctgatttcatggtatggccacctccttgtccctatcgcttgagcgtgtcaccagcatcttcagcttgggaggtccagaactgagctcctgattttgccccctaaacttttacttcttctggtctcactcatccgtccacgtactgaaggcagaacccaggaacccaggaagtgtccttgttccctttgttcacatcctgtcggttctgcctagaccttaaatcatgaacctgacctaaggccactccagcttttgcctggaccacagcaaaaggccaggagtgagcccccgcttctactcctgacacctccggagccattcgccacccagagctgtgtaggctttaaaaagagccagccagccgcgtgggatcctggatgggatcctggaacataaatcaggtgaaaaattggtgaaactcaaatcaagttcatcgtctagttaatttcctgttcttgattatcaagctgtgcttgacgtcgtacaataagacattcacgttaggagaagtggagcgagggatatatgagaactccctgtaccgtatatgtaactttcctatatgattaacattagtttgaattaaaaagttttaaaaaattggatgggtgcagtggcttatgcctataatcccggcactttgggaggctgaggtggccggatcatgaggtcaggactttgagacgagcctgaccaacatggtgaaaccccgtctctactaaaaatacaaaaattagccaggcatggtggttggtgcctgtaatcccagctactcaggaggctgaggcaggagaatcactcgaacccaggaggcggaggttgcagtgagccgagattgtgtcattgcactccagcctgggcaacagagcaagactcagtctcaagagaaaaaaaaaaagttaaaaaattaaaatgcaaaataagaaagaatcgaactgtgtgctgtcttacttaaaacactgcagagctcttgtgtgtgcctagcatgtaagtcagatgcctcttgtcgttttgagacagagtct

SEQ ID NO: 18829 - DNA, 1065 bp, Homo sapiens
cacgtggtggggcgggtgagggacggcagcagagccttggcagagcggagctgtgtggccgacggcttcctctttcttcctccagcgtgcgattataacttgttgctcatgcaccggcatgcagctctgtttgctcagtctgtttttctgtaaagtctctttttaaaaaagtatatgatacaggctgggcacggtggctcatgcctgtaatccgagcactttgggaagccaaggcaggtggatcacttgaggtcaggagttcaagaccagcctggccaacatggtgaaacctcacctgtactaaaaatacaaaaaattagccgggcatggtggtgggcacctgtaatcccagctacatgggaggctgaggcacgagaatctcttgaaccagggaggcagaggttgcagtgagccgagatctcaccattgcactccagcctgggcaacaagagcaaaactccatctcaaaaaaaaaaaaaaattgtgtgatatagatggaagaccacgtaaaataaatgtacaatctgattgttataaggtgaccgcctttgcatatctaccaggcaggttgcaggagagcacagccagccacccagcagccgtcctgccctccacctgccgcagggggccagatcttgccattcctggtggtcccgtctctgctcttcttggttttctttctttcgttctttctttttttttttgagatggagtcttgctctgttgcccaggctggagtgcagtggtgccatctctgctcaccacaacctccacctgctgggttcaagcaattctattgcctcagcctcccgagtagctgggattacaggcacgggccaccatgcctggctaatttttgtatttttagtagagatggggtttcaccatgttggccaggctggtctcgaactcctgaccctgtgatctgcccggctcggcctcccaaagtgctggggaggtgtgagccactgcgcccggactttttggttttcttatccaactgtgagtccttcaacacttggcgtcgggtgtttggcttgtctgttttttggcttgcttttgctt

SEQ ID NO: 18830 - DNA, 1032 bp, Homo sapiens
agtgtcttctccttctctacctggtagtaaagatgaccagaagggtcttgcttccagccggcaaggtccacagcccgccttcatagttacacttcaggggtctgtcagctaccagccttatgttatcacttcagtctccttcttcattccatggggtgccaacggataaccactcagatagaatgtaaaaggactttgggccaggtgcagtggctcatgcctgtaatcccagcgctttgggaggctgaggtaggcagatcacttgaggtcaggagtttgacaccagcctggccaatatggtgaaaccccatctaataaacccctactaataatacaaaaattagctgggcctggtggcaggtgcctgtaatcccagctactcaggaggctgaggcaggagaaactcttgaacctgggaggcggaggttgcagtgagccgaaatcgtaccagtgcactccagcctgggtgacagagtgagaccttgtctcaaaaaaagttcataaaaggactttggctcctcttctggggagagggttagcatggttttggttgtaagacggatagtagcattatatggcatggaagcctagttgctatttacttgatttggaagttaagtacggttgaaaagaggagtagatatggacaccaagttgacaaggggtacgtgtagtgagttcgttttgcgtcaccttggctaagttggagctctgtatgtaacttgagccacaagagaccatttgtgtaagaccgagaaggcagaggggacacagcagccacatgcactgtggctcatgcacgtggtctctgatctgcaggctcaccttgttggcgcacggcagccatcaggcctgtacctcttctgaaacccaccaaatctttcgttgttcccctcatctgcgtatgtggcagacagtttttctatgttttcaggcaattgttgagcaaataataatagaatttttgaacaggccagcatcggtgctaatatgtgccaggcacagatctgagccctttagagtatttactca

SEQ ID NO: 18831 - DNA, 1042 bp, Homo sapiens
actccttcagagtaatgtttcagacagaggagagagctttgtgggggccctctggcgtgctcacagaagctttggtattcgtcaaccactgtaggagccaagcatttcctacagaatgcagggagcagggctggcggggagatagtgcgtgaaaagagaggctggtgttgggaaagaaacagagacagaacggtggccggcggacaaacgacaataagccaggatgatggtgtcactgcagccgggtgcggagtttctttctggggtgatgaaagtgttctaggttgatggtggtgatggttgcacagccctgtgtgaatatgctagacaccactgaattgtaccctggaaacagatgaattgtacggtatgtgaattatatctcaataaagctgttattaaaaaaaagatggacagtcccagctactcaggaagctgaggcaggagtattgcttgaggccaggggttggaggctgcagtgagccgagattgcaccacggcactccagcctaggcaacagaaccagacgcttctctttaaacaaaaacctaaacaattgtagatttttttaaaatgaggctttttgttttttttatgccaaaacccttcatagacatgaaataacagaagagtaagattggcggggggggggggggcggtttcatcagtacaggttacctgaaagaactgagttgttggtctgacctctgctaggactcgccatgtgtcatggcaggcctggcacctgaaggagagctttagcaatttgcactcacatcatcctggacctcagcctgggtgatggtcactgtcttgagacagcttcagaacaggcaacctgggtgtggccgccttgtcaaccagagataataaaaacacaggtaaacctctgcacctccatcgtcatgccgaattataacaacagcacatatttgttgaagtcttactatgcactaggcacagtgctgagtgcccatgatgcagaggggaatttgagagtgtcagtcatttctgccccttcggatcacgcactgctttccag

SEQ ID NO: 18832 - DNA, 1093 bp, Homo sapiens
gttagaacttctaaaaaatttaatctgacagtcttcaccttttattggagtgtttaatccatttacatttaatgcaattattgatatgcttggattacatctaacattttgctatgttttctctgtctcacatctttttgttctgtttctccttactgttttcttttgtgttaaatagatattttctagtgttctgttttcatctgtttggtgaggtttttaatattttttggttatatttttagtggttactctaaggattgcaatatgcatctcatcacagtctactttttaaagatctatatatagcttttaaaaagtagagatggggttttgccatgttgcccaggctggtttcaaactcctggattcaagtgatccttccatctcagcctcccaaagtgctgggattacaggcatgagccactgtgcctagagctcacagtctactgtagattaatgctaattcattttcaataaaatatagaaactttgttccattaaatgtctatgtctatctacctcctctgtggtattatgtcatgtatatgatatctttgtatgtcataagcccagtagtaaaagtctgtagttattgttatatgtacttgtcttttaaatcagttaagtgtaaaaaagagactatttataaatctgctgtatatttgcctatgtaattagtattactagcattctttatttcttcatgtggattcaggatataatctggtgtttttttctttcatcttgaagggcttcctttagtatttcttgtaagtagggtctgccagtaacaaattttctgtctttgtttatctaggaatatctttatttctacttgttagttttggggtatggttttgatggatatggaattcttgattggaagtttttctttcagtgctttgaatatgtcattttactgttttctggtctctgttaatttctaacgtgaagtcagctgttaatcttatggtagtgctccttttcatgaagaaccattttgtcttcatgcagtcaagattttctctttgtttttggcttccagcagtttggctatgatgtgtcatggtggctcactttattgagttgg

SEQ ID NO: 18833 - DNA, 1030 bp, Homo sapiens
tcgacaatttggacatgatgttgttttggtatttctcttttttggagtcctctaaacttcttggatctgtgctttgatgtcttttattatgtttaaaaaattattggccattatctcttcaaatatttccttctatcctttctttcttcttcaagcattttcttttttcttagaaacatttaataggggcttatgcacagaagctatgtctgttctcaagcttctgttcattagtctgtgaactggggctgcagcgagaagagacagtggatccctgcaccattatcccctggtcccagggcttgtataccgtagggaaggggtgattcagagggatgtgtaggtcagtgtgagtacaataacatcaaagttgtttgacctaaggtcaggctttatggtaagttcttggtcttacacgaggaacagcgcataagctggaaatctcagagggtttcctggaactggggttaatcagaagccacatggcggagtagcatccacgatggagctacttcagcctccacagtccactcttgtaatccagctcttgtaatctcacatgccctcttcttccttcatggtccctgagcctttaaggagggtgcttgatactgtatagctttagcagcagtgccttggtcatggaaaacagatcgggcccagtgggattccaaacaagggagattcacaggcttttaaatcgtcttcagtcttcagaatgcagtggctttggttctgtcagaataggcaaaacaatgtgagatatataacatcgatcactcggatagtagaattctgtgcacacagagattgcaatagaaagagaatcgcctgtaatcccagctactcaggaggctgaggcgcgagaatcgcttgaacccgggaggtggaggttgcagggagccgagaccgcaccaccgcactcccgcctggatgacagtgagactctgtctcaaaaaccaaacaaaaaaacccagaattcgtgggccagaacaacaatgaaaaaagaacgtattctgttaagaagcca

SEQ ID NO: 18834 - DNA, 1124 bp, Homo sapiens
cgggaggatcactcttgaggccaagagtttgagactagcctggccaacgtggcaaaaccccatttctatcaaaaaatgtatatatatatacaaaaattaatcgggtgtggtggcgcacgcctgtagtctcagctactcgggaggctaaggcaggagaatcacttgagcctgggagatggaggttgcagtgaaccaagagcatgccactgcactagagcctgggcaacagagcaagactgtctcaaaaaaaaagtaaagaaaagaaaaattacctctgttaacttctttaaattcttaggtacaggtggtaatttttttctttgttaaaattgatgttggtcattttgtgtttgagttttctgttgctatttcatggggattttcctgtgcatctacataatatagtatttctttgaattaatatgccatagtttaatcatttcctgtttgagctttttagattgcttgaaggtttttctttcctttgtaaatactgcagctttaaggaatgtgtgacttttgaagctctctgttttggcagatggcaaagggggtgaccatcttatttttattaattttttattataaaagtaaaacatgtttttggtgttttagaaaagacagataagcaaaaagaagattaaaaaaacatttaccaactagagatagccattttgaatgtttcaacatgaggtttttagactttttcagtgcatatacgatatatatcaaatatttattcaaaatcaaatatatatcaatgcatataaatatatatagatataatggtgtcatatgaaacaccattaacaccattaaacaccattaacaccattaaacaccattaacaccattaaacaccattcatggatcatgaatacctttccacttaaatctgtatgtacatctttgtttattttattttattttatttttttgagacagagtcttgctctgtcatccaggctgaagtgcaggggcatgatctcggctcactgcaacctctgcctcccgggttcaagagattctcctgcctcagactccccagtagctgggactacaggcgtccgccaccacacccagctaatttttgtatttttagtagagacggggtttcaacatgt

SEQ ID NO: 18835 - DNA, 1027 bp, Homo sapiens
ccagctgagatggtttcttaacgtcctccaaaggtgatttttttcaagaatcaatataaactcttggattttagcttatttgatgtatttcattccattacagatacatgatttttgatgctcagattgtcccatttggggcccatgggagcccctttaagttggctgctgagtcctcttcatgcaaccccagtggtctttgataactttcatacccttttagtaacctttttaaagagttgagaaattataggtattaaaatctcattaattctgtttgtctgatatgtttattcagagagactgagctaaagtttaccctcatcttttttgaaaagaaaatgaatagtatatgcatgtttctatgaggaaataatgccacccaagaaacggtttgtgcatcttcgagttccttggaagctttaatttgcattcctacaattgagagcaatgtagaatttctttctgtatcttcccactaatgcctgttgaggggcaggtgtctgtgaatgtaggtaaatcgtgataaaaaaacaataaaaaggccgggcgtggtggttcacgtctgtaatcccagcactttgggaagctgaggcgggtggatcacttgaggtcaggagtttgagaccagcctggccaacatggggaaaccctgtctgtactggaaatacaaaaattagccgggtgtcgtggcgcacacctgtaatcccagctactcgggaaactgaggcaggagaattgtttcaacctgggaggcagaggttgcagtgagctgagatcacaccactgcactccagcctgggtgacacggtgagaactctgtctccaaaaacaaaacaaagcaaaacaaaacaaaaccaaaacaataaaaaaaaatcccaaaccaaaatgtagatgacctgtttgcagactgaggagtcctgcagcaaactccatcccccaggacagctgcggaatgttctagaaggcccaactctaggaaatcccttagtaggagccttgctctcaacagtgcctcctggaacga

SEQ ID NO: 18836 - DNA, 1050 bp, Homo sapiens
tagtgaaaccccgtctctactaaaaatacaaaaattagcctggtgtggtggtgtgcgcctgtaatcccaggtgctcgggaggctgaggcagaagaatcgcttgaacccaggaggtggaggttgcagtgagctgtgatcatgtccactgcactccagcctgggcgacagcctaggcgagactgcgtctcaaaaaaaaaaaaaaaaaaaaaaaaaagtaggtataagtatgattgcaaaactgccctgagctgctactttccgcctttgggaaagcccagctctgcaggagcagtcatggagccgtataacactgcctgcctcttcaataaaggtgttttctttcctgccaccggctcacccttgaattatttcctgggcaaagccaagaaccctcttgggctcggccccactttggggcgcgtctgacctgcgttaatagttcccaacctccgtgagctcacagttaaaaatgttgtggagtatgttcgggagtggggagcgctttagagggggctcctgctggagctgggtcctgagatcaggctgtggctctccaggtggacagaagagcaccagggcagagcggagaggtgggtatggctgggccctgtgcttctctgtgggggcggacgattgttagttgttcatcaggacaaggaaggccatgggtagcgtgggaaggagtttgcatttgaccccataggtgtcagggaaccactcaacagggggcttaggtgatctgacttgcagttttagaaagttcactctttcagagctagtgagtgtgggttggaaagagattaatgaggtgtcgagtaaatcccaggtaggggtgatggtggcccaatccaaagttacagtagcagtgatggaggtgatgggatctgagtggcattaggaagagcagcttgatgggactgcaagccagatttaaacaaacgactggcaggaggggaagggcttgaccatgtgaatgggaaatggcattttaagtttctggaagtgacttggcgacaatgtggagtcaggaatgggtgaggggcctttgaa

SEQ ID NO: 18837 - DNA, 1050 bp, Homo sapiens
tatgttttactaaaatcttcaggattgaggggaacatctgttgtggaagtatgtagagaaaataacactgattttttttaaaagcctgcttttgtgaagctgtattgtattttgtggtccccacacactgcatacttaaacagttaaaagcctcaggaaagggaatcctcggaagaagtaattaatagttccaatcagagatggcagaagtaatagtttcaatcagagacggcagaagtaatagtgtcagtcagagacgtccagtggttgaggtagggcctgcataggtcgttggtgtgagatcatcctatgtgtccagttggcattctctttctctggcttgtgatctgagctcctgtatcttttatgtatttgttctctggcaagggaacatcatctttcttctgatttttctttattttactaactttgctgttgaagattttatggatgtagacgaaaactattttcacccgagaattcccctaacctagagcactttaaggactatgttaacaaggtcagaaactacactttctgttcacttgaaagatgctgccgtgatgagtgtctttccgtttagggcggtggcactcgctcttgagtctgaaggtgtcagtggacggggctgtgggtgtaaccccctgcttgccaccttggcatttttagggcccaggtgttgtgagctctgtccttggagactgtgggacggtggagctgggcggcagtacgttaaattaaatatgttggcccagaggacaatgagaacgttttgtaagctgtactttgtatgctgtattactcgaatttcaaaaatgaagagggtgtaattattaaatatgtttggaaattgccaagtcattgaatacctattttgtgaatttatgagtagttttatttttaagtttgtagatcaggggtctcagacacagagccaaaaaaaaaaaatgctagagtgagtttgtgtttttttttttttaaacctcaaatagtgtaaatttggtaaattaacttttcttgacatttgtgtacattgtatatttataaaag

SEQ ID NO: 18838 - DNA, 1023 bp, Homo sapiens
aggggggcgcgagtccggggggcgtggcctggctcggacgccccgcccctacccccacgcggggcctccttccggccggcgcgccccggacgtgacctcgcgggcgcgcgccgggagccgccagactgggcgccgacagcatcctccgggggtaggcgcccacagtcattctttccatcgctgcggacacgggagtcagaagtgaaacagtcctgtcctcgtggggcttacgttccaggcgcaagagccacaggtagtcgaattgggaaaccgcctcggatgtcacataagcgcccagggaggacagggcaggacagggcctccctggggaggtgacttgagtcaagactcaaaagagggaagcgagggaacaagccatgcgaggaactaacgaaggaacattccagaaagatttcacatcccaagcctaaggtccaggggcagcaggcattgaggcggatgtggctggagtggagagaaagaggaattaaaaggatggagtaatgacaataatggctcacattttttagcaagaggtgggttcactacctatctgtcgttatctggggggaaattaggctctgggaggtcaaataacttgcccaaggtcacacagcttgtaagtggccagaccagcattggaacccaaggggacggatgtctgaaacacacccaggagtcccaaggtgggatgaccttgaccaagacaggccctttaccccttgcctcagtttcatcccaaagagctgcccaaacacagcttaaaatcagggcacagagcaagggtgtagctgagtgtgcgtaacatctgttctcctgggagatgcttttgttgtctgggaagcacttgtcacctctccaggctctggagcaggtacaagtggcttcggggagaaagggtgggagccgggaagaggctgcttctggtggcaggaggagagagggagtgggtgaggggccccgggctggctgagtgctctggagcatgacaaaggcagtgtcagccaggcagctgtgtccgcc

SEQ ID NO: 18839 - DNA, 1023 bp, Homo sapiens; identical to SEQ ID NO: 18838

SEQ ID NO: 18840 - DNA, 1028 bp, Homo sapiens
tccgctgcagaactgactgcttgcttgttattggggagaaacccccacatgttttgccacagaagtcttttctgttgattgttatggtgtgaaagcagaggagaaacaggttttttctccacaccttcacatgccacagaacccagagggtgtggaggggtagactttgcagaggcctctggtcttccataggagtgacttactattaagtttgtgattgacttgtaaagattttcaaacaggcacctattttgtttgcaattaataaatccaagatttaaagcaagaaggccaagaagcctctcttggatttgtcagggctgcaagttgacttcagtgggctccccagaccccgcaagtctccccttcctcctctgttgggaactgggcagatccccaggtctcctagccccctccctcaccagcaccttcccacagcagaggtgctggggctgcattttcagatcagacattttccattttgtagcttaatttgaacagtactcgttttattggaaaactattttgcttctgatcgtgtgattgaaagattattcttgtagtttttattacaccctacacaacatggttttgtgggaatgcatgtttgattttgtattggaaggcactgggagaatgggtgtttgaattcgggaaatcttcatgagctgttttccagatcctctccttggtagagaaggacctgccctgcagtctctgctggggttcaggaaggcagcaggaggacgcatgtggatatggaggggtgagggggagcagtgagtagcaggcatggccctaggtggggaagacacggaggagcaacagggccctgcggcccccggtgaggggcaaagagaaggtgggctctggtgtggccatcgagctggaggggaagccagccctgtgcaggtccagacccttccctgtggcctgcattttctgtacccaggttgggtgaacaccaaaggagggctatgccctgtgggcttacaccctatcatcatgggcaaggctgtatgtggaat

SEQ ID NO: 18841 - DNA, 1046 bp, Homo sapiens
ctttaggacaaagaccagccctggggacagacaccagaagagtaaatggagctgatgtgttatattcactgttctcatgtcacctgttaattctggaaagggacagtgttctacgcttagggatcggtgactcgtgcactgctcagggtttatcttcagcagggagtttttgcctggcggaacttgtctcttccaatcatctgactgtggcccacatcttgcagggagccgatatgtggatttactcccttgatggaagcagctgctgctggccatgagataatcgtgcagtattttctgaatcacgtaagtgaccctgattattagcatgtaatgtagtcacggcaaatgaggaatcatattactgaagtataagctattacagaattttcctttgcacagaaataactttcattcatttattcaacacattttcattatctattgacgcccggtgttgagtggtgcttaggcattaaggatacagtggtgagtagaaatagacacctattcctgtaataattttgaaaatactatctgaaaattatggaaaaatattttaaaagtaaatagcactcataatcctgtcacttagaaaaattatatagaataagaaggcagagatcctcctctctttttcaacctccctgatgcccacttggtttgagaaagagctgccctaggacttttcctctgctgtggaaagatgtgtctgtaggcaagtgtgtgcacattgctttgtgttttgaacaaagtgggattctacgtatagtctgtaacttagagacatcttatagacatcttatctttgtacagtattccgtgtacaatctgcctcagttaatttaatgagtttcttattagtagaaacttagtttttaacattttgcaattataaacagtgttccgggaatatccttttacacatagctttaatacatttgcagttatttctgtatgttgtatttctgttttattttattaatttatttttttgagacatggtgttgccctgtatcccaggctggagttcagtggcgagatcg

SEQ ID NO: 18842 - DNA, 1255 bp, Homo sapiens
cccatctctactaaaaatacaaaaaaattagccgggtgtggtggcatgcacctatagtcccagctactcagaggctgaggcaggagaatcgcttgaacccaggaggcagaggttgcagtgagctgagatcgcgccattacacaccagcctgggcgacaaaaattttttgatagagatggagtctcactgtgttacccgggctcaaaaacatttttttttcttaattgagatggagtttcactctgtcacccaggttggattgcagtggcatgatctcggctcactgcaacctccatctcctgggttcaagcaattctcgtgccttagcctcccaagcagctgggattacaggtgtgcatcaccacacctggctaatttttgtatttttagtagagacagcattttaccatgttggtcaggctggtcttgaactcctgatcttgtgatctgcccgcctcggcctcccaatattttttctatttttagtagagacagtgttttgccatgttggcgagaactcctgacgtcaaatgatcagcccgcatcggcatttcagagtgctggtattacaggcgtgagctatcaggcctggccctcaaaaacattctttatcatgctaaatggaaacctcgtacccaacaagcagtttctccccatttcccctcccctagcctctggcagccacctgtctgctctgtctctgggtgtgcctattctggttgtcttctgtaaagggaatcgtgcagggactgtcccttggtgactggcttcttttgctcagtgtcatgtgttcctgggtcatccgtggtatagcatgtgtcagtgcttccttttcatggctgaatagtattccactgtatggatagaccacgttttgttgatccattttcgttgatggacatttgggtgatttccattttttggctactgtgaagagtgctgtcgtgaacatttatgtacacatttctgtttgaggacatgttttcagttttcttgggtgtgtacctaggagtaaagtcattggctcatataatgactcttgtttaccttttgatgagctgccagactcagtctcttttaaaaatatttgtacggccaggcatggtggctcacccctgtgatctcagcactttgggaggccaaggcggttgggtcacctgaggtcaggagttcgagaccagcctggccaacatggtgaaactctttctctactaaaaatacaaaaattggctgggtgtggtggctcactcctgta

SEQ ID NO: 18843 - DNA, 1078 bp, Homo sapiens
cgcggcctcgggtaccgctcaccctccacctgagggatgagacgggaaagcagcccggcctgggggtcccagctctcccaggaccctggaattggggggctgtcgtgaccacccacgcgggggtgcctgacggggccgcgtaggggcttcagggttcgccagacctggacaccggggatcaagttgaggcagagtctgcagaaaggccctacttttcatcagatttccaaaggaaccccttccatataggacccactctaatcatggaaaataacgattctcgagctctgaccgcaaacatcccttttagattgtttttgtttgagtctctctctgtcgcccaggctggagtgcagtggcgctatctcagttcactgcaacctccatctcccgggttcaagcgattctcctgtctcagcctcccgagttgctgggattacagatgtgctaccaccatgtcgggctaatttttgtattttttgtagagacagggttccaccacgttgaccaggtggtcaactcctgaactcacgtgatctgccctcctctgcctcccaaagtgcggggattacaggcgtcagctactgcccccagccatcccttttagttctgtcagcaacctgtgtgtgtaggtcctgttatcatctctgtttgcccagtgaggaagcaaagcccagagcccttcagtaaattacccgggaattaacagggggttaataacaaagatgacattcatccacttccttttccttttccatggtggggtgagctggccttggaaccagggcaggggcttcccaggccaaagggcttatccagccccagggctgcccttcagatggttttatcgtctctccacagggccctgaaaaaaactctcttcctgtgtctggccagaggtatagagagagacaggttcaactctaaggcctgaaaaggaacaaggcccaccggaagcaatggccactgtccctggcctccagcccctgccaaccttggagcaggacctggaacaggaagagatcctgattgtgaaggtggaggaggacttctgcttggaagaggagccctccgtgga

SEQ ID NO: 18844 - DNA, 1048 bp, Homo sapiens
taaaaatacaaaaaattagctgggcatggtggcaggcacctttaatctcagctactcaggaggctgaggcagagaattgcttgaacctgggaggcgggaggttgcagtgagcctagatcgcaccactgcactccagcctgggcaacagagtgagactccatcgcaaaaaaaaaaaaaaaaaaacgaaagctgctacagccttctcaggcttattgttttcatggtatgtatatttttccatccatttcctctcttatttatgtctaaattatggctttgatagacagtatgtaattggggtttggatttttatccattttgacagtatctgccttttaattagcatgtctattagcatttttcaaatgatgttttaagcacttaacacgtgcactttttttatatttgagacacagtctcactctcttgcccaggtaaagtgcagtggcacaattatagctcactgcagccttgacttcctaggctcaagcaatcctcccacctcagcctcccgagtagctgggactataggcgtgcacaactgtatccaacttcacatacactttcgaaaagctttttagggtagaagttccgctttcttagctcatcttcatagaatttgaatctaaaaaaaaaacaactgaaaaacatttgtctttaccatattattataataaaaatgacactttgtgaaacagcagctgtatttttaaagtactatcagctgatacacttttattttatgttattttattttattttattttattttagagaccgagtttcacccttgttgcccaagctggagtgcaatggtgtaatctcggctcactgcaacctctgcctcctgggttcaagtgattctcctgcctcagcctccacagtagctgggattacaggtgcctgccagtactcctggctaactttttgtatttttagtagagatacggtttcaccatgttggccaggttggtctcaaactcctgacctcaggtgatccacccacctcagcctacctaagtgctgggattacaggcgtgagccatgg

SEQ ID NO: 18845 - DNA, 1049 bp, Homo sapiens
aggcagcagcaagaccctgtctcagaaaagaaaaaggacaaaaaaatggctcacaaaagaggaaacaaaggcataaaaaatattcggtaatcaggagtaattaaaatatatcaaacaaggccgggtgcggtggctcatgcctataatcccagcactttggaaggcagagactgggggataacgaggtcaggagatcgagacctcggtgaaaccccgtctctactaaaaatacgaaaaattagccgggcacagtggcgggcgcctgtagtcccagctactcgggaggctgaggcaggagaatggcgtgaacctgggaggcagagcttgcagtgagctgagatcgtgccactgcactccatcctgggcgacagcgagactctgtctcaaaaaaaaaaaatgaaacagttgccttttttgactggttaaatgatcaggtaggaagaattttacatgtatttatgggcacttatttgtagtttttaaattacatacttggtactggcataataggagagcttgctggtgatctttatgaagtgacatagtctcattgggaagtcatctgtctacatttgttgagagccttaaaacttttagaacctgttttattctatttgtggagacctgaatttaaaacatagagaagttttgtacgtaaagatgtttggtgatgtgattttacaattgaaagtgggctaagtgtcaaactacaggtcagccattaggtaaatcacagtatatctctcagtgaagttttccatagtcaaccactataaaccataattatgccagaattatgaaagacaacaatatagataaatgtgaatcataaacaacattaaaagtctgatagaaaatagtaggcccatccagcctgggcaacatggtgaaaccctgtctctacagaaaaaaaaaaaaatcacacatggggcatgcacctatagtcccagctattcaggaggctgaggcaggaggatcacttgagtccaggaggttgaggctgcagtgagccatgattgcaccactgtgctccagcctgggtgacagag

SEQ ID NO: 18846 - DNA, 1048 bp, Homo sapiens
gaggtggaaggatcacttgagcccaggagtttgaggctgcggtgagctatgatcacccccctgcactccagcctgggagacagcataatgctgtcactaaaaaaagaaaaaaggctgggtgcagtggctcacgcccataatcctaacactttgggaggctgaggtgagaggattgcctgataccaaaagttcgagaccagcctagccaacatagcaagacccccccatctctctttttaaataaataaataaataaaaattaaaaactataaaaacaagaacatgatatgatcagaaatgaggaaaggcattcttttgcaccattgtcacttgcaaagagaggtgaagaagtacaagaatcaagaaaagacactttggcaagctaaaagtcatccgtaaaagcatgttgaaatagcagcagtggcatccagcccccagctctcagggttgcaggaaggagcaggcggagtatgtgaatgtgtgtggaggagactggccaatgagtgcttctgtcacaaggattgggaaggacctgtggaaggaagggctgggggaacagtgagaggtttgggggaaggcaggcatggggagaaggatttgtggactgggaaagattgggttccaagctcaggtgaaggacttagctttggagaggagaggcaaggcccattctgttgataacgggaagacgggaaaggtagggtgtgggtagagaattgaagttgggaaagagaggtgaaaattgccgtcctggttcatgcagtcaaggaagttgcctggctctaaacacagtgcttcagtgacttgtggtggattctgttgggctttaaagtagtatccagagccgggtgcagtggttcacacctgcaaccccagcactttgggaggctgaggtgggcggatcccttaagcccaggagtccaagaccagcctgggtaacatggcaaaagcccatctccacaaaaaattaggtgtgctgacagatgcctgtagtctcagctacccaggaggctgagggggaaggattacttgagcccaggaggtcgag

SEQ ID NO: 18847 - DNA, 1653 bp, Homo sapiens
tttggagttcactaaagtataaaacaaatagttgatgttaacttcccactttgggtctaacctttgaggggattattatgaagactggttaagcctgcagtagcacaagtagtctctttcctcctccttcattagccagctgtctgttaccaggcaatcacgaagaagttgaaaatatgtgaagaggtatgtaggctccatgcctccccattttaattttcacctggggccttaaactgcaggcagactgacttgatgatgtgtgcttcctgtccgtaggaaactggctccacctccatccaggcagctgacagcacagccgtgaatggcagcatcacacccacagacaaaaagtaggacctttgatgaaaaggcctccagtggctctggttctgctgagggtggggagaaggtgaccccaggggggttctttaagggttgtgtcccagccattgctggcattgaatggaaaaggtggggggatgttgtaactcttatcgataaagacaggagtcaaaagctgtgtaaatctgtggtcgggtctcccttgggcataagctgagggatttttttggctccagaactcaagagcaaggagcacttggctcagtggttctcagactttcctgtgcctgacagtcacctggaaggtggcttctcagtcaatatgtccgggtggggcccaagaatttgtatttttaaccagttcccaggtatactgctgctgctggtcagagctacgctgtgagaaccactggctgagtagaatcatgatgaggccccaaaattggccatggtggggcaggtgggggaagggagatgaaagtgcttggggatcctcactgagcacttgctggctgtcctgcaccctgcccggtgtgggtggggcgatcctggacatgctcccagacccaacttgcgcccagccttgcctctgtgcctgctctgtaggcatgtctcctccgcagagtcttgttggcaaaaagataccttttctaggaaaacacgttctctggagcaagttagctaaagtcagtttccagtttgtacctttcacatggtcttccccagactaaaaacagtgcatcttttacatgatatttttgtactgtttaaatcactaatgctaccagttatttttggtgaacttgtctctgtagagtggaggagataagggcatattaggtgcaaacaaaggggaggaggattgtgttaaaaaaataaaaataaaaaaatgatcaggatagggtgaggacagagtcctgatgtttttacccaacacatttattggcccattagtcaaacttttaataaaagagtatgaagccagcatcaaaaccaaccagttttgttgttgcccaacccaccttaatccacatttccattttgtctgagacacagtgtgaaggactctcagttgccatattaaaaatccagaaccttgacctgggcatggtggctcatggctgttatcccagcactttgggaggccaaggtgggcggattacctgaggtcaggagttcaagaccagcctggccaacatggtgaaaccctgtctctacaaaaattagccaggcatgatggtgggtgcctttaatcccagctacttgggaggctgaggtgggagaatcgcttgaacccgggaggtggag

SEQ ID NO: 18848 - DNA, 1065 bp, Homo sapiens
agcattttcggaggctgaggtgagcagattgcttgagcttaggagttgaagactagctctacaaaaactaaaaaattggccaggcatggtagctcacacctgtaatcctagcactttgggaggccagtgcaggaggatcccctgagcccaggagttctagaccagcctgggcaacatagggaaaccccatctctattaaaattttttttgctgggtgcagtggctcacacctgtaatcccagcactttgggaggccgaggcaggtggttcacctcaggtcgggagttcgagaccagcctgaccaacatggagaaaccccgtctctactaaaaatacaaaaattacccgagtgtggtggcacgctcctgtaattccaactactcgggaggatgaggcaggagaatcacgtgaacccaggaggcagaggttgcagtgagccgagattgcgccactgcactccagcctgggcgacagagtgagactccgtctcaaagaaaaaaaaaaatttaatataaatgaattaaaaattagctggggttggtggtgtgtgcctgtagtcccccctactcagaaagctgagatgagaagatcacttgaacccaggaggtggaggttacagtgagccaagattatgccactgcactttagtctgggtgacacagcgagaccctgtctcaaaaaaaacaacaaaaaaagaaacaaaaagtactagttgggcatagtggtacacacctgtagtcccacctacttgggaagctggggtgggaggatcacttgagcccaggaggtcaaggctgtagtgacctacaattccaccactgcactccagcctgggcaacagtgtgagaccctatctccaaaaaaagagagaagctggaaatacaggtttttatgtgaaatatcccaattttaaatgtgcttagttcaaaaatatgtcttggggccatagaaacatctctgtgggctgccagtgtgaggcctctggtgagagacagcccttctcactgttagatgacctcaggctgagggagtggtgagagcaagggtggcagtgctgtccctgca

SEQ ID NO: 18849 - DNA, 1032 bp, Homo sapiens
ccagggggcgcccacaaccccttcaaggactgaagcctcaagctgcccggggtggcacgtcgcgaaagcttgtttccccacggtctggcttctgcaggggaaatttcaaggccactggcgtggaccatctgggtgtcctcagcccctgtggggcagccaagttcctgatagcacttgtgcctcagcccctcacctggccacctgccagggcacctgcaaccctagcaataccatgctcgctggagaggctcagctgcctgcttctggcctgcctgtgtctgctgccgagaagcccgtgcccccgggagggctgccgcactgccaaagagtctccctcctcctggggaaggggctgccaacgaaccagactcagtgaccacgtcatgacagaacagcacatcctggccagcacccctggctggagtgggttaaagggacgagtctgccttcctggctgtgacacgggaccccttttctacagacctcatcactggatttgccaactagaattcgatttcctgtcataggaagctccttggaagaagggatggggggatgagatcatgtttacagacctgttttgtcatcctgctgccaagaagttttttaatcacttgaataaattgatataataaaaggagccaccaggtggtgtgtggattctgaatcatggacttaggtcactgctagggcttagcaggtgtggcttatcctgaaacagaagtcacaacggcatcctggagccaagtcctgttccctgcttgtttaatccagtgcttatcaaactttaatatgccacaggtcacgaggagatcttgttaaaatgcagatttgggcctggggtgaggccagcaattctgcgtttccaacaagctctctgacgatgctgatgcttcaggtccccagaccacacttcttgtctttcttagaaacagggtctcgctctgttgccctggctggagtgcaatggcacgatctcggctcactgcaattttgacctcctgggctcaagtgattctcccacctcagtct

SEQ ID NO: 18850 - DNA, 1033 bp, Homo sapiens
ccaggagtttaagaccagcctgggcaacatattgaaaccctgtctctacaaaaaatgagctggttgtggtggcacgtggccgtagtcccacaacccaggaggctggggtgggcggatcacctgagcccaggaggttgagaggcttcagtgagccatgatcgcgccactgcattccagcctaggtgaccaagtgagatcctatctgaaaaaaaaaaaaaaaaaaaaaaaaagccatccttgtggccattcctggaccgtctggagaccctgctctgtgccagtgcctgtgctgggcccttgggacacagaggggccctgtgctgccctcagactcctcacccctacaggccatgagcttccagtggcatctctgaaggattgggtgcacttggggtgttgagggggcttgggtggagaaagaagggggcccccattttgggtctgtgccattcacccaggggaaaatgggtgtgacaaatggaagatgcaaggaggacgacgatggtgacaatgacagtgatgatgatgatgacgcggcatgattcctgagcgggccctaccctttccaccgcctttcctgcctcccattcctagtcccccacccatcacatggtttccccactggcctcagtcccacccgggccctcagggcctttgcacaggctgttccctatacctggaacagcctccctccgttttgcaaatggctacccctttcttgctgttcagggtcctgcaggcaccctgattagcgtgtgtattcccacccttctccccctatccccttctgtctgtttctttacagcccttttgggatctgtaatgatctggtttatgtttatttaactgtttattctctggcttcaagttcagccctttgtctctggggccttgaacagggctcggtattgggcacgtgtctgttgagtgcctttatgatgacaattataacaacagtcgtagctgacaattactgctcactggacctgggcggacagtgtgcccagtgcttagtgtgtattattttgttttc

SEQ ID NO: 18851 - DNA, 1128 bp, Homo sapiens
aactgtcagcgcaatgggggagaagaggttagtggatcgggggtccctggctcaaggtctctgggctgtccctagtgggcacgagtggctcggctgccttcctggggtcccgtgcaccagccctgcagctagcaagtcttgtgtttaggctcgtctgacctatttccttcagttatactttcaatgaccttttgtgcatctgttaaggcaaaacagagaaactcacaacctaataaatagcgctcttcccttcattgtgtgcattgtcggcccttcctcgggttctcctcctccagctgcctgggggctttttaataaacttgtctcacctcgtcagccactactgtctgcagcccctttgcaaagtggatgcactgaatacagtccggacagacattgtgggggtctttttattaaatcaagaacattgttaaattcaattaaggtttactctgctgccttggcagacttacgatctcaacagttcatacgagcaggtgaaaggattataaatagaatttcgttaaagtggaacagacgacaagaaagccttttagcaagagggcatgctcactagtggttagtaagctgtcgactttgtaaaaaagttaaaaatgaaaaaaaaaggaaaaatgaattgtatatttaatgaatgaacatgtacaatttgccactgggaggaggttcctttttgttgggtgagtctgcaagtgaatttcactgatgttgatattcattgtgtgtagttttatttcggtcccagccccgtttccttttattttggagctaatgccagctgcgtgtctagttttgagtgcagtaaaatagaatcagcaaatcactcttatttttcatccttttccggtattttttgggttgtttctgtgggagcagtgtacaccaactcttcctgtatattgcctttttgctggaaaatgttgtatgttgaataaaattttctataaaaattataattcagtgagttacgtggaagtggaggaagatttctactctccctggaaacaggcctgggaaaccttggcatttgtaacaaggtttcactgagatgtacttttccttctaattccgttttgcgggggcagggtctcttgtttctttttttttttt

SEQ ID NO: 18852 - DNA, 1130 bp, Homo sapiens
cctctgggaccccttgggtcactgcacagcagggcagctgcccagagagaagctgctccacgtgctctcctgagcttggtcacagtcccagagtagttcctgatacacaaaccgggactgttgtgccttgagctgccctgggcagctgcctgagtatttgtaacacctggccctgttggtggcgggcagagccagttcaggagtaaagacttggttgtcagaagtcaggccaccagacagagaagtgattaagtgcacgtcaggttgcttcaaaaagtactgagggggttggagaaagggaggaggtcatctcaccgttggctgtctagctaggtccaatttataggtgagttaagttattgcagtgaaacacagtctccttttcttttttcttttcctttttttttttttttgagacagagtttcactcttgttgcccaggcttgagtgcagtggcgcgatctctgctcacctcaacctctgcctcctggattcaagtgattctcctgcctcagccttcctagtagctgggattacaggcatgtgccaccacacccagctaattttgtatttttagtagagacagggtttctccgtgttggtcaggctggtctcggaactcctgacctcaggtgatccgcccgcctcggcctcccaaagtgcatgagccaccgtgccctgcccacagcctccttttctaaataaatacctgatttaggttttggtcattttatgcggtttttcttcattggtcttctgaagaagtttctttggaacaaaaaatgagttttcagcgttttagtgtttaaatgtgttcagtgtggactcattttttgtcagttgtcaagtcttttctgtgctttcatacatattttcagatagtcgcagaggaccagttttgtggccaccaagggaatgacatgtacgatgaagaaaaagtgaaatacactgtgttcaaagtattgaagaactcctcgcttgctgagtttgttcagagcctctctcagaccatggtgcgtaccggtcccgtggatataccccaccgtggctcccaacgtccaccttccttccgtgtcactagaaaatactgattgcctttgggggtaggtgctgtgtccagccactgccta

SEQ ID NO: 18853 - DNA, 1011 bp, Homo sapiens
gagggagagggggatgttgggagatggagtgcagctggtttatcctgtagaagcacatccagcagtccggagggtcttgtggggttttaggcatcttgtcctttccccgttcctcaccttactggtgtcactgctccagttttccctcagtttctcctggtcacaagtgggatttcttagtaagttggactgtgtttaggttgtgtttctttatttttaaatgtatttttaatgaatttagttttctgaggatcacgactttagaatgagtagtgtgttctctagggttgtgtcccccaggtttctgggcatctgagagagcagtgagcatggtgggcgaccaggtggccagcccccgcttggatgaagggaaatgggctgtttctggctgctggtctggctggtctgttggatctgcagtgtcctcatggatccagtgatccagggtctgttttgtaatcttataaccttgactcattgactcaactaatttataattaaaaatgtcagtctggcctgtgcttacaaagcctgccagtgtatatagttcatggtgcctgtgtacccattttgtagtcagctgtcagctccaaatgtactcttctgctaggtcagtccagttggactgagggactgaggtatagatcagaaagttgcttttttttctgagacggagactcggtctgttccccaggctagagtgcagtggcgcgatctcgactcactgcaacctctgcctcctgggttcaagtgattcttctacctcagcctcccaagtagctgggactacaggcgcccgccactatgcccaactaatttttgtatttttagtagagatggggtttcaccatattggccaggcaggtctcaaacccctgaccttgtgatccgcctgcctcggcctcccaaagtgctgggattacaggcatgagccacttgctcatccagaaagttgctttttaatgagaacttggtgtgatgaagaaatattctggtctgttgacgagaatt

SEQ ID NO: 18854 - DNA, 1094 bp, Homo sapiens
cttgatatttgggttggtctccatttgaggtggttaggcataaggcagatcgaccattcttaatgcctgtttgcatttggaggaagaggattactggcctgtagggtgtgcgtatgtccagcttgatggatcaagttagcgagattcccaaagtggtttatcaattgcacagtcatcaggaaggtggcagagttgcagttgctccacacccacactggagctgtcagttgccagactttgaaagattttggtgggagtatagtgctatctgcattttagtttgtatttccttgaagatcagtgaggttgttcttaccttttcaaatgcttattggcaatttggatgtcttcctttataaaatgcttgtttaaatactttaacaattttagtattggcttcttttctttttccttaactgatttatagtcattcctttaaagaaatatttaaaataagggggaggatgggtgtggtcgctcatgcctgtaatttcagcactttgggaggctgagtcgggaggattgcttgaacccaggagtttgaggccagcctgggcaacatagtgagactccatctctacaaattagctgggcgtggtggcatgcacctgtagtcccagctacttgaggctgaggtgggaggatagcttgagccctggagtttaagtctgcagcgagccatgattgtgccactgcactgcagcctgggcaacagagcaagtatctctctcaagaaagtaaaataaaataaaaagagtgaggaggggaagtgctttatgttgacccacatatttacagcttgcaatgctcctccgtttttaatttggatatggattctcgttaggaatcatttagtgcgggtcggctgagatgagttttttcaccttgcatgcctagaaagattttatttcatctgcagttgtgaaagacattttaactcggtgtagacttctaggttggcaggttccttccttcggtctgttagacgttctaccgtcttcttgctcgcctcatttctgagaagtgggctgtagtgtccttactctttctgttcatctgtttctctgccccaagcccccatattcttcgcttcg

SEQ ID NO: 18855 - DNA, 1030 bp, Homo sapiens
gtttcaacttctaaggaattaaaaaatgaaaccatgagtgaaatcactacagaatacactgggggagccccaaacacccatttctctattaaaggtaaaaatgcctccatcctacctttaaccccaacccgaaaggagagagcaatgaaatcataaatgggaattttggtgtgctatgtttactgtctttaaaaatgtataacatctggtaaataatgtcaactaaggctcagattattcttttaaacaggtcatggtcttgccatgcacaagcagtgctgaagataataaattacagagatgatgaaaagtcgttcagtcgtcgtattagtcatttgttcttccataaagaaaatgattggggattttccaattttatggcctggagtgtaagtaacagtgtatttagtctgaacaattggtgcattactgcttgttgttcccttaactttttgatttttcaagtcctttattgattttagagtcagatttttactttctaaattggacaagtgtctttgaaaacatgttttctccagtttcgtatcttacgtttttagcagctttctggattcacgtctcactttttagtcagacattcaaagggagttcccagtgggctaaatttcctttaaaagacataatgctgtttgaggtcctttcatgattcaggcatagtactgagtggttccatgtgactccagtaatcattcagttcactttggctgctttttgcagaggtggtaaccagtggaacaatcttaggaatgttacttcttactatgctaagtcacttatcattgcattctccagcccctcccctgcttagaggggcacagatttctcctgtccatgctgtggcactgagcccctgggtacctctgggatacctctgaggtgccaagcatttgctgtatttgttgtgagaccactgttaaaagaaaattgaaacagtctaaaattagcaaaaaagttgggatgtatttaaaaaaaaagtattttcatctctattaagtacagggcactaatg

SEQ ID NO: 18856 - DNA, 1053 bp, Homo sapiens
tgaaggatgggaggatgttcttaggcactctttacccaagcctacaagtctcattttgtgccttaggagcctggtggtcagggatgtcaaaatagcacctgattctaagccgggaacagccttccaggcactgcctgtagagcttggcccttggtgtggccctgggactcctgccagtcagtgagctgtgtgcagactataatgagataggtacagaaagtgaaaggaagcgtttagaagcttgtgtagcatgttgactttgctgtggcaatttcatgatgctttataaaagtattggtcaataacagattggtgtgggtgtgggaggactgtgccttcgcaggagtcgtttgggaagcagtaagatgctgcagggtttgtcaaaggtgattgaccgatggccacatgcaaatgaatagtcactgtcatcagtgaaagattgaattttaaatggagaccttcagttggacctctgctaagaggcactgtgttgtcagaaacttaaatatcttaaatcagcctttggtcttgttatcatttaacaatttatactactcatgtgggaaaaaataccagttcttaaaaaaaaaattattccccctagggtgtccaggctagtatttttgcaaaaatcgtgaaccaatgaggttagcatttattatcaggctactgttgtagcccttgtcttgcctctgagcagtgctgagcttccaggggaatggctgtttccctggctctcaagtcctgcctgtgtgttccgtgctctgtaaagtcagcccaagtcccatgtcgtggtctttacccccagaagtcccgtccttgaacagatatgagccatgtcgttccttctctccaaggtctctccactcacttggtgcctggggtccttgggaattcagctttagtaaagtagacattgttctcatgtggaactcagtctgacagggatggcaagtgtatggttagcactctgagttttggacttcataaggaagaattaatccattcagaaactgtatgttatctcagtcttcgggttttaataaattggaa

SEQ ID NO: 18857 - DNA, 1048 bp, Homo sapiens
caataaaccagcacatggtaatgttgtataaaaaataattattttccaagtaatgttgtataaaaaataattattttccaaaagtgtattgagaggaatggcattgctttacatttttgtaaatttctttattgtctgttgtaatagaagacttcatacctgcttgtgcattcagtcagctgcagtgtaattttaattaaaatatgaaaaaaccaatcttacagagatatactgaaaaaaacaggaggaatgctttagtagcctttttgaatgattgactattctctgataactacagcaaagcaaaacaagtggtaacttaatgaaggttaattcaccccgccccattaccttaagttcgtcatgcactttcagtggattttttccagttgcatttattggccgtttggaaaatatggattcatcaagttttacaggtctgctaaatgttgatacattttattatacagttatattaaaaagttgagtttatatgcccagacattggcgttgttggaaacgcctgctgctgtttgctctgtaggtggagccttctgcgtgctggcagatggctgagtggttgagcgtgagtggctgtgtggaggccgcctttgcatctgctggtgtgtggggctggggtataggccagtgaccagattattggaggtgtgcctttgccatgcctgtatgctcttcagagtgtcagttcagctattctgactttttagttgagttttgtccagctgttgagttttgtgaactgttgtttatatatttgagatttgagtctttgtaagatacgcgatttgcagatattttctgctggtctgtagctcgtgtgtattcacttaacagcttctttctggagcataagtctttctggagcaaagttgatcaacagtttttttctttatttagagatgcggtttcaccatattggccaggctggtcttgaactcctggccacaagtgatcctcctgcctcagcctctcaaagtgctgggattaccggcttaagccaccgccgcctgccatttttttgttgttg

SEQ ID NO: 18858 - DNA, 1016 bp, Homo sapiens
gctctaggacccggaagcggcagggaaacatttccccctagaacctccagaaggaatgtggccctgctggcaccttggttttagcccggtgagacccatttcagacttctgaccttcagagctgtgaaagaacaaggtgtgtcaacttacctgggtcacccagagcaagtggcagagctgggattggaacacatgtggtccggcttcaccatagccagtaagtgctattggtcataaagtagtggttactgaattttaattaatatttttttggagacaggctctccctcgtgcccaggctggaattcagtggcgcaatcaccgttaactatagcctcaaactcctggggctcaggagtcctcccacctcagcctccctagtgactgggactacaggcacaccacacctggccattttttttcttttttgtatagacgggggggtctacttttttatttaaacaccctcctgctttcatccattttcctacctcaccacccaaaagtcgtgaactgcagttgggcttcccagtctgaacgttgtggtgtggttccccacatgctttgaatatagaaagtagcccactgcctgaatagtccagggccactgatacactgcaggtggcatttggtggcataaaaagagatgaagcaaaataacgcacgttggtagattgcttcctttgtgaatcaggtgttcagtaacaagttttaatgagatcctgagctgaatgaatcattcctaaagcaaaccatgctgggctgtatgtatctgagtgtatggagagatttaaatgtgaaaaggcctgagtcttgtctgcgagggctcagggtgcaggtgcacagcgtctcagcatacccaggtctctagatgtacagagttagatattacagcattttagacctaagtatagcctcatgcgctcaggtcctcagtcatcctcatgcccacaagccctctgcatttacagatgagcaaataggatatccaggggctctctccaagcctgcagagc

SEQ ID NO: 18859 - DNA, 1053 bp, Homo sapiens
aggaaatacggtgattggcaaccatgatggtggggctacttgggggctgttggaaattgccagcgaaggtggttggcctagagtagctcacacccatttggaaggaaagccaatgacagtctcccccaccagggcccttgttgtctctctgaacacacaggagaacagcacgggatgttccccatcccaaagctgaaacggcacatttgctcaatatttgtcatcagctaaaacaaacagaccagaggaaccaggaagaaacggcttctctgtgtttgtagaaggacaatagttaatttcaccagggtcttgaacacatgtaagagaagagaggtgttacttcaccttggcacagggttactttaaagcacagattttttatgcttattttttatttttttggccaggaagggaagttcaattgctgtggtctgccattgtcctatccagaaagaaatgatggcaagccagatgtggtggcttatgcttgtaagcctggcactttgcgggactgaggtaggaggattacctgagctcaggagttcaagaccagcttgggcaatgtagtgtgaccttgtctctacaaaaaattttaaaaattagctaggtgaggtggcacacttgtcgccccaactactcagcaggctgaggtgggaggatcgcttgagcccaggagattgaggctgaagtgagctgtgactgtgccactgcactccagcaagagaggaagacactgtctcagaaaggaaaggaggctgggtgcggtggcctgcaatcccagcactttgggagccaaggcaggcagatcacttgaggtcaggagtatgagaccagcctaactgacatggtaaaaccctgtctctactaaaaatacaaaaaaattagccaggcatggtggcgtgtgcctatagtcccagctacttggaggctgaggcaggggaatcattttaacccgggaggcggaggttgcagtgagctgagatcatggcattacactccagcttgggtgacagagtgagactccatctgaaaaaaacaaaaaaaaaaaggggg

SEQ ID NO: 18860 - DNA, 1035 bp, Homo sapiens
atgcatttgggaagttggaaagaaatgacaaaatcagggagaaaacatccaagcttcttacctgtagatagaatcagccctcacttggtgcttattaccagttattcaagaacaataacaacaacaaaattagtagacatccaagaagcacatattaggaccaaagatagcatcaactgtatttgaaggaactgtagtttgcgcattttatgacatttttataaagtactgtaattctttcattgaggggctatgtgatggagacagactaactcattttgttatttgcattaaaattattttgggtctctgttcaaatgagtttggagaatgcttgacttgttggtctgtgtgaatgtgtatatatatatacctgaatacaggaacatcggagacctattcactcccacacactctgctatagtttgcgtgcttttgtggacacccctcatgaacaggctggcgctctaggacgctctgtgttcactgatgatgaagaaacctagaactccaagcctgtttgtaaacacactaaacacagtggcctagatagaaactgtatcgtagtttaaaatctgcctcgcgggatgttactaaactcgctaatagtttaaaggttacttacaatagagcaagttggacaattttgtggtgttggggaaatgttagggcaaggcctagaggttcattttgaatcttggtttgtgactttagggtagttagaaactttctacttaatgtacctttaaaatagtccattttctatgttttgtataatctgaaactgtacatggaaaataaagtttaaaaccagattgcccagagcaagactctaatgttcccaacggtgatgacatctagggcagaatgctgccattttgaggggcagggggtcagctgatttctcatcaagataataatgtatggtttttacactaagcaactgataaatggacaatttatcactggacaatctccctctgcttctttaatggggccagctttgcagccctgcagcctgggtagtcgcacaca

SEQ ID NO: 18861 - DNA, 1051 bp, Homo sapiens
tggcaaaatcttgtctctacaacaaaataataataaacaaagaataaaagctgaagtttgtcttcaactctggccgtatgcccctgggctacccagggtgcactgtggtccatgatttattgaaaattcacctttcttcctgacaggtctgtgtgtcatgattgcggcctccatttatacagacaggcgtgaagacattcacgacaaaaacgcgaaattctatcccgtgaccagagaaggcagctacggctactcctacatcctggcgtgggtggccttcgcctgcaccttcatcagcggcatgatgtacctgatactgaggaagcgcaaatagagttccggagctgggttgcttctgctgcagtacagaatccacattcagataaccattttgtatataatcattattttttgaggtttttctagcaaacgtattgtttcctttaaaagccaaaaaaaaaaaaaaaaaaaaaaaaaaaagaaaaaagaaaaaaaaaatccaaaagagagaagagtttttgcattcttgagatcagagaatagactatgaaggctggtattcagaactgctgcccactcaaaagtctcaacaagacacaagcaaaaatccagcaatgctcaaatccaaaagcactcggcaggacatttcttaaccatggggctgtgatgggaggagaggagaggctgggaaagccgggtctctggggacgtgcttcctatgggtttcagctggcccaagcccctcccgaatctctctgctagtggtgggtggaagagggtgaggtggggtataggagaagaatgacagcttcctgagaggtttcacccaagttccaagtgagaagcaggtgtagtccctggcattctgtctgtatccaaaccagagcccagccatccctccggtatcggggtgggtcagaaaaagtctcacctcaatttgccgacagtgtcacctgcttgccttaggaatggtcatccttaacctgcgtgccagatttagactcgtctttaggcaaaacctacagcgccccccccctcaccccagacctac

SEQ ID NO: 18862 - DNA, 1075 bp, Homo sapiens
ctcacgcctgtaatcccagcactttgggaggccgaggcaggcggatcacctgaggtcaggagttcgagaccagcctggccaacatagtgaaaccctgtctgtactaaaaatacaaaaattagctgggcgtggtgacacgtgcctgtagtcccagctactcaggaggctgaggcaggagaatcacttgaacctgggaggcagaggatgcagtgggctgagatcgcaccactgtactccagcctgggcaacagagtgagactctgtctcaaaaaaaaaaaaaaaaaaaagaaaaagaaaaaaaaagaaaagaaaagaaaagaaagaaaatgtccttggtttttcagaaatacacactaaagcacttagttgtatggtttaggcaacttactctcaagtggttcagaaaaagagagacagtgtatgtgtgtgtgtgtgtgtgtgagtgtgtgtgtgtgcgtgcattaatccatttaaaactggggctacaatttcatcccagtgaacagaaggtctgattcgcactgtacttcaaaacatgaaactacaaattaatttttttccaaaaaaatgtagtaactatctcgtcacaaattattggaataaaagaagaatgaaccaagtgttgatattaggaggctgcatcttccaaccagatcatttgatgtgacatcttcccttgacatttgagttttgttgaccaagatgatggttataaaatactcaaagattttatcaatttttcccagtgtgacttttaattgtttgatagttaaagcattcttttgaatgctttttcctcatttattgggaacttctccagctcagacaagtcctcatgtattcatgccctcagtggcttttcatctgatctcccatgacatttttatcaactttggacaactgtagttctgttgtaagacttccaatttcactttgcaattgcttcctcttgtatgtcactcaaactgtcctgccaaagtaaagcattaccctgaaatctcagtggtttaacatccagaggtttattaattccccaatcataatatctgtccaaggtgtgaggcttcaacctact

SEQ ID NO: 18863 - DNA, 1026 bp, Homo sapiens
aaagccaccattttttcagggacactttctagccctaagttaagtcaggttttctcctctgccattagttctgatggtatttgtttaagcccagcaagagctggcaggcacagggaccatcgcttcctatctgatagttcaccagggcaccccggtaaccatcgcgatgtatccccagtgtctcagcagacccaggggaggagtgggagaagggaggcttgggtgagcattgaaggggaggctgcaagggcagggggtttggaagccctgagaagtcactagggtcagggcggctgctccctctccctcctgcagttggctctgtctggagccacatcaggcccgagtggcatgatcagcatccgtttataccagtgtgacatggggtcacattcttcccagaccagagcctgagagaggcttaatcatcgacacacccagagtggggtctgcatgcacgcaggcatttggaaatgactcctgtagcatacaggcgatgttaaagactgtattatgctcgtgttcatttcagtgtattacttaaatgtcccttggcaagtgatgctgattttccatttacagcgtaatgcatgtttaaaaatgaatcgggctgggtgtggtggctcatgcctgtaaactcagcactttgggaggttgaggtgagaggatcacttgagcccaggagttcaagactagttcaaggaacatagggagacccccatctgtacaaaaaataaaaaaattacccaggtatggtggcatgcacctgtaggaggctgaggcaaaaggatcacctgagcccaggaggtcaaggctgcagcaagctgtgatcatgccactgcattccagcctgggcagcagagcgagaccctgttttaaaaacaaaaaacaaaacagaataaatattttaaaaatgaatcaatttaagcttaatgtgttttaaggaaaactgttgaatagtgagtagaacaggtggtgcacccacagaaatgatcacagtggtgtgattgacactgagggcctacc

SEQ ID NO: 18864 - DNA, 1076 bp, Homo sapiens
cgaggcgatcaacacatttctgctgaatgagtgggagaatcactcctcaaaaggaagaaaattgtgtcaagaaagtagctggcagagccaggatgtaagtccgaagactccccgacttcgaagcttatcccgtttttctctgcggtctgttattgtcactcaaacctctggccccgaccctcttaattaatgtccctttcgactccgcgccggtcagtctccaccctccatccgcgccaggtccttcgcgctcgccttctaaaggcctcgttcctgtcagtcattccaagctccgccctcaccctgcccactttccacgccccgccccttctgggccccacccctctccgaatacaataccttctagcctgccgctgtcagtcattctgcagatcccgccccctccctcccacgccccgccttttccgggcctgcgcctctaagttcctgttgaggccttgcccttttctcacccgtgtccggagtggcccccgctccagaagcgcacagccgctggttggggcatccctgacatgaagcccctctgcccgcctgggcgctgtcggcccctggacagtctgcgcagagacaagaccacagttagagcagctcccgacactttcgccccgcgacccacgccccctccgcgagcttaccgtgaggcacctcctccattccgtcgcctttgccgccttcgtggtcaccggaacccgctgtcgtacatttccgccttgtgggcacaatctgattctccgaccgcgcgaaataagtctcggaaagggggctgtgcgcacgcgcgaaccttgggccgaaagactgggactcaacgtctgttccttttcagagatttcctatcataaatacttctgcagtgcatctcctaagaacaaagccattcttcatgacatcagtgccattttcatacccaagagatttaatatcgatgcagtactagccaatgcagtattagccaatagacagtttatatttcaatttcagttgttagaccccctcccctgctggattcactcactgcctggagttatttctcttcggtctcctttaattcagatcag

SEQ ID NO: 18865 - DNA, 1067 bp, Homo sapiens
gtgaccagcactgggggcaggaagagaaaaagccagtcactggaccagctccagtttctgcagcatattcacaaccagcattagtagcagtgaaaatagcatgatgagtgtcactgatgccaacttcagctgtttactcgacaccaagcagccttttaacaggtcaggtgctgctgcgggtatgatttcagggccatgactttgccatgattcagcctcagaactcccttgcagggctgcatataaaagcagcaggtgcagtggctcacgcctgtaatcctaacactttggaggccgaggcgggtggatcacctaaggtcgggagtttgagaccagcctgaccaacatggagaaaccccgtctctactaaaaatacaaaattagccgggtgtgatggcacatgcctatactcccagctacttgagaggctgaggcaggagaattgcttgaactcgggaggcggagttgcagtgaactgagactgcactccagccttggcaacaagagcgaaactctgtctcgaaaaaaaaagaaaaaaataaataaatgcagcaggtttacactgctgccaagtggattcaggctaaatcaactcacatcacgggtcggccggtaccagtgcagaaactagatgggggttttgcaatctctgaaccctggagacccttcctccaccccacagggagagtaatctgaccatatttcatcgatgccaagacatatatgtcaccatttgaatatcattgagatcaggatgtgtcttataaccaatagcgtgtcacagtttgcattttggcctcatattggggtcttacaatggatggcatcttagattccatgaaatatgatgtttcttaaagggtaaatcaggctgggcatggtggctcacacccgtaatcccagcactttggaaggctgaggtgggtggatcgcttgggcccaggatttcaagaccagtctgggccacatggcgaagccctgtctctactgaaaacacaaaaatagcctggtgtggtggcgggcatctgtaatcccagctacttgggaggctgaggcatgagaatcac

SEQ ID NO: 18866 - DNA, 1077 bp, Homo sapiens
gggtgggtggatggatggataggagagggagtgggtgagtgggtagatggataggagggggaatgggtgagtaggtggatggatggataggagagggtagtgggtgggtggatggatggattggggggttggggggtggatggacggatgggggggtgggtggatggataggaggtggaagtgatgcgtggatggatggataggaggggggctgggggtgggtggatggatgggagggggagtgggtgaatggatgcgtaggaggggggttgggggtgggtgtataggaggggtgtggggagtgggcagatagatggataggagaggggagcgggtgggtggatggataggggaattgggggtgggtggataggagtgggggtgggggtggttggatggatgaatggatggataggagcagggagcaggtgggtggatggatgggagtggggatgggtagatggattgatggatgggaggaatggagacctgtatttgttgatggaattggcagagcttgctgacatattggactcaggtagtgatgagggatgtggaagcacgaatgattggcagcttgagctatcagggatgatggtgccagtacccaagatgaacaagagcaaattggacaaagggtagggcaatcacttccagtctttgtggccctccctcccctgaggacattttgcaaagtctggggagagctggcattatcatttctcatcttcttcccagagtaaggtcagtggcccatagcgtggggctatcttatgcctctttctggcctcaccctggttccatctgatttgcgatttcagaaattccagattcgcaggtggggcaggtggcctcctgcatgactgcgtgcacaggtgagtgattctctcaggacgcctgatcacacctctggtgaccaggagcctgagcccagtacagggcccaatgggagtgaagctgtaagatgggattagagacagccccagagggccctgactatgctcccaaagataccagttgggaggaccaaggccagttctggaaaggtcacccacagagttagagaaatgaatagca

SEQ ID NO: 18867 - DNA, 1028 bp, Homo sapiens
gagctcggtcagcgtgccacagtgcagcttttttgaaatggcagcagctctggattctttctacctcaaggagcagaccttttatcatgtggcatcagacagcatagaatgcagcaattttttaacttcctatagccccttcagctactacactgcatgttgcaggaccataagcaggggtgtgtcaggcttcatcgactctgaacaaggtgtctttgaagcccctactgttgcattttcttcccttgagaagaaatgtgaggttgatgccccaagctccgttcctcacattgaggagaacaggtatctctttccagaagtggacatgactagcacaaacttcacaggcctgagctgcagaaccaacaagactctcaacatctaccttttggattcaaatttgttttggttatatgcagagagactgggtgctccgagctccactcaggtgaaagaatttgcggcaattgttgacgtgaaagaagaatctcattacatcttggatccaaagcaagcactgatgaagctcaccctaggtactgcaggcagtttatttccccaagcattgtacattttgcttgacttcatatgggtaaattttattgatggctctcattacatttagttgtggggtgatgtcaccttcgtagctcattttaagtctttagaccaccatcagtcataattttcaaagaagctaattttgtctattaaatggaacagaaacttcctcactctgaattttggataagtttgtcatttagcccatggtgggggtaagagtcccactttctaaattggcgatttctgtcacatgtctaaggtagaaccagctgcaggcagtggggacttggggactagaacaggcagggaggtggagagctattctggtgggatgtcctaggggctgatgaaagtgagccttgacagcagctttgttctaaaggagcttaaagagaaagcagtggccgggcgcagtggctcacgcctgtaatcccagcactttgggaggccgaggcgggtggatc

SEQ ID NO: 18868 - DNA, 1035 bp, Homo sapiens
ggccatagccagtaagctactaagccctgatgttcttattacgtgatcagaatgaaaaggtctgttgaagtttttttattattttagatctgtccacctcaacttctagagagggaacaccgcttaacaacagtaattcttcccttttacttgtaagtgccacttcctcttttgtaaatacatcgcttgaattgaaaatagttacttaagtaaccgagttatttgaatgaacatgacagtctcccttaaattttgtgtgtgctgcaggaaattgtgttaaagtaagacttctggaacatctagtaataacggctctgtgtttaagacttgatctgtcatagcaaattaatcggtattgcagacaatgtaagaggctttagcacagcataaacaaatcaaggaaatataagatcggggcatgtaaagcgtgtgtacttttgcagtagaacttattacttataatatggaggatcaaaaaagtcggggggtgactagaaaccaaaagagagaaaaatgtagaaagagacagtttttaagatagaagagcattaaggatggagtagtactgacctcagtttatgaagattatcttatttttcagatgaattcagttcctttcttcagtgataatgcaatatttgttggctgttttttttttttttcttcttatttttcttgcagatgaatggaccaggtagtttgtttgcttcagagaatttcctgggaatttcaagtcagcctagaaatgactttggaaacttttttggaagtgcagttaccaaaccatcttcatcagtgactccaagacatcccctcgaaggaacccatgaattgagacaagcttgccagatctgttttgtaaaatcaggtcaggaccaaacaaacacgcagagagtattaaactacttgctcataaccttgaaagttcttaggaatttgtaaatacatgttaacaacatcagttattatggttcttcaatccctattttgaattcttcctaaacaagtagcagttactgatttagtgcctttgga

SEQ ID NO: 18869 - DNA, 1048 bp, Homo sapiens
ctgacatttaacgatatctggagacacttttggttgtgagtggggttggggtgaggggctacaggcatagtgggtagaggcagaaatactgccaatgtcctgcaatcacaagacaaggaattagctagcccagaatgccaagcctgaggaactctagtttgggccactgggagatgatgttttatctcagatctcttctctgtggctctccttgaacttggggaactgctcggtgaacgttgattagtggaggtggggcccaaaagaatgatatgtgttgacatttgcaagtgttatattgaggataacattttaatatccagaaaattccaatggaagtaactttatatcattattttatctgttgtatcaacaataatcattttggaagtttgtgggacaaaatatgtataaggtttaaacttggcttacaaggaagtcagactccctcggaggcaagcggatgtgaaacctttttatttctggagagcttccagaagcaaaacaaggctggaactgttctagggacagcttatgcgtgcgtgtagacagggaaaaacaaaacctgaagccaaaggagggaagaggaaaggaaggggagacatgactttttcctggagactgctcaggaggggtatacaaagtctgcatagccattcagccttaaagaatgtgaaaactggccaggcgctgtggctcacacctataatcccacactttgggaggccgaggtaggtggatcacttgaggtcacgagttcgagaccagcttgaccagtaaggtgaaaccctgtctctcctaaaaatacaaaaattagccaggcgtggtcgcaggcatctgagtcccagccactcaggaggctgagacaggagaattgcttgaaccctggaggtgaagtttgcagtgagccgagatcgcgagatcgcgccactgcactccagcctgggcaatggagcgagactccgtctcaaaaaaaaaaaaaaaaaaaaaaaagaatatgaaaacggtgtgcttatggtgtgccggaccacaggggagccacaaagat

SEQ ID NO: 18870 - DNA, 1138 bp, Homo sapiens
ttgtgtcaaaaacaaaacaaaacaaaaacacacacacaaaggggtgtgtgttggggggagattatttcacaggtaaaactaatcaatggtgaggaaaaaagaaattacagtagtggtttggggaaggggcatgaaggaactttgtagagtgacagttaatggtctatatcttttctttatttaagagacaagatcttgttctgttgcccaggttgggttgtagtggcgcggtcagcagctcactgcagcctccaactcctgggcttaatcagtcctcttgccttagcctcctgagtagctaggactacaggcacgtaccaccacacctggcttaattttttgtagagatggggtctctccatcttgcccaggctggtttcatactcctgggctcaaatgatcctcctgccttggcctcccaaggtgctgatctatatcctgatagggctctgggtcacatgagtttgtcaaaactcacattaagatttgcgtgttttaccttaaaaaacaaaactgtaaacaaatattgatctctacttaattgtgtgtgtgctgagatgtttaggtatctgcagctgactttgaaatttattaaaacagtaagacggactgatgaatgaacagaaggatgagcagatagataaagatgggcagatgtgatctcacaaaatattaattgtgggtttgggcatacagtattataattgtttttaactttactgtgtgtttgagaactttcaaaataaaagtttttggggaaacttaaaaaactactgaacatgaaatactctgtcatattatattcaaatattgcctgatattgtgatcctagatctataaacagctaaaggggtgtattttgtgcattaaaaacgtctgtatccattttccgtttcctttcaatcacttacttgtggtgtcagctctttgccacacgccttttgtgtataaggttgaggttcaaggttctctaacactttctggggaaaatagctttaaggctataaacttggcagatatcactacccaggagtccattcttagccagcagattaactttttgagtcaacctcaaaccaattccctaccttggctagatagaggctgagagaaaggtacatcattcactgaactgtgt

SEQ ID NO: 18871 - DNA, 1030 bp, Homo sapiens
tggaactacaggcacgtatcaccatgcccagctaatttttgtggttttaatagagatggggtttcaccatgtttaccaggctgatctcgaagtcctgacctcaagtgatcctcctgcctcagcctccctgagtgctgtgattacaggcgtgagccaccgcgcccagctgagtattattctttacactctaaaccatactgtgtttcacaaaagtctcttaactgtatactttagatagtcagattctgaaatgccggtatataatttactgcataaaatgcatgtttggctgtgagtcaaaaactgcggttgaggttccagtgctggttagggagtttgttctctgtatagatcgaggtccatttaggggcttatggataatcaaaactgcacgtggtacatctatgccgtttgttaaccaacagaactgttcctgctaaaatgtttgtatggtgttttttggtaggaggcaaggagaaaacgaagagaaagaaattttgaaaaacaaaaggagaggaagaagaagaggcagcaggctaggaagactgcatcagttcttagtaaagatgatgtggcacctgaaagtggtgatactacagtgaagaaacctgaatcaaagaaggaacagaccccagagcatgggaagaaaaaacgtggcagaggaaaagcccaagttaaagcaacaaatgaatccgaagacgaaatcccacagctggtaccaataggaaagaagactccagctaatgaaaaagtagaggtattgttttaatatttactgttcataatggattggttcagtggctactgtgtcaggcaggtactgtgctgagcaataaatgatgaaaaatactagagtgaacccaaagaactgtgaaggtggttatcatatcatgatttattgtaccttttttttttttttttttttagatgggatcttgctatattgcccagaccggtcttacactccgggggtcaaaacagtcttcccaccttggcctcccaaagtgctgggattacaagtgtgagccac

SEQ ID NO: 18872 - DNA, 1892 bp, Homo sapiens
cttaacatcaggcaactttcaactttaaaaccctttgtgaaaaatgtggttatagcactatagctctgattttaggatggttaaatgttatattcattgttggcttaccttatcaaactgtgccattaatcctttcacagacataggtaaggaagagaacaaccagtggattcaggggacaattatctatctccaaataataggcttttatttcttgcagctaactttttcagtgattctagcagatgccatctagtacatccttgatcttgtttctttcgtgagagatctcgccatggcagcatcttgttaagtaagtgtaattgcacatgcacaaaagacttaactagctttacatttagcagtcagttggttagattaggtttcatagtaaatgaataggaatagaaagaataggaagtgtttttattttccagtagtaattccgtggattccatttgacccagtttactatcagttcagttcaggtagatttggttcaacttttggtggtttttggctctaggatattcttgactttaatatcctagaacttactgagtcttcccttcaataaatacacttctcacatacctctaatcctatgcttccttgaaacaataatgctagctgagttgtttactaaggattattataagggcctgaaggtgtgggagtggagattaattaaaacctttatgttctccaatataagggaaaagcaggttggtactacttctgattaggcagaaaacaccaggattccttaagtgatccttgaaatggttattgttttctgccttgtcacatttgccactgtgccctttaaaacgatgtggaaacctcaggtttgtggacagcacaggtggaatgacatcttgtgcttcctgaggctcccctctaccaggcacattagcttagtgcttcagatgtcagcccaagtccttgttacctccttttcctgctgcccagggaagagtgtgtgtgctggagctggagcgcttgcactcttcaggtgactattctcacctccatttcctccacatgcattaggtgaaactgaggtctaagcctcctgcaaggtctacattttaaggactcacacatcaggctctcagaaatgtacacaggtattagttctgtttgttctaaaggaaatgtgggtatctctcaggccaggacttagtgactagttttcgctagacagcaggttaatacctagatctcatttaaaaaaaaaaaaaaaaaacaggattaaagggaactgatcaggtttgttgagttttttagcctaattccaaagcatggaagagtgctctaggtaggaaagaaagctttttcttacgatttgtagctacctactgtgcctgacttggtgcctgtgtgaggattaagcccttagtctgctcttgcaattattcaaatgacaaattaaatttgcttttgtaataacaataaaagttgtcatcttcccttttgaaggatttgtcgtttgtaattacctgtgttgtaacaagcaaaaaccatgcccttttttgtacaatccttttatttttgtatcaggtactggaaccatctaccaaaaggtttgttggatggatctaataagctctgtcacataagggattcacaaacgtcatctgcttgcatatggcatgcaagtcttttgtataatgtatacgacaaccttaggaaacaaaaataagaaccctataggaagttagggatgctgaataataaataactagatcacagttatgtggttttatgtgaacagtagagttgggggaaacgtcaattattattagaactatgaacctctacattcaggatttttaataaagatcaagagaccaaatagtgcttgcccttttcattcaatgtgcaagggc

SEQ ID NO: 18873 - DNA, 1054 bp, Homo sapiens
ttttgagatggagtctcaccctgtcgccaggctggagtgcagtggcacattcttggctcactgcaacctccgcctcccgggtagctgggattacaggcatgcatcaccatatctggctaatttttgtggttttagtagagacagggtttcaccttgttggccaggctggtctcgaactcctaacctcgtgatttgcccgcctgggcctcccaaagtgctgggattacaggcttgagccaccacacccagcccttacttactcagttttgtctgtagagttgtcccaaaaattatggagatgagccaggcatggtggctaacacctagcactttcgaagtttgaggtggaccgattgcttgagcccaggagttggagaccacactgggcaacatagggagaccctgtctctgtgaaaaataaaattagccacttgtggtgatacgtgcctgtggtcgtagctatttgggaggttgaggcaggaggattgcttgagcccaggaagtcaaggttgctatgatttatgagctctgatcacaccactgcactccaggctgggcaacagaacgagacctttactaaaaaaaaaaaaaaaaaagctatggaagtgtaaggcagcttggtggttgcaaggggctgaaggagggaaagtaaggagtgactgcttaacgggtgtaggatttcctttttgggacaatgaagttttagaattagatagtggtattgattgtacaacatggtgaatacactagatggcactgaattgcaaactaaaatggtttaaaagttgaatgttattacttatattttaccagaatagaaaaaagtatgattctctaaacataagtgaagttagtgcccagacatatttgcaagtgaggggccttagtaactagtatagagaaagtagctgttctctgtggaagctatcacttgatactaatcactaggcaggtatagaatgtcctagagttgagcaagcctcaaaaactcacttcagtttagtcctcctgaatctcagtggaacagagctagaatagtttaaaagacatagag

SEQ ID NO: 18874 - DNA, 1021 bp, Homo sapiens
aaacctaagtctgtggttgcaccgccaggtgctcctaagaaagagcatgtaaatgtagtattcattgggcacgtaggtaagctgctctcatagcaattaaagttactggatacataaaacatagaacatcctttttagctacctggagatgtttagtgaaactgaaggaaattaattgaaaatgtcttgatttttaacttgctgattttttttagctggcaaaaaattgcaagtacttttttcctgaagtttaggcaaatgaataattctgtaacggcatagatgctggaagaaaaacttcagtatattgtacgtaacatataattagtctattgaccattgatggtagttcagcatagtattatatatcagtatcttagaaaatgtgcccttttttatgtgaacctcagttaacttgttaattttaatgggattgaccttaccagataattttgtgtgaagcaggaaatcaataatttggagtaacttctggatgcttgccaggttgctggtttagcaaaaaacaaaagaacaaatttatttaatttactcagatattctctaattatctggcctatccccagaattgtgagaaaaaaaatacagaattatgtgtctttcatttcagctatctctgccttccccccagatatgaaacactgtaccccttcttttagtagcaagaactcttttgaaagtgtaaaggagcggctgggcactgtggctggcgcctgtaatcccagcactttgggaggccaaggcgggcacatcacgaggtcaggagttcaagaccagcctggccaacatggtgaaaccccgtctctactaaaaatacaaaaattagccaggtgtggtggcatgagcctgtaatcccagctactccggaggctgaggcaggagaattgcttgaacccagaaggtggaggttgcagtgaggtgagatcgcaccactgcactccagctctgggcaacggagcaagattccgtctcgtggggaaaaaaaggtgtaaaggagcacata

SEQ ID NO: 18875 - DNA, 1081 bp, Homo sapiens
ttttctgtcgtggagattctttaaagcaggggcacgttcatattggagtataatttaggtttgtctgtatctgacaaactaaaatccaaaaagcagacttagatatttggttattagtatgtatttctcctacatctcttccagtaatgtcataagtaaatttgcagtgtggcaactggaaactggattgttgcttggttttagagttctagtataggaaaaaactggcatcattggaatcaccttttctgcagatatttttaatggcttatatatgtttcaggactttatacacatgtcatttatcttataggtatctaatttattcagggattttgataacatgagtatggaatattaaaaagggctaatcacaggctggatgcggtggctcaagcctgtaatcccagcactttgggaggccgaggtgggcagaacacctgaggtcgtagttcaaaaccagcctgaccaacgtggcgaaaccccatctctactaaaaatacaaaattagccgggcatggtggcatgcacctgtgatcccaggtactcaggaggctgaggcaggagaatcgcttgaaccggggagatggaggttgcggtaagccaagatcgtgccattgcactccaactccagcctgggcaacaagagtgaaactcagtctcaaaaaaaaaaaaaaaaaaaaagggctaatcacagctttcttgggctgggttacctagagagaatcacgggaagtagatgtgtatttgttgagcacatctctaatttgatctgtgctgagctgcaaattactttgacagtatctgtgaagaaaaggtttataaagcaaatcaaaagaataagcatgtttttatgaatacattgaaactactgaaaatgtttcaaaattggctgtaattagtagaattttgaaaagtaggttaagcagagacttctaacttgaaggcctgagttagctgccattgatctggggttattgattgaggcttgtgtcgtgttattgaacttctgtttttactgcatattaaaagataagtgaaatggatggataagtatcaatttttaatagaacttctttct

SEQ ID NO: 18876 - DNA, 1375 bp, Homo sapiens
ttttggtacaggtggggttttgccatgttgcccaggctggtctcaaactcttgccatcctcccaccttggactcccagaggtttaggactacaggtgtgagccaccatgcccaacccatttgcaacttacaatccattgtaagttgaggagccatctgtattgtaaatctaatagttggtgccaggaactaagtggtcaggtgtaagtactgttttgttttgaaaagctgttacagttagtgatacacttgagagtggtgaggaagcccaccacacccgtcattttcctgccttaagatacgcagtacatcataactgtgtgtccgtcagagcttagtttacttgtacactgattttcagcagggactatctgaggaaggggaagatggcacttgcataacttggaaatgcctgcagttgattctgatgtgcctgtatgttagatggtagtgattacaggatctgtttcctaaggcttttggtgggaatgagctagcagtcggcacttagggctcaataaaaattagttaaagcaaattgctaccccctccatcccccactccctacacaatatggatttgtgagtacttttatccttgtctggcccataatagatactcaatacatatatatatgtattcatttttattaatttttttttttttgagacggagtttcattcttgtccaagctggagtgcagtgacgtgatcttggctcactgcaacctccacctcccgggttcaagcgattctcctgccttggcctcccgagtagctgggattacaggtgtatgccacacccagctaattgttttgtattttcagtagagacagggttttgccatgttggccgggttggtcttgaactcccgaactcaaatgatccccccgcttccgcctcccaaagtgttgggattacaggtgtgagccaccgtgcctggctgatactcaatacatattgataggattgagttggagtagttacatagcagatggagacacatttgttgaatacgccaggagttctttaactgacactaaacaaattattctcccatttcctcccataaactcctcaacaatcctctcaggtagatggtatatcatttccacaatttcagtggaataagtgcaggcacagcttgtaataagccaggagttaaacctaggagtcagctcagttccaggctctgagaagtaccccatgcagtcacctccttcttagggtggcctgtgaacttgatactctcagtactacctggcttcctctgaaaactgagtaatttttccttaccttatccttaaacttttcttgaaaatggaaaagcaaaaaaaagttaatctgtattgtgttgaagtacagtttctgcctcc

SEQ ID NO: 18877 - DNA, 1027 bp, Homo sapiens
tttttacctgccatgatgtctgtggccttgactgacgtatgctgtgaggatatgctggccaagtaggattctccatattcaagtcctttgacccatgatcatagctttaaaaaaaaattgtacactcttttaaaaaattgaagcaaaatccacataacataaaactggctgggcgcagtggctcacgcttgtaatcccagcactttaggaggccaaggcgggcggatcacaaggtcaggagatcgagaccatcctggccaacatggtgaaaccccatctctactaaaaatacaaaaaattacccaggcgtggtggcgcgcgcctgtagtcccagctactcgggaggctgaggcaggggaatcgcttgaacccaggagtcggaggttgcagtaagccgagattgcaccactgcactccagcctggcaacagagcaagactcaaaataaataaataaaataaaataaaataaaatgagtcaggaatgatgttggtgttgaggttggcatacgtatcaaggacagtaactaccatggctcccgaagtgttgccaaaacctcagatgtgtggccttctggccaagcgtctgcgatttcaatgtttggagcattcatggtgtccctgggggttgcagctttgtatgagtttggtgtgggtgaaccaagaaagaaggcatatgcagatttctgcagaaattatgagattttgagcagatgaggaaggctggtatctttcagtttaaagtaatcttggaatataaagaatttcttcaggttgaattacctagaagtttgtcactgactcgtgttcctgaactacgacacatgaatatgtgggctaatagttcgtcttgataaacaattaacaaacaaataaataaagccattttaaagtgaacaattcagtggcatttagtacattcacactgtgttgtacaaccagcaattctatgtagttctaaaacatttccttttttttggagacagggtctcacaccgtggtccaggttggagtgcagtggtgcgatct

SEQ ID NO: 18878 - DNA, 1021 bp, Homo sapiens
gtaaatgcctaaggtcactcacagagttaatgacaccattgagtctagaatgcagatttgctacctgctagtttagtgcttgatctgccacatcatgctgtttaataacagggggcgggaagggcatgcctggagctaattactacaactagcgtgtagttttctgagagtggccctggcatttgcctaatgtttcattcttaaaggtttttgaaattattttggggctttgaagtgcttgctgtaataaatttattgagcatttaccaccccttatcagttatttagtcttcacaacattctcttgaggttaggtactgttgacccattttacagatgagaaaataaaggctcagtaaagctaaataacttaggtcagtcatatccatgagaggagtgaggcttggaatcgaggtcatttcaaagtttattctagtagtgactgctagtgctttccttgtgattttgtattaaagtagactgagactctccagaaactggacctgtgagcttggaccatggcatttctctgtgttctgtctcagtagtagcagaatgacatttgtcataagtaggcagtgctctgatttaaagcaatattttgaaattacttctttttacattttagcaagtgttgatgtaaaatactttaaaacagctctgttcaccactgtctgtaccgagcctttttatttttagagtgttaggtaattaaggcaaaaccatccacattgttttatgtgttctgtagacttctttctggtgtttgcttttactgtttttcagtattgtctacaggagaaaaaaagaaaaacctcagcttgcaaatttttgttcagagatgggatcgttctttgttgttggagggatttacattaaaaaaattcaagaaatattgtctcatgtgatcttaccagataagtgcctattattaagacttgttggctgctggatttattatcttagcctaattttctttctgagttaaatgaatcttgcttttttatcgttaccaccctgg

SEQ ID NO: 18879 - DNA, 1034 bp, Homo sapiens
aagacagcaatttcagtttgaacaagttaaggaagtaatgtagacgacaaagtttaagccttgatttgcttgctttggtttgctggggaagaaatgtctgaaagtgttcagatagtattttctttctggttgaagagaaaggaatgaaaaagagatttgataaccttctgggttgagttagcagtattggaatggaatttttttccagaaatgcgaatttctggttttgctcagatatatgtactagcgactcattaacaaacatttaccagtccactgaatgaaagatgctatgctaggcacttgaaataacaccaagatgaataaattgtggtcctgaaggaatctagaaagggatcagatgcccagtgtactctagtggaagtcacagtgtggtaagtgagccctgcagagagtgtagagaaggctttcaaagccgagaacagcaatcccttacgtaaaacctctcagtcttgtcactctcataaaactaaagatttatctattatctgctcactgttctttgcgaatgccttgtgtgtatttttttttctggcctcctgggccagagttgcagccaaagcctgatcaccaaggttgtgtgtattttaaaaaactttttacttattattttttagagacgggatcttactttgtcacccaagctggagtataattgtgtgattatagctcatcgtaacttcaaatccctgggctcaagtgatctttcacctcagcttcctgagtagctaggactataggcacccaccatgacgcctggctaagtttttttgtttgtttttgttttttgagatggagtttcgctctgtcacaggctggagtgcagtggccctaactcggctcaccgtaacctctgcctccccaggttcaagcgattgttctgcctcagcttcccaagtagctgagattacaggtgcccgccaccacgcccagctaatttttgtatttttagtagagatgaggtttcaccatgttgcccaggctggtctcgaactcttgacctcaagtgatcc

SEQ ID NO: 18880 - DNA, 1599 bp, Homo sapiens
ctggagagtcagaccttgggattcagtattgaccttggatctctttgaaaactaaagaatataggttccttaagaaataattaagtggaacccatttaagtgtaattaagtgtaattcatttaagcacagttctctagagccaagtaaattggccaagagattctccttaaaaagtgaggtccccaagtgaataaaaatatagaagacaaggcttaatgtatattagaacaagcattttatctgataggatgtatttaagttgcaatttgcacctagttttttttattgttagataagaaactggtttagtaattttagggttacttgaactttttagaacagccagagcttctaaagtaatgatgtggtgttctttgcatcatcccacctttaatgcttctcagaactcactgccattaagaaacaagcatggaataaaaccagcagccctcagtacttacttggaggaggcactgtctccaaaacttagcagattgtattgtggaacttgaattttaaagagaaacattctgttttgtagtgttccgtatttgctgaatgccttatttattggaagaggaggttttttttttgtttttttttttttttgagacggagtcttgctctgttgcccaggctggagtgcaatggcacgatctcggctgactacaacctcctcctcccaggttcaagcaattctcctgcctcagcctcccgagtagctgggattacaggcacctgccatcatgcccagctattttgtgtgtgtgtgtttttgcagggatggggtttcaccatgttggctaggctggtcttgaactcttgacctcaggtgatctgcccgccttggcctcccaaagtgccgggattacaggtgtgaccgcgcctggccttttttttttttttttttaaatgattgacatttaacttacacactgtaaaattcacccttttcaactgtacaagctgggcgcattggctcacacttataaacccaacactctgggaggctgaggtgagaggattgcctgaggcctccataaaacatagtgagactgagaccctgtctccacaaaaaaaaaaaaaaaaaaaaaaaaaaaaatacagctgggtgcagtggctcatgcctgtaatcccagcactttgggaggccgaggtggacggatcacctgaggtcaggagttcgagaccagcctggccaacgtggcgaaacctgtctctattaaaaatataaaaattagccaggcatggtggtgcgcgcccgtagtcccagctactggggaggctgaggcaggagaatcacttgaatctgggaggcggaggttgcagtgagccgagatcacaccactgcactctagcctgggcgacattgacactctgtctcaaaaaaaaaaaaaaaaaaaaatagctgggtgtggtggcacaaacctgtagtcccagctacttgggaggttgaggtgggaggatctcttgagcccaggagctggaggctgcagtgagctatgatggcaccattgcactcagcctgggtgaccaaatgagacactgtccaaaaagaaaagtaaagtgtacatacagttcagtggcttttaatatat

SEQ ID NO: 18881 - DNA, 1094 bp, Homo sapiens
atgttgcttcttctgggaaagctctggggtgcctcccaactggcttagttacccccaccctgagcttccacggcacccagtgcttccgtgtcgtaacttcataactcatgcaacaccacaaggtcattgcctgttcccatgtctgggcccctccctagaacttgggccattgagaacaaagacactgtctcagtcatgctgttacctagcacacagtgggtagcaggggtgcattgaataaatgcctacctgaagacaaataatttttatgtttctagccctgtaatgactaagcctgctcagattctgcctctggctttgaaagagcagtatctatatatggagtttaactgtaaaactcttaattgacttttcattaggttgcgtatttaaaatcccaaataggactgaagttttaggggcgtagccacaaacacctgagttcagactgtagcatggaatcttaaagtaaaaaaaggcagtcattctaaataagacttgttcgtggatctgacaccccagaatctctaaacagaaatgaattgtgctctttccttccagcgaagggacttggcagtagtgaatctgcatgtaattgtcctggaacttcttcgtccctggatatcacattgtgcatcattagccttgagcaatgcctcatgtgtaccaagtgcccagaagcaatttgttaaatggaatattctatgattaagtgtgtacataccttatagcagcaccagcgttagcgctaaagaaggtaaatacaggagaggtgatcactttggaggaaaaataatttatggaagaccttgaccagaagtaacatgtccagtgacattcacaattacatatttttctctttcatggtttttcatttaagcagaataaagcttacacatatgtagatggttgtcttcttttctgtgcccggtatcatagttctgttcagtccatgttacttcttggctaaaaaccataaaatcactaccttgccaacccttctccctctactctcttccctctaaaccaggggtgtccagtcttttggcttccctgggccactttacaagaagaattgtcttgggccacacata

SEQ ID NO: 18882 - DNA, 1035 bp, Homo sapiens
gaggtgcttcctccgcgcccccatgatgtttctgtggtttcactttcccatgctgggcactgccctccctagacaagacctgtctgtggactctttccagcgcagctgtttagccagacgctggccccgtctgcagccgtcacaggccctctgtctgtctgctggtcatgtcatgctctcctcaaggtgccgtcctggtcctgctgttcatattgttttgttctttcccaccaggaagcatctcgaagaacagccctgccacactctttgaagttcctgacacatggtaaccaagacctgagggcagcaaaccgctggtgctgtcgctgtgagcaagagccggctggcacatttggaagccgcactgtatttaacttaatcaaatgtggtatgggaggggttggaaaccaagttgtctcctgggggggagaaaacaggttttatttttgtggctgtggttttttcccctttttaatctaactgcctgttgacattgacactcatcacggttgtaggctgtcatgaatgtgtacgtgcttaaccagtgaattccgtgttgctcttgtgaggcctttcctgtcatgacccagtgtgcttaagaacctgcctgatggggagtgtcggctgtgaaatctgcaaaaagagctgacattccagctgctgtgatcatgaatttgggggtgtactgtcctgcctgtgcatcttctcgcactgagattttgaggcagttgcagccctcggttagtctcccagtggaaaaatcggttgtgcctccctgcttcccaccatagctgcctgaaaacatgacgctctcaagcttgtccttccttcaggaagatgtccactcatgcccacccatgagagggcttgccgtatgccctggcctttgggcatatttatgtagagttcctttctcctaagacgtgagtttctcatgggggatgtacgagtaaaaaggttaacttctgttcttatgcgtggcgctgtgttcactttccagagtctctgttcgtttgtttggatggcggtctcggg

SEQ ID NO: 18883 - DNA, 1036 bp, Homo sapiens
tcataagaaattgatacactcttttccaaagtggcgtcaccattttggatttcccccagcagtatacaaggcttcagctcactctgcgccctcaccagtacttgatattgatacacaccccttttgcttgtttgttcagcagttctaatgggtatgtagtggtatctcattgtggctttggtttttatttccctaatgactaataagcatcttttcctgtgattttttgccatccagatttcttatttggtgaaatatcttttcattttttccctttgttctagggttgtttattttctgactgcattttgagagttctttatagattctggatacaagtccttttaagcattttacaaatatattcttctaggttggtttttcttttcattttgttgttgttggtggtggtggtttgttgttgttgttgttgttgttgttttcgagacagtcttgctttgtcgcccagactggagtgcagtggcacgatttcggctcactgcaacctccgcctctcgggttcaggctattctcctgcctcagcctcctgagtagctgggattacaggcgcctgccaccacgcccagctaatttttgtacttttttagtagagatgggttttaccatgttggccagggtggtctcgaacccctgacctcgtgatccaccggcctcagcctcccaaagtgctgggattacaggcgtgagccaccacagccagcctcttttcattattttaacagtgtcttttcaagagtagtagttttaaattttgatgaagtccagtttatcagatttttccccttggattttgcctttggtgtcatatctaaaaaatctttgcataactctaagttgcaaatattttcttctatgttttcttccagaagttttacagttttaggttttacaattaaaatgtacaattcaagttaatctttgtatataatgcaagctatggattaaggtccactgtagcaaaaggcaggtgtttttaagtatctccctccctcccttcctccctccctccctccct

SEQ ID NO: 18884 - DNA, 1018 bp, Homo sapiens
tggtctgtgctctctttctctccttgagtactgggctttgtctctctgatttcactctcagcctcagttgcctagttttagaagatagtttgttcatgaatgaatggatagatgaataaatgaacaagtgagattgaaatatacaggcgttcattaatgtccatgagagactggttccaggacccctgagtataccaaaattctcacgtactcaggtcccccagtcagtcctgcagaacgtgtgggtatgagaggccctccgtgtaggcaggtttcaaatccctcagagactgtgttttcaagatgtgttgggttgaaaaataatctgcatataggcggacccatgcagttcaaacacagattgttcgagggtcaactgtatttgtttggaaagtagttagcatagttctttacaagcattatagtaagtacttagtaaatggtggctttaataatttttgactgacttttcagcctgaaaccatgaagaagaaaaagaaaaacaccaggctggctaatcaaagcagggttccttagtgacatcattcattcaatgctgaggcaattggcttgggccataggaacttacagcctaagcagtagctcttccacctctcagtcagcctgttaatagcttgtatttattgtcgcctttgctgctgcccctgctcatgttgagattatcatttcccacctagatacctgcctacttggtgttgctctaccagtcttttcgcctcctttactcttccttcagattgcaggcttcttaggatcagggaatctctgcttcccactgctgcatcccagtacccagtgccagtgtttattgaatgagatggctgggcacagtggttcatgcctgtaatttcagccctttgagaggccaacatgggtggatcgcttgtgcccaggagtttgagaacagcctggacaacatggcaaaaccttgtctttacagaaaatacaaaaatcagccaggtgttgtagcatgcacctgtagtcccagctactcagg

SEQ ID NO: 18885 - DNA, 1044 bp, Homo sapiens
gttagcactagttggaaggtcacatctctggcagggaccttatcaggtaccagctccatggcctcttctgctcttcctgtcttcccaggttccagccctggtgcttttgggaagatccctcccctcccctgacctcgacccctcttcagaggaaacagtgaacttccaggtgcgacttcctgcccccagattcacaaagctgtccgcgcacacacctccctccttctgtgcctctgtcagacatgtgtccccaccatgtgctccaagtcccttctcaggggccttgtgctacattttatccatgcccacccatgggcagaattccttccacctgttcaaaagaactcccacaaccccagctcgcctcttctcccaaatctttccttccttttcggaattcgaggcgtctgcagtcaccacccttaccgtggttcctcgctcactctcctctcgctgtggtccccacaccacagagcctgttcttactgaagaccctctgacccctttgccacacccaccaggcagtcttctcaccttgcctgagtgctcagtactctgacctctgttttttggagacagagtcttgttctgtggtccaggctggaatgtggaatgcagtggtgtggtcatagctcactacagcctcaaactcctgggctcacgatcctcctgagtagctgggactacaggtgcgcaccaccatgcctagctaatttttttttttagtggacattgaggggtatgtgttgcctaggctggcctcaaacccgtgaactcgagtgatcctctcgccttgtcctcccaaagtgctggcgactacgggcatgagccaccatgcctggcctcttcttcctccttgaagcaatgttttcttaaatccctaggtttgcccttctccttttcaggccacagcttcccaggctttcatgactgccctccccatccatacgaggattaaaggccggtgctcctaagttcagtctggaggcttctgtgtttactctgcaccttctcctcagcaattccattctttctcagggctca

SEQ ID NO: 18886 - DNA, 1027 bp, Homo sapiens
tgattaaccttttagaacacaaagcacattgtcacatagaaatgctgttttgaatggtgggtgtcaatgagctgtgttgtgttatagagttcaggtcaggcagggcttgtttagtgggtcaggaaatcaatgctggtagataccagcatttaaaaaaaagaggggagaaagtcgaagaaaaggacgtatgagagtgggtttcatgtagtaaaagtaggtattgtttagtgatactgttgcaatttaaaacctattgcaggctgtatgctggcattaaattgggaatccctcaggcaggggaaggggcgtcaacaacgggttaaatactggctgtgcacggcagtccagcacggtgacatcaggcaagttattttaacatgtctcaggcactgttctgtcgtattcaaaataagactgctttacaggggtaggattaaagatggaagaaaatagattaatgttttaggatatagaataatgtattaggattagagatagtagagaacctggtgcttagtaacctccctataaaccatgattggtatctgtttgtacttctttgtaatatgtaataagcagaccttaaagatatagtattaactaagccgtgtactatttagtcttccctggagtggaatttattcagagttcttgacgtttaggatctgccatttcacatgatctagcagatctttgattttaccttaaattattcttgtgtagttgagacatcaatcttaattttctgccatgaagtgtgaagaatgttgtaaattgcttaggtctttcagctgtctgtcaacttcctcaagactgttaagtatggaattgcttcccaagtctattttaagttgtgtttcatcttttaaaaaaagaagggtttcttctttttttttctttaagtaatagttctaaactttttgccaaactcccatctgcttctacttgatgccatcataaattccttcttaccttctgcacttcactacccactttttaagctgctgtgtcagcacttgggaaagcc

SEQ ID NO: 18887 - DNA, 1026 bp, Homo sapiens
ttattattctcagaaccacttactttgaattatatatatatatatattttaaattaagagactgggtcttgctgtgttgcccaggctagtcttgaactcctggcctcaagtgatcctcccacatcagcctctcaaagtgctgggattataggcgttagccaccatgccccgccccctgagaataatttttaaattatcttttttttttttcaagtttccacatacaacattgaataattttaaaattctatcaaatgttggaaattgtcagcctacaatgttgatttgcatacattcagaaattatagggatttctatatttttgatatatctgttagccttaagcctatagttattttaaagtttcgtttttataaattctctctggttattacagagtgtctcactatgggaatgtgagcctgcatttccccacactcactttttagatcctctaaatcaggtcactataataacaaaaatcttatattatgttctgagtccaggaatgctacacgttttatcttttatttttatttattttttaaaaaatttattttgctactattattttttatggtgtagagatgagggggtctcactctactgcccaggctggtcttcaattcctggcctcaagcaatccccctaccttggcatctcaaagtgctgggattacagatgtgaggcaccatgcccagcctgcctatttgtctgtcttatctatgtatctatccatgtatctatctatctatctatctgcctgcctgcctgcctgcctatgttatttgtctattgacctgccactttaggataaaaagtatttataaaaataaaacaggtacatatttatgacagaaaatttggaaaacacacaataatgaaacataatcacccagaaataattatgataacattctggcatattttcttacagtatcattttcattattttatgtaggtgtaatcatactatagatggacttgaagatttgcttttctcattaacagttgagaaatgttctc

SEQ ID NO: 18888 - DNA, 1195 bp, Homo sapiens
agattggtcatttcatagttgctttccttgtaaaggttaaagcagagggaactcaatttatcatgtcgtcaggtaaaactggcttgtttggagattcagctgtttactctcatttggattccccacaaggtcatatagagaaattagtttcagcttggtgacatggaactttaagagtgactccatttcagttaggtctgttgggcctagtgcaggagctcagtccaaaccattgacctctatacattttatttaacaatggagactttatagaatatagctgcaagactggagtgtttgttgttctctgccttcctttcttcaccagggtgtttgacccaaagccattaggaagaggatttctgggctgtctactttttatttgcttttaaaggagaggtactcacctcagagcttcaggagagtcattctggttcttgcctgacaagagaaatgccacaaaaatgggctggctgcagggaggcccggccactcctggcccaactttaaccctggcacagtgaccgtggacggctccaagtactggatagttaggcaaatggagacataggatggctacaactgttgaatttgactttaattgaagatgatgttgcttttttcttttcttgatagtttattttctgcagatgaatctccttattgtggattacacccttgacttttcctttgtgtgatgaggtttgggaaaaccagggatgtatggtttactttgccagcctgttcatttcagctgcttattaacttgcatcttggcccctttagaaggaagcggcctgagatgggagctgagtaaaaacagtggatgaggccgggcacggtggctcatgcctgtaatcccagcactttgggaggctgaggtgggtggatcacgaggtcaggaggttgagaccatcctggctaacatggtgaaaccccatctgtactaaaaatacaaaaaaattagccaggcgtggtggcaggcacctgtagtcccagctacttgggaagctgaggcaggagaatggcgtgaacccgggaggcggagcttgcagtgagccgagatcgcaccactgccctacagcctgggtgacagagcaagactccgtctcaaaaaaaaaaaaaaacagtggatgatttatttaattcttttggcaagttcttgggaaaagtaacatgtagaaaatttggttat

SEQ ID NO: 18889 - DNA, 1051 bp, Homo sapiens
gtagatactgtaagaaactttttaaaagcagaaattgataaagacactttagaagaggcaggaactcaacagttattttgggtcataaaaagttacccagtaattataaataaaataaaagcccaaattcagatagttgtatgaattcctgataccctgccttagaagctttttcaggatgatttttgggatgagggaagacacttggctttgcctcagtctaaattattgagtgtgcttatgttaaattgtgtttttaaaaagcacagcttttgattatgctgaacagataaatattagaattgtagagacaactctttcaggatgattgttcagccctgaatttgctaaaaggctgcttataactttgaactttacctgtgctttttattatccttttgatgtttgcagaatctgtagtgataactggtttttattcgtgatattactcatttgtgtctcatttttccttgttcattccagtcagctgttaccattttgttgatctctctcaagaacgcttttggctgtgttcgtttctctgtattgtttgatattgtctattttgttggtttctgttttttttctccttttacttgcttgggtttactttgctcttcttttctcagtttcttgagctagaaccgtatgtgattggttcttcttttcttcttttttctaaattctttttaaaaaatttaagcctggcgtcctcgaggttgttggtaggtcaacatattaatatcttactgattagccagtgattggtaagaggtggtgctgaaacaccttgagctggtaaagctttaaccctttgccagctaagttagggaacagactcaacattccggcagcttacaagtctgccccaatgtttacttttgtctggacctctgtcctctgtgggcgcacaggccttatggtcagctagctatgtgtacatagctaagactctgcaagtcattgacttgaaccattttccttttctaacagaagcatttaaagctataaattatcctctaagtactgcgttagttgtatgttaactgtt

SEQ ID NO: 18890 - DNA, 1047 bp, Homo sapiens
cccagataatatcatcaatcccagatattatcattttagtagatgttaatataataacatctactaagattccttttccaactaaggtagcactcagaggttccagggagtagaaagtggacatatctttttggaggccaccattcagcccactgtaggcaggttagtagtaaagtcagcattcttagctatttccagccttgcattggtcctggcttggagcaagtgggtaatagttatttccaagactatttagcatttaatttgcagtgttcaaggattagcagtatactctaagaaatttgggctacctatcaaatagcttatcgattgaacaccttccactatgcacagtatgtcacctgcattgactgttttttctaaaggcagccctcatagataggggaaaatgtgcccattttaaagccgagacatctgcctagggccccaggagtggcagagtcagggataatcaagcctgtgctccactaagaagggattcttcttccatagcacacagtgtctataagggacaatgctgtagttggtggcatatctttttaagagacagtgttagtgtctttgaaagaagatttccgtttctctcaatgtttggcctgagcacagactgtaaaagatgttgacttagactgttggattgtgtggggcttgtttcctctgacactttacagtatgttgttttacaggccctgcaggcattgcctttgtataatgtttaatttaatgtttttagttgatgtaatttgatatgcttcatttggagactgttgaaatgagctgctggttttgtttttttcttcctttgtttttttttttttgcctttgtttctagtgtatgtatttaagaaaggatatgagttggcttcaggacaaatgttgagtaacgctctatttgtcaaaacagcaagtggctagattgaaaactgtattccccccacctgagtgaaattaaaataactgatgccacagtcactcccatctagccagtggttacccttattttacacaggagccttagtgagcaaa

SEQ ID NO: 18891 - DNA, 1034 bp, Homo sapiens
tcgtcaccccaaacagaaactctgtaaccagcaagccagtaactccctatcttctgcctcccctcagctcctggttacctctaatctgtctatgaatgtatccttttgtgaactgttctttttgagcaactcattgcttcactgacattttaatttattaaaacaatgatattttgcatcacctggagcatttttcttttgtaattgtattactgccttatgtttagatcacaccttgggcacataaactttaagatacatagatgtgtatctgtgcaacatctcagctagggtggcttatgcataaggcagcaggagcataagggaaatagctgaggcttcagggtgggtcggttggattgatgccaccagacgggagatttgtcttgccaaagctaggtttctagtctttcaactgtagatcataatctccacctggttgggcagcagcgctgataaggctgtttggtgttgggtgtggcatgtagaaggtgtgcagaaagggtggttgttactgtgacttacactgtagtgaacttgaagaaaataatggaaatcttgtttctcatttcatttcgtttttttaaattcttttttttttttaaatttgtatatattttttgagaagtctcctccatcgcccaggctggagtgcagtggcgtgatctcgtctcactgcaaccttcacctccgaggctctagcaattctcatgcctcagcctcctgagtagctgggattacaggctcaagccaccatacccggcaaatttttgtatttttagtagagacggggtttaaccatgttggccaggctggtctcgaactcttggcctcaagtgatccgcccacctcagcctctcaaagtgttgggttttcagacatgagccactgtccccgcactttttttaaaaaatttaatttaatttaattttttttgagatggagtcttgctctgttgccaggctagagtgcaatggcgtgatctcggctcactgcaacctctgcctcccaggttcaagcgattcccctttctc

SEQ ID NO: 18892 - DNA, 1030 bp, Homo sapiens
tagcttttcagcagccccctctcccgccccagtaccaatttactgtattagtctattttcatgctgctgataaagacatacctgagactgggcaatttacaaaagaaagaggtttattggacttacagttccatgtggctggggaggcctcacaatcatgatagaaggtaaaaggcacatctcacatggcagcagacaagagagcttgtgcagggaacctcccgtttttaaaacaccagatctcgtgagactcactcactatcaaaataacagtacaggaaagatccgcccccataattcaatcaccttccatcacgttcctcccacaacatgtaggaattgtgagagttacaattcaagataagatttggatggggacatagccaaagcgtatcatcttccgtcgaggttataaggattgtatgagatttgaaaggactttgatagttcctagaacttaataagtgcccagcatatattcttttccgtttcttgaaatataaggggtgcggggaggattggggagatattggtcaaaggacacaaaatttcagttagtaggaataaattcaagagatatgttatacagcatggtgactgtagttactaacagtgtattgtaaacttgaagattaccagaagagtaggttttaagtgttttcactgcaaaaagtgagtatgttaggtaatggatatgttagtctaatttagccatcttacagtgtatacatatttcaaaacatgttgtacatatcaatatatacaatttttagttgttaattaaaaataaataaataaggttgggcatggtggctcatgcctataatcctagcactttgggaggccagggaggtggattgcttgaggccaggagttgaaaccaggcaggggaacatagcgagactccatctcttaaaaaaaaattagctgggaatggtggcacatgcctgtagtcccagctactcaggaggctgaggcaggaggattgcttgagcccaggaggttgaggctgcagtgagccatggttgca

SEQ ID NO: 18893 - DNA, 1060 bp, Homo sapiens
ggctccctgcaacatccgcctcctgggttcaagtgattctcctgcctcagcctcccgagtagctgggactacaggtgcgtgccaccatgcccagctagtttttttgtatttttagtagagacagggtttcactgtgttggccatgatggtctcaatctcctgacctcctgatctgcccgcctcagcctcctaaagtgctgggattacaggtgtgagccactatgcccagctgattgtttttatttttgttgcaagcggccttatttctcatctttgagtttagcaaattccaggcagcatttcctgtcccccttcaaccttcagcccatcctttaaaatgaacgttggcacgttttctataaagggccagatagtaaaatattttcagctttccatgctgcatagtttctgtcacaactcttagctctgccactgtagccccgaaatgccatagaatacgtaaaccaattggcatagccgtgttgcaataaaacttcatttacaaaataattggttggctgtatttggcctatggaccatagtatgccactggactaatctttttcttattttaaataatttttttttttttttttagagatggagtcttactctgttgccaggctggagtgcagtggtgcaatctcggctcactgcaacctccgcctccgaggttcaagtgtttccccggcctcagcctcccgagtagctgggactacaggcgtgcaccaccacgccctgctaatttttttgtatttttagtggagatggggtttcaccatgttggccaggatggtctcgatctcctggcctcatgatctgcctgccttggcctcccagagtgctgggattacaggtgtgagccactgtgcccggccttccccatatctttttaataaaatagagactaggtctcactcttttgtccaagctgatctcagggtgctgggctcaagcggtcctcctgcctcagcctcccaaataggtaaaaccacaggtgtgcactaccacgcccagctaaaagattaatattttgttacttctagattggaagacacct

SEQ ID NO: 18894 - DNA, 1065 bp, Homo sapiens
tgtatggactcagggattttttttaattattagtattaataataatactagattattatctaggatttttactgtttactttgttgcttaaattgtaccacctttggccattggagcttctttgacttggctcctgtgccctctgaacaagccccccatccttttctgagcacttctttgctttctggtattcttgtagtttctctggctcagctatggaatgaatgacttctccacggagctctggttcctcttaatggggaatgatgtttagaaaccaagatctggccctaggttactgcttctggccctaggtgatattattgcttctaagccctctcactggacagaactaagaaccatatgtatgtagacctaggcatgtacacacacagctatatttctgtgtctctctgtatatgtatgtgtgtgtggatctatataaatgtgtatgtagctgggcatggtggctcaaccctgtaatcccacacttagggaggtcaaggcaggaggactgcttcaggctagtagttcaagaccagcctgggcaacatgggagaccccctctctacaaaaaatgtaaaaattggctgggtgtggtggctcgctcctgtaatcccagcactttgagaggccaaggcgggcagatcacgtgaggtcaggagtttgagaccagcctagccaacatggtaaaaccccgtctctactgaaaatccaaaaattagctggtgtggtggtgccacctgtaatcccagctactcaggaggctgaggcaggagaatctcttgaacctggaaggcagaggttgcagtgagctgagattatgccaccgcactccagcctgggcaacagagcaagactgcatttcaaaaaaaaaaattaaaaaattagccaggagtggtggcacatgcctgtggtcccagctgtaggggaggctgaggtgggaggattgcttgagcatgggagtttgaggctgcattgagccatgatggtgccattgcactacagcctgggcaacagagcgagaccctgtctctaaataaataagtgtgtgtgtgtttgtgt

SEQ ID NO: 18895 - DNA, 1078 bp, Homo sapiens
agatgctgaactttgcatcagggaagctttaaggccatagaaaccctctcaaggtttcatgctgtctcactgccagctgcaggcttgtaaacacaggggcgctgtagggaaggcccctgctgtcctcattccgggataaacagaggtttacagagccttgtaaaagaagagggttggctcacgaggacttctcttgctcaagtaagtggggcgattaaagtcgaatagaaagttggaaagatccggagagaaacaatgctgtgagcctcttcagcagtggctgagattacaggtatccagaaaagcagagttgagtttctggttccatttgctcatgttgtgcacacctagccagcagacttcagataagtggtggttttgattgaggcgggccctaaaattcagagatacggaacataagttggttttgagctcttttgtagccgtcatgatagttcagtcagcttttccaagattggacatttgtttgtcttatacacattcggataccttagcttgctgtacctgttttcttttctctgacatctttcttctacagaatattcataacatgttgctgaccgttggtagtcaacatcccaaagcatactaccaaaaagccctgtttattagcgatccggacatttaaaatttttgagtcttgaatgaaagttgactaaagtaaaataagatgcgtaaatcccataccttaaatatatatatatatatattttttgagccggagtctcgctctgttgtcctgctggagtgcagtggcgcaatcctggctcaccacaacctccgcctctcgggttcaagcaagtctcctgcctcagcctcccaagtagctgggattacaggtgcctgctaccacgcctggctaatttctgtatttttagttgagacgggctttcaccatgttggccaggctggcctcgaactcctgacctcaagtaatctgccttcttcagcctcccaagatactgggtttacaggtgtgagccaccatgcccggctgtataacttggatacttttgaatggtattgattgctgttttgtcagaagtccgccagttgg

SEQ ID NO: 18896 - DNA, 1818 bp, Homo sapiens
caccagggttacaaacaagagcccactgctggctccttgttttgtaaataagatttgttggactacagctatgcccgtacatgtacattttgtgtatggctgcttttgtgccacaacagcagggttgagtattgcgacagagacccccattgcccacaagcctaaaacatttgccatcgagccctttaagaaagagtttgctggccgtgcgcggtggccgtggctcccgcctgtaatcccagcactttggaaggctgaggcaggcggtgaggtctggagttcgaaaccagcctggccaacatagcgaaaccctgtctctaccgaaaatacaaaaattagcctggtgtgatggtgcacgcttgtaattccagctactcgggaggctgagacagaagaattgcttgaacctgggaggcagaggttgcagtgagctcatattgtgccattgcatgccagcctgggtgacagagtaagactgtctcacaacaaaacaaaacaaagaaaaagtttgctgacctctgatctgagctcttgtctcttgcctggacaattgctcctgacttgtttcctaacttcactctcagagtagtcatcatggcctttgaaacattatgcaggtaaggtaattatcttgcttaaaatcttctaatgttgtccagccactgttagaataatgtacatttcttacactggcctgtgagggcctgcagaatcttgctccatactctctccaatgtgatgctgtaccattccatttttgctcatgacatctggccacaccagctccttgctgctcctggaaccgtccaagccatttccatgttctgggtattaatacttgtttcccctacccgaaggactcttcccctagctcctttcgtatccgacttattctcatcctttgggttttccctgactttcctgattttcttgtcagaagtagttcccttcactacagagcaggatgcatcagcttgtcactgttcattccccagtgcctaatataatgctttggcacagcataagtgccagataaatatttcttgaaagaagactgaatgaatggatgaatgataaacacatttcaaaatcatttgcctttctgttcattttttgagatgtagttaaatatggtaaatctttcctgagtaatttagactctttggtttgttaaacaaattttatgttagacagttacttctgctaatgcattctttttaaaatcgtgtttaggaattccatatttaaatcaggaagaagaaagacagttaagagagcagtatgatgaaaaacgttcacaggcgaatggtgcaggagctctgtcctatgtatctcctaacacttcaaaatgtcctgtcacgattcctgaggatcaaaagaagtttattgaccaagtggtgtaagttcctaaattaaaactaagcgtgcattgtgtgctatatattggggatgacaggcatctatatctcaaacctgtgctttacaaacatagtacacacacgggtgtgatgttgtgaatggcaggatataattgtggcatattaaaaaaaaaatttttttttttttttttttgagacagtcttgctcttttgcccaggctggagtgcattggtgcaatcctggcttactgcaacctctgcctcctaggttcaagcaattcttgtgcctcagcctccagagtagctgggattataggcgtgcaccaccacacccgcctaatttttatatttttagtagagacgaggttttgccatgttggccacgctggtctcgaactcctggcctcaagtgatctgcccgcctcagcctctcaaagtg

SEQ ID NO: 18897 - DNA, 1029 bp, Homo sapiens
cactttttttgccagttagttttagcatctattgatagttcttgctttaagcaattatcgttgactgatggtggttttctacgttcattgttctttctacaaattccttagtgtcccatggctttgttgttattgttgttttgagactgtctcaccctgtcgtccaggctggagtgcagtggcgtgatcttggctcactgcaacctctacctcccagattcacgtgattatcccacctcagcctcctgagtacctgggactataggcgcgtggcaccacgcgtggcaaatttttgtactttttggtagagagagggttttaccatattggacaggctggtcttaaactcttgatcttaagtgatgcgccctcctcagcctcccaaagtgctgggattataggcatgagccaggcgcccggcctcccatggtgttttgttttttttttttttttgagatggagtttcacccttgttgcccaggctggagtggaatggtgcaatcttgactcaccgcaacctctgcctcccaggttcaagcgattctcctgcctcagcctccagagtagctgggattacaggcatgtgccaccacgcccggctaattttgtatttttagtagagacagggtttctccatgttggtcaggctggtcttgaactcacgacctcaggtgatctgcccgccttggcctcccaaagttctgggattacaggcgtgagccaccgcgccccgtccccatggattttaataccacccgtgtcccaatgataactaaatgtatatctcaacacctttctcttgagctataggcttgtaactgcagcttttaatttgtgtattcccttagatgatttaacatgtccgtggtagggcgcggtggctcacgcctgtaatctcagcacttttagaggctgagatgggcagatgacctgaggtcaggagttcaagatcagcctggccaacatgttgaaaccttgtctctactaaaatacaaaaattagctgggtatggtggcgggcgcctgtaat

SEQ ID NO: 18898 - DNA, 1057 bp, Homo sapiens
gggtggtctcgatctcctgaccttgtaatctgcccgcctgggcctcccaaagtgctgggattacaggcatgagccactgtgcccggccagtgttttttttttttttttttttttgagacagagtcttgctctgtcacccaggctggagtgcagtggcatgatctcggctcatggcaacctctgcctcctgggttcacaccattctcctgcctcagcctgctgagtagctgggattacaggcgtgcaccaccacgcctggctaatttttgtatttttagtagagacggggtttcaccatgttggtcaggcgggtctcgaactcctgacctcttgatccgcctgcctcagcctccgaaagtgctgggattacaggcatgagccatcacactcaacctgttttttgttttttttttaagaggcagagacttgttctgtcacccacgctggagtccagcggtgtgatcacagctcactgcagacttgaactcctgggctgaaatgattttctgattctcccacctcagcctgtgggatagttgggactacagatgggaaccaccacacctggctaatttttaaattttttgtagagatgggtctccctatgttactcaggctggtctcgaagtcttgggctcaagcgatcctcccaccatctcctaaagtgctgggattacaggtgtgagccactgcacccagcctaatatatacttattttaaaataattttattattattatttttaattgaaatggggtcttgccatgttgcccaggctggtcacacaaactcctgggctccagcgatgcaaccacctcagcctccggaagtgctgggattacaggtgtgagccaccatgtccagcccagtctaatgtttttatttaaatctgggaacatattttggctcatgctaggttcgagatatatttgtttcgtaaggcttattattgggaactttccttttgatcttttttgttttgaggcaaggtctcactttgtcactcaggctggagtgcagtggcatgatggtagcccactacagcctcaacctcctc

SEQ ID NO: 18899 - DNA, 1184 bp, Homo sapiens
cgaggccaggagatcgacaccatcctggctaacacggtgaaaccccatctctactaaaaaaaatacaaaaaaattatctgggcgtggtggcgggcacctgtagtcccagctacttgggaggctgaggcaggagaatggcatgaatccgggaggcggagcttgcagtgagccgagatcacgccactgcactccggcctgggcgacagagcaagactctgtctcaaaaaaaaaaaaaaaaaaaaaaaaaaaaaaagtcatgctctttgatccagcaattctagactgactctgaaaatccatctgaggaccataaccctaaataaaatacaggaagagctttatgcacagagaagtccttaacagcactacacaaagaacattacctgaaaatggtcacagaaagcaagagaatgcaaacactcttagttgtccaaaagggcaacagttaattactatatattcacttgaaggaataccatgaagacattaaaaataaactatactttgaaaaattattattaaaatgatatattcctgttttaacaataagtgaaaagagccagatacaaccatataaacacaaacacacccccttcgattaaagtctgggaaaaaagagaaaatgttgactgtggatgcccctgggtaatctatcccatattccttatttctaaattcagtaatttttacaaatatgacaaaagcatataagaccatctttcttttcactcagcaagaacagcaactagacaaacgggtcaactttaaaactttcagaacaaaataagacattatttctttaaaatagccacctgataccacattacctgattacaaaggtattggcccaggccaggtctagcagcagcactaagatatatgacaggcttcttgttatataacacattgaagccatccactacgaagtcttcatatcgagaatgaatggcaagcctacatatctttgcaagtccttctctttcctcttcgtggaaataagcacacccattttcatatctgttaagagatacatattaatatgctcttatttctagttaaggattgtataagtcaaccttataatcatggagacaattcttttctcaagctaggaattgtcacttttatcaggcagagaggacaggaatgtgaaacatcctcatcatagatggctgacacctcat

SEQ ID NO: 18900 - DNA, 1095 bp, Homo sapiens
aggaattaaacattgtatggttcaaatttcttcgcttcagactcactgtataaatataagcaggtttttttgtttttgttttttgtttcgtttttttgttttgtttttttactggagctgccacaattccactgaaatgtggagaaaatcattctaaagttctaaaatcattcaaagttgctgaggttcaaaaaaagttatattttgaaaacagatgaacttatatactataccaagattttgatgtaattcactttcttcaaactttcctgcaaccgttgactctgcaaatgacaaaaaataacacatgtaattagatggacgtgggacatgaagaagtggttttcaccaggggctgtggaggtctgtgaacacggatgtcaggcaaagtcacctgccacttggtggtttctaagttcagccacctgtttttgtatttcaacaactgtaaatattcaccaatccttcaagttacatgtagtaattcaagaaaagcagtttctaataagacatggaaatctgttgtatttgcaatgtaagtctgtcattcaaaagctactgagtataaacacgtgcaaggcacagtactgaacactaggggagaccaacgacaaatgagaggatgcagcacgctcaagagctggtgataagagcacagtgctgccactcatcacctgcaggaccacggataagtcaattcatctgccagtcaccagctatgtaacctgtctatgcttcagttccctcaattataaaatggggaggatagtatgtatctcacattgctgtgaggattaaatgagttgatatgcaatacaggaagtgcttagaaacagggtctagaatgtagtgtcattagactaatgtctcaatcccaggtccctcatcactaatcatatctaactcatgggattggagtatattaattcaacagatattcactgagtactggacagtagaaagcccctcaagaaattcctttttgttttcttaaagaaaattaattctgaatacactgtcatcagtggaactgacattctagtgaagttgcagggatcaaatgagatgatgcatgaaagtacttcatggtgcctg

SEQ ID NO: 18901 - DNA, 1047 bp, Homo sapiens
gagccccacagcctgcccgtctgtatgctctcctagaggtctgagcagcagcggggcactgaagaagcgagccacacccccatcacatgccctgcgagggggacaagggaacctttccggtttcaacaccatgtgacttccacttataaccctctctgccaggtggagaatggtctggaatgggctgtgtagaatgtatgaaagtcagaggtcagttgacaggggacaatggccaaccaggtaaaaaaagagtggtgccctggactagactggtggcacttgggtcattctttaagatacagattcctgggcacaacctattgactcaaaatatgtgggaagtaagacccacaaatctttatgttcaagcaactctttcttagccattccagcactggtccagggactggcatttgggaacccctggtttaatcaccgcaaactatcagcaaattgctaaggcgtttcggactgtagttttcatgaaaattattacatttttctgaaatgctgactgaagattgtcagcaataaaaatattttgaactatttaacttgaaatggtatcaaattcaaagcctttaacacagatatgaaaataaccctcttttaaaattcaccgacctgagcctggtaattcctggaaaaatctgaacaccaccactggggagctgagctcatcttccacctggaagaatggaagtctcatatcaccaagtaacattaaactccagacgccttcaaaatgaaatgctgagttcaaaaactcgcttagaaatgctctatttgtaaataaacacactaaaaagttcagaggttaatttcagttgctagagaaaaatcaaatgtttagtaaaattttaaaaaataactatgagccagccttgagagtacactgtgaattataagatgtttgaccctggtacattgaaattaaagcagggggaaattttaataagggataaacataggtctaacattaaagattaaaaccagtaagaagcagtgaaactagactcagtgcggagagagcccatgctttcaaga

SEQ ID NO: 18902 - DNA, 1040 bp, Homo sapiens
tcctaggagtctaaaaaggaaagagagagttctctgggagagatttgctagtcaatactggtcgattctaaattctccctctgtggtctgtgccaaggctgggctggcttcatggacacgtgacccatgcaggcccaaaatggtattttcattttcctatcatcttggcccccgcagggggacgtaatcaatgccattatgttgccacacactctgctccgtggttctcagaacgtgcttgtcagctcttcctgatctgttgtagaactgtgatcgctcagggagtcagaggcaaacctggtggcccagtggcaaagccatggtggtcgcagctctccttactgctactacttggagtttattatgaggccccttgaggctgtgccctatgttgggtacatccaagcttctggttcatcccttaggaagattttgtgtctgagaaggcagcgtaaagtctggcaacactttgccgagcgtgaattcgcccacttgacgggctgtggaaaagggggttagtagatgagtgtgggaaacactgggttcaagaaagttagttggatttttcagtcgcaggacttctcaagagcttcactgtgcaatgcgcagtgtgactcctaaggagggcttccagcaggcagttgcccagtctttttgttttgttttgtttttgttttagagccggggtttcaccctgtcacccaggctagtctcaaacttctgggctgaagcattccttccacctctgcctcccgcgtagctgggaatagaggtatatgccagcacacctggcctcaaaccttttttttttttttttgagacagagtctggctctgtcacccaggctggcatgcagtgatgcaatcttggctcactgcaacctctgcctcctgggtccaagtgattctcctgcctcagcctcccgagtagccgggattacagacgcccaccaccacgcccaacttacttatttattttttccccctgagacggagtcttgctcgattgcccagagctggagtgcagtggcgcgatctcag

SEQ ID NO: 18903 - DNA, 1031 bp, Homo sapiens
ccgtcggctcgcgtcttccccttgaggggtcggggagtttttgccttctttagacttcagcgggctgccccggaggccactctctgacaagggaggggacgggggcccagagaggttaggtgacttgcccaaggtcgcacagcactgcggctcggggacacgccgggacccccattccccgacggggcggctgcagcccccatagggctgggtccgtttaggcaaatccggccgcccgccttcggggacccgcagcctgcggtgaacgttgcttcgtccttgcgtccccgtgaagcaggaggttattccagggtgggcttcggagagcgtttggcctgggggatcttggcggggacccccagtccttcctcctctctctcccctacccccggggcgtagggcgccgagttatttttagccgggagagagagccctgctttccgcagctgggccataggaccacgccctgatgcacgggttttgtttttgttttttctgcttttgtgctcaaatagatctctgaactcttgtccacgcttatgcagggactgttggcaagggggttctcaggttttaaaaagagcggggcgtggcggcgggggcagacgtcctatttgccatagatcctgttaaaggggaatcaatcagttccttgatttgagagtcaaatatcgagcccctaatatctgttgggcaacgtactgatcactgtccctgccctcggagtgtttatagtctagaagggagaatggtttctgatgaagaaggctcagatactataaactgttaagtaccataaagaaaaagcgtcccctttcactctgagatgggaagcacaggaacctgaccaagtgtgttgggttggggaaggcatttagaggtttcatctgtcacagctgtacagtttgtgattattttgtttgcttgtttgttctctattggtctgtcgccagaatgtaagcctcctgaaggcagataagagtagtgtcctcacttttgtatcctcagagtgtaggacggtccctggcata

SEQ ID NO: 18904 - DNA, 1042 bp, Homo sapiens
cctgaaaatgaattaataaaatattttgtagcaatagaacaaaggacaaaaaccacataatcatctcagtagatgcagaagtgtgtgacaaacaccaatatccttttacgagaaaaacagaaggaaattttctcaacctgataaagggcatctgaaaaacccacagctaacatcatattcattggtgaaagaccaaaagttttttcctaagacaaagaacaaaacaaggatgtccgctcttgctgcttgtctagccaaggcagttaggcaagaaaaagaattaaaagcatccagatggaaaggaaggcgtaaactctcttttgcaaggtgattttatatgtcattctaaggagtttacacacacacaagaaattttagagataataaatgagttcagcatggttacgggacagaagactaacatacactaaccagttgttcaagacaattgaataggggagaatagtcatttcaacaaatgctgctggcagaagtggatatgaacatgcaaaagaatgaagcatatggatatccatatttaaaaatgaactcaataaaagccctacatgaagagtaaaaactgtaaaactctgagaagaaaacgagtacattttcatgatgttggtttaggcagtaatttccagatttgatgcctaagcacaagcaaccaaagaaaaaaatgcatcaattgtacttcaaaattaaacgttgttatgcttcataggacatcttcaagaagatgaaaaggatccccaaataatgggaggaaatatttctaaattttatgtctggtaatggacttgtatatgtaaagaactcttataattgaataataaaagggcaaatagcccaactgaagtgggcaaaggatctgaataggcatttctgcaaaaaaagcacatgaaaagaagctcaacatcattagccatcagggaaatgatttcacttcatgcccacaaggatggctataatcagaacgagaagacagtaacaagtgttcacaaggatatggagaaatgggaagttggaactgtcatatgtt

SEQ ID NO: 18905 - DNA, 1076 bp, Homo sapiens
gcttccatgtgacttgtaagtgtgccttgttttttatttaaactatgtctgtagttgacaaaagtggcttcatcacaaatttttttaaacgtttctactttggggttccatttaggagctttctagaaagttgaggatgtttgaagcttcccttctgtgttccagtttgatatgggttaggttaaggaaaaggagatggtctcgatgtcatggatttaaagtcagcatttggattacaacacacattattgtgtgtcgagaggcagcattggaaagagcctgattttctaaaatatgcatcaagtgcataaattacaaatcagagctgagtggggaggtgcttcagcagcagcgggatcaatacgatttccactgggaagagacaggaattctacctacacataggaaggccaaggttgatccacttaaccttgttattgtaattttaaagctggtatcggtagctgggaagctttatgtgtgtgtatgtcagctcagcatcttttaatcgtgtctgattttactctcgttacttctcgctgttggaagcatctctgggtttcttgtggcgtctggtgtggaatggccttcctctctaggtgcctgaggtgtccgctgacgggtggcctctcacccccctctagagaaacctgacatttacaatggattgtatttgtccggcaaaaaaggcggattcattcatagagcagaaagaacctgttggcgtaaggtcttccactagttagatggtttcttttggggaaatgtttatatttggtaacttctagaaagccagaaaatggactctgatttcatagcattttgataaaatgccacaaaataagggctatagagagatttttacaagtcagattttttgttccccaaatcttttaaatgaagccagtgactcccagttctcaacacatggccccagtcaagacagaacaccatggaaaaaaccctgtaagtattatggcactctccgaatcctcctgaaggcatttcctctacagacatagtgttacaggaagtgaaatgcaaatgtgcaattttttttaaaggagcttttaaac

SEQ ID NO: 18906 - DNA, 1055 bp, Homo sapiens
gagtaggccctctctcacctccccagcccgccctggggacgcatatgggcaagtcgggtctgcacagaagccatgtgagtgttgcttagagtctagcctccccatccctaccccccttcgagcacagcaacccacacttcacaagcttggaccactggccatcagctggccagtctgtgtccttcttatagtggggtttggaaagaatgaatgaaaaataaagagaatgatgcaatttcctcccccattattatcttgttgagagttttcagttatggaccggcagggggaggacagtttctgcttccatgttggtctggtgtcccaaagacgctaaaaacaaacccacttgctttatttcagtgtaagagaaaaaaattagagatttttcatctgttggtctcattaaccaaaatgaagtgagctgagttgggtataacctagggtgtctctcttgagctctgaaaagtgtgaattctcgttttccccaggttgccgatatagaatctggcagacagattcagctgatcaaccgaaagtctctgcgatctctcactgcccagttgctggtattgttgatgtcttgggaaggaaccacccatctttctgttgaggagctcaagagacattacgaaagtacccacaacactccccttaacccctgtgaatatggattcatgaccttgaccgaactgctgaagagcctgccatacttggttgaggtaggcacgttaatggctctttagaactatcattgaaaactatcgattgggcatttccggattacctgatggtctagattagagtgtgtagagctggaagggacccgagagaccatttcatggatgaacacgccgagacctcaggcagtgaagcagccctgcctaaatgggtggcagaagccagtgaaagcctggtctcctcatcctggcactggggtgtgtttgtcccgttctaggatgaaagcctggtctcctgatcctggctctggggtgtgtttgtcccattccaggatggatttcgctactgttttatctttctgaatgagatggttt

SEQ ID NO: 18907 - DNA, 1051 bp, Homo sapiens
ccaagctgattgagttattagaagcagtgcctcatgtattgcaggtaaggcgtgtcacgggattacttgtttacaggcaggaatgttcctccatggctttggctgcctccatcaaagaaacagtttaattcctaagaagtcagttctgggcagaacatccactaaaaactttcttcagagggcaggaataacacacacaggcggcttctcaatttttcagaacgctgctagtttccagttttagaggaactccttggaggactgaggagtattttccctctaagctctatagaccttcttcatcccagcacagctttctccagaactgttcatgattacaaggaagctcccatgaatagccacatacttgtatgttggtgcctatgtgagagtcaagggcttaacctttcttctaaatttaactagttggagacaagttactgggctagagtgtagcactggatcctatgaagacttttaccagttaactcacagtgttataacagcttcccactcactaaaaacggcttgaaaaacttgtagaccaatttgtctggacaaccaatacagttttcatttctgtactcacgacttttcttttcaaaagattacacttttcatttttatactcaacgactgtttgggagaaggtgtgccaggccaaaaacgataagagtttcagaaggccttggacatttgttccttttgaccaactacattttgttgatcgacatgtgtttcaaattgcacacattctacataaagggagtcatgctctgaggctagtaacgagagggtgagccagcagcaaggaagtcgctgtctgctgaggtcttatgtgtataaataaactatttgctttgcagattcttggaatgggctccaaacgtctgctgacccttacccacagggcccaggtgaagcgctttactcaggatttactaaaacttctcaaatcccaggccagcaaacaggtcattgtgagagaattctcacaggcttatcactggtgagttgatgaaaagaacagaaatgaaagtaaatattttag

SEQ ID NO: 18908 - DNA, 1049 bp, Homo sapiens
ttgtactgctgctgttagtgcttgtaatcttgaaggcaaagtagtttttgctattcaactttatatatatatacacacacacacattttttttctttttttttttgtttttaagagatagggtctcactctgtctcccaggctggagtgcagtgacacaatcatggctctctgcagccttgacctcacaggcccaggtgatcctcccacctcagcctcccaagtagctgggactacagctgggactacattcctggcgaagatttttattgtaaatgaaagaccagatttttataatagggacagtcatcagcttaactttattgcacatctatcaagcatagtagacttcattttttataacacttttctagaagacctaaaattgttaccttctgaggaaattgttaattttttttctgtccagcaaagttacctaaaataaagggagagagatttccatctgttttccagacccttaaagtagtattggcactgagaataagcagctgagaactaataaagcgtgtgtataatcacattgtagaattagaaaacccagtgataaaattgcattttctagcagcttatctaaatttatgtatatattttttcctattatcaaagttgttgcaagaaagatgttttatcagttgtagaaagtgtttggggttcatatattctcaagaatctagtttttgcattacatttttgttgcattaggatattaagtctctaggttctttttttttcttctcgagacaagagtcttgctctgtcgcccaggctggagtgcagtggcacgatctcggctcactgcaacctccacttctgagttcaagcgattctcctgccctcagcctcccaagtagctgggattgtaggtgcccgccaccacgcctggctaatttttatatttttagtagagacagggtctctatctcctgacctcaggtgatctatttgaagtggttttcattgtgttgtaattgaagagctttggcaaccctcaaaatgctgattgaacaccttgtcctttcttgcaaattt

SEQ ID NO: 18909 - DNA, 1206 bp, Homo sapiens
ctcgtgtgtgtgcacaatctgtcttgaatataactctctccctatcgtgtaagagggctgtttccctccctgacattgaaggaccccaccttcagcaggcatctcctgacacagcagaccccatgagcacagatccctgggacctggtggctgcccttatcagattccctgacatccccatcttaggacccaagtctgaccaccttcggggtctgcagctgtgttacagaaaaggggtcctgatccagatcccaaaagagggttcttggatctcgtgcaagaaagaattcagggcgagtccataaagtgaaagcaagtgtttgtttgtttgttttttgagacggagtctcactctgccacccaggctggagtgcagtggtgcgatcgtggctcactgtaagctccgcctcctgggttcaagctattctcctgcctcagcctctcgagtagctgggatcacaggtgcccaccaccacacctggctagtttttatatttttagtagagactgtgtttcactatgttggccaggctggtctcaaactcctgacctcaggtgatctgcccgcctccggcctcccaaagtgctggtattacaggcatgatccaccgtgcccggccaaaagcaagttttttagtaaagtaaagatctaaaagaatggctactccatagagagagcaacccagagggctgctggttgcccatttttatggttatttcttgatgatatgctaaacaaggggtggattattcatgcctttccttcttagaccatatagggtaacttcctgatgttgccatggcatttgtaaactgtcatggcgctggtggagtgtagcagtgaggatgacgggaggtcactctcgtagccatcttggttttggtgggatttggccgccttctttactgcaacctgttttatcaggaaggtctttgtgacctgtatcttgtgccgacctcctatctcatcctgtgacttacaataccctaaccgtctgggaatgcagcccagtaggtctcagcctcattttacccagtccctattcaagatggagttgctctggttcacgtgcctctgagagctgggctcctcgggatctcctgacatcctgccccttctatccccagctcctggggccctccgccctcactgccatcgctgtcttcctgagcctcctccctctgaatttcttcatctccaagaaa

SEQ ID NO: 18910 - DNA, 1044 bp, Homo sapiens
taaattgtttcttcatctcattgtcccagcagctgtggccaatcatcatgtggctaaggacaaaacccagacgcagccctggcccaccatttgtatagacagaatattataaattgggtatttgaaaattaggacctgctgggcatggtggctcatgcctgtaatcccaacactttgggaggccaaggcaggcagatcactttaggtcagcagtttgaggtcagcctggccaacatggcaaaaccccatctctactaaaaatattttaaaaaagttagccaggcatggtggtgggcacctgtaatcccaactactaaggaggcagaagcaggagaatcacttgaacccaggaggcagaggttgcagggagccgagatcatgccactgcacttcagcctgggcgaccaagtgagactttgtcttaaaaaaaaaagaaagaaagaaaattagaaccactaggaaagccagggctctggctttcaaatactcttgccctggtccccagagtgggcactgacccaagatcagaaaccttttctctcctctgagcaccctcctctgtctccattccttatcttctgctttccctcccacagggcttccagagcgaccctgtccgccacctgtccacctacctatgcctgtctctggtggtggcacagtttgtgctgtcctgcctggcggatcaaccccccttcttccctgaagacccccagcagtctgtaagtcaccaagttccaacctcattcctgttccactttgaggtctcagtctcccccaggtgaccaaaagtctttaatttttttattcatttagccattcagcaaaaagtgtaccacatttctactcgatgccacagttggcagactttttctatatgggccaagagaaaatattttggactctgtgagccatacagtgatctcagtggcaattactcaactctgccattgaacgcaaaagcagaatatgtcaacaaattgcatggctgtgttgcaataacactatttgcagaaacaggcagtgggccagatttggtcatag

SEQ ID NO: 18911 - DNA, 1058 bp, Homo sapiens
tcattggtgggagcagcgttcttagttcagtgcctggacagcgtgttccttagatattctaataatttgtagagcttcaggatttgagaccctatgattttatttcagccttattatgtaagaaagggttggctgtagtctctcttgtcgagacttgatctctaggctatgtaaaatctgatcatcctggacagctctccagccaacagggagcacgccagtggcctgacactgccatgtattgccttgttccatctctttgcatgcctttgctttttctcctaggcaggcgtagtcttacttaggtgtattttttgaaaagtatgtcaagcattgtgcacagaataagtacccatctgaatgctgggttggttggtttggaggactgtttatttatgaatgtcatcttgtgttactcagtttttctgttattggtaaagtgaagaatgtttttgttgttgttgttattttatagtgtggggtgatcagccccagatttgacgtgcaactcaaagacctggaaaaatggcagaataatctgcttccatcccgccagtttgggtaagttggcctttccttaattaaaagaagttaatgctaagaatttctgtggtgcagtttgacttaagggtttttttctttttttctgtttaaaacaaagcagtggtaatttgtctactcttaaccattttgacctaatagctcaagtgttatccatatttcttttctctctctttaaaaagagacagggttggccaggcacagtggctcacgcctgtgatcctagcattttgggaggctgaggcaggcggatcacctgaggttgggagttcgagaccaccctgaccaacatggagaaccccgtgtctacctaaaatacaaaattagccaggcctggtggcacacacctgtgatcccagctacttgagaggctgaggcaggaaaatagcttgaacccgggagagaggttgcggtgagctgagattgtgccattgcactccagcctgggcaacgagtgaaactctgtctcgagaaaaaagagagagagacagggtttc

SEQ ID NO: 18912 - DNA, 1087 bp, Homo sapiens
ggttcggtctcggtgtcctgcgaggaggctggtccccaccttggccgaggatcctggccttgccggttcctggacaggcatagaggagagccatggctgggcgccccagactgtgcactcaggggatcccggtccgtggggtgcaggccgcagcgcgggcgggagccggagccttcgactgcccagctaggcggtagctccggttcgggccgcagcgtctggatctccctttagtgctgaggcagcgccttggccccgggcggcgggcaacatcggggctggtgggccgtgcagcttctcactgctgcggccgcgctgggagcttgggaggctgaggccacccagcaggtaaaagctgcatcgtgccggggttggcagtttgctgggtgccaacttggatcttctgggccgcagagtttttctttagacacttttgaacttaaggaatttaagttctactctttactattggcactttggtctttcaaaacttcagtgtagtgtgcggttcttgcccattagaagagagtccagtctgacaagcatgtaaaatgtttctgtttgccactgtggctcttgctgttggacgcaattttaaatggcacgaagatggatgtttaatagttagatgtgttcattgtaggtgagagtgaactgatttaaagtacaatgttaatagtatggaatctgctgattttcagcaatttggaaaatgttgccgatgatactctgcttctgttctgaatcactgatcgactatacccgatgttttccttccggtagctggcagtttctgccagttctcacgttgtcttgtgtcaagtggattttgtcccacattttattatctccagacgttggtgtgtggcacgattcgaagaagagtggttagtgaatgaatgagtttcaaaatgtgcaggctgacgtcccgataacctgttttcaacaaccgtagtaaataggaattttcctgggtggtgggaaatggagaagcagcctgcttagacttgagaaaacttcgccaaggtggggccagaaaggaaaggatacttccgcagtgtaatggttggtgtctgttgatgttggc

SEQ ID NO: 18913 - DNA, 2213 bp, Homo sapiens
tggctcacgcccgtaatcccagcactctgggaggctgaagcaggcggatcacctgagattgggagttcgagaccagcctgactaacatggagaaaccccatctctactaaaaatacaaaattagtcaggcgtagtggcgcatgcctgtaatcccagctacttgggtagctgaggcaggagaatcgcttgaacctgggaggcggaggttgcggtgagccaagattgcgccattgcactccagcctgggcaacaaaagtgaaactttgtctcaaaaaaaaaaaaaaaaagtaataacctttagcaggttaattgctgcctccttaatgttgggtttttttttattttaagtgacttccttactattgcttcctggactaaaccaacatggaatcattttgaagtacattggaatggccaagagggagataaacaaacttctcaaacaaaaagaaaagaaaaacgaatgattcatctgctttaatcagtgtgattaatgcagcacccattgccccgggaaccgtttctgctgtactatctggatactaaaatgttacggaagtagctctttgttctccctcactctgcccttagttaatagaaattcagactcgccaagtaaggcttcgtgcatagtgtcttcatgtcgcgtatagttgagcgcgttcttagcagttggcttcatggacaactcattagtgttttgacttttcttacccagcgttaattgaattcttgcttttagacaacttcctttttgtagtggtgaaccttgccctttagtacagttcaagtgaatctggataattgttcatctttgctttagcttagataccatgtagtggtctgtggctacaggaagctggttctgtctgcttccacagtctgcttaaaaaactgtctgacttcgtgaatatagagaccaagtttaccacttctgatgaagagaccaattaagattcattcctcattctgtttctttccagtgggagaagagtccccatgaaataagatgaaactgattccatgcactagtacatgtaggcttctcccttgtgcaaagcttagcaatttgtaggaaactttgatctttttgtccaagaaaaggaatgtctgacaggcttaagctttcgtccccttgcacttagactcgaagttagtaaatccttaaaggctttttaatagcagacttccaaaagattgcatttaggatttctagcatgcttttaatttcagattttcagctgacattagctatagtatacagtaggttaagactcatgtctatgactttcactctaagactggcaaaaggacagcagtcttctatgtttagtcaatattcatttcagtagaagataatcttatctaatttttgagaccagaataagccttttaaggtaaacctcaaaattatcattttatggtaatactgaccattttagtcccctaggtttgacatgggagatagtgactacactggtgtctgacttttttcctagagatttctccctgaaaaatacaagggctgttggtgagagcagacttgaggtgatgatagttggcctctggtctacaaagatttcataactccttggaaagcttcttataatcattcttaacttcttggtagctagaaatttagagtagttgaaatctttaggaatgaacttctgagggccaaaaaatgtgactgacgggaacaattcttaaactgattaactagctgtaatatagttttgtgaatttattgcactgatgttgtaccttgtggtatatctgtccctattaaataagtgttgttttctcctctttaatattgctgtgaacagtggtgcccattgtagcatatgtttgatttttttttattatttcataagaaaactacgttaattttaccttactttcattgtaaataagcctgtcttcctatctggattttttgtgtgcatacatattctactgattaactacttttgcagttttaatcctgtattatttcttctactttgttttgtgtaaaaggggaaaaaataaaaaaagctggaatcttcatgtctcactttctttataacttagccaatataatatttatgattggatttatgaatctgattaatgaagtaccctgtgtggtccttagatgtctataaggtaccctacctgtaatcccaccactttgggagacctgggcaggaggttcactggagtccatg

SEQ ID NO: 18914 - DNA, 1035 bp, Homo sapiens
gagtttcttattctaaatttttcttcctttaccaaaaccagctttaagggcttttgccacattagctcatcctagaggcccactttcggctgttcagagtcagagaaatttgaagtataatcaaaatgacatcctgagtggtaagaaacactgtattgaggaggtatattgaccgtaaaatgccaccttaatttggtgaaagtagttttccttaattgtccaatgaatgtcaacatctgagtgattccattacacaaagagctattttagaaattgaatgctattcagggaaagtctttcctaatggatttagaagggtttaaatcaataagatgacaaaaacaacggatcaattctaaccatctgaaataaacaaacttaaaaaaagttatttcattttattaatactctgggcactgccacgattccccgcatgactttgagaaagtaaaccattttgagctcactttctttaattgtaaattgagtctaattatccctaccttgtggctctctgtaaggattaagttacatcatgtatataaagaatagcccagtgcttggactagaaaagtgaccattaaaggatatttaggctgggcctggtggctcacacctgtaatcccagcactttgggaagacgaggtgagtggatcacttgaggtccagagtttgagaccagcctggccaacatggtgaaaccctgtctctacaaaaaattagtcgggcgtggtggcgggcgcctatagtcccaactactcaggagtatgaggtaggagaatcgcttgaacccaggaggcggaggctgcagtgagccgagatctccccactgcactccagcctgggtgacagagcgagactccgtctcaaaaaaaaaaacacaaaaaacaaaaaaacccattgtattttcatctttgaaattgcagtttttcagaaaccaactagtttaaaattggcaatttggttaagaggttattttttgtatttggagctttaaaataattgaagtctatgaaccacaaaaatgttgagagt

SEQ ID NO: 18915 - DNA, 1846 bp, Homo sapiens
attatttttggtcattgagttcttagtgtagtttgctagatgattattaagattcttttgtgtctgacacttgtggtgagttgcttttgaaatctgttgagatttccatgtgagaactgataatcaggctcttgatctgcttccctaaattacttttttagagcccaaaccccaggtttagggtgagggtttgtaatacaaagaaacacttccatcacttctgcccttaacccttgcctctattacctaagcttagtaagtagttttcttaatattgtccaatgtttggtgttatctgcattgttttttgtttttttaattgtggttgttctgacgtgtgaaatttaaggaaagagccattttttaaaaatgccgagcagggcaatgcaagtacagccaaatattagacttgatgtgcaatcttcggtcctttttaatctggggtattataggcagtactttaaattgcaaagtcttccgggcctattttcctctacatttttgtaattaactctgggggcttacttgttttggcagtactgaaatcaaaggagctggttcttcttttctcccaattattttcatatgaaagcacctacaattagcctgttagtcctattcagatacatcaaatatcagtgaatgctttactattcgcacatttaagcatctttgttttacataaaattagagtatgaaaaccagtgttcaattttttatcttgttgagcttgtaaaatgccagcaatttaaaactaggacttttccccccataagccaaggaggtagaattactaatacaagggttaaagaaggtagattttgttttcaatatttgggtaatattagaaagattcttcccacagggaagaactagcaagtgtcccaattttttccaaacgttggggaggggaaaattcactgtatcatgaaaccctaagggtttgttgcacttcctgctttttaggcctggataacagtatcaccatccttatttacagaagggtaaaactgactcttaatgagaaaagctttataagttcaagggctgtaaaatatgaactacttagggtcgtttgccttccatgggaacttggctagacttagaaaaagctgtttgttgtgctaatgtaaaagtgtcatacaatttagaagatttttgaagatggtaaacttagaagaattctatgttctgaaatgcacacttttagaatgtttttctttgaaaacaggctaatagttttttctttttttgacaaagtttcagctcctctttaaagttattgtgtcatttttctggtttaaatttcccttatatttccacctgtaatgtcagtggcaacaacatcatacttcacttacttgttaatttactttttacccttattctaagagcaagttgagttgaactgaatcttccttgtcttagtaacaatgtataaatagtggcttttctgtacaaaaggttgtaatgcctcctgatggatataattttgtgattgtatttaaaagttgaataaatcacaccagcttcctgaaaatgttcataatgcatcttttggaaaacaaatacatgcctactttgtgcatatttgcattaacatggcaaagattgtatgaaatacctgtttttcagaaaataaaggttcagtctcaaaagatacagcatttaagttctgaatttattggtcaaaatagattttggaaaacttgaaaccttttggaacctgggtagcttgaaaaaacaaaacgacagggtctccctatgttgcccaggctgatctcgaactcctgggctcaagttacactcccacttcagcctcccaaagtgctgggattacaagcct

SEQ ID NO: 18916 - DNA, 1792 bp, Homo sapiens
caccgcctgaacacggagattgtctttctgccacagaacagcagcagacgtgtcgggaggttagctgcggaaagaaatcgggatgccgcggagcacagagtgatttggaactccattccacctgaccctgtgtgtacaatccaggaaaaaaacaaaccccactcagaaacagagaaaactggggtcgcgaagaaatcacagccaaggaagatttgatgcattcagattctcgtgtaacacttgttgcttggcaacagtactggttgggttgaccagtaagtagaaaaaggctaaaggctatgcgatatgaatttcagaaatggactgaaaatggagagctatgtaacagatacactacagtagaagaacttacttctgaaatgaagggaaaaaaaccaccccatcgttccctactcctccccaccacttacccgttccccctttacctaatctagtagattagccatctttcaaattcacttttatttcagtccttatatttcatatacttccgtctcgatgctgttaacaacttctgataacatggaaaattcaaggattgtttaaaggtctgatgatcacacacaaaatgtaattccggttatttaagtcatttctgtgattctatcatgtacagtttccagaattgtcactgtgcattcaaaagtaatgaatctaacagacatttgatttaatgtacactcccttttgcttatagtgtgcattttttttggaggtcattcaaattttccctcttctgtgatagctgtagtttctttcatagaaagtagctaatccagtgtaatcttttacctttttaaaaaccaagatagagtatctattagagttttacattgttgatgatagattaacaataaagtgatgttctggtggaggtagactgaaatttttttaattcatgtttttcatttgatacttttaatttacacttagtaaattaaaagttgtttaatttacttggcattttaggacatgtacatgaaacagtgaaaatgagatccaccaacatcttttattaagttcagttattagtctgtgaagtgctttactttttgcacaattttaatagcttgctattcagtaatacattatagtgaattcatgatcaaggtttccttaaatttagcattgcatttcagtactgactgtgtaagctaaattgctgatccaaaataaaaacccagactagaatagggttcttaaaatcaagtatcaatacaaaatagaacacaattaaaatcttaattgttggctgggcacagtggctcacgcctgtaatcccagcactttgggaggccgaggcgggcggatcatgaggttaggagagcgagaccatcctggctaacacggtgaaaccccgtctttactaaaaatacaaaaaaaattagccgggcgtggtggcgggcgcctgtagtcccagctactcgggaggctgaggcaggagaatggcgtgaacccaggaggcggagcttgcagtgagccgagattgtgccactgcactccagcctgggcaacagagctagactctgtgtcaaaaataaatgactagataaaaaaaaaaattgtttgagtacattttccctgcattttagagattaggacagtggtcactttctagttgccgtcttcacagacaaacttgaaaggtattaaggaaaaaattccacatagctctgggccttttttgtattctgattgccacgttaatctgtaatcgttaagtacccatgaaagaatgtgtttcagtatcagtgcttttttggtactttaa

SEQ ID NO: 18917 - DNA, 1049 bp, Homo sapiens
ccataagtgaaaagttccatgcctgacctggtgatggatcccagtagtgaaaatctagtcagaacctgtttcatgcacaaaatcactgaaaatgtataaaattaccttcaggctatgtgtataataaggcataagtggattctgtgtgtagacttgcatcccaccaccaagttcctcattatatacatgtatatattccaaaatctcaaagaatccaaaatctaaaactacaggtcccaagcattttggataagggatactcaacctatgtttgtaaagcatctttgggtatcgggacatttgtctgaagtcattattctgaaattttttcattagtcttactaatattgaatatataaatttgagaataaagctacagaaaagttataggaatgcccataaacgttttacctagactcaccagttaacaatttcccatgtttcattgttctgtgtgtgtatgcacacacagtttttctgaacaatttgagggttctttgcagacatcttagcacttcatgcctaaacttcaccatgtgtctcttgaacaaaatactataatactgtagctactacataattgtcaactcaggaaacttaacattgttgtaatactattatctgacattcagtccacattcagatttctccaattatctcaaaatatcctttattgcttattcctcctctctgaaccccctgttcctccgaccttcaagatctagtcaaggatcatcatgcattttgtgtatagatagatggtcctccccttatggagtgacatcccaataaatccataagtctaaaatgcatttaataccccgataaacccatggtgaggtaaaaaatggtcattcagatccactgtgagtcagggactgtccatccttgtcctacttcttgatctgctttaatatctagaacagttcctgagcctttccctcttctcttccgttgatatttttggtttgtctagattagttggtttacagaatgtgcctccatttatatttgtctgatattttcctcataattcaattcattcaaga

SEQ ID NO: 18918 - DNA, 1098 bp, Homo sapiens
cttgtgttttcatcaactattttttaaagccagtagtagtagtttgaatttcatacacagagaagctaaggcttaattagattcctttattgtgatataacttgtaataaaaccaagatatgaacctagtctgagcattcagatatccagcttgtctttctctttcttagctataccaacaaacccatacagtttgcctccaaaatgaatgaaatgttgtctcttccctccagtgttgtacatagtctagtaagtaagaaaactaagcctccagaaaaggctattacttcatcattacaaacagtaaataatttaattttagaatttacttttactttgaatttttatttgatggtggaaacaaagttcctataaaaatggagttgaactaagcagtttaaacacactcatatttgaaacatttgttacttaatcactaggtgactgtcttgagagtaattactgatactaaaactatttttcttaatcattaatttatcaattctaggatgaagaagctgctctggcagatggtgaagatgttccctatgagaacagtgttaggcagtttttgggtgaatataaatcatggcaagacaacattcaaacagttctatttacattagtccaggctatgggtcaggttcgaagtcaagaacacgttgaaatgctccaggaaatcactcccaccttgaaagaactgaaaacacaaagtcagaggtaagaatgccttctggtcagaatttataaaacataagtacaaaactactggtataagaagtttatctcttgatttaatttttcagttttgttcatatttttataagtagtatcaggtaaaacatttcgtaaataagccattttattttgtatttcagtatctataataatttagtgagttttgcatcacccttagtcaccgatgcaacaaatgaatgttcgagtccaacgtcatctgctacttatcagccatccttcgctgcaggtaggagaagagtcctgagtcttgatctgttgttaatgttacacatagatgctaagatgtttaattatacataactgtctaatattaaacacttaaggcctgtcattctataa

SEQ ID NO: 18919 - DNA, 1086 bp, Homo sapiens
ggttaataactttgcaggtggctttttaaagttttgtcgacctgacagccgactgctagctgtacctattgcaaggactggattgttttggtgttgtgcatacatagctcaacattggggaattattaatagtttgctaaaagcccctaattgggtgatgatcacagcagtgttttccttctatctcctgtgatttcactgcatgtttggacagaggaaaagaaagagtcttaacaaagaatcctgtaatgcacatcggccaccagcgttaacccatccaggatggcccagatcccagtactgagttaaatgtagaaataagaacagcagatagttgtgtggattttaaaatttagttttgttgttgtttttgagacagggtctccctctctcacacaggctggcatgtagtggcgtaatctcggctctctgcaacctctgccccctgggctcaggtgatcctcttctcctgccctagcttcccaagtatctgggactacaggcacgagccactgtgcctgactaacttttgtattctttgtagagatggggttttgccatgttgctcaggctggtcttgaacttctgaactcaagtgatctgcctacctcggcctcccaaagtgctgggattacaggcatgagctgccgccgtgacctaaaatttacttttatgccatattgaatgtggaagaaaataagtgttctaatgtaatgtaaatttgtttctcccatcttatgaatatagataatgctaagtttgcaacagagagcacagaaacgtgcaagttacatcttgcgtcttgaagaaatcagtccatggttggctgccatgactaacactgaaattgctcttcctggggaagtctcagccagagacactgtcacaatccatagtgtgggcggaaccatcacaatcttaccgactaaaaccaagccaaagaaacttctctttcttggatcagatgggaagagctatccttatcttttcaaaggtaggatttaagacttcctccatttttcagaagagtattagtcttactaatgctttgtgtgagtgtgggtgtgtatagtaggagattatttc

SEQ ID NO: 18920 - DNA, 1173 bp, Homo sapiens
tttcttcttctttttccttgacaaatcttgataagtttttttatattagttttattttctagaaaatgtcttatgaatttctcctatttgctctagcatgcttatagaaaatgtcagtgtttcttacagctcaaatttgtgtagttgttttaaaatgcggtctctttcttcttcccctggtacttttttctttctgtctactgaagttagttcttatacatggtcttatattttggctgtctcttttccctaggaacattcatacaggttgaatattccttatctgaaatacttgggactggaagtgttttggattttggattttggaatactttttttttttttttggagatggggttttactcttgttgcccaggctggagtgccatggcgcgatcttggctcgctgcaacctccgcctcccgggtacaagcgattctcctgtttcagcctcccaggtagctcggattacaggcatgcaccaccatgcctggctaatttttttgtatttagtagagatgggttttcaccatgttagccgggctggttgtgaactcctgacctcaggtgatccacctgccttggcctcccaaaatgctgggattacaggtgggcaccaccatgcccagccggattttggagtattttcataacacttactggtgagcatccctaatctgaaaatcctaaatctaaaatgctccaaaatttgaaactttttgagcaccagtatgatgccccaagtggaaaatcccacacctgatctcatgtgatgagtccaaactgttgtatgcacaaaattatttaaaatattgcataaaatgaccttcaggctatgaatagaaggtgtctatgaaacataagtgaatttcgtgtttagacttgggtcccatcctccacatatctcattttatatatatgcaagtattctcaaatccaaaaatatacaaagtctgaaacacttctggtcccaagcattatgaatgagggatactcaacccgtagtccttcttttaggggaaaaaaaaaaaaaaaaggcttttttttttttttttttttttttttttttttttgagacagagtcatgctgttgtcgcctgggctggagtgcagtggtgcaatctcggctcactgccacctctgcctcccgggttccagcaattctcctgcctc

SEQ ID NO: 18921 - DNA, 1057 bp, Homo sapiens
cttcatctcccgacctcaggtgatgccccctgccttggcttcccgaagtgctgggattacaggcgtaaaccacctcgcccagcctcagagggatttctggtaccagaattatagattgtttttgttaccgaacttcctaagttatgctcattctttgtttattaaggggagacactagattttttttttattaccctttttatcatcatagagaactttagtagtctacaagaatattattagaggcttagcagtggcctcactgcacatacatgtatatgtctttgggaacctacaggtttttaagaagttgttaaacttaatatttactagatatttgtttttggatggcatctaatatattaatagcctagaaaaaaggctccactaatgaatatgtcttggattacatagtgacatatattagcttttcgtccacatttgataacattgctaacattttctttttttttttactgaagctctttgaatttaaagttttctctcatttaaatttattaattaaaaacgtacctttactctgttccctttagcatttcaacctgatgttaaaagatgtatatgtgtgatacgtgtgtttgaaattttaactttcatcttggagtatttaattctctgaagcagtgcatgactcttgctcttcagcctcttgagggtgtccctggtttatattcctgatgatacaaaccctggaatttcttgtctgaagtgttaacacttaatttccaggccctaatttgattttaatagtggaagttcagattcaatgcattaatgacagattctacgttgacttcttcagatttgccagacagaaaaacctacttatgtgaggaaatcattaggctttttgactatcctctttgtataatgagacccttttctcattagatgagtaaaaagatccagagatgatcaccaatatcacccagaattcatatatatttaattgaaaagaaaacaaatcctgggattctttcctaaaaaggttgattacatttcttgcctgtccgaacgttgtataaacgtgaagaaa

SEQ ID NO: 18922 - DNA, 1050 bp, Homo sapiens
ttctagttcgagtcattttatggacgccgacttcccgctgacattgtctggtgatgtcatggtgagaattttgacagtcattaaatttctgcctggagggccaacgggaccaaagaaactcagatgtgagtaggacataaagctaccgagggcagaaagccgttgtctacaaagttaacatgtcaaacacaagaccccctcttcctggtctcctgctagcattgtggtgatgagagccagctgtcttgaacatttactaggggacaggcagtgttctaattaggcacttgatttaactcattcagccctcccggcaaagaacaacgttatgggccaggtgcggtggctcacacgtaatcccagcactttgggaggcctaggcgggcagatcacgaggccgggagttcaagaccagcctgactaacatggtgaaaccccatctctactaaatatacaaaaattagccaggcattgtggcgtgcgcctgtaatcccagctattcaggagactgaggcaggagaatcacttgaactgggaggtgcaggttgcagtgagctgacatcacaccactgcactccaccctgggcaacagagcgagactctatctcaaaaaaaaaaaaaaaaaaaaaagaacaactttatggacatgcaccaccactccccactaattttttaattttttaaagagaagaggcctcacgctgttgctcagactggtctcaaactcctgaactcaagtgatcctcctaccttgcctctcaaagtgctgggattataggcatgagccaccttgctggccgtaggttctatctttatccccattttgcagacagggaaactaaggcatagccaggatacatacattgtatgagatcaggcagccagattcaaacctatgcttcctacattatacctttaatcaccctaaacactgcttcaagaaagtttttccaaataaatgtctgatgctttttttccatggtttgaggcaagaggaacaaaataagacatatgatgggatttttttttttgtaaagctcaatttacagt

SEQ ID NO: 18923 - DNA, 1816 bp, Homo sapiens
gccggcaactgtaaatcttaaaacttgcaggttctgtctctctctctctctgttttttttgtttgtttgttttggggggggtccttgttttgtatttactgaagaaaccggattattgttttgtagagtttacccaagtccaaattttgctgattatgccatgatatggcttaatatttttttctctttattttctataaactggtagcgagagctggaagcttgccttgatgaggttagggttggttattcttggcaagataactctagagatgagggtgtttttccgtcaggaggcacttgacatctggttgactcctgttgtttttggctgctattgatgctcattggccagatctgtccattttctagggagctacaaaatgctgatattttaattctattacttcttgcattagctgaaatagatctttaaaaagaaacttttcctcctctactatttagttaccaaataggcagaataaatgctttatctttccttttatttaccagtttccagaataacaagctggttccgtagcattctttaccagtgaccaacagagcatacattgaaaatttttacagtgaggatagagcctatcaatagaagctgtcatggagttgaatagggtcatggggcttgcagacatttggaacagtgtttcccaaacttccttgaccacagagtcctttaaaacgtataagacattcccccagaggagcacaagagcagagactaaaggaactccatccacatctctccatttctctgttgtcctctcccattctctcgtcacaatcccttctctcccttcccacctcacttccccatccccctcctcacccctacaactcttcagccatttgctctggaaagggtcaaaactaaacagcccatcttgaactgaccttggttccctcctcattgagttctaattaattatctctggccaggatttaagtcaatagccaattaaaagtttattctcatgacattattaaaatttgatcctgaagttttaatttttccattttaaagataggattgcagtttttaaggactgggaaaaaaaagttctcatatgtgctgcatattagtgctttacattcttcacattattttctcaaagggtttatgattgagaacttatttagtagataccggggcagggtaccaaccatgaccacctcatctgattgagcacattggctaaatctaaactaataagtattcaactttacatatgatcattattttacttccccaaattcctttgcagatgagacaaacagatcgggatgtaataacagcattaactcacagaccttggagcctaagccatacaggagatgggaaaccacgctatgatactttctggaaacattttatatttgttatgatggacattttgctcgattggagcatgcataatatcttgtggtacctgtgtggaatttcagctttcctcatgcaaaaggattttgtatccccgtaagttggaaggttttttattttacccagacagacatcctgaatgctcttatttgaaaggaaggattaacagagtagacaacctgaattggttctgacctgcaaagcttaccatacctctaaattggattaccaatttcgcttcttaggtgggaagagttcaggcatatttcactgttttcagaccgagtcgatcacatattttcggttttttagtgtattttgaagaaaaaaaatgaacctgtgacactatgctgagcaagggattttatttctgtgactggtttttttgaaagccaacacaggatcctgggcagaacc

SEQ ID NO: 18924 - DNA, 1032 bp, Homo sapiens
gaaaacaatcaaatcaaacactcttcaaaggatgttctgttaactaaactaaataggaacttaaacataaatcgccaagacctggtaaatgtgtgaaaactatttttctccttcacaagccattcttgactctccaggaagaggaaatgcaaaataatttttctctcccacatcatggccctggctatttccattagccattacagtttgtggtagccaggggctccatatacaggttgaacattcctcatctgaaatccaaagtgctccaaaatctcaaactttttgagtaaaccagacagacaggacctcatggaggtgatgcgcttacagggggaaaagcagacaactacttacatatttacttgttaaataacagtgataagcataatggagaaaaagcacaggtgagcggataatatatcgtacaggatgacctgacctaactttctgtttatctgcagaaatgggaaggccaaggatggtttttctaaagacatgacatatgaacccagctctgaaggatgaagatgcaaaaaataaaagaaagtaagttctaaaagaacaggggagatccctacagaaggtgggaaaagcatgattattaatgataataaaatcattcttggttgggcacggtggctcatgcctgtaatcctagcactttgggaggctgaggcaggtggatcaccagagttcaggagtttgagaccagcctggccaacatggtaaaaccccatttctactaaaaaatacaaaaattagcccggtgtggtggtgcacgcctgtagtcccagctatttgggaggctgaagcaggaaaatcacttgaacttgggagacggaggttgcagcgagcagagatcacgccactgcagtccagcctggacgacggagcaggactctgcctcaaaaaaaaaaaaaaaaaaaaacaagttcttttgaccactatctctctttaattgttctatcttgtttcagctttggaggaaccgcaagtctttttagcataattcatcagtttgtctcaaaa

SEQ ID NO: 18925 - DNA, 1068 bp, Homo sapiens
tcactctcactccacgcccaggctggagtgcagaggcgtgatctcagctcactgcaacctccacctccagggttcaagcgattctcctgcctcagcctcctgagaagctgggattacaggtgagcaccaccacacccagctaatttttttttgtatttttagtagagatggagtttcaccatgttggccaggatggtcttgatctcttggcctcatgatccacctacctcagcctcccaaagtgttggtattacaggcatgagccaccgcacccaggccccatcatttttattttctacaattctggctgacatcttattgctccatccttgctaatgatagacttcatctcacatagaccagtgttttcagagaccggcttattgattcagtaaagggctgggggaaactgcacacacaaggacatataaaatctaagcctctgcctgggccacatgacaggattcagaagcacctttgatataatgggtgcccgacctcatgtgaaagtccaagttcaggtgtaatgtgagagcggtaagaattcactggcctaggcttgggaactaatgctgcccaccacgttcagcctcagaggagaagaaatgacttgaagaacataatttgtgaatttgccaattgtttttcattttatagcatcacacagtaaaagtagataaaataattttaatgaaaatacttctgtgggccaggtgcggtggcttacgcctgtaatcccagcactttgggaggccgaggcggcggatcacctgaggtcaggagttctagaccagcctgaccaacatggagaaaccccatctctactaaaaatacaaaattagctgggtgtggtggcgcactcctgttatcccagctactcaggaggctgaggcaggagaattgcttagactcgggaggcggaggttggggtgagccgagatcacgccattgtactccagcctgggcaacaagagtgaaactgtctcaaaaaaaagaaaaaaaaacagaattttgtgaaataaaggccacttgggagtatctgagccaccccacaatgctgtctgagtt

SEQ ID NO: 18926 - DNA, 1022 bp, Homo sapiens
cgagtgagtgctaaaacctcctgttttctgtgttaaacattccgtccctgtttgagacatcagtatgtacagttaacttttgttgagtgtttagcaggtactagggacatactagtgttttccttaatgtatttaatcttcataattatgaaatgggtgctattattagccccatcttatagatgaggcaactgaggttcagggataaagtaataaaattgcctggggtcacccagccactaagtgcagggtgttgtacttttgtacccgaagccctaagttcactattcgccactctgaatgtcccctttagggaatttccaccagaatcctcgttggggattgaaatgtctttagatggaggaaaaagttttatgacaagtctgcatctctgataaaaagtggagtgaatgaggaacggagaatcgcaaactccttttccttccttttcctttcccctgtcatagagcagctgtaggcagagaggtgtctgagttgttaccaaacacatgtgactgagctgctgctgctgggaaatgtgcctctaaaccagtcctgccttttccactggtgtcccttcggccctaagtgctgaggtaggatttttgtgctttgactggattctgaacaaggcattttaggaagagtggttagtcccgcaaatgaatcaatggcagatcccagggacgtgtgtgtgtgttttgagataggctctcactctgtcacccaggctggagtgtagtggcatatcacggcttgttgcaaccactacctatccagcttaagtgatcctcccacctcagcctcccaagtagctgggactgtgggtgtgcaccacaacaaccagctagtgtttaaaattttttgtagagatggggtctcactatattgtccaggctagtcccaaactcctggactcaactcatgctcctgcctcagcccccaagagctgggatcacaggtgtgagccactgtgcccagccccagggatgtgtctgatgagattcttttttatcacaagg

SEQ ID NO: 18927 - DNA, 1068 bp, Homo sapiens
tgaacacaaatcaagtaccttcaacagagttaatgccaatatgtctcatcctttagttttggggaaacatcctcttctttcaggtggtaccaaaaggaatccatgcagtccccaagctttcccaccagcaaaaaaacaacccttcactattcatgaagaaaagcctacatcatctgattgctccccagtaagaagttcttcctggaggcgtctcccatctatattaacttctacagttaacctacaagagccatggaagagtgggaaaatgacacctccattatgcaagtgtggtcggagatctaagagacttgttgtttctaataatggaccgaaccatggaaaagtcttctattgttgccctatcgggaaataccaagaaaacagaaaatgttgtggttatttcaaatgggaacaaacacttcaaaaggaaagagccaacagcatggttccatctcattccacagggggactcacttttagttctccagaaacaagccatatttgtgacagaaatttaagtatttccaccaaaaattctttgagactcaggccttcaatgaggaattgataacctttcatgtatgaatcctaattgttccttgaatttccaaacatgagtattctgataacatcttacactattttatttttattttatatattaatgtttactgcatttaccatactttcttcaggaaccacaagtgtaatcttttgtaaacagtatttattagattacatataataagcaacaatagtatatgatccttcttttatagttagaccttgaaacaagtctaaactatttttaaattatttgcaaaaaatgtgactaataaaaatccctagtctattttcaggtagattcttgtactttgagattatcataatcttctaactgatattttatatttttctaaaaacttttataagttctttagttttatttcaggcttgaacattggttctgatttgtatatcaacatatcagaagaattagtcaactaaagtttgaaaacctatgtagcagagatctggttcagaaactgcttctatactatacat

SEQ ID NO: 18928 - DNA, 1020 bp, Homo sapiens
acaaacatttattgactcctaagtgctagccagtgtttcaggcactgggtgtacacaggtgaacacaagcaaaaggttcaccctttcatggagcttacatcggagtgggagctggggacagagagagacataatatatatcccagtaaaccagattttgatcaagcgctgaagaaaataagagtgatgtgattgaaagtgtcttaactgtagatgcagtcaaagaggatctttctgaggaagtgacacttaagttgagctttaagtataaagaaggagccagccatccaaagaaaaggggaagatccttccaggttcagggaacagctggtgcagaaactggctggaatgcgcttgtcaagttccagggaatgggaagaaagggtcagggtaggtgggaggtagtggaaagaggatgggttgggtgagtaatagccagagcttagtgaacacgggggagagttggagataaggtcagagaggtggatatggggctcagaataggtaggcaaacaaattgccagaaggagtaggaagtagaaaatgatgctgcttgttgattaattctgtcgccttaactagggtcttatcacttactgtttttgcaggtactgttggactatcataataaagtcactctgctgagtgggagaggaagaggcagtggtcacctgggtcttttctggcagataaatttcaagctgggtgttcagattttcagcaggatgttcaattgaggacacacctctttctttattttgtcttatatactgctgtttaaaactgcataataagttctctgaatgtgttctagtatacgaatcctcctttgtttccagctctgtatgaatttaaggactgggcaagtgttaataatatgcccttatccatctaccaagatgaccatcaggatctaagtttcaagttgtcttttgtagggaggcagtttatgttgcaatagttccactcttgtctgatccttctgatgactaataacactcagctgaggtgtaggttggta

SEQ ID NO: 18929 - DNA, 1095 bp, Homo sapiens
tcctgtttttactcgattgagactttatccataccccttggaagttgtttaatttacctacacccgggctctttacctgcatgttgaaaacagtttggaatggacccaaagaaagttgttactaaggcctttcttttttctctcccagccagtcctctggaatgaggtgttcagttggcctagggttattcatttcttgtttccttcagcaaatatttttttgagggtctgttatgtgccaggcactctgctgggatttggaatacagagttgaacaaaagagcgataggacctatattccctgagcttttattgaccagtggactgtgacttttgatgtaattttatttttgagagagggtcttgctctgtcacccaggctggagtgcaatggggtgatcttggctcactgcaacctccgcctcacgggctccagtgattctcctgcctcagcctcccgagtagctgggactacaggtgcaccccaccttggctggctagtttatgtaattttttgtgtgtctgtggagacagggtttcaccatgttgcccagggtggtctcaaactcctgaactcatgtgatctacccgccttccaaagtactgggattacaggcatgagcccccataataatttaattattatttaaataatttttaattttaaaaattttaaaattattttaaaatttaaaatttcctttgcttatttatactcagtggacaacaaaatgtttatatattcacagagagatcaatgtcttattgtgatgagtctcgactgtcaaatcttcttcagaggatcacccgggaaaacgaccgagaccgaagattggctactgtaaagcagttgaaagaatttattcagcaaccagaaaataagctggtaagtatagtatgtttggaaatatgaggatttttgtgtttccataataaactaggtaatgctaccttgagtagtttaagaatggggaaagtctgtattatgatgatcaagaacttaatgctctctaatatgtaatttctttttcttcttaaagacaagatcttgctctgtcgcccaggctggagtgcagtggcacaatcatagctcac

SEQ ID NO: 18930 - DNA, 1032 bp, Homo sapiens
tcaccgtgttagccaggatggtctcgatctcctgaccttgtgatccgcccgcctcggcctcccaaagtgctgggattacaggcgtgagccgccgtgcccggcctcaaaatagttttcttgtgggatttcagggggaaaatgacttgtaccagataccacatgatttggttgggtggcgtgggaaggcgggtcttggcaattctcaggttcatcccatggcaaggatcggcctggatctcagtagtgtgtgtacacattcaaggtgggaagggttaatttatagttggggtcttgagccatgaaatcaggggagtggcttctgactggcaggacctgttggcgctgttttctgccacaccgtactttggggagaagggggagggggaggcatttcttcataaatgtgagaatgccccgagggcaagactcagcagggctctgtgtggtttctctgaggctctgagcggagcagccgcaccaccatgcaggtcaaagccgggaaaaatcgtaggacaggagtggggagagcctgtggcttccagctgggcgttggacatgtgaatgtaggggatgactgatttcttttttttgtcattagaatttcactggttcagtctccctctcgcctaggtacatgcccgcctggtatgtaacgacatggataatagcttatgcagcctgcactcttacctttaaaaaatgaatccctgttggctgggtgtgatggcccacgtctataatcccagcactatgggaggccaagacaggcagatctaccgaggtcaggagtccgagaccagcctgaccaacatggtgaaaccccatctctactaaaaatacaaaaattagctgagcatagtggctcacgcctgtaatcccagctacttatgagtctgaggcatgctccgggacgtggagtttgcagtgagttgagatcctgccactgcactccagcctgggtgacagagcaagcctgtctcaaaaaaaaaaaaaaaaaaaaaaaaagcagcccctgggtgctgagtgtctgac

SEQ ID NO: 18931 - DNA, 1035 bp, Homo sapiens
acatctggctaatttttgtatttttgatagagatggggttttgccatgttgctcaggctggtctcaaactcctgacctcaggcagtccactggactggcctcccaaagagctggaattaagatttcaaattttcttccttttcacccatatcaatcctttctccttaaatattgaagcccttgaaatcatctttggagaaaggcatagacatacctctcaggcgcttatccttaaccttggcaatggaaactttccacattgattgagacctgtctcagatacttttggttcacagaagtaaacgtcttttcccagctttcgtatattttgcgtgctccctttgattctgtcaggcttttattttattctttattagggtgggtctatttaggtttttgatcttattctaggacatgatctttacttctaaggcatggcttttctggagttataactgtaaggggtgctcagtaaggtatctctactgtggctctcagtaagaattccgacattttctgcactatgtaaactctgggtctacctttgttacaggtagttagacaggtatgagcgggacaggagagggctctccccccatccaccaggaatgtcgggtgatgatttggcagttatcacattgcctctctaagtgataaattgggccaggcgcggtggctcagacctgcaatcccaacactttgggaggccaaggcgggcggatcacctgaggtcgggagtttgagaccagcctgaacaacatggagaaaccccatctctactaaagatacaaaattagccagggatggtggcgggtgcctgtaatcccagctactcgggaggctaaggcaggagaatcacttgaacccaggaggcggaggtttgggtgagccgagatcgcgccactgcactccagcctgggcaacaagagcgaaattctgcctcaaaaaaaaaaaaaaaaagataaattggagaggccatttcctgatagtccacacccgttgcactaaattaacagtgttaattgaatgcagaca

SEQ ID NO: 18932 - DNA, 1020 bp, Homo sapiens
gattcttacatcgcgagggcaagggctaggacatgaggccactcagggctacagaggggccttgaactggacagagcgtctgcaccttggggacccaacatacaaactggggctccacgcaagatcccggcccacccgggaggaagcggcagcacgggagcgcccctacgtggctgtaggcaggatcacgcccaaggaaaactcaaaatcaaatccaaacacacttgtgaggatttaatattaaaaatattaatttttgatatgtaggcactcttcattttaatagtgcgttcctagtgtgtttactgctgctgatcgcgagagcactgtgactccaagtctccgtgagcaacgcaggagacagcggttctatattgagcatgcgcaaactttgagggcggggcgcctccgtcatcacactaatatgccggcataggaagccctacgatcgggaggtagcgtggccgagtggtctaaggcgctggatttaggctccagtcatttcgatggcgtgggttcgaatcccaccgctgccacacctcagaaggtctcacttttctatccataaaccatctctttatgtagtcctttgccaacttctcttccttttttctcctttctgatgtatttcttttttaaagctttagattgcttataatggattttttttaatggaagggggaagggaagagaaaaggcagaaactgcagtgcaggctctttcactgtctagcccaatacacaaacctctctttcacctacccatccagctccctcaaaacaaaacaaaaaaacaaaacacatctccccatttccaggggaaagcatctgagctagcttgaaaagttcccaacagcctgtctgggtcttcctggggttagttgggggtggttgtaatcatgacctgagttagggacgggggtccctttctggcctgctccgtgtactttagagggctccagggaccccataaacctctgttgtcaggtgaccctggagtagtaggggtctggccctatgt

SEQ ID NO: 18933 - DNA, 1091 bp, Homo sapiens
caaaaacacgttatgatgggaaacagtgatctaaaaagagaaacatccccaaacaagacacccaagccatgcacctgactttgtgttgcagtctctgataaaaaccctcacgcagcacctctggttaaagatgagccaagtcatctctagagacccagcaagacagtgtacagaaataaaaacacaaaagtaaaggcattaatgctatgtctggaaacttgaatataaataaaaacaaaggtatatgccagcataacaaaagaactggtgaagagacatgagaggatgagtggcttgaacatatttctgcatggtaaaatgcaggcgtgcatcggacttagcaagcaggtgaagcgacaatctaagctgcacggagatgagaagagggtgtcaaaattggtgtgaagtcttaatgcacaaacatgccactgcatccatgaaacaggatgccgtaaaatacgttacaccccaaaataaaaatggaaaagattggattcagtatgtctaatatctgtcataagaattctgaaaaaaacaaaaaaaagtaacaactcacaggattttataagaactcaattgtctagtacaataatgacccgcaccagggcacagctgaaatggcactgactgatatacagaataatgaaaaattctgcagtttggcataaaggaaagaatacaggccaaatttaaaagaccaagaaggagaatgttatggaatttcaacaactctgaaaacttaaacaatggaaactctcttaaagatgcttcatgccgggcgcagaggctcacgcctgcaatcccagcacttggggagaccgaggcaggcggattacctgaggtcaggagttcgagaccagcctgtccaacgtggtgaaactccgtctctactaaaaatacaaaaatcagccacgcgtggtggcacacgcctataatcccagctactcaggaggctgaggcggaggttgcagtgagccgagatcgtgccattgcactccagcctggctgacagagggagactctgtctcaaaaaaaaaaaaaaaaaaaaaaaaaaaaaaaaaaggatgcttcatgtatcactatttgtctag

SEQ ID NO: 18934 - DNA, 1033 bp, Homo sapiens
attttattttttaacacaaacttttttgagaatgagaaccgcctcccgagtagctgggattacaggcgcctgccaccacgcctggctaatttttgtatttttggtagagatggggtttcactgtgttagccaggctggtctcgaactcctgtcctcagatgatccacctgccttggcctcccaaagtgctgggattacaggcatgggccaccacacccggcctaaaacatgcaatatttaagatatacagaatggggtaagagaacaatacagtgaatacccatatatccaccacctagcttaaaaaagaagactgcccacactcttgaacttcccaccggagagggaacttatacctcctccttggtgacatatccctcccacctactaccaaaccatatcctaaatttgaaaaaaaaaaatcatagttcctgatttcacagtgtgttcagatgttttgctccattcaaataatcataaaatacatgttgctttctctctgctgtgatcttgatttgtttacatttttgctggatattttattaaaatgctacatttttggctgagtgtggtggcttatgcctataatctcagcactttaggatgccgagggagacagattgcccaagctcaggaattcgagaccagcctgggcaacgtggtaaaaccccatctctacaaaaaaaaatacaaaaattaggctggtgtggtggcgtgtgcctgtagtcccagcttacttgggagacagaggtggaagaatcacctgaacctgggaagtcaaggctacagtgagccaagaccgtgccactgtactccaggttaggtgatgggagcgagaccttgtctcaataaaaaaataataataatataataccttttgcccagcttaacaaactaaaatgaaagatgctagactagggcattaaaatggccctctatgctgctaatcttataaatagtccccttcaagtagttcagttatgtgtaggccacttgactgtaaagataatcacggatattaaccagtgtccca

SEQ ID NO: 18935 - DNA, 1029 bp, Homo sapiens
ccactgtatcaaaggactgctccataagatttactatgcaaagaagtatttcaatgacgtatgttacaactagtgtcctttcttatattgttaactaaattttcatttctgggagttgagtataatataaacaaatcctgttttatgggcattatacctaagaatagagagagttgaaaaatgaggtttaaaataaaatatggttctgtgctaaatggaagtatgagctactgacatgtaattacctcaaaaaccacatttctgttttgcttttctagttgctcatcttacagaaggacacgaagagaagtagagtgacctggggcagtgttcttaatgctgatgtatttttccttttcttgacttaataaattttagtccccttaggagtccaggatatatgacaataaactttaacagttgtattcacagcaggcaaattcatgggaactttaaagatttttgaaagctccacctataccttggctcaagggtccattcaaaaaagtagactgtcaggatatgaatacattcattgtactagcaaataggattttagaagtaacactgcggaatgatcattcctgaacaaataactgcatctccataaagtagatgaccatttttcacttcttacaagtatgggtacataagagaatacattacctgctggaggcgtcagtttaactgaattttaagtagaactcgggtttccttctgtgccactccaccttccattgggatgtgacttaaactacatgttcttttttgaaggactgggttatataaattgttgatgtgagatcatttgtattattctaagattcatttgttgtgctagatcttcaacttgctgctgagcttgggaagacattactggatcggaacacagagttggaggactctgttcagcagatgtatacaaccaatcaggagcagttacaggaaattgaggtaattcacttggcaggagagttacacttttgacacttcgatgtgttgctgttatgccaatcacatactggtaaa

SEQ ID NO: 18936 - DNA, 1045 bp, Homo sapiens
ttaatgatcctgttctcagtatcttacaactatagaatgttttcctttagcagtagtaagccatgctctgaatagattgaatctttgtatcaaagtttcctagggtatccgtttttaaattgaaattgctggaaatttctaacctcagtaaactctggtctactattcataccttgttagaaacatgtaaagcttttgtgtaggcaggaggagaaaaccctttgctgttacaaaactctttgatgaagagactgtcttttgtcagagagctgagttggctcagtaggaatactgacaataatctctgtgggtaagatcttttctgggacagcaggagccttcagtgcaggtaatgatggtgcttgctttgaaacatgcccctgagaacaaggtggaaagacttcagagactggattttcttttaaaccagctgctattgtcatttggtgagctgtgcaaacttagaataaggattcaggtttctgttatgtggatcagtaaatgaactcttagtttaaaggaatcctaaaattgcaggatgagtacatcctccttgtgtacaactattttgctgaatcactgtttggagggttattaaaactgacaacatcatttttcttgatatttatattcaggttttctgctttcccaattatagtaacattggcaacaggagttaaacagaagcatcactaaatgacgcatttgactttgtaataggaaaaactttcagccttactgttagtgaattactcctacagactacagctgccagtactaattttttgcctaaagcatagagctgagtatctgtttaaagctaacagtttacaccattaaaaatatattattacctgcaaagactcattagtgaaagaatattcaacatatgaaggtattgatatgttgaaattctcaagcctgcaataaatctacagtatttttagtagttgcctaaaccaggccagttcaataggatttagagaagaccctcttaatgaaaattcattttgtaatcctgtagagatgaacaggtgtataaggc

SEQ ID NO: 18937 - DNA, 1026 bp, Homo sapiens
ggggaaaattataaaatattgaaagaaatttctaaacatctaaatagatggaaaaacatcccatgttcatggatcagaagatttaacatcattaatatggcaatactactcaagctgatctacaaattcagtgcaatccctatcagtattccagctgacttatttgtagaaattgacaaactgattctaaaatgtatatagatttgcaagagactcagaatagccaagtcaatcttgaaaaagaagaacgaggctgggtgcagtggttcacgactataatcctaccactttgggaggccaagacaggaggatcacttgagaccaggagtttgaggtcaacctgggcaacatagtgatgccccatctctacaaaaaataatttttaaaaattagctgggagtggtggcgcatgcctgtagtcccagctactcaggaggctgaggtgggaggattggttcagctgaggatgtcgaggctacagtgagcagtgtaggtcaaggcgacactgaactccatcctgggcaacagactgaaactcttgtttcaaaaaaaattaaattaaataaaaaagaaaaagaagaataaagtaggaagactcatacttctcaatctcatcaagaaagaaagtgaaaagacaacccacaggagaaaaattttgcaaacaatatctgataacagattgcatcaaacatatattaatatgaagaactattacaactcgagtattagtaaactaaataaaaagacaacctaattattaaaaactgggcaaatgggctgaatagacatttctctcttttactttatttctttctttcttttgagacagtcttactctgtcacccaggctggagtgcagtggcatgatctcggctcactgcaacttccacctccagggttcaaggaattctccctgcctcagccacccgagtagctgggattacaggagcccaccaccacgcccagctaatttttgtattttttagtagagatggggtttcgccatgttggccaggctggtcttga

SEQ ID NO: 18938 - DNA, 1038 bp, Homo sapiens
tcaggccaggcgcaatggctcacgcctgtaatcccagcactttgggaggccaaggcgggtggatcatgaggtcaggagttcgaaaccagcctggccaagatggtgaaaccccatctctactaaaaatacaaaaattagccaggtgtggtggcgcatgcctgtagtcccagctacttgggaggctgaggcaggagaattgcttgaacccgggaggcagaggttgcggtgagctgagatcatgccattgcactccggcctgggtgacaagagcgaaactccgtctaaaaaaaaaaaaaaaaaaaaaaaatcaaagaaataaaagaagatcaaaataaatggaaagatagtccatgttcgtagataagaagactcaatattctaatgtatcagctcttctttgatctatatattcaatgcaatccctgtcaaaatccccataagttattttttggatactgacaaatttgttctacagtttatatggagaggcaaaagacccagaatagccaagacaatatggaaagaaaagaacaaagtcagaagactgacacacccaacttcaacacttactataaagctacagtaatcaagaagtgtggtgttgatgaaagaatagaacaataggactatttagttctattgttcaaaatagacccataaaaatatagtcaactgatcttcgacaaaggagcagaggcaatacaattaggaaagatagtctccaacaaagagtgcaggaataatgaatatccacatgccaaaaaaatgaatctagacccaaaccatatacccttcacaaaaattaagtcaaaatggattacagacctaaacataaaatgcaaaactagaaaactcctagaaaataacacaggagaaaatctaggtgaccttggggatgttgatggctttttagatacagcagcacaaaaggcatggtcaatgaaagaaagaactgataagcgaaacttaaaaaaactgctgctctgtgaaagatactgtcaagagaacgagaagacaagccacagatgggaaaaacta

SEQ ID NO: 18939 - DNA, 1008 bp, Homo sapiens
gctggatgcggtggttcacgcctgtaatcccagcactttgggaggctaaggaggaaggatcacttgcgcccaggagtttcaaactagcctgggcaatctagtgagaccctgtctctacaaaaatttttaaaaattagccaggcacagtgtcgtgcacctgcagtcccagctactagggaggctgagtcagaaggatcccttgagcacaagagttcaaagctgcaatgagctgttattgagccaccgtactcagcctgggagacagagcaagaccctgtctccaaaaaaaaaaaaaaaaaagatatataggctaggtgtgatggctcacacctgtaatcccagcactttgggaggccaaggcaagtggatcatttgaggtcaggagtttgagaccagcctggccaatgtggtgaaaccctgtctttactaaaaatataaaaattagctactcaggaggctgagacatgagaatcgcttgaacccaggaggtggagtttgcagtgtgatgagatcatgccactgcactccagcctgggcgacagagcaagactctgtctcaaaaaaaaggaagaatgagaaagcaccttatgtcatgacatgacacaaacttcaacatataaagtggccgggcacagtggctcacacctgtaatcccagcaactagggagactgaggtgggaggatcacttgaggccagaagttggagatcagcctgaacaacacagcaagaccccatctctaaaaaagtaaataaataagtttgaggctgcaatgagctatgattgtaccacttcactctcagcctgggtgacaaagcagaatcccatctctaaaaataaaaatagaaaataaaaataaatagtccagagaacagaatatgcatacacacagagatacagataaaccaaatatggtaaaatgtcagcaattgatgaatctaagaagtgggtatatgcatgtattttctctgtaattttctttaaactttttttatatttggaaaatttt

SEQ ID NO: 18940 - DNA, 1050 bp, Homo sapiens
tgagtcgagatcacgccactgcactccagcctgggcaacaaagtgagacttagtttcaaaaaaaataaaataaaataaaataaaataagtgactaaattggccaggtgcagtagctcatgcctgtaatcccagtgctttgggaggcagaggcaggtggatcacctgaggtcaggagttccagaccagcctggccaacatggtgaaaccccgtctctactaaaaatagaaaaattagccaagtgtggtggtgcgtgcctgtagtcccagctactcaggaggctgaggcaggagaattgcttgaacccaggaggcggaggttgcagtgagctgagattgcaccactgccctccagcctgggtgacagagcaagaagacattgtctcaaaaacaaacaaacaatcaaacaaacaaacaaaaaacagtgactaaactgagagcaaagaaatggaagggagggagcaggaggatcatcagtttccatccttttactgtgtgctcaaatgtaatttggctgcaggtgaggtctgtgcagaccctgggtgaggggcgagttggctatggcctgtttaactccacctgtgcagactgcagctcagcctcgtccatgcttcgtgactcagccttgtcctcagggaagctggggctggtgcaactttcagaagtggtcccaggtaagcctggccctcctgagtccatgggtggggaatgctggtacaggcctagcagctggctttccggggctgggtggaggtacaagagcggtgatgtgtggtgttcgccactttccatggtgcaattacccctgcatggccgagttcaagttttgaaggtgcagtcaccaatagtggagttgggaagagatttgcacagtcagctccagagccagcatgcaccatctcccacccgtcactgccccctgccttcctccctcttgtccctgcagcctgggatctcactgctgctctccaagtgaggaattccagtaaggcttcttaagacttctttttggtttacctggcagaaccccacctcaaactggcttaagcaaa

SEQ ID NO: 18941 - DNA, 1029 bp, Homo sapiens
tgtttgctttttaaagttttattcttgatttcttgtaaacatccattgcactgaggccgtatcattccttaagacagccctacatcttgccttggtaatcccttagataatgtggaaactcaaaccgttaggctccagtcatcttagaccatttcccatccgttttgtattttctcgtcctgaaagcagctgaactgaaagtaagtaataatatgctggaccagtgggaacggatgtgggagtatttgtggtgtgctaaaatactgtaattatctgtgaggctgcctgacacgcttttgcaatcttgttttcatcattcattctgcaaacgtttatggagggccttctttgagcacagaggcaaaactgaaagcttcagggatttgctgtagctgaggagccctgggagcacagcccatcaagcaagggatgtgatggtgtcctaaatggagtgacagttctcctgggaaaagagatcacgtggattccggtcaaatcggctaaggcttgtggttctcttgagcaagtctgttccttctggaaaccaaaagtgcccttcatctttagagacattttactcttccatccaccttttcagactgagctgtctctactatttaggggttgaaaatccattacacagtcactttacgttaacattgggtcatcttatgtttgtatgagacggatgtgggatttgaggggaacattgtcattcccttaaaataactatcatgaaaaaaatagcaacagtatgtaaagggaccaagagtggcagcctttagggaaaatggagcagagaagagctgtgaacaaagctcatttatttgaaataagcgtgctttatttcacatagaggggcatcagacgttacatttcattcggacaaattactgaacagccgaagtgattgtttccaatgtaggttattataattattggatacaaagatttaactagtgtttctgggttggatttttgaaatagtatgcaagtcataagcacagtttcaataaaacacgtattctg

SEQ ID NO: 18942 - DNA, 1056 bp, Homo sapiens
tctgcgagatgtctctcagaccactgccagtcctgatggtctggagaagttcatagaattgggagatcaattagtatcgaatttccagttacccacctgtttacatttttcctatttttagattgtgttaacagaaatgtactatgatgggttccatcgttccttttgtgatacagacgacctggaaacagtccatgaaagcgactgcatttttgcctttgagactcccgaaatatttaggcctgaaggaattctcagtcaaagaggtaagggagctcctgtttccataatgccacctgggtttgcaggtttaactatagtctacctttttagttgtctattatataatgatatacatttttttttaaattgtggtaaaatacacatgattttttaatgatggtataatggtaaaaatcttatagtaatattttcctagaagaaggcagctcttactgttttaggcaaagatatatccatagtttagttgggaaaacctcttattgagatttaggactgactgtgacctctttaagtagcctttttggcatcttatcatgacattcaggaagatatactatgccataggtttttttttttttttttttttttttaaattttgctatcagctcttaagattctaacatttttgctatagaatgttttcttggtacctgcttttaagaaatttgcatgtaactcttcattgataggcagcaaaatgaagtaaagccctggacagtatttttcctcttactgcggtttgggctgtgatttggaacttagcttgtctccccactgtgcctggagttacagggttattctgattttaagagttaccaagcaactcagactttgctcctcgccacagcattcttcagggttcctcttagggctcctcttcttttgctctaccccagtggttattaatgcatcagtattacctgggaactggttagaaatgcaaattcttggtccctactccacaccgagtaaaggagaaactctggtaaacaagccctttaggtaggtgatcgtgatgcaagctaagtgaga

SEQ ID NO: 18943 - DNA, 1052 bp, Homo sapiens
gtgaagttgtactttcttttttttttagccaccatcagagactgatatgatgcctgagggaccatctttccctgtctgtagcacttttgtacaagaactctttcaagcgcaatacaggtatgagaaaatcggatgtttccacttattttgtttacctgacatcgttctgggtgattttaatgtcaagcgtcttacctttttgttttgaagatcttctttgacgtgtcctcattgtcagaaacagagcaacacttttgatcctttcctttgcatttctttgccaattcctctgccccacacaaggtaagaatggatttagtaaaatgaagactgtattttcttatggtatccctttgcctctgtaggctcctattaggtcttcttacttatttagacaggtaatgggattaataatgggattgaatacagtcattgctacaaccttacaagaataaatgccctcctgagtttgcagggtgagcaggcacatgaggcaagcaggggctgtgtagtctggcccagttcgtcatccacacatagtatcggggttgggggacgggggctgctgagtgacttcaggattctctagagaccttactttacatttcttgtttcttcgttgctttattttgaacaatttctcaacatttccaggagttatgctgttctaaagaaaatacaaagcacagaatcaagtgtagatatatttttgtttgcttcatagaatgttcattttatgaagattgccttttccaaagatcttgatgattgtttgacagttctgcttagagccaagtgaaatttttccatttgggcttccgagtaacagtgtgggttagctttagttttttgttgatttcgtctcaggtttattttgcatcttctatattttagttgaaataagtgactaatgagaagatctgactttgatctgtacaggcctctctatgtcactgtagtgtatcaaggcaaatgttctcactgcatgaggattggtgtggccgtacctctgtctgggactgtcgccagacttcgggaagcagtgtctatgg

SEQ ID NO: 18944 - DNA, 1034 bp, Homo sapiens
tgtaatcccagctgcttgggaggctgaggcagaagaatcgcttgaactcgggaggcggaggtcgcagtgagctgagattgtgccactgcactccagcctgggggacaaagcgagactgtctcaaaaaaaaaaaaagaaaaaaagaagagtgataactttgaaaagttactttctttctctgaggctaagttttttcatctataaataagaatacagcatagggaatttcctaagggtgaatttatttattttattttattatttttttgagacagagccttgcagtgtcacccaggctggagtgcagtggtgcgatctcagttgactgcaacctccgcctcctgggttcaagcgatcctcctgcctcagcctgtagagtagctgggattacaggcatgagccactgcacccagccattaagggtgaattttatagaaaataacatctataagcaataagcgtaatgcctgatacagtataagcactcaataagtattaactgttattgttaccctttgcaccaagcactgtatttgctaggtattggggaagtaatattgagtaagacattattcctgttcactgtctagtgatacatgtgagatggtatgtcctagagatatgaataaaacgtaatgtaagaagtcatataatgcacttatgacaaaggagcctcccataagttttggtgcttttggaagtgaaactccggagcttttccagtgtggctgtgttcgttctcagacttggcttcacattagaaatagtcattaaaaataagtcacacttgaaaaaaaaattagcagtgggctgctgccaggacatggtttttatttttaactttccccaggcaattctaatgtgcagccaggattgagaactaatgctttagatattttctcgttttctttatctttggcatttttaaggattatgtagtatcatagggtgattcttttctttttttattctatttttcaaaactaacataatagcatctgtacagagttttagactttacaaaatgcttttat

SEQ ID NO: 18945 - DNA, 1028 bp, Homo sapiens
aacctttctttgtgaacatttcaactatatataactaagaggggagagcagtacgatgaacctgcatttccctgtcacccagcttcaacaactaccaatttgtggacaatcttatttcatctgtataacctttgcctttattctccccaaacttttgaagcagcttccaaatgtatttcacccataaatatttaagtatatatctctaaaagataaggatgctttagaaaaatgataatgccattgtctgcctaaggaaaactaatattccttaattagtgttcatatttctctgatattgtttctgtcacacacatatatatgtacacatatatgtgtacaactgtgcatatatatttcctacactttatgtaaggatccaaataagtttccaaaatttcaatggattgatacatctgttgtcgctcacaacctctctctctcatttattttatttttcctctggcagtttatttgttgaatgcgtgtttgtctagtagagcagagctcttcaaattatttgtggtttaggactaatttttaaaatttccaatctattgtgggctgtttgtaaaatacaatacaaatgaattaatagaaaagtgacataaaaaaggcatatgtaagaccagccccattaaaaaattgttaaattcagaagacataaagttatggtttaatttgtaaatacttctaaatgcttactctcaatttctataatctcatcatggactggcaacggaaacttcatagtcttgattttttgtattatattccagtagcttcaattaagatgttcctctgtccatgtatttcctgtaaaatggtagttagagctagaggtttagagactcaagtttgaggtttttttctcctctttttggcaaaactttctgtcgtggtgttataaacttccatcagaaagcctgcactgtttggttttatctcttgtggtgccaagaatcactggtagttgttccctgacccgttaatttattaagggttgaaagtggtgaaattataattct

SEQ ID NO: 18946 - DNA, 1045 bp, Homo sapiens
cttaaatcaagataacagctgtaatcatatagatgcttttcctgagttagttgttttatgtcttcctttgtgtgacttaaagtttttagtttgactctgctacttttgttctatttgtgcgtggcttgatggatttttcctgtccccatctatacactcgtcacaatgaggggctactaaataaggcagtgttctctgtttgtgtagtccccacagctgtttcctatagtaaagactctggaaaacaatgacctcatagtttccacaaaaaaaaaaaaaaaccttttatatttagtaggggaaaataaatcattcaaaattcagtaatttaaagttatgtcctctgttgcttcttccttcaaaaatattattgtttgctctgctaattaattgttcattggctgttcctcaaatgaccttttatgtttaacaaacaacatttttgcagtggagcacgtcgggatatcttgtctttcgtttgattgtgatctttctctatttagaaatcattgttttaagccatggactgtggcagttcctagagcaattggccagtcactgaacatctgttgcttcttccctccagctgttgggttcggatggtagcaaacagtgtgtccacaaataaacagttgacgctttagaagatttcataggactggtcaggaaatgcctttgttggtatctgcttctactggaaggaccccttctttgtaaacacatcactagctcagtatatgttttggctttaattcttggtattcttttgatcttgaagagcaaggcagagagccatctgattgtcaggagatttaagaaacaataataatcacagtgatggaaatgccgcttatttgtgtagggccatatcatttacaaagtgaattcatgtacacaagcccagagagaaaagcaagctgatgatggcaggttccatgtgccttttatggttcattagagttcttcagcatcaaatgccctcccattcattgctacactcattttactgcttgctcatttcagtcctttggtactctagtgacac

SEQ ID NO: 18947 - DNA, 1027 bp, Homo sapiens
gcgcaagtttccttttacttccccagcctttaaaatggttaccttgttatctctcgcgctctctctttctctctctctccccccccccaacctctccctctctctttctccttctctgtctctgagtgtgtatatgtgtttgcagcagcactagggtaaaacttgggcttcactggcaggacccttgcatcactttcctagtaaaatagtgagagtaaataaatcactttgaatacataatatgccattttaaagggaatcagcttattgctttcataggagcatgggtgccccagattcttacaaatgctttctgagttttagagctcagagccgttttgcagcaagtaaaaagatggatggtcatctttcaagcaagaaagataaattttatggcagcagtttttaaattgtgctggcaaagaacagctagcacagagtgatctattgataaaagaattgtggggactccttccagatttgcagtgaaacaaatggtaattgatgaatagaattctctctcccatttttttttccttgaactttggtgccttgtggtgcttatttattagtgagaattctcaagtcacaaaaggaataaacttgtataagagactagtggtgaacaacctggcaatcagaggctcacacttgctgagtttcccagcctgcttttccatgcactcatgctgggggttctggtgctatgctgcaaacccatggtacacagtttttttcttgttagtgtcaagctctttagtatactgatacttcagtgttttccacaaagcacactgacttcagggtgtcccttggaaaaaatgaaattgtgtaggtcacatttagctttgtgacagagtataaaataaaaagtacatcccttcctggtcagttctctggtccatcaaatgccatcacttgagttttagcaaagctccacacctctgagggagaaagttgatagaatcatgaagttttagacttggaagcagacttggatgtggtgtgagtagttcctagcctttca

SEQ ID NO: 18948 - DNA, 1022 bp, Homo sapiens
agggagggacacatgaactctccctaatcctctggagtcctctgaaaggacaaggtctgtcttccttagctggtctctgaattgcagcccatctcaggatttcaggactgcagaattatcgaagggttcccaggatatgtgcctgtttccccttgtttgtagtcccaaagagagtatcccaggtattttgtgtcagaattgtttgaaacactcacttgacttaacattgacccctgttcctgggttgctctccactgatttgacatcttctgtctcttctgtcccaggaacctatccgcttacggtacaagctgacattcaaccaaggtggacagcctttcagcgaagtaggagaagtgaaagacttcccagacctggctgtcttgggcgcagcctaacttttcacaagatggacccttcatttcaagcttaggctggcgttacttttgctgtctagtcaggactaatcacggtgtttcagtgcggagtgccaagagtcctatcctgacgtcaggctctgggtgtcaacctctgacttattctgcagatgctctgtgtgtgtgtgtgtgtgtgtgtgtgtgtgtgtgtgtgtgtgtgtgttcggggagagggtggtagcacagggcttgggatatcggcagtgtgggaaatgcgaagcatttctcatcatcatcatctctgctacagtcatgtttctgcatgtcagcgagcgacactgtccctgcctcaggttggaggttttatcagccaaagtgtttttttcatgtatcgttcgttccattcatccactctgtgccttgtcagcctttgaaaggcttggttgctcccaggctgctgttctcagggaccttaaaagggacctggttagtcttggggcagagagtatctacttgggcactctcttccaagaaagaccttgtctccattttcattagacaatgcttcttgtgtgtgttctggaagatcttctaaatggaatgcttgttgcactgttcccaggcgagtggctgccatgagacctg

SEQ ID NO: 18949 - DNA, 1044 bp, Homo sapiens
ttagaccagggctggcaagttcatgtgccttttctagagagggcagttctagcacagggcccactagctgttggcaggtatgagtatgggctcagggttgctagtttaggtctttgtatatgtttgagtgtttagatgttggtgactaatttgcagtgttgaaagccacagtatggacgagaggaggggtctgcaggctcagcttgcctcttgagtgccagtgggtgacatccggctggtcttgggcactggataccagatctctgcctctggggaggggttggttctttagccactttctcctctcaaagggtctccttaaaaggtggggtgacctcagggtttgacatacctcactaagctatttcctgggcataaacctcaggcagttatagcaagattgaacaggggacatttttttcttgatctgaaaacgtcctcttcatcaaaacttcagtgtcctcataggcttgaggcagggttagccttggttccagcgcagtctccagcaagtgattaccagcctggaggggagcctgggaccactggctttccaccttctcctgggggtcctgtgtctgtgcaggtgctggagatgtgcatgaaccactgtggggagaagttccacagcgaggtggccaaatttcgtttcctgaacgaactgatcaaagtgttgtccccaaaggtgagtacctgggcttggctctgctgactgtgtcgcacctacgcccactgtcaaactcctggctccctcctcaggccagaggcaggcccacgcatggacaaaacctgctcctgcctgtgaaagaagcgctctcctctccaagctctaggaagaggctctgctcattagctgacccctgcccctcactgttagcattttcacatttcccttttaagaaggcctggggaacgtgtggcctagaggagatgaggaactccagcttggaggcacaggttcctgatagagacagtgagagatcccaggggtggcgtgaaagtttcctatcacctcctgccttgtcctctgtacctgtcctcctg

SEQ ID NO: 18950 - DNA, 1119 bp, Homo sapiens
gaagccaacacccgggccaacctctgcactaaaagtggagccgctttcaggggaataacttgtcagttaatttttttttttttttttttttttttgagacagagtctccctctgtctcctgggctggagtgcagtggcgcaatcttggctcactgcaacctccacctcccaagttcaagcgattctcctgcctcagcctcccaagtagctgggattacaggcatggatcaccatgcctggctaatttttttgtatttttagtagagatggggtttcatcatgttggtcaggctagtctcaaacttctgacctcaaatgattccccccacctcggcctcccaaaatgccgggattacaggcatgagccactgtgcccagccagcttgttaatttgctggttcattcaatcagcaaatattcagtaagggcataccatgtgcccaatgctgtgctgggtggtggtaggcagcgcaggcacaattcctctccttccagctgtctgcccactggtctgatcctgtagatctgtgataagacagctcttggccaccatgtgtatggggaggggtgtaaatttcttcctattatgtactctctaactttattatttatttgacagacaaagccacagacccaagcatgtcggaacaggattggtcagctatccagaatttctgtgagcaggtgaacactgaccccaatgggtaaggtaacttctcacacacatagttgactctgggggcaccccacactgagtgtaggcctttgtctctcaagactgttttagggttaagctctctaggcaaggatcggtggctcatgcctataatcccaacagtttgggagaccaaggcaggaggattgcttgagcccaggagtttgagacctgcctgggtgacagagtgagagactctgtctcaaaaaaatagaaatgcagtcaggctggcattcattctctcattttcccctataatcctgagaacattatttttctaaaattagcaaattcatgtgggggaaaaaaaacacaggatagctcacttgcaactggcagttattaattttaaatactgttataaaacactaatgctgaggagaactctgaatgttactgataga

SEQ ID NO: 18951 - DNA, 1047 bp, Homo sapiens
atagatcaatttgtgtattcaccaaagagtagactctacaaccactgaaggctttgcatgaaatgttttaacatgtttcatctaatatttcatcttcagacacaaaaaatcaatacatgaaaatattcaattacgtataaagggctatagactatggttggaggaggaaatcgcaaatcgacagtgggatattccaaaccactgtattgtgaaagcaaacacaagaaagaaaatagggattcctattgttcccgataaaaggaaaggaaaggtaactcccagagagccactccctcactttgccatattcaaatgttctgaacaaggcacaggtctggccatacccaaggaaagatgaggattcagggtgtaacaaaagacagcagagatcatggggcgtcttaggattctgcccccaatatccacccttccacaaaaacttaatctgacatctcacattggtggggatctggtgttcttgtaagaaaaaaagaaagtctcagaaagtgtttcccttgtagactctggggcagttgatcctcagcactttctattttggaagccagaaaattcctttttgactgagaaggggtgcagtcctgtgcaccataggattcccattgttgactgcatgtcagtgggagccaccagctattacaaccagaaatgtctgggcaaacttcctcaggatgcagaagctgctcccgtgagaaccgctgctcctctccatatgtgaacagactgacagatgcaggcagcaccagcaatctctttaaccactgaggtgcactggaaaatgtgagttgcagtgtgtccctgtgttagaattattaagaggcttttgttgacaattgctgagaccatacaatgcaccacagcaagattagctgggtaaatgatcttctgataaaggtttgaacccagatgttcctcttttgttgttttcctggaagtgggtaaattcagttttcacttcggtagctcccctaacaatcccaagaccaggtcttttactgcttccctaggtggcatgaccattatcggcct

SEQ ID NO: 18952 - DNA, 1085 bp, Homo sapiens
attagctatgtatatattgttcacttcaaaacagagtaagataaagcaaaccatgtacatactagcataggttacatataaaatgtcagttatagcctctgtatgttaaaaaaaattcgatgtagtcacaaggacagaaaaccaaacactgtgtgttctcgctcataggtgggaactgaacaatgaggtcacttggacagagggtggggagcatcatttaccagggcctgtcaaggggtagggggtttggggagggacagcattaggagaaatacctaatgtaaatgatgagttgatgggtgcagcaaaccaacatggcacatgtatacctatgtaacaaacctgcacgttgtgcacatgtaccctaaaacttaaagtataataaattcaatatagtgattaagtggcattgtaccaccctgttatcttgggaagcagatgctttcatggactaaattttgtgtttggtgctcctttcttgcagctttcagtaaattctcattttatgaaagacctgggcttagacagtttggaccaagtggagattatcatggccatggaagacgaatttggtaaggctcagtcttctatctacacactgcgatttttgattaaggtggattaaactgaaagaagtggtgggcgtctgaattggaattagaattaaatattaatagaaacagtagcatccactgcccttcacacacaccttcctgcccacttaccatcaggtgaagtaagctttagggatggtacatttattcagagagcaccttgcacaagcccagcagagtgcccagtgtggtgccaagagccgaatgaccagagatggttccaggggactgattcttcagacagggttctaagacaaagggcaaaagcctccccggaacacatgctgatgacatgtcagcccctcctgagctcgggtaacgcgaaccaggtagaagtaatgtgtgccaggacaagagacgcacccagagcctctggccttggtctcctatcctggctcacaagcacactccaagtttgggactgtgtgttgggcaggtgagacctttataaggttccatggctgtttctgc

SEQ ID NO: 18953 - DNA, 1050 bp, Homo sapiens
ctttgggtttaccatgacagctctttccttttgggttattttgacttgggtcagcctattaaaggtggcagcaccctgtagaggcctcgggatgctgaagatgccatgagaagacacaggcattctgcagacgctagacaattttagtggcagttagtgtcgcagagcagtatgaatgtccagagcctgagggttgaagccaggaggcagaggggccggtcctgactcccaggaaggaggcctgagatgctgctgaactgttggggcttctgcgattacccagtcctgcaacttagtgtgtcctggtggccacaatgagaatcagatgctgtgggttctctaaagccccgaaagttctgtgaaagttacctataggcttgtgcattgatttagaggtattttccattcaatgacagtgtttccttcctgccgtcgctctaggttcctggtagagttacacagttgtgccgccagtatagcgacatgcctcctttgacgttagagggcatccaggaccgtgttctttacgtattgaaactctatgacaagattgacccagagaaggtaactgatggtggtttgaatttttttctttaaatatagagtatttaattacatgctagaaaatgcaaagggaaagatactcagtaaaaatctccctggctcccagacacccaggcccattctgggagatagccagcgctaccagtttcatgtatgtttccaaaggtactcaatgcatatgttaaagaagtatacacacgtgtgtatattatatgtatgtatctctcaccctttttaaaaaacacaactggccgggcactgtggctcatgcctgtaatcccagcactttgggaggccgaggcgggcggatcacctgaggtcgggaattcaagaccagcctgactaacatgtagaaacttcatctctactaaaaatacaaaattagccgggcatggtggcacatacctgtaatcccagctactcgggaggctgaggcagcagaatcacttgaacccgggaggtggaggttgcagtgagccgagatag

SEQ ID NO: 18954 - DNA, 1033 bp, Homo sapiens
atgttctgaatgttcaaaaaccaatttacaaatgaatatttctaatttgagcactccctgcacatgtgtgtcctcattctctctttgccaatatttccccaaatgaatggcatgaaatgtagtactatctaaggggaaggaaatggatgaatcagattcatgcctggcaagactggctaaaacaaacactgggaaccggaagcaggagaagctaaagctagaagttggctgagcgcggtggctgacgtctgtaatcccaacactttgggaggctgaggtgggaggatcccttgaggccaggtgttcaacaacagcctgggtaacacaggaaggccttgtctctaaaaaaaaaaagaagaagaacaagaagccagaagtccagtccagtaataatctcaacagttcctagacggcagggaaaaaaatcaagccagtggttaaatcctggatacttcagagcctatcggtcattgctttaattgtttggtttttgtctctgccagatctttatttttcctgacatactcttgacagtctatttgggatatttatttttctccgaaattaggggcttctctttattgtcctgagtcatccctgtgccaaagagagtgagtcgttgcgaagccctgtgtttcagctcattgtgattaaccctaagacgactctcagcgtgggtgtgatgctgtactgtcttcctccagggcaggctggcaggcaagtgtgcataactgctactctatgggtgggacattctgaaaggcactgtgcaaacacaaaaactagatatttttgtgtcacttagaagaatggaaaacatgaaatactatatatcatgataggaatattcagaagtaggatgaagattagtggacttgagtcaaaccccagattccctgcatcctgatctctactagtatggggttatataggtttttaatagtgtttattcaagccctgttttttcccctaaggtaaatattttggcagcacatggtggatcatgcctgtaatcccagcactttgggaggtc

SEQ ID NO: 18955 - DNA, 1113 bp, Homo sapiens
tgacatcagcctgggcaatgtagtgagaccgcatctctacaaaaaaaaatttttttttagtatcccagtatggtgatgtgtgccagtagtccaagctgctccagaggctgaggctggaggattgtttgagcccaggagtttggcactgtagtgagctatgattgctccactggagtgccaagcactccagcctgggtggtggagtgagaccacatgtctaaagggggaaaaaaacagcagaggaagtatggggataaacacactaacatgatgtcattcaagatgaggcctgcctatttgcttttagctgctcacacccaaattgatcaaagacattgaacagtaccaggttcattggctttgctcaggcttgaagccgagtggagttgctcaggggtggccattagtctggtccttgccgcttcactgcatgccgggcagcttgggtggctatccccatgtgtggttttaacacatgtggaccgatgggcttctgtctcagtagtctgctcgcatggtgtgttgactgtttcttctctctgtgtagctttggtgtgaagcttatggacttccaggcccaccggcggggtggcactctaaatagaaagcacatatcccccgctttccagccgccacttccgcccacagatggcagcaccgtggtgcccgctggcccagagccccctccccagagctctagggctgaaagcagctctgggggtgggactgtcccctcttccgcgggcatactggagcaggggccgagcccaggcgacggcaggtaaggaggctgacttctgctggcagtggaggctggacgccccagccttcttgcaggtggtggcctttgagcacggcatccatgcccaaagaactgctccagcatggagtgaacagatttactttcactcctctggttggcaaaagatggaaaaaaagactatgaatggctcgcttctttttatgttttccaaagaaagcaacattggtttgcattctttgccacactgctttggtgctggaaaccggaagccagtggatgtctcatagtgtgatgagcctctgtcacctgttggatgtatactgtcagcattcatgtaccttctgttcatt

SEQ ID NO: 18956 - DNA, 1031 bp, Homo sapiens
cattccaagcactaatctcaccataaagtcagtgtgtagcttctcagttaacgtttcttccacgtgtattccagcttaacttggtggtgtgcttggtaagccctgcagtggaacggcatcatacacatgttaaaagtgacccagatgtacgtgagtggggggaaacagaaaggaaaataaattcaatagtgtggacttttgtccagaattgagtgtgagaacacccacctggcacagtgagttgagtgatttggcgtttaaggagacatatttctggtataatgtggccccacaatggaagccaaccactgaatttgatgttcagtgggaaaaacctcagtatttgccaattctagaagaaaaaaaaatggcagtgttgaacttagtgagaagcagtgtgtctctatatactcttttctatgggcaattcatgggattttcaagggtgattaagactgtttgtaatttgtgcctttggatgccaacctgtcccatgtgtgtgatgaaatgccactgtactcactaggaatgctaacagttaagaggcctgttggaagtaatatgcttttcttggtatattaaataatactactagaaatagttttacattaaaacgaagtgacaagctcttattttaattgctcagtcttatagtgaggtgtgctgtttgtttcttgttctttgtattgcattttttacccctagcaaaggagaatgcattattctgtccctattctgtccttccaaaatccacatttattctatgcagacgtattacctctctgaaccctcattcatacattcagtagtatttcctgatgacagactctacctgtaacaaaattagctttcatatattttaagttacagaatacagtgcatgagtctagttagcacgtgacagacaattctcagttacctgccttgtgtattctccctgccagctgacccagtaagcacgagctcaagaagccaggtatctttttactttttgaactgaaagaaaaagttgttaagttcatagatcagtc

SEQ ID NO: 18957 - DNA, 1028 bp, Homo sapiens
gaggacgctgactcttagaaagaaaaagtaatttgcttaaggtcacacagcagggaactggtgtgcccaggttctggatacagagcctgtgtccttattaacccttattagctttccagtactctcctaaaagaaaaatgggaaaggatggagaggacagttcctccctaatccagcagagttttaaggcacacagactgatcagattccacatgggaggaaggctgggaaggatcatttacaggcagagcttcaattttaagctggaatttgaaaggagcaagaaattttacttggtcggaaagtgggtgaaaatactctgatgggaagagaggtcagagtgataggagaggagaggtttgaggcagtcagacctgggattgagcttgggaacccagtgtcctcatgtaggcctcataacgggttgttgtaaaaattaagcgaggtgaagaacctgaagcctggtaggtggccagaaagtgtcaggccttttgcaggtggtttgcttttgtggtgttctgactctcagctgaaacaggagcttgatagcagtgataataactcttacttttttcttcttcttcttcttctttcttcctttctttttttttttgagacaagttctcgctttgttctccaggctggagtgcagtggtgtgatcatggctcactgcagccgcaacctcctgggctcaggctatcctccaaccccagcctctccggtagctgggaatacagatgcatgccaccacacctggccaatttttgtatttttgtagagatgggatttcactatgttgtccaggctggtcttgaactcctggtctaactgcctcagcctcccaaagtgctgggattacaggtgtgagccactgcgtctggcctacttattttcttctttttgagccttggcgtcagacactattaacatctgaacactcatcttgagactagtccacatatatgatgaccttacgtgtgaatgggaggctcaggtttcaacataataaaaggcacatttgccaggc

SEQ ID NO: 18958 - DNA, 1065 bp, Homo sapiens
acaattggtttgtaatttgggagaaatagagctttttatctcataaattacagattaattagatggtcaagtgatctcattctctctgcatccacctgtgtagatagatgttcattctgaatgttatttgaggtgaaattatttgaaatggtaaaggaataggtcttcggggagtcttgacaatctagagtcttaagtctggattgacttagacttttcctgctcttatttttcattgttttaaaaaaattgtttttttatttcctgctaatattaagactgttatattttagttcatttaggtcatgacatactttgcttttcaaaatagcaaaccttgatcagttaactgcaattaaatgacttgtttaaaataatatagtgggtagaaatataagaaaaatataaaaataatatagtgggtagaaattaaaactaaactcacaaagttatgcctttgttttaaaaagtttttatgtttaaaagatgatattcagataaatgcttctactaaaataatgtcacattggcttatttgtggtctgaagagttgtagctttgtcagtgtcatttacccagcagtcttcttaatatctggtctaacctagatcctggctattgcctacttattgcacacaaatttgggtagaggtttaggaagtcatcatgggctgatgtctgttctctcaacttccacacttgtcagtatttcaagtggtaaaaacttaagaaaatattttctgcctccttctctctctatgcataccttgtgggtaatttcctcagatctatgttctgtttcactgattctctctttagctatgtttgatctgctactcaaataacactgagtttttaatttcattgactatattttccatttctgaagttctagttattcaaatctttttgatactacattattcttttctagtgtttctttcttttaagtcattttaaacatacttatttaataatctctgttaattctgttttctgaaattctctgtgagagtggtaggtgtctgcttgtggtggattatttcctcatgtgttttgtaatta

SEQ ID NO: 18959 - DNA, 1050 bp, Homo sapiens
tcaagggatcctcctgcctcagcctctcgagtagctgcacaccaccacacccagctactattttttttttttttaagatggagtctctctctgtcaaccaggctggagtacagtggcacaatcttggctcactgcaaccaaggtgctgggttcaagcgatactcctgtctcagcctccttaatagttgggattacaagcatgtgccaccacacctggctaatttttgtatttttagtagagatggggtttcaccacattggccaggctggtctcaaactcctgatctcaggtgatttccctgccttagcctcccaaagtgctaggattacaggcgtgagccactgcaaccagccccagctttttatttttagtagagacctggtctcggtatgttgcccaggctggtctcaaactcctggccgcaagtaaatgtctcttcttgacctcccacagtgttgggattacaggtgtgagtcatcacacctggcctgtacgtgtgattggaatcctgtgtagctgagagtgcaggccaccctgcgatacatctttgctcaagagaaggaaaaatattctaatgattaattaaacaaggcagcaaatgctccctcactagagttggttgagcattattatagatgtttatctgacaggagttttgcatcttgagtgcatgtatctcataggtgattttaatactgattcttgatcttgcattcatggtcttgttcacttaatcacaataggtgttggagaagctgaaacaattgaatatttccactttttctcattcttcttgcttttccctggagaaaaaaatggtaataagtaggaatccattatatgccagacatcatatgctgtgcacatgcacacatatttttctcgcttttcctccttatgacagttccacaaggcagacagtgtttgtgatagttttgtagatgaggcaactgagatgcatagaggctaagtcactaactaggtcacataactagttaagataaagctgagctccaaacttgaacatgtcagactctgaaatctatgct

SEQ ID NO: 18960 - DNA, 1455 bp, Homo sapiens
ttgtttttacattgttcgtgacaggtaagggactttcactctttttatacaaagttctgagacttaaatctaccaagctatttagggtctctttgactcctgggtcatcttagaggcttctcccttcacacttttttttttttttgagacagggtctccctttgtcacccaagctggggtgcagtggtgcgatcttgtctcattgcagccttgacttccctgggctcaagcgaccctctcgcctcagccacctatgtggttggaactacaggtgggcaccaccacatccgctaatttttgtattttttgtagagtggggatttgccatgttgcctagggtggtctcgaactcctggcctcaactgatctgcctgccttggcctcccaaagttctgggactacaagcgtgagccaccttgcctggcaccttcacattttaaaattccggccatgcttgcctaccttcagtttccacaggaggtcttgctttcttacctgctagcatctacttggaactcctggaagcctctcccaccacaccttttctccaggcacctcttgctcattcttcagccttctgggaaaggtccctctgcctctgaaaggccttctatgatgctacagcatagattggatgcctctcctgggcgttcttgtaatcctgtgtagcacttgcttttctgtgctgtgactgcctcttgtgtgtgttctccatcagataaataccttgagagtccttgctgtgtctcctttgattcccagggtctgctgtggttcctaccccatggccagggtgcagtagacattgttaattctggtatttgagttcttactagatcgccttggtggtgtgggcccgagtatgggaaaacatgaagtggatagagtagatggtgattcatgctggagctgtaattctgggcctgacctttgactgtctttaaaaatctttattgctagatgccagtggaagctgaagctattacagaactattaagggtgtggcaattatgcacccaaagtcagaacatctgtttttaactgggaaacctgttgcttccttgctgttgatttcctagatgtgtgtgtgtatgtgttttctgcttaagtaatcagaaaggactaaggaagataaacggaggctggagagtgcctagaattgttactgcttggaagtaggtggttggttggccccagaatcaggattctgggtgtttttaggtcaagatgaaggctacaaagcaaagggtttttttgttttcgcccctgcgatctaggtggagaaggaagttatatatgtgaatgtcatgcccatcgtgttttggtttatcaatttgtggaattctaggtggtgtcttgcagtgagatattctcctcagaagggagacctttgagtactttcactgtaaggttccaggggagggacttgtagagaattagtaatgcctggaagga

SEQ ID NO: 18961 - DNA, 1044 bp, Homo sapiens
tttcttagctatgaagtgtaatttccaagataaacttgagaatataaataaactaaacactttcatcctgttctcacctctgcctctaacttcatcagtctgttcctcctcttctgtgtgtctcagcttctcctttaagaatgtggcgaagatacattgtccgagttcagaatgaaatacccttcagtacattgaggccactgcaactggattgctaagttcggcaacattcaagatcttccatatgggtgagagttgtcttcaaggatataaaaaatgccaaaagtttttttgttgttattacctactccgtgagatcctggatgaaacttgataacagattttcacatttagatagaactttgaggagtctgatcggaactacatcaaatccatcttggttttgaagagatccacaaaagaagagtgaagattttatagctttcctcagaagtctgttacagtgtacctttttttttttttttgtcaagaagttgatccaaatagctagggcagaatccctgtattgtcactgaaatcctgttactaatgccttgccctccatggaggtgagaagcaattgatcacccctcatccttttctgtacccgaagacttaaatcccctggctgctgcttctccagcctataagtaatcccaggtcctcctactgtttctcatagccctgcacttgcctctcagttgctctgggtgctcctgccggcctcttccgaactaccatgccctcctcagatagaataggaggcctgctcgtggtgtgtctcactaaagcaaagtaggatttcagatgcgttctagttctatcctctaacttctctggctcttatctagaacatgactggcatgttggcatatttcgtacctcccacccctgcactgcagtataatattataatagtgtttctaaaactttaaggggatagggaagaggtaatagacacctgaagcatttctaagaccagttggactcctttggcctgctgtcgatcagatagccacctcagcttagaccagcgctctcagg

SEQ ID NO: 18962 - DNA, 1338 bp, Homo sapiens
atatatattcttacccttaaaggttttcctgtaagaactagctaggaaaagaaatggtacatatatgagaagtaaaatgatcgtgtaagttagtagatgtttgtaccaaggaagtcatgtaaaaataaatgtgcagtgtcacagctgaggaaggtttgggtgtgaacaagtggcccaggagagcatgtgacagcagaagattgaggcatgcagtaatgacttctatgtctaccatgaaatatgtttattttactgtaggaagtgcagtgtctacatctaacaagataacccggttggaacagagaaaggagccatggactctaggtctgcattcctctaacaagagaagtatcctacgaagcaactacgtcaaggaaaagtcagttcatgctattcaggtccctgcaaggagtgcaggaaaaacatggagagagcagcagcagtggggtttagaagatgaaaagatagcaggtgtgcattggagctatgaggaaacaaagactttcctggcaattctcaaagagtctcgcttttatgaaacacttcaggcctgtccccgaaatagccaagtgtatggtgctgtggctgaatggttgcgagaatgtggcttccttagaaccccagaacagtgtcgaaccaagttcaaaagtctccagaaaagctatcgaaaggtgagaaatggccacatgctagaaccctgcgccttctttgaggacatggatgctttgttgaaccctgcagcccgtgctccgtccactgataaaccaaaggagatgatacctgtccccagactgaagagaattgccatcagtgctaaggaacacatcagcttggtggaggaggaggaagctgcagaagattctgatgatgatgaaataggcatcgaatttatccgcaagtctgaaatccatggtgcccctgtcttgtttcagaatctcagtggtaagaattgtgctttgtttctctggtaggaaaacagatgtgtgatcttgtggaaaaaggagtagaccagaagtggccaaacccggggggtgctgtcacacacacctcaccactttcactgtggtgtggccacatcactgaagtactctcaggtgcttgctgctgcccccattgcagtcagagtaacagctccaagtggccgtggagaagtcgttttcactttagagcacagcatggattttgagtgtttgggtccttgtggaaggaagacaaatggagttacagggttctaaggatcttgtattatctgataattggcataaagcaatcaattgtattgcattataagtcaagcatgcattattacgttatctaaaataaccagtacaaaatttt

SEQ ID NO: 18963 - DNA, 1024 bp, Homo sapiens
tgtcccagccgggactgggagtcagcctcagtgcttcctctccctgaccctcctgcatcccattgtcaccagatcctgtccagcccagctgccaatagccctctagccctgccactgctgcctcaggctgagctccagccccggcccacactctgcctctgtgctccctgcagaagacccctggatgcccccactgctgcagcagggctgtgacccctggtgaggctcctgctcatctgccaccgcctccccccacccactgctcagggtgcagcgcttccttcgtcagctccggagcctctacacagagcgccctgggcctgcgcgccctcccctctggtgtctggctttgtttcctggctagcacccgctcgccctttggcactggtcagcccctcgctccctgcacttcctccatcctcacacttgttaagtccccatcttcatccctctcttgaaccccagcatcagtcaggatgcttcagtcatgacagaaaagccaactcagactggctgaaacaaggacggacttggccacaggggtcttgaggagatgcctggtctagaggctccagcaaggtcaccacacagccatatttctgtgtctactgtgctttcactgggctggctgcatgcttggggcctacgaggtggtttcctagaaatccagctgccttcttcatggtagcaaaatagctgccatgcctctgggcctcgcgcatcatgcctgggatcaggaggaagagggtggctctcacttagtggctcccacatccttgcaagcatcctcatggcccacagctcccacgtggacacctgtgaggtggggatgggattatccagctggcattggaaaattagacccacctcggagagaggggtgggactgtccctctcaggccacgtggctgagggagcaggggcctttccctaagcatatcgaaggtgcgatcacatcttcagtagcctcaggggcagcagggagtgaacttggacactgaattggtggctggcctcccccgct

SEQ ID NO: 18964 - DNA, 1058 bp, Homo sapiens
agtgcagtggtgtgatcacggttcactgcagcctcgacctcccaggctcaagcaatcttcccacctcagcctcctaaatagctgggactacggaggtgtgccactatgcccagctaatttttgtgttttttgtggagatgggattttgccatgttgctcaagctggttttgaactcctgggctcactgtgcccagcctataaggaactcttataatatagaggtagattttattcattattaatttgataaggttttaaatctggtctaacagtccttgtctttaagctggaacatttagtctatttttattcattgttattactaatctagttggattatttctcctgacttactttgtttttttgtgtttgtttttcctatcctggttttcctttccattattttttctcattacattattcccctttactatttggaaattatatacactatttgtttttttaaaagttgttactctagaaattgtaaaatgcaagtgtaaaatttattcatgtccagcttctactcctgaccatcacaaggctattagaacactaatcccagtgattgctcacctcccatttatgttattatttttgtgtatttagttttttaaaaacctcattctttttactgtggtattaaaaacttttttttaaagatagaagcatttcttctgatttttactgttttatacagttaacttggatttaaccacatatttaccaactttttttgctctttattctaccctgcattttagaccttccaacttgtatccctttctttcttcctgaactatatgctttggaatttcctttagggagcacctgctggtcacttgctctttcagttttttgttgtttggaaatgtttttgtcttatcctcagtcttcagctcgttatagaattctctgttgagacacccgctcccagcatagaagatatgtttccactgtgaccggcttccattgttgccattgtgatggcagccggcagtctacttgttgctctttagaagtcatctgactttttctttgattgtgtttaatctct

SEQ ID NO: 18965 - DNA, 1033 bp, Homo sapiens
ggaagcagtgagttggtgctggagcatgcctttcctgggtgtggcctgtgcattggtcaggggaggggggcctctgtcgggctgcctctgatcttcctctgtgtccccacagccgctcctctggaagagctaacaatgggaacctcctgcctccctgatacgttcaccaagctgataaacccccaggaaaacacctgcagcttggaggagtttgtcctccagctggagctgtctgggtatagtcccgaagacctgactgctgccttggagatcttggaagccattatagccacgggttgttttgggattgacaaggaggagctgcgcagacggttctcggccttggagaaggcaggtggtgggcgcaccaggacattcgcagattgcatccaggtgagctgtgctttaggttagccggatatcaccgaagcggaaattgcagctcccaggccaggtgcacactgaggatgggcttgatttggggcatagcatgctgcgttctttttaaacgttgaattagtcattaacacttgaaaactggggcatttcacatccgctttgagggtacagttgtggatccccaaaggtcacacggctgacgtggttcacgagcagccagagagaaagagatgctgctccagggcacagggctagcaaggggcagccccggggctaggagccaggcctgcctcgtgggcctgggctgctcagggcactcaacccgccagtcaggggaggccactccactcgtcccccgtcaccagcgtggaggatcccgagctccccacagaccccgcgtgtctcctgcctccccaggccctcctggagcagcatcaggtgctggaggtcggtggcaacactgcgcgcctggtagccatgggctctgcctggccttggctcctgcactccgtgcggctgaaagacagagaagacgccgacatccagagagaagacccccaggccagacccctggaggggtcttccagtgaggacagcccccccgaggggcaggcacctccttctcacagccccc

SEQ ID NO: 18966 - DNA, 1027 bp, Homo sapiens
ctccgggccatagcacatgtgctggttcaggaaggagggcaaacttgactcaccggggcccggctgtctgtcaggcagcgtcaggtccaggacacactagacccagggattccaagtggaagaggttgtgtgtgtgacttccctttcctagggctgcagccccacggtgtggcctttactctcaaggtttccctgttagaaggcacaggtgaaagaggaacagcagcatgagtgcatgcaactagacagcatttgcactcgaatggaccaggggcagcgcgggtgttcctcgggtgggccttctgactgcctgtcctgcaccctcttgctgtgcctacctcctctcacagccatcatctctcactggggaaaatcaagcaacagcgcatttgtatcaacaaagaaataagcccctttaaaagaactgagatggctgggtatggtggctaacgcctgtaatcccaacactttgggaggccaagtggagcatatcatgaggtcaggagatcgagaccattctggccagtgtggtgaaaccctgcctctactaaaaatacaaaaattagctgggtgtggtgcctacagtcccagccacttgggaggctgaggcaggagaattgcttgaaccagggaggtggaggttgcagtgagctgagatcatgccactgtactccagcctgggcaacagagcgagactctgtttcaaaacaacaacaacaataaacaacaaaaactgagattatggaatatttggcacagttctcatcaagccagaaatccttatccagtagcttcttaggccctctgttaggtcgttcttattataaaggcatacctgaggctgggtcatttgtaaagaaaagaggcttaattggctgacagttctacaggctgtataggaagcatggtgccagcatttgcttgggttctactgaggcctcaggaagcttccagccatgacagaaggtgaaggggggcaggcacatcacctggcaaaagcaggagcaagagagagagttgggggagg

SEQ ID NO: 18967 - DNA, 1084 bp, Homo sapiens
aactgcagagcagtacaaaaaacttaagaaacaacagtgtctatcctttccacattgacagctctcatcagtttttatgtctgctataagtatttttaaaataaaacaataatgtcccctggccccctgctccccactcccccaccagcctgccacttgttccctgagcagtggcagtgtgttcctgtgctgacctccctcagagaaggccaagaaaaactgcagcccagtagtagcagtgccttctatttctgttgatcttcaaagagtgcagtcactgaagacaggaaccccccaccctccagtctagggttagggagagacaggaaggtataggcatctgctgtgtctccaggcattgctggagggagtgggcgagggatgggggcagcgggtaagcatggggggccacataacctcaaaaatgaaagtgcccaggcctcttgccacaaggtcccactacagtagctggtttttccggctggaaggggcttccgtcgtgtgcatgtgactctagtaccagcgtaggtttccaggcaggactttctctggcacccagagcatgtgctgctggcagcctttgatctgctggggccatgtgagctggagctggtgcgtctgtgtcagtcttttgcctttgctcctgtgtcttgcccggaaagtggggcaatgtgaatgctgtatatttctcccttgcctttgaattctctgaaatgttgccttactgcgtctcatttgagcttcacaaaaccacaaagctggtggttgggggtgggggcagggtggtccttatttcacaaatgaggattcggagaaaatgagccaagtgtggcattcgggagcccttgtctaggcgttgcttcctgccccctgtttccagatctttctgagcccatgttcagcatgaagctgctggccagagtggatgctcagacagcctgaccttgctgtccccggcctcagcagagacaggcaagaagcctggctccctgggggcctggccgtcctcacctgccacaacatggctggtgtgctcacacacaccctgccccactccacctctccctgctgggcattcaagtta

SEQ ID NO: 18968 - DNA, 1022 bp, Homo sapiens
gttggaggctgtgatggaatggatgtcagttgctccactagtagagaggtgaggacggtgaaccaacttggtggggagaagaagggttttttttgttttttttttttgttgtgttttgttttgtttgaaacagagtctcactcttgcccaggctggagtgcagtggtgtgatcatagctcactgcaacctcaaactcctgggctcaagcaatcctcctgcttcagccttccgagtagctgggactacagatgcacacctccaacgcctatagctaattttttgtatttgttatggaaatgaagtcttgctctgttgcccaggctggtctcaaactcctgacctcaaatgatctgcccacctcggcctcccaaagtgctgggattacaggcatgagccactgctcccagccaagatcagaagctttgaagactatgaggctttttctcttttttgcccactgagtcatgagtttactagtaccgtttcttgccttccacccgtgtttattttgagagctgtcctgtgtatcttttcctagccaattagcctcttaaggaagcttaaaaggagaagaaatagcgctgggccactggctgagggcgcctcaggtctgactcccccaagtgctgtgtcgtgctgctgctcaggcagaagccagcgtccctggcgccgcgccgctcttctattctcagtcacagggacgttttgaatcaggggcgtctaaaccaaaggtttagagcctgggctccagagccagactgcctggtaaatgccaccttctcactagcaaaggggcatttgtttgtgtgaattccttggctccttagtgttctcatgtgggactggaatgatcacccttacctcctcaggccatggtgagggtcagttcatagggtacacggggagcctaggacagcatccaggatatagtaatggataaatggtcgtagtgttattaggagccataggttgctcatgtgagcagcatggtaggatgggggttgggaggggcttgtctaga

SEQ ID NO: 18969 - DNA, 1052 bp, Homo sapiens
gatagagaaagtagcctatgcaatttctgccttatatttttttttcgtaaatgttttatttgaaaaagcaggtacattccctgtgtgcagtttaaagcagttttatagatagtattatttaagggctttatattgttatatatatatttttgaggcagagtcttgctctgtcgtccaggctggagtgcagtgacaacatcatggctcactgcagcttcaacttcctgggttcaagtgatccttccatctcagcctcctgagtagtgggactaaaggtgcatgccaccatgcctggctaattaaaattttttttttttttttttgtaaagatgaggtgttactatgttgcccaggctggtctcaaactattggcctcaagcaatcttcctgcctcagcctcccaaagtgctaggattacaagcgtgaaccactgcacccagcctctaaattgtcatttatttatctttactccctttatctgccaaaagctggatgaggtaggttaatctctttctcttcaataggattcttcccatttttacttgaatttctgatagtttttgttttcataaaaaagtttgagtctatgttgttcatcacaagaagattcttgacagttatattttcattgcggaattgtggattttatcttttgtcaagataaaatggctattttcccccagtgaatgctttttactttgcatcctatttttttcatattttaatattgctatccctgctttctttcgtttgtattcccttgatatatctcttactagactttttattttaacttctccatgtctttttgttaggtgaatatctggtaagaacatagagttagctttatttacttattttttggtacaatccgagagtcttaaacaaatactatttatttctataacaaatacacttggcctcacttctttcacttctttctttttgttgaatgttcccaatttttagtttttttttaatcttttactatatagattaggttttgcttctttttttctttactaatgttttaaaaagcatgcatactgata

SEQ ID NO: 18970 - DNA, 1052 bp, Homo sapiens
gacttaggagcgcagaggaaaggccaatggggagtaagctgggctgggatggagtttttttttttttttttgagacagagtctcgctctgtcgccaggctggagcgcggtggcgctgcaacctccacctcccgggttcaagtgattttcccacctcagcctcccgagtagttacaggcatgcgccatcacgcccagctaatttttgtatttttagtagagatgggatttcaccatgttggccaggatggtctgaatctctaccttccaccgtagatgtctcccagacggacctcgtgatccacctgcctcggcctcccaaagtgctgggattacagatgtgagccaccgcacctggccttttttttttttttttttaagagacaaggtctcactctgtcacccaggctggagtgcagtgatgcagtcatggctcactgcagtcttgacttacagcttttagtgatcctcccacctcagcctctcgagtagctgggactacagatgtgcatcaccatgcctggctagttctgtttattttttgtagagatgggatctcactgtgttgcccaggctggtctcaaactcctgggctcaagcgatccaaagtgctgagactacaggcttttgagacgccatggctggtcaaatggaggatgttctttccaggactgatagcatggcccaggggtgtgggttgtagtgagccctaattcttagaggtgtgcgagctggtctttgacctgacctaattcttaaagtttttatttatttgtttatttttttgggacagagtcttggcctgtggcccaggctggagtgcagtcgtgccatcttggctcactgcaacctccgcctcctgggttcaagtgattctcctgcctcagcctcccaagtagctgggattacacaggtgcatgctcccacacccagctaatttttgtatttttagtagagatggggtttcaccatgttggccaggctggtcttgaactcctgacctcaagtgagccacctgccttggcctccccaagtgctgggattacagacgtga

SEQ ID NO: 18971 - DNA, 1051 bp, Homo sapiens
tgcagtggaagcttaaactccaaaatctgacatcaaagctctgtttataaagctgtcacacctggtagttgtctacgctttagtctgcagctaggaatgttaaatttgtactagttctgaagtcaacacatgatcacttaagttctttgattttgcttttataatttacctttctcttaggtgagcatgtgtcacagaaagattgaataagattcagtagacattgactaactgccttctgtgctctagtcagcggtggcaatgtttagatgatgaatatcttagtttttaggttctacgtgaaccggtaaatgatttctatgctgttgcccatgtcttagaacagcaaatgcagtggatgcaattcttacctcctatgaaaatgagttgaacgctaatatattttcaccttaacctttaaaatcacatcttcttttctttctgcaggcatgctcagtccctggctgcgctgcaggcttactctcactggttagcacagtattgcagtgaagttcaccggcagaacacgcagcagttcgtgacactcatctctactaccatggatgcaatcacacctctaatcagcaccaaggtctcgaaacagcaaagcctacaccttttatctaactctctgtctctccttctgttcctatacccatttactagaaaatctaaatatgacacagagttagacccataaatctttctgctgttatacatctgttttatttcatgttcctttttagttgtagcctacatgcattcagatacaactttacttttttagttatctgagttccacatgaatacatgctcactgtgaaaaagtaaaatatcattcagatttccagactaaaaagttgtgatacctctgaaacattttccttcgcgcggtaagcacagttgggcagtggttgtgcaggcacacctcattttattgcacttccctttattgcgcttcacagagactgtgttttttacaagttgaaggcttatggcaaccctgcatcaagcaaatctgtcagcaccatttttttgacagtatttggtg

SEQ ID NO: 18972 - DNA, 1279 bp, Homo sapiens
taatattctcagttttccttagattgtcctttgttattaagctatatagaattaagctattttcttttccttagagtaaatagcagaatataaaatcaagtgcataaagttgaaagttgtagtgctttttaaattgggcagttttgtaaaatatttctaaaattaaaaaattggtacataagattattttggtttggtttattgtaaaaccgtgatgtttgctctgtataagaacacaatctgatatggtaatatgttcttaaaaattatttggtgatagctttccatatgaattcaaaggcatcattattcacactttcatattctttctgtctgtggttaagaaaggctgtattaccttttttttaatgatctgtgtgtctcatgtctatctcttcatatgttaatttaaaaatctagctgcttgtatcaactatcaaatatcagttgttttgactttaatcataatgtagtcacagacaactttgttgtggcttccatttggatggtatagaaatgtcattatggattgtctatgtactgatgttgttacgtgtaacttttgtgctcttggttttacattttaatcctgtgcttcctattgccctgtgaaagctgagaggtgcctgggagcagaaaggtgacataaataatgctgtgtgcttgcttcctggctctgggtcccctaccactaattctaaacagctcagtccattctcagttgtttaggagctgctaaccagatccttggcttctctttccctctactgccttttcccctaactttctactgttcattagcacctgtaccagaaggtgggcaagggaaagaaaatgaggtgaaataaaatctgtagttttagctactgaacagccttgtttgtatttttaaaaaattgggttagatactaaagtaaaattgagattgttctgtatttagcccatggcttttttttttttttttttttttttaaatgggtagtagggaattgagtgcaccttcctaaagaacagtcagctgggtggtgactttgaatatccatgtaaaactatcatgcggtacataagtgagtgaggaaggagttcctactcttgagtattagtgattgatgacaccagagagaagtgtctttgtatgttcctgtctctaaaaacagttgattttagtgccttactgtttttcgagtacttggccccatgatccacagagacagccattctctttatcaaaacaaattaatatgtattttttaaaaagctgcaaataagctcggccgca

SEQ ID NO: 18973 - DNA, 1002 bp, Homo sapiens
caacactctgtctctaaaaaaaaaaaaaaattaggctgaatgcagaggctcccacctgtgatcccagcattttgggaggccaaggtgggaggatcacttgaagtcaggtgttcaaccccaacctcggcaacagagcaagacccaggctctacaaaaatgaaaataaaagccagatgtggtggcatgtgcctgtagtctcagctatttgaagctgaggcaggaggattgcttgagccaaggagtttgaggcctcagtgaactaggatcatgccactgaactctagcctggcaacagagaccatgtctttagcaaaaaaaaaaaaaaaaagaataactggggcagaaaaatctatatttaagagaatttatctggcggtaaagtactgtttggattggaattggaaaacctggaaaccaggtaaaagcaattatagtaacgtaggcaggagatgattagggctccgtagaaatagtggtgagggagaaggtacaaacctgcaaaagagtgagaagcaacagtccgcagacctgatggtgtttgctgtggatggagaatatggggaagaagcaaaggcgatctcaaattatgtcacccttctgcttcttccaagttttaatttttttaggtgattatgggtcttggtggacttagtagtcccttaataaatgagtcaatggcatagatctctgaactgctgacccatgagcagcaaagtaaaaggagcagataaagtcagggcaggcacagttgcaagcttatcacctttgcagttttaactgtttctggaacagaaaacttgggtttgttttagatctatgcagagctctccaagagtatattctgagccaagcttaattcgtcatcctgcccaaggattttaagtgtatgtgccatttgctattgaggtgagccaagtaactcttggggaagcataggcttatggggttgtaataccttgtgctgccatcctggcagctctgaagacaagagatggttcctag

SEQ ID NO: 18974 - DNA, 1199 bp, Homo sapiens
tacagtgtggatgtaccttatttaaccaatcctgccttgatggaaatttaagttgtccccattcttttgttttacaaacggcattgacatgaagatcctttacacctaagctttggaggaaaaatcaccaaaagtgtattgctgggtgaggttgtctttgtgtttgaaatttgataaatattgctgacttgtcttggcccccactgaggtggcaccagttgtcttgccatccctgtatgagagtgaaagatgtaatttcagttcattatggtcggtgtcatgttgaagcccacaaggagtgaggagctctgagggtggggaagggggaactgcattaggcttcacagagttggggaccttttcgaggagtcaggagcattctagatagaggaaatggtgtgtgtgaagacatggaactgttatgtggagagaaaagggtgagtttgggtttggctgaggcagagggtgggtgggtggctgtggatggtgaggtggggacagtaagtcagctaggttagggccaggtgatgaaatggtttaatcacccctggtggtcaggtagcaaagaccctgggcggcagtggtgatggggcttgcaggtgaaagatacttgagagagaatgtacgaccagtctttttagcaatctttttttacccccgaaaaactttctagacttgttagaaccagaatcacaaagctgggaagggctttagtgcagggcttttctggtgctctgtaggcccatagggattcttggaggtgtcacagacactaggtttgggagtacagacaggcatttgagaccccctcctctacccttattaattaagcagtttctcatttagtctgctttatatggtggggttctatgcaatatttctttctttaaaaagaaaaaaagtgtttgctgctagaatcatgagtctagtcccaaactcttactgtcctgaacacagatggaggcctgtgggacacgttttcattcttacattcttcgtttgcagcagtgagaggtgatttgtatataaaaatgaaagtgaaaaggcatttggcattcttgggatgtttttgagcatttagctaattttttatgtaggatttttattttgttcctttttttttaagctcattgactcaccagtgaaatatctagtgaaatagttttgctcatttatggatgagggtgctaagggattta

SEQ ID NO: 18975 - DNA, 1031 bp, Homo sapiens
agcccttggtaagtactggatcacctagcctgtggttgagcacctcgaggagtggagctgttctcctcagtttcacccattttacccctgccaagttagtggtataatagagaaagggacatagctgcatcttttgtgatacagaccttaaggcctgtggaattttcgaaacattcaaggggcctgtgggtagtgtgtaggtcctgagatatggagcttacaaccagctgggtaaagtacaccattaatgctgagcagcaccgtacagtatatgctatacgtatagtgtatgtgttttatttttatttgttttgagacagggtcttgctttgtttcctaggctggagtgcagtggcacgttcatggctcactgcagcctcgacctcctgggctcaagcagtcctcccaccttagcctcccaagtagctggggctgcaggcaagtgccaccatgcctggctaattttttgtggagatgaggtctcaccacgttccccaggctggtcttgaacctgagctcaagtgatccgtcctcctcagcctcccaaagtgctgggattacaggcgtgagccaccgtgcacagctgagtctatgtattttaacatatatattacacagtatgaattgtggcaaatcagttaagctctcagttccaatttcctcaactatgaaatttggggataggatttctctaaagagtaatctagaggtatgaggtataacatttagtggctaatgaaagtagcactcattccttccttcatttattctttcagtaatgctttttttttttttttttttgagatggagttcagctgttgttgcccaggctggagtgcagtggtgcagtctcagctcacggcaacttctgcctcccgggttcaagtgattctcctgcctcagcctcccgagtagctgggattataggcatgcgccaccatgcccggctaaattttgtatttttagtagagatggggtttcaccatgttggtcaggctggtcttgaattcctgacctcaggtgatccaccc

SEQ ID NO: 18976 - DNA, 1051 bp, Homo sapiens
tcaataaatcatttgcacatctggcccaccttgcctgcttctcagaggatggaaccaacacaacacatctgaagagaggcacagaagtggtgactttgggaggccaaggtgggcagatcacctgagtttgggagttcaagaccagcctgggccaacatggcgaaaccccatctctactaaaaatacaaaaattagctgggcatggtggcacgcacctgtagtctcagctactcgggaagctgaggcccaagaatcacttgaactggagaggcagaggttgccatgagccaagattgtgccattgcgctccagtctgagcaacggagtgaaactctgtctttcaaaacaaagcaaacaaaaccaaaaacaaacaaacaaaaacaaaaaaagaagtagcagcctgcaatggtgcagtcctttgtccctgacgcctagggataagccactcttgccagctcaaaggtgccacctctccagagagggtcttgatgggtataatttggatagcggaacacaaagaaaaaacttagccatgattttattttccttctttcttcttttttttttttttttgagatggagtcttgctctgtcacccaggctggagagcaatggcacaatctcggctcactgcagcctccgcctcccaggttcgagcagttctcttgcctcagcctcccaagtggctgggattacaggcacgtgccaccatgcccagctaatttttttttttttgtatttttagtagagatggggtttcaccatattggtcaggctggtctcaaactcctgactttgggtgatctgcccacctcggcctcccaaagtgctgggatgacaggcgtgagctacctagtccagtctcttttctttttttaatttaatttttatttatttatttagttttatttatttatttatttcttgagatgtagtcttgctcttctcccccaggctggaatgcaatgatgcgatctcggctcactgcaacctccacctctcggcttcaagcaattctcctgcctcagcctcccgggtagctggtactaca

SEQ ID NO: 18977 - DNA, 1051 bp, Homo sapiens
aggtcaccttcctctccctcactgccttctaccccaggtaagcaggtggagcagggagtgtggggagaggctgtcccatggtcagcctaggtcctcctgaatgttcctgtgttctccttcccagggccgtgatctcctggtggtcctcagggactgggggagctgggctgctgggggccctgtcctacctgggcctcacccaggccggcctctcccctcagcagaccctgctgtccatgctgggtatccctgccctgctgctggccaggtgagctgccctgagccgggagggagaggggtccaaggagagaaaacttggccatggctgggtgtggtggctcacgcctgtaatcccagcactttgggaggccaaggagggcagatcgcctaaggtcaggaaaccagcctggccaacatggtgaaaccccgtctctactaaaaatacaacaattagccaggtgtggtggcgggtgcctgtagtcccaactactcaggaggctaaggcaggagaatcgcttgaaccccggaggcagtggtggcagtgagccgagatcgtgccattgcactccagcccgggcgacagagttagactctgtctcaggaagaaaaaaaaaaaaagaaagaaaagaaaacttgattatgattgcaatcttcaagtccctaccttgctgtgaagggaggcggaatctggactctgatagccccaggtgtgagtcctggagctgccactttttagctttgtagcgttgaacaagttactccacctctctgaaccctcagtttccccatatctcaaatggcagttgttcttgctttccttggaggtgatgagggtaatgcattcagcacagtgtggttcccaaggtgattagaagtaggatgagggtggactttatttgattagttccttttttttttttttttttttttaatcagtgttgaccaggttggcctcgaatgtgtagccttgcctgcctgagtgccagggcaacaggcctgaaccatggcgactcccttttttttttttttttttttttttttttgagacgga

SEQ ID NO: 18978 - DNA, 1032 bp, Homo sapiens
gttaaggtgagggttgctgggacactggagacagggccagaagctgcctcttgtcaggataaatgttaggcttgtggggaggagattaagatattcagtgtttgggtatgagatggcaggtttgtggtcttggccacgcagaatgggtggtgaggagatggtagagaaaggtgggcctgagtttctaactgctacacttggctatatggatgtgaactgaagagctcgttgaacttggctgtttcctttccttctcctctccagaatatgatcacaggcactgcacccctcgacggctgcatcctggtggtagcagccaatgacggccccatgccccagacccgagagcacttattactggccagacaggtactcagagcctgggtaaggatgcaaaagggaagagtggggagttgggcccctctgtatattgtccctgtctctctggcatctacagattggggtggagcatgtggtggtgtatgtgaacaaggctgacgctgtccaggactctgagatggtggaactggtggaactggagatccgggagctgctcaccgagtttggctataaaggggaggagaccccagtcatcgtaggctctgctctctgtgcccttgaggtgaacgcggggtcaggcagggcagctgctgcagagggtggggctggatgggcacccagagctctgctttgtgtctgggaagtggctcttgataatcgagggaagtagaatggggatttcagagtcctggcacttcccctcaacagggtcgggaccctgagttaggcctgaagtctgtgcagaagctactggatgctgtggacacttacatcccagtgcccgcccgggacctggagaagcctttcctgctgcctgtggaggcggtgtactccgtccctggtgaggactctgtctgttcccacgcactctctctagcagaagcctagctcggggtccctgatatcctgtcttattccctcccaggccgtggcaccgtggtgacaggtacactagagcgtggcattttaaag

SEQ ID NO: 18979 - DNA, 1031 bp, Homo sapiens
ccacatgagtccgacctcgggggcctgttgtgcattgtgcgtcttaggagacgtgggaagcacctgcagggttaagcaacggagaagcctcccggctccaggctttcaaaagctcacttggggccaggtgcagtggctcacgcgtgtaatctcagcactttgggacactgaagcgggcagaatgctggagcccaggagtttgagaccagcctgggcaacatgatgaaaccctgtcctacaaaaaaacacaaaaaagtagctgggcacagtggcacatgcctatgatccaggctacttcgagaggttgagatgagaggattgcttgagcccaggaggtcgatgctgcagtgagctgagatcgtgcgccactgcactccagcctgggtcacagagtgagaccccatctcaaaaaaaaaaaaaaaaaaaagaaagaaagaaagcttacttggggctgtgttggggtaggggacacaggagaagctgagaggctgggactgtggtgtacaggaaggtggtaccttggaccaggggatggccgcagagacaggaagaaatgggtggatgtggaatccactttttttttttttgagatggagtctcgctgtgtcacccaggctggagtgcagtggtgtggttctcggctcactgctagctccacctaccgggttcatgccatactcctgcctcagccttccgagtagctgggactacaggcgcctgccaccacacctggctaattttttgtgtttatagtagagacggggtttcaccatgttagccaggatggtctcgatctcctgacctcgtgatccgcccacctcggcctcccaaagtgctgggattacaggtgcgagccaccatgcccggctggaatccactttttttaagatggagtcctgtcctgtcacccaggctggagtgcagtggcctgatcttggctcactgcaacctctgtctttcaggttcaagcgattctcctgcctcagcctccccagtagctgggattacaggggcccgccaccacgtccaac

SEQ ID NO: 18980 - DNA, 1056 bp, Homo sapiens
tttttttttgagaccatctcactctgttgcccaggctggagtgcctcttcatttttatttctttattcagcaagtattgatcaaatgtgctttgtaccaggtactgagctctacgttgggatataatggtgatcaaggagattgtagattctggcagggaaaactgacatcaaacacggcgacccgacatagtgagaccctgtctctactagaagaattttaaaaatcacctaggtgtgggccgggcacggtggctaacgcctgtaatcccagcactttgagatgctgaggcgggtggatcacgaggtcaggagatcaagaccatcctggataacacggagaaaccccgtctctactaaaaatacaaaaaaattagctgggcatgggggcgggcatctgtagtcccaactactcgggaggctgcagcaggagaatggcatgaacccgggaggcggatcttgcattgagccaagatcacgccactgcactccagcctgggtgacagagtgagactccatctcaaaaaaaaaaaagaaaccaaggatatagaataaaacaagagtgtagatttgggcattgaggccttcaaattggattgttcccaatgtccagaagaaaaaaaaaatttagaagagacccaaatcagaaaacaaaagttgggctgaattcaacgcgaattattttctagctcaatattactgcttatgtcagctgaatttcagcctttcaataacagctagtcaagtatttttttagttggttcctattgatcatcatcttattttagtggaatccattatattgaagatgtcaagttcctcatttcccatacaaagaatgtgagattcatctttcttgaatcttagctgctaagtgtttaaggggacttttggcatcttttcaggaggactataattgggccctctaactaaaaagtctcctatgccccttacataaatgagattttttttttttgaccttgtacccaccaacattggtgggaggctcagaagggactgtgtttgtaactttgtagcactttctaaacagtgacct

SEQ ID NO: 18981 - DNA, 1056 bp, Homo sapiens; identical to SEQ ID NO: 18980

SEQ ID NO: 18982 - DNA, 1084 bp, Homo sapiens
ggaatgtcatcagttaaggctatttttacttcttgtgtggatcttcagttacttcaggccatctggatgtatacgtgcaagtcacaggggatgcaatggcttggcttgggctcagaggcctgacagtgtgatcttggctcactgcaaactctgcctcctgggttcaagcaatttttgtgcctcagcttcccgagtagctgggattacaggtgcccgccaccatgcccagctaatttttgtatttttagtagagacatagagtttcaccagattggccaggctggtctcgaactcctgtctcacgtgtctgtgtgaagagaccaccaaacatgctttgtgtgagcaacatggctgtttatttcacctgggtgcaggcgggctgagtccaaaaaaggagtcagcaaagggtggtgtgattatcactggttcttataggtttggggataggcggtggagttaagagcagtgttttgggggcaggaggtggatctcataaagtacattgtcaagggtgaggagaattacaaagaaacttcttaagggtgggggagatgataaagaaccttcttaagagtggggcagattacaaagtacattgatcagttagggtggggcagaaacaaatgacaatggtggaatgtcttcagttaaggctgttttcacttctgtggatcttcagttgcttcaggccatctggatgtatacgtgcaggtcactgggatatgatggcttagcttggactcagaggcctgacattcctgtcttcttatgttaataagaaaaataaaacaaaatagtggtaaagtgttggggtggcgaaaatttgtgggggtgatatggagagataatgggcgatgtttctcagggctgcttcgagcgggattaggggcggcctgggaacctacagtgggagagattcaactgaagaaagattttggggtaagggctgatactgtggggttgttagaaggagcatttgtcatatagaattattggtgatggcctgaatacggttttgtatgaattgagaaactaaacagaagacacacagtccgaataagagaaggagaaaaacaggtattaa

SEQ ID NO: 18983 - DNA, 1033 bp, Homo sapiens
cattttggaaatttcctattgacagttttcatttatagtactctttatttgtgataaaacttaatagatttgaaatagcttactgatctgtgtcagttttctgattggttttttaaaaattaaaatattaagtgctacggacagtgaattgatcaatcttaaatttatttgtatcatcagcactaatacagatagtgatttattttccatataattttagaagatttattttccatttatcacttccttgaattttttgtttttcaggttgttgctgtagcccatgctgtttatcaagcaatgctcagcttgaagaatattcctgttttggagactgcctataagttaatattgggagaaatgacttgtgccctaaacaacctcctgcacagtctgcaacttcctgaggcctgttctgaaataaaacatgaggcttttaagaatcatgtgttcaatgtagacaatgcaaaatttgtagttaaatttgacctcagtgccctgactacaactggaaatgccaaaaactcgagtctttaattgtaatgactttgttttatccacagttaagccttttctcattacatatttatgtatttcactgtcatgtcaacatgtctgcagaatcactgtatgtaacaaacagccatatttaagacatgcctggataaataaaattggtaggaatgttttcttgccattatatttaacgtttcttctttttccttgacaaatcttgataagtttttttatattagttttattttctagaaaacgtcttatgaatttctcccatttgctctagcatgcttatagaaaatgtcagtgtttcttacagctcaaatttgtatagttgttttaaaatgcggtctctttcttcccctggtacttttttctttctgtctactgaagttagttcttatacatggtcttatattttggctgtctttttttccctaggaacattcatacaggttgaatattccttatctgaaatacttgggactggaagtgtttttgattttggagtttggaa

SEQ ID NO: 18984 - DNA, 1067 bp, Homo sapiens
gggtacaacgtaatgtttatatatatgtgtgtaatgtagtatgattaaatcatactaattaacatactatcgccttactttgcttacttatattttgtggtgaggcatttgaaatttactcttaattgtttgaaatacattattattattgctattgttatctctgtcttctctttgcaaataaataatcattatttactatggccaccctgttgtgcaaagatttcaaaaactattctcctatgtgaaatttgttcccttttctttttcaaaaaaaaaaaaaaaaaaacacccgctgtcttagcattggtgaagttaaaaatagaaccagtgtgttttagattcctctctaagtgtctttatttttaagaatatatatattttttttttttgagacggcatcttgctctgttgcccagcctggagtgcagttggcaccatcttggctcactgcaatctccacctcccgggttcaggcgattctcctgcctcagcctcccatgtagctgggattacaggtgcatgccactatgcctggctaatttttgtatttttagtagagacgggtttcaccgtgttggccaggctggtctcaaactcctgacctcaggtgatacctccgcctcagcctcccaaagttctgggattacagatgtgagccaccgtgcccagctagaatgtgtgtattttaaaaagttgatccttcacagatatttatcttaagagaggctggtgtcatgaaaaaagctatggactaagaatgggaagacaaagatcttttgtattggcactaccagctgtgtccctctgagggggtaatttttgccttttgaagatgttgggagggttaaagttcaggaaattatttttaaaactgtttcagtgaatatttagaaaaatattagtggagatagaattaattgctctgcagtggagtggctctctttctacattttcttttttttcttttctttttttttttttttgagacggagtctcgctctgtcccccaggctggagtgcaatggtgcgatctcagctcactgcaacctccgccacctggatta

SEQ ID NO: 18985 - DNA, 1359 bp, Homo sapiens
ccatcgccttgctgaagtcgctcatcagcgtcatccacctgatcacggccgcccgcaacatggctgccctggacgcagcagaccgcgccaagaagaagtgacgctggagccccgggtcctggctgcccacctgccctgggagtcttgctgtgccacacagctccccaccccctgctaggaggtcccagtctcacgccttcctcatgtgttgttctacctgctgggatgggggtcagcctctctttggtgacgtcacgttctctgggatcctgaggacccgggcctcaaatcagggaggatacgcgggaggccccctccatccaggcggtgctcctggggtgccgggaccgggcagtgtcacaccctgcctgctcagtcctggggtccgagatgctagggacgcttgagtgagggaggtggtgtgagggccaggtttcctgaaaggcgggagtcagacctccgcccccagccagagcaagcttggggcaccatgcccaggagggaagaagccatccacagccttccctgtcaccggctcctctgtcctgcctaccctggtcctggcgggacttcactatttgacttggtttcctttcagatattcttggctcagggcctgggttgagggagcttagggaaggacgtccgtctgggtgcttttcctccagtttgctggctggcttctccgtctacccacagtgacctcacagagaggccctcctgccacccatgctcatgtggtgtccccaccgcccacttgtttgatgtcactgactgtctacatgtatttatattcttgatattttctaccctcactagaatgtaaactccatgaaggcacagacttttcttgttctcttctctatccctagagtaagaccaacttgaacctggcatatagtagctgcttaataaatactcgtctgtcaatgagttggtttctcagagtgtggtccttagaccacctgtggtatatttctatttctcttttttgcttttctttctttttttttttttttttttttagagacagagtcctactctgtcgtccaagctggagtgcagtggtgcaatcatagctcactgcagccccaaactcctgacctcaagtgatcctcccaccttagcctctcaaagtgctgggattacaggcatgagccacaaagcctggctggatatttctttaaaatgcaaattcaagccaggtgtggtggctcatgcctgtaatcccagcattttggaaggccaaggttgggtggatttagtacaggagttcgaggccagcctgaccaacatggtgaaaccccatctctacaaaaaataacaaaaatagccaaatgtggtggcacatgcctgtgg

SEQ ID NO: 18986 - DNA, 1796 bp, Homo sapiens
ggctttgcagcctatcttaatatctggcagggtcggcctttcctctttgctcttatttttaaaaactgacctaagtttgggaggatggcttgagcccaggaggtcaaggctgctgtaagctgtggtcatgccactgcactcagcctggatgacagcaagaccctgtctcaaaaaaaaaaaaaaaaaaaaaatggcctcagtaattgtagacttttattattctctgttaattttagagagtcttatgagtttctgcaaaaaacaaatctggaatttgtattagaattgcgcattgagttttcaaggttgggagaagtgagagggattttggcatgaagattctagaagacagaagagaaagaagcccatgggtttgcttcagatttctttctccaacgtcatcccacccaatgaagttcattcactcaacaaatatgttcattcattcaacaaatacagagcatcagctgtatactaggtagttattcctaggtgggaagagacagatcataaacaaatacaaaaagttagaaaaagtcagacactaactgctgtgtagaaaatgaactgataggcctggtgcagtggctcacgcctgtaatcccagcactttgggaggctgaggcgggctgatcacctgagttcgggagttcatgaccagcctgaccaacatggagaaacctcgtctctactaaaaatacaaaattagctgggtgtggtggcacatgcctgtaatcccagctactcaggaggctgaggcaggagaattgctttaacccgggaggtggaggttgcagtgagccgagatggcgccattgcactccagcctgggcaacaagcgaaactctgtctcaaaaaaagaaaaagaaaactgataacacaaaaggcaggatgtagaggaggctgttttagccaggggggctggggagggctggccctgaggaggcactgtgtgacctgcgatctgaatggcatgacggacacgccacgctgacagctgagcaaagaagcatcccgggcaggggcacagccagtggccggggcaggcacaagctggatgtgtgaagcagcaaggtgtccgtgggaccaaggcccagcaagcaaagggagagtggcagagaggctggcggagcttggagcctgcagagccctgcggaccactgaggagtctggagttgttcccaaccagcttttgaaggcttttaagtgggggagtacgtggcctttggttgtgctgttaaccaccttccgcttcttccccagcaaaaaagggagacgctgtccccgctgtgcctcatccccatggtgacatctccccgggaggagcagcagctcctggccagcacctccaaggtgaggcccccaagccctgcagggtggaggctcactgggggggcctctccctgcagcctcacccctctcgtccatcctctctcccccgccagcccgtggtgaagctcctgcacaaccgcagtaacaacaagtactcctacaccaggtgaccgccggggtgcggggcactgggcgggaccctgggatgcagcacagccctgcttctgcccaaggcgagggccacggccacacggggggcctacaagaacatctgtgcctgctcgcagattcggcttcgcctcttacccctgacgctctaggcaggtcctttctgcttctcagcttcagctcagtcatcagtaaatgggtttgggtgaggacaaagtgatagtggcgagcctatcccaagtgctctcattctaggaactggcagagtcctcccccttgaggtcagtactgttgtg

SEQ ID NO: 18987 - DNA, 1044 bp, Homo sapiens
tatccttatggtcttgtttaaaaatgtttttctgattttctgttacctgtgagctttgtagttttatttttattttttgaggcagagtcttgatctgtcacccaggttagagttcaatggtgtcatctcggctcactgcaacctccacctcccaggttcaaacaattttcatgtctcagcctcccgagtagctgcgattacaggcgtgcaccatgacacctggctgattttttattttttatttttctaaatggagtctcactctattgcccagactggagtgcagtggcatgatctcggctcactgcaacctctgcctcccgggttcaagcgattctcctgccctaacctcctgagtagctgggattacaggcgtgcaccaccatgcctggctaatttttgtattttagcagagatggggtttcacgacgttggccagactggtctcgaactcctgacctcgtgatccgcccgccttggtctcccaaagtgctgggattacaagcatgagccaccacacccgtctaatttttgtattttttgtagaaagggggttttgccatgttggtcaagctggtctcaaactcctgagctcaagcgatctgcccacttcggcctcccaaagtgctgggattacaggtgtgatccgctatacctgacctatagttttaaatatggatttttttcatatatgggtattttaatctaaatggaactcacttttgtaaatatgattgtgaagggatttagctcatttttgtcttccatagggtgaggtagttttcccagtgccaggtattaaacagtccagaggtagccagcacccaagacagccaccaggggttcttgcctcctggtttccaggctcttgttcagtcccctcccacaccaaatagggcagaccttttcagatcctcaccaaggagacccttgtgtatgaccaataggacattgcagaaatgacagcatgtgactttgaagctaggtcataaaagacattacagcttctgcctctctttgagatcactcactctatgtgaatgc

SEQ ID NO: 18988 - DNA, 1068 bp, Homo sapiens
gattgtcaccggaggtatagctgtgcccactgccgcgctcacctggccaaccacgacgacctcatctccaaggtaaccaaccaggccacagtggggctggaacctataggggctgcctggcagctccccaccggcagccctgaccccctcctctcttcccaccctctcaccctttagtccttccagggcagtcaggggcgtgcctacctcttcaactcagtgtgagtatctggcctcccttcttgctttccctgacctctgttgtgacctgtgacccctggcatcctgctgagactcccagagttccccggtgcaggcaggaaattgtgagcatcatttcttggatgctgaggacagacacagtgcttgagggggtgggccctgtgatggcaggaccctccctgggactaccccatgtccccacagggtgaacgtgggctgcgggccagccgaggagcgggtgctgctgaccggcctccatgctgtcgccgacatccactgcgagaactgcaagaccactttgggctggaaatatgtgagtcacccacctctgaccccaggctagcctttgacctgaccttccaacacctcctcctgacaagctgtcaccctatagcctttcagattgcataggccgagctcacacaagtcagcatccctgaccacattctctttatcttgcaccttgcaaggggtgtagaacttttctcttaacccatcccttctctcccaggcacttggatccccattagagagttaggatataatcagagtcaccatttatggaatgtttatgtgccttgcactgttgtgtgcctggcgtctattatctcattcaatcattgcagtgatcctctaggtagaagctattattatctctacagaagaagacagggaggcccagagatgttaggtaacttgcccaagatcacccaactggtaagtaacagaatagggaccagaatctgagttggttggttggtttttttttttcactccaaacccttggtcaccagcttatattgtcatttagagtatcagaaaaattgccccagactctgcaacaac

SEQ ID NO: 18989 - DNA, 1044 bp, Homo sapiens
ccccatgccaggcctgagccttgctgtctctaccaccccagccagtggccgaggagcccttcaccttcgccatggagctggatgacctacctaaggagcggctgaaggagctcatcttccaggagacagcacgcttccagcccggagtgctggaggccccctagcccagacagacatctctgcaccctggggcctggtgagtgtctccatggcccacacatggacaccctgatactaaatatctatatctgtatatctatatctatatctatctgtacatgcctccatacagcagcaagcttaccccacacccatggtcaatgtgtctggtgacaacagaagtgcccagggggctgggtgtggtggctcatgcctggaatcccagcactttgggagactgagactgagaggagtggatcacctgagggtcaggagtttgagaccagcctggcctgcatggtgaaatcccatctatactaaaaatacaaaaattagccgggcacagtgggtcactctggtaatcccagcactttgggaggctgaggcaagtggatcacctgaggtcaggagtccgagaccagcctgcctggccaacgtggtgaaaccctgtctctactaaaaatacaaaaattagccgggcacgtaggcatgcgcttctagtcccagctactcaggaggctgtggtgggaggactgcttgaacctgggaggcggaggttgcaccactgtactccagcctgggcaacagtgagactctctcaaaaaaaaaaaaaaaagggctgggcacagtggctcatgcctgtaatcccagcactttgggaggccgaggtgggtggatcacaaggtcaagagttgagaccagcctggccaacatggtgaaacccggtctctactgtaaagaatacaaaaatgagctgggtgtggtggcacatgcctataatcccagctactcaggaggctgaggcaggagaattgcttgaacccaggaggcagaggttgcagtgagccgagatcgcaccactgcactccagcctggactacagag

SEQ ID NO: 18990 - DNA, 1031 bp, Homo sapiens
tcgagaagacattgggaccctgttgggggtgagcatggaaccctcttactctcgcttcaccctctcaagctccttagatgctgggcagaagtgggatgagtggcccaagaccgagatccctaaggttctgagagccagtgtcttccctaatctggctttcctctatccttgccgtcgttcccacagcccttcagtgaagtgcaaactcagtggccaagtgtgggccaagtgtgcattgtactggcacagagaggggcagtgactcactggagatcacaggaatcaaagggctggcccagacccagtgggctcctttcccagacctttcttggcacaaagcctttgctgcctggccttggaggccctgcggcctacattctctggaccccactatgtgcctggcacagggctagtgccttgaggaaactgaggtagctgggttggtccccttccaggaattcagagtctggtggcaggggcatgggaaatagacagatgtaattctatagcctgggcctggcaccctccacctccacgccccaccagcattgccttacgcctcccttgccccacgttagatggtttcttccggttttgcactctggctgccccttggagtctcctggggagctgtaatatctctttggagattcagattgagctggtctaggttgtggcccaggcattgggcattttggaagcccccaggtgttttcagcttgcagccaggccgagagagagcccctgagtcagatccccatggtttaggcacacctagcgggaggggtggctcctggaccccaccgtggttggagagctgagcatgtgtgtggctttagtggggtctgttagttatgggggtctgggcactggagctgcaggacacttgggatcccaggtcagaaagggccagatgagcaactaggaaagacttgggggccagggcggagtggggtcacctgacactcttgtgaggccccttctagtgcctgctcacaccggaatttcattcactccaagaagccatcagg

SEQ ID NO: 18991 - DNA, 1494 bp, Homo sapiens
ccctttcagtgtgccttgggatgcccaagtggccagacatcctgatgtttggcagctcacagactatccagtttctcgtttgagcttggggaggtggcttgcctcagttccccctgcaatgcaggttttacactattgctactgaccccttccgtgctcccccgaccctgcagagagagctccattcccgtggacgtggctcggcagcgggagctcaaatggctggacatgttcagtaactgggataagtggctgtcacggcgattccagaaggtttgagggctgaatggtgggcagggcaatgcacaagttgggaggggtagcatgtgctccagggaagcccaggaagccgataatatctgccctctggaccacactggggatagatgggccctggcgggggaatggctttaaaaatagaagtccaggccaggtccagtggaatcaagcctatgggatgtcggaggagtatccagggagtttgtggactgctggggaaaggttggaggctgtgccagcccttgaagctgtccccctcctgccactttgccttaggtgaagctgcgctgccggaaggggatcccctcctctctcagagccaaagcctggcagtacctgtctaatagcaaggaacttctggagcagaacccaggaaagtttgaggtgcgtgcagctccaaggtgtggggacatgtggccctgtctgtgcaaggggtatcagttcccccagatgctgaggtaatccccactgtcccactgcaggagctggaacgggctcctggggaccccaagtggctggatgtgattgagaaggacctgcaccgccagttccctttccacgagatgtttgctgctcgaggggggcatgggtaaggtggccggaccatgggggtcagtcagcaaacattggctggaggatccaccttttagctaggtggatacaagactgagtcgaaagtggtttttgcccttcaggacttgtagaagagctatctgtaatggactaagtgtcaagccatgtcaaaggaactgtcctgggaaggagacttgactcaggttgtgtgtgggggcacgtcatgggctccttgaagagcttgcatttgggctgggttttggaggggtgggagctacagcagtggggcagggttttcctgcctgggggttatggaaaagatcaccagggacccttaaatgctatgccaaagcatttggaattttgttctatagaccaagcttcctccagatgtcagtatatactcttctctagtagtatgcaagatgatcatcttagggagttctctgatggacttttttttgttttgttttttgagatggagtctccctttgttgcccaggctggagtgcagtggtgtgatctcagcccactgcaacctctgcctcccaggtacaagcaattctcatgcctcagcctcctgagtagctgggattataggtgcacaccatcgtgcccagctcatttttgtgtttttagcag

SEQ ID NO: 18992 - DNA, 1394 bp, Homo sapiens
aacaaaggaaactaacatttaacgagccccttctatttaacagatgtttatatgcagtttctcaatagtcttctcataactttgtgatgtaggtggtggtggtgttttttttgttttgttttgttttgttttgtttttgagacggagttttgctcttgttgcccaggctggagtgcaatggtgcgatcttggctcactgcaacctccgcctcccaggttcaagcaattctcctgcctcagcctcccgagtatcggattgaagacatgtgccaccacacccggctgagtttgcatttttagtagagacagggtttcaccatgttggccaggctggtcttgaactctcgacctcaggtgatccgcttctcacttctgacacctccgcctcccaaagtgctgggattacaggcatgagccaccatgcccggcccggtggtgtctttttataattgaggaagggactcaggtcatcccttgacaaagctccctattgtctcagagacagaactgaaatttgaacttaggtaggtttgattcttaagacccaagctttcttccgttctactcacctcctagtactggctcctacaagtaagtgtttgaagaatgatggggcaccatgagtatgaacctctgacagaacagtgagtaaatagggcagggagtcctttatttgcctggggtgatttcagggaggaggaggtagagtaaattgcaggtgacccaagggatcttaaacatttgataggacaaaactcagatggttgcgtctaaagagacagaagtacatttgttctgtattttattttattattattatttttttttttgatggagtctcgctctgtcatctgggctggagtgcagtggcacaatcttgactcactgcaccctccgcctcccgggttcaagcgattctcatgcctcagcttcgcgaatagctgggatttcaagcacgtgccaccatgcctggctaatttttgtatttatagtagagacagggttttaccatgttgtccaggctggtctcaaactcctgacctcaagtcatccgcctgcctcggcctcccaaagtgctgggattacaggtgggagccaccatgcccggcctattttattattttatttttattttttgtagagacagaatctcgttatgttgcccaggctggccttgaactcctggcctcaagtgatcctcttgcctctgcttcccaaagtgctgggattacaggcatgagctaccatgcctggccctctagggtattttattttatggatagtaaggtattacttaatgggcacttcgctgtgtgttatttcgtataaaccccttcgggtagatattgttactttctccaccttacagatgaggaaattgggcttagcaaaat

SEQ ID NO: 18993 - DNA, 1154 bp, Homo sapiens
ccaccaaggtctctctctccttcagcttttctggggcgggttgactcgtgcgccaccttatcacaggggcatattggggtcagaagaggaaccttggcagtagaagatacctttgtaccagttttttttttttttaatgttttgtttttgagatggagtctctctctgatgcccaggctggagtgcagtggcacgatcttggctcactgcaacctctgcctcctgggttcaagtgattctcctgtctcggcctcccgagtagctgggattacaggtgtgcgccaccacacctgaccagtttttgtatttttaatagagatgaggtttcaccatgttggccaggctggtcttgaactcctgaccccaagtgatctgcctgccttgacctcccaaagtgctgggattacaggcatgagccactgcacctggctattttttgtatttttagtagagatggggtttcaccatgttggtcaggctggtctccatttcctgacctcacatgatccgcccgcctcagccttccaaagtgctggcattacaggcgtaagccactgcacccggcttttgtaccaggttttaattcctagtgtacaacctagttccctcccctaaccctcagcacagcctccgggaggcccagcttgcaacaccagttctcagcccagactgacagccagatcttggccctcagcttgccacttaaaggtgctatgattattatctagagatctctgagtgctttgaagtttgtaaagcttatttagggcctagaaaccagacctgactcctctgcttcctgccctcatgacccaactttccagcatctcatcaattttttttagtgtcatgaaacccttcagcctcagccccaccccattctcagctcctcatttcttttttcttttttcttttttttttttttttttgagacggagtttcgctattgttgcccaggctggagtgcaatggcacaatctcggctcactgcatcctccgcctcccgggttcaagcaattctcctgcctcagcctcccgagtaactgggattacaggcatgcgccaccacgcctggctattttttgtatttttagtagagatggggtttcaccatgttggtcaggctggtctccatttcctgaactcaggtgatc

SEQ ID NO: 18994 - DNA, 1046 bp, Homo sapiens
gcctagaaaggctcctgtgaaggagagtcctgaagtgctggtggaacgcaaccctgacccagctattagcgtggccccggcacgggcacagccacccaaaaatgctgcctgggacccgaccacaggagcacagcccccggcacccatacccagcatggatgctcaggccggccagcggcgccacgtgtgcacggactgcggccgccgcttcacctacccctcactgctggtcagccacaggcgcatgcactcgggggagcggcctttcccctgccccgagtgtggcatgcgcttcaagaggaagttcgcagtggaagcgcaccagtggatccaccgctcctgctccggggggcggcggggccggaggcctgggatccgggctgtgcctcgggcccccgtccgaggtgaccgggacccgcctgtgctcttccggcactacccagacatcttcgaggagtgcggctgagcggcaccgcaggctggagttgagcctgaccttggcacgaaggactgacggatccctgaggtgggccactgagtcggggactccggaactgaaattcatgccctgggctttcctcaaggatccctcaagtttccaacttgtaaaaagaaaagtgcctgtaaagattcgaatagattagacttgccacccatctccccagtcttttgtttaacaaaaaaaaaaaaaaaaaaaaaaaaaaagaagagagtgagaccctggactcatttcaaagtgttatctgaagatcaggtgcaacagagacctttatatcatctcaggaactagccactccttatctatttcagatgcagatgctgagggggaccagggcctggggaggggacctacatggagggcgtggtcaaaccctggctaattgtcatcagcaggggacccagacactggagtggatgggagtagaatagatgcaggtggcacaaatccagcctctgttgggagaccaaggagggaggatcgtttgagtccaggagttcagaccagcctgagcaacaggctatctagcgatatctagatatctagg

SEQ ID NO: 18995 - DNA, 1026 bp, Homo sapiens
agctttccaatccactgcttccttatctagaaattaaggatacagcacacattttacaggactgttctgagaaataatatatgcaaatatatgcatagtgcacaataacacctgctttagaatgtttaatagctcttgcttcagaatgtttaatagctgaaatgatctatttcttggtttattcccctagaatataagcttcgtaagggcaggaccttgtctgtcttgttcagtgccgaaaaccatacagtgggcatatagtgggtattcagtatttgttacatgagttaaggaaacaagccagtgctgaaacccagatctgtctgcttctgaagctcatggtcataaacagctgttgagtgaagtgaatgaatggataccagagagggcctcactgctgcatcttgctttccctaccagcaacccccttgggcaacgtggaggagtgctaccgctacttcaccagtgtccttttttgccatggagtcagggtcagttcccctggaacattctggaaactttacccatccccagacaaggtctcacccagtctctctcacattcatcacccttatcttcttgtgaagaccccagtgggctctccttgctcctgttgctgggcttttggaggcaaagccagggctccggaaggtagtcagggttctaattccgagtcaccaccacagcggcctcctttcagcatcgacctcttcaaagaggaacagctgctggccttggaagactacgtggtcaacacttacttccgccacttcaagctctataaatacgtcttcacaccccaggtagggggtggtggaccatgaggagccaccctcaaccgcccctcccctcagcacaggtgcactcctttcagcctccctctgccttgcttcccaggtgcggctggatctgtctttgacttacatggggctacagccacccaaactgtggccagagagtgagacgggtaagggagagtgccagggcagggctgggctgggccaggcctggggccacagtctcttc

SEQ ID NO: 18996 - DNA, 1043 bp, Homo sapiens
gtttacagtccaagctcttaacctcaccagcctgcctcaaccaccaggggccagactgctgatcttgaacaaggaagaagaaaatccaaatggtttcagtgcctaaatgtcctcctttcttgcctttggtaacaactttttctgtctctgaatatcattgctacttctctggacactgcttctctgcttccagggctgtttttcttgcttagccctaagtcagcctcgtttgggccctgtccttagactctttcttctgcacgggtctgtgaaagatctcctttatgtgcgcagctccagctgttggtcctttctcagtagtctaacccagactgcccctctgagcgccagcctgagcagccagctgcctccttgacatcccctctctgggtctcattcgtgatgtctcccctaacacggcttgcttccaaagtgccacctcctccctgccatggcctcttagttccaaattgtggcatagtggtggggaatttagaaaggcttcaaagacgaagcctcttgaatgagttctcagggctagagatagaccacagagtgtgttctctgagcgctaccaacagtctgggggtgaatttggagagtggaattcaccatttaatcagtcagctggctatggaatgcccagctgcatgccaggtccagccgctggggtggaaagatgcattcatgagtagaacaaacaggattcctggcttcagggagcatccaggctgttggagaagacagacgtcatgcaatcccccaaaatacactcttataaactgtgataagtgtcatgaaggaaaagttcttggtgccatgaaagcatattgtagatctaaattagattaagatggtcaaagaaggtcattgtgagaaagtgacaattactgtctccctgagatctgaattggggaggagaattccatagacaagcaagagtaggcacaaaagacccaagggtgggaaagagcttggtatggtggggaaactgaaaggcaatccttatagtgggagctgagcatgcaggggcttgggctgag

SEQ ID NO: 18997 - DNA, 1032 bp, Homo sapiens
atgccaggtttcaacgctttgaagaacaggataacagtcttccttgggggacaatgttgtaggctacaaattgaaaccctctgtgatctggcacagtgagaaccacagggccttgaagcacatcagtaagcacacatggccagtgtactacaggagcaataagaagtcatggatgacctagctcctcttccaagatgcaatcctgaattgttttgccagagaaatgcagaaatactgtttggagaataatatatttttcaagattttgcttattgttgataaggctcccatacatcctccttttactggtgatattcatcccaatatctaagtggtgttttcccctccaaacaccacctctttgtttcaaccaatggatcatggaggtatagcagcttttaaggcctattacctgaggagacctttgcccaggtgattgctgcagctgaggaagacactgagaagccactgagacaattctggaaggattgcaacacatctgtgacttcatcaagaaccctgcttagacttggggtgatgtcaccatgcggtatgaatgccatctggaggaagacactcaaaaggttggtccatgacttaaaagtatttgtcaaggatgaggaggtttcaaaaatcaataaagctgtggttgaggtggcaaataattttaacctgggtgtggatgaggatgacatggtagagcgcctagaggtaattcttgaggaattgactaataaggagctgttggaactggaacaggaatacatagctgaagaagaggcaagagaaaaaagaaactgcaggagaagaaaaacccagaagaaaattcacagtgaagggtttagcagaagctgctgcagacctcaacaaactccttaaaacgttgaaaacacggacccccatactgaacggttttcattaatagagatatgttcatggtgcattatctgtttacaagcaaatgtatgattaaaataaaagaaagaaagaagccaagcaaacctccatggacattttttgaaagagtgatag

SEQ ID NO: 18998 - DNA, 1043 bp, Homo sapiens
aggataacttgaaactaggagttcaagaccagccaaggcaacatagtgaggccccatctttacaaaaatacaaaaattagctggacgtgtagtcccagctacttaggaggctgaggggcaaggattgcttgaggctgagagattgagcctgcagtgagctatgacgatgccactcgctgcattcaagtctagatgacagagcaagaccctgctcctggacatactactaagtgctttcagcatttcatgtggtcctcataaaaatcttgagggccgggcatggtggctcacgcctgtaatctcagcactttgggaggccaaggcaggtgggtcacctggggtcaggagttcgagaccagcctgaccaatatggtgaaaccccatctctactaaaaatagaaaaattagccaggtgtagtggtgtgcacctgtagtcccagctcttcaggaggctgagaaaagagaattgtttgaacctggaaggcggaggttgcagtgagccaagatcacagcactgcactgctgcctgggcgacagcgagactctatctcaaaaaaaaaaaaacccacacaaccttatgaggtagaattccattttagagacgaggaaactgggaccctcaattatgcagaatggatgagtggtaccgccaaaattcaaaccccagactcccgaactcatgctcagaactattacaacatgcagaaacaacaaatccagtcatgtgtgcatttaatttggcatagcaacaacaacacatttctcaggcaaaatggatttccagcttctcttgaaaagtcctgaaatctagtccaggaccgtggattgtatttaaaaaaataaaaatagaagaagaaaaggccgggcatggtggctcatgcctgtaatcccaacactttgggaggctaaggcagctggatcacttgaggccaggagttcaagaccagcctggcaaacatggtgaaaccccgtctctattaaaaatacaaaaattagctgggcgtggtggcgtgcacctgtagtcccagctactcaggatcctg

SEQ ID NO: 18999 - DNA, 1237 bp, Homo sapiens
atctgccataatcctcttcccttcatcccccagggaggatgagctggtgttaagactaatacagccattaatcctgtttcctcccaaccatgatccccaggagcagctgggtggagggcgtctgggttctggaccagaaagtagggatctcagctagagctggtatcccaggaggccatgttagatcagatacatcagttatgactcagaaagaggcttccagctgctagcaatggctcaggctgccttgagtgattctccattaccagagttgtgggaacaggccaacaagattccagagcagagagtggacagattccagtctggggcggaggcccgtacagctgtgcaaggccagaattctgtgtgaacagttgctgtctctgaggactaaccatccagaggaggaaagaaaacacaaatgctggggacctgtcacttccagacagtgccagctaccagatttagcccattggctcagcccttttctggtcccaggtctgtcttttctgggcgcttggagaccttcaggccaggcccacgtctgggtacactctttatcctggcatagttcttggacactgagctgaagaaggaagatggtgagacagatggaacctgggcctctgggaatgccacagtgtttggaaaagcccgttgggggcggggggggacgtgtaggtgaatcttttgtgaccctcagcctcctttcttagtggctctgcggacacttggtccaactcctttcttcaatgagcagatcagggaggaaacgaacgcaggatgtcagagccaggaatgctgggcaggaaggatgtgtgggttccgaggtgagaaatgcagatgagatagggttctctctgaggctttcaggagtggcgaaggtatgtggctttggtctaactttgcttctcttgcagagaaaccccgttcaccaaggccatggaagtggaggctgcagaggcccggtccccagcccccggctacaagcgctcgggccgccgctacaagtgcgtgtcctgtaccaagacatttccaaacgcgcccagggcagcgcgccacgctgccacacatgggccggcagactgctctgaagaggtggccgaggtgaagccaaagccagagacagaagctaaggcagaggaagccagtggggagaaggtgtcaggctccgcggccaagcctaggccctatgcgtgtccgctatgccccaaggcctacaagacggcacccgagc

SEQ ID NO: 19000 - DNA, 1626 bp, Homo sapiens
atgacctgagctcagggttctggtcactgtggggctggcggaggcagcagacaagcgtaagaggccccagaccactgagcaagaccccagcaacttaaggcaaattaaacacctggactgaagtcccagctgcttaggttacccattgtgggaccatgggcaagtcacttaactcttggaacctcgatttattcctctgtaaagtagggacaagaatccctatctcagaaaggtataagacattaaattaaataaaccagcacacccagcaatgtgtctggctctaagaagacgctttgataattgaggacagtaattatttttgactcattcattcctcacccaactctgtcaggtaagtactgtcattatctccatttttcagattagaaaactgaggttctaagacatgcagtacattacacacggtcacatcagctgggaagtgatggaggcaaaatctgaagccagacagtttggcttcagggactgggcacttaacaaaatactgaaccatttctctggaccttggttcccttatctgtgaaaatggaataatagaactttcctcatggggttgccatgaagggtaactgagctaatacacataaggagtttaggatactgcctggtatttggcgagtgctcagtaaatgtgaactatcttttttatcatttatttatttatttatttttgagatggggtctcactctgttgccaggctggagtgcagtggcaccatcttggcttactgcaacctcagtctccttaggctcaagcatttctcctacctcagccttctggagtagctgggagtacaggcatgctccaccatgcctggctaatttttgtattttttgtagaaatgggattttgctatatcgcccaggctggtcttgaactcctgggctcaagggatccacccgccttgtcttgaactcctgggctcaagcgatccacccgccttggtctcccaaagtgctagtgtgagccactgaacctggcccaagctatcatttttattaaggaggaacattatcaggcagactctccagaaaccgtctggaagaggtagtgagtacctcatccagaaatagggagggatcccttggaaactgtaggaagaattcaagtcatcagaaaggttagaattcagtccctttaacttatcttcaagccccaggattgattattgattgattgattgattgagacagtgtcttgccctgtctcccaggctggagtgcagtggtacagccttgaactcctgggctcaagcagtcctcccaccccagcctctcaagtaggcagtactacaggcacatgccaccacatctgctaatttttatttttagtagagatggggtctcaccaggttgcccaggctggagcgcagtggtacgatcatagttccctgcagcctcgaacccctgggttcacaggatcctcccgcctcagcctcccacgtagctgggacttaaggcgcatgccaccacacctggctaagccctaggatttagtgggaaaagtgaaataaccaagtgagaataagatggagttttgtgggattggggccaaacccaaaggggagatgcttgaggatcctcctggtggaagtggggctc

SEQ ID NO: 19001 - DNA, 1640 bp, Homo sapiens
ccatgagaaacatgggcgtcagcttcaggtacccacacaggatgcagcccgccttgatgtgggtcaggctcttcccggccaggcagcgctgcacgatgacctacgggaggggcgttcagctgcccgcttgcgggcctcccctcggccccgccccgcgccccgttccgctctgtgccccgcctctggctcgtgagtgccccaagttcagctgcacgcttggagtagatggagccttctgtctggtttagcaccaacccgaggggttcccgcccctcagactgcgccttagaccgttgtggggaaggcggggagggactcaggctccgcccgtctcggctccgccccggcctcactgcaggcgcagccctatacccgcacctggtcgctgcaccagtaccagcccgagacgattgtgagtccgaggagcagcgcgggccacggcagatccccggtcacggggtgccggagcaggtggtaggagtcgggccggggtcgatagcagaagctggagatgtttcccacggctggatcctcggacaccgtcagcgaagtcgctgctcccaggtatttgtcgaagagacccgaatacccgcccacctcgtggaaggctgccgggcaaggccgtcaggggaccctccttaggaccctcagaccggagacgcgcaacggccccgcgcgcaggccgagagctccgcgaccatgccctccgcgcccctccctggtaggcgagcccctaccgtaacccatgaggatgcaggcgccccccagaatgacgaaggtctgtaccgtgtccgtgtacatcagcgcggccagccctcctgcaacaggccggggtcaggggacagcccagctgtttatgttacaggctggccttagcaataaggcgtctttgtgggaatttgaaagagttccccttcctggagaataaatttcaaaacgatagcctgttctcggggctcatgcacgcaggcaccaacaagcagggcttggcgggcagagtgtggctgagttttagggccaggcgcctacttgcaggacccccactagcagccccctctaggccccagttttgtttgtttttgtttttgtttttgagatggagtcttgccctgtcgcccaggctggagtgcaatggtggatctcagctcactgcaacttccgcctgcccggttcaagcaattctcctgcctcagcctcccgagtagctgggattacaggggcgggccaccacgtccagctaattttttgtatctttagtagagacggggtttcaccatgttggccaggctggtctcaaactcctgaccgcgtgatccgcccgccttggcctcccaaagtgctgggattacaggcgtgagccgctcccagccggccccagttttttctgcgtcatcgtaggagaggatgattgtctaaggtcctatactcagttccgttccttctggaggtgggtccctcaagcgggccttggcaccaagccctgcctactctggtccgcatctgacctcaggccccaccccaggtccctatgaaccatactgggttttgccagagatcttggagactcgtcaggtgtgctctcccaggtgttcaaggcaggcaagagctgctaaatcttccttttctcaaagtcctcactc

SEQ ID NO: 19002 - DNA, 1433 bp, Homo sapiens
gcaggctcctcacccccacttcctgtgaggctgtggcttatggtgtccaacgcagttggtcttaggcatagaagccccagaggaacacggccactgccatcatgagcagggcattgaggttgaccacacgggcccagctcgggtcctcgctgatgtcctccagccgcctggctgctgccgctgcctcctcctgggtaaggggcggaggactgcccaccccacctctgctcattccacaaaaccagagcaggcactggcggaagaggcttggtgccggggcctggggctctgagggaaattgaggccctgcagttagtttgcgggaactcagctcctccagccccacctcccagcatggtgccctaccattcatctccatggcactctctgggcacccattctgtacagggagtgaggagccttgctgctcatcagcatccaggtcctcccgttcctccttgctatgccggagactgaagaccaggcggtggagctggggagggtgggagcacgaacgaggtgggagttctgtccccccatgcctggccctaaagtctcttgcacaccagctcgtcactgcctgccctacccacctctgtccagtctacacacccagcccaggcttaactcatgccaactccaccctacatggctgccctgtgccctcgggataaaccccaagcccctgagcttgtgtttaaagccgttggccttgctcccccagctttgtcagctcaggtctgtctacacccagatggtagcgcttgtgacactggcctggcagtcctgctcacagtgttctgtgcctgtgtgctcccaccctttcctcctgctgctgcagaaacccggccatccttccacacccagatctcttgtcctgtcctcaccccaccctgccaccatcagccctgcctggagccacctgccctttggcaacaaaaccaaacctttttgtgggcgttcaagatggtattgtgcccaccagtcagatcctgtgttttgagtcccaaaggccatgccaaggattggctttgggaggctttaatcaccaacccatcaacatcaagcctcccccaggccggttcaaataaatgtatttaaataaaaattcttgctcggcaattgcaactgcagctggacccccagcccattcccaaccctcagtcgagaaattcaggtcctcccagctgggcactccaggaagcagagggtaggtgctgtgtcccacagtgcttgcctggggcacctggccactcacgtgctttctggggatgggcgcggtgcacagggagaccgtgagggtgaggaggccagagcagaagaacagcacaatggcgaagtagaggtagtgcacgccgcagaggaaagctgggcacgccgagggctgcacacagctgcccgagccgaaggagaactcgggaatcaggcgtgcc

SEQ ID NO: 19003 - DNA, 1050 bp, Homo sapiens
cctccccgagagcgagccccggccgcggcgaccaccagccgcactaaccgccgaccaaccgccaccgaggcgcatgagcgagagcagaggaggaggaggcatgagcgaggcgggcgaggccaccatcatcaccaccaccctccagcaggctcctgcggtggcggccgccgcggctccccaggaccccgcgaccaagagccgggtgggcagcggtgcaccccaagccgcggccccggcgcccgccgccctcgtcgcaggaaacccgggtggggacggggcccccgcagccacgggcaccgcggccgccgcctctttagccaccgccgccgacagcgaagacgcggagaaaaaagttctcgccaccaaagtccttggcactgtcaaatggttcaacgtcagaaatggatatggatttataaatcgaaatgacaccaaagaagatctatttatacatcagactgccatcaagaagaataacccacagaaatatctgcgcagtgtaggagatggagaaactgtagagtttgatgtggtttaaggagagaagggtgcagaagcagccagtgtgactggccggggtggagttcctgtggagggcagtcgttacgcgctgattggcgccgttacagacgtggctactatggaaggcgccatggccctccccgggattacgctgggaggaggaggaagaagggagcggcagcagtgaaggatttgacccccctaccactgataggcagttctctggggcccggaatcggctgcgccgcccccagtatcgcccccagtacaggcagcagcggttcccgccttaccacgtgggacagacgtttgaccgtcgctcaccggtcttaccccatcccaacagaatacaggctgttgagattggagagctgaaggatggagtcccagaaggagcacaacttcagggaccatttcatcgaaatccaacttaccgcccaaggtaccatagcaggggacctcctcgcccacgacctgccccagcagttggagaggctgaagataaagaaaatcagcaagcctccagtg

SEQ ID NO: 19004 - DNA, 1083 bp, Homo sapiens
gcctggtgatgggtccctgaggcgtggcaaagcaggaccccttcgtggcagtgcgtcggtgtcgcgactccaccctgacgtctccaggagctcgagagggatggtctccggacgccaggagtcgcggagggccgaccaggatgaagaaacttcaggcggagtcccaggagagcagcgcgggatcccagcctcagcctgcccagacggtgtgtgggcaagtctccccgcaactcgcgccccctctgatctacaggacaggcctgcagtatgcccgtgggctgctctcttacccgattgtcgttctcgcggagagcagaacccggcagcctcaagggctacctggggttgggtgtttctgtgccgctgctgtatgtctgtgtgtgtgtatgtctttctttcactccttcctctctctctcctctctccctctgtggctgtgtgtgcccatgtgcgtgtgtgttttgggatgaatgtgccctgtgcgctggagggctgtttcttgcatgtcggtctgtatttggtgagactctttctgtgtctctgcctgggacgtctgaccagttgttggtctttttcccggcggttccagtttgggtttgtgaaggccttggcaatgcgggtagctgcgatggacccgcaggggttgaaatctactccccatcctgagaggcctcttttctaggatcaagacggtctcaccacacccaaggatagtatttaaaaaagcatcagcggagctcattgttcttctgcaggagaggtgcagaccgacctccaagaagatggttctaactcctcccgccctctcttcccattgagaaatggagccccaccgcgacacaggcttggagaagaagtcgagaacgggatgtggcaaggatctctgtcactccaacgctggcctttctggccaagtcacccgtttggcactccttcccggaagcccatggcggtggcattgtgctgtatcccgcctgggctctgacctctacactgtcctccctcttgctctgtctgccatgtttctgacgggcctggatgcttcttggtctggctcagtgtcttccacagagaacacttttg

SEQ ID NO: 19005 - DNA, 1031 bp, Homo sapiens
gttttggtgataagaactctgcctagccatagatcctgattttctcctattttttttctaaaatttttatagcgttatattttacataaggttgtgatccattttctagttaattttggtataaggtgtgaggtttaggtcatggttcatttcttttcctattctgtttcactaatctgtgtagccatccctccaccaatacctgtagctatacattaagtcttaaaatcaggtagagtgatttctcctactttgtttttttcaaaattgtttcagctaccctggttcctttgcttttcaatacaaatgttaaaataattttgtctatatccacgaaagatcatgctgagattttgataggaactttaataaacccatatgtcaatttgggaaggattaacgccttccaatctttgaaaacaatgtatttctccatttatttaaaatctctgatttctttttttttttgagatagggactagggacttgttctgtcactcaggctggaatgcggtggcatgaacacggcttatggcatagcttcagtctcctgggctcaagccatcttcccaactctgcctctcaagtagctgggactaaaggtgcatggcacaacactgagctaacattttttactttattttttgtagagatggggtcttgccatgttgcctaggctgttctccaactcctaggctcaagcagtcctcctgcttcagtctcccgaagtgctgggattataaacatgagcccccacacccagccaaatctttgttttctttcatcagcattgtgtactcttcagcatacaaatgttgtatgtgttttgttagatttgtacctaattatttcacttttttgagtgattatggtattaatttcagtgtccatacattcattgctagtatatagaaatataatttatttttatatgtttatgctatatcctatgactttgttgaaccacacttataggaatgtttttgtagattccttgggattttctatatagagagtaatgttatctgcaa

SEQ ID NO: 19006 - DNA, 1101 bp, Homo sapiens
aggtaaacttggtaaagcagaggcagactttgatgggattgactccaattttgaaaaaccttctactgtgtgtaaagtgctatcaaacaagatcacatgctacagagaaatcctttcatgaaaggaagagtcaatcaatgtggcaaacttcattgttgtcttatttttaaaaattgccatagccaccttaaccttcagcaaacaccattctgatcagtaagcagccatcaacattgaggtaagaccctccaccagcaaaaagattatgtcttgctgaaggctcagaggattgttagcatgttttagcaaaacaaagtatcttaaattaagatgtatatattgttaaaaaacataatgcctttgtacacttaatagatgcattataaacatagtactcattagtataaactcatatgctcattagtataaacacaacttttatttttttttgtttttagagacagtctcactgtcatctaggctagagtgcaatagcatgatcatagctctctgtagcctcaaactcctgggctcaagcaattctgcctttgccccccaagtagctgggactacaggcgtgtgccatcacgtcttgctaatttttgtattttttagagatggggtttcacgatgttgcccaggctggtctcagactcctggccttaagtgatccacccaccccagactcccataaacatttgtatgcactgggaaaccaaaaaaattgtgtgactcactttaattgtgatatttcctttattgtggtggtttggaactcaacctgcaatatctctggagtatgagtgtgtatggaagactgattatttatgaagctgggcgtggtggctcacgcctgcaatcccagcactttgggcagccgaggagggtggatcacctgaggtcaggagtttgagaccagcctggcgaacatggtggaaccctgtctctactaaaaatacaaaaactagccaggtgtggtgatacacgcctatgatgccatctactctggaggctgaagcaggagaattccttgaacctgggaagcagaggttgcagtgagccaagatcgcaccactgcactccagcccaggcaacagagca

SEQ ID NO: 19007 - DNA, 1027 bp, Homo sapiens
cccacttggtgaaaccccgcccctactaaaaatacaaaattagctgggtgtggtggtgggcacctgtaatcccagctactcgggaggctgaggcaggagaatcacttgaatccaggagacggaggttgcagtgagccaagattgtgccactgcactccagcctgggcaacaagagcaaaactctgtctcaaaaagaaaaaacaaataccaaatacattaacattgcaaaggcaatttaacctcaaatgatgttttgagaagacatcctgcttgatttacttgtttgccctataactgaaacagagaaggaaaatgacaggaaaactgtgcacacaacttacagtattttgttctattaaaatggatatcctggaacaagttaattttgaatttaaggtaacttaaaatgttttttcttgttttaggatgacaaatgggaaaagaaatgccagaagattttttcatttgcccaccagactatcagtgctttgatcaaagcagagctggcagaattgcccttaagactttttcttcaaggagcactagctgctggggaaattggttttgaaaatcatgagacagtcgcatatgaattcatgtcccaggtgatgatctgttctttctgcgttgtcatgtcagctctgctgggttcagttgcttgtttgcaggcatggtggtaatgcacatgaatttactcttcttttactgaatgtgtaactaccaccttcccaccatcatggaacctgttaatattattgttgtaattgactggtgttgatcatttgctgatgaaatctaagatttccaagtgggtcatggtaaaaatgtttcatggaacataaaattcgggaaatgcactcaattcccaaaatccagtttgggaaccctgggttaaacaaagttgaaagaagtttctttattgcaactttttagcgtttttaccatctcagttgtgtcctgtggctctcaagagagggtgcagcatgttctgatatgaaggctgcagaagtctcacaggatggaggtt

SEQ ID NO: 19008 - DNA, 1035 bp, Homo sapiens
aggctgaggtggaaggaggatagcctgagctcagcaggtggaggtttcattgagtggagagtgcgtgactgcactccagcctgggcgacagagcgagactctgtctcaaaacaaaacaaaacaaaacaaaaaaaacaaaaaccttttgggctcatacaaaatatagaaaagcaataaagaataagatgtcatccatgatctcactacccaaaccctgtatcttttaaaataaaggggtgttttttttttttttagattagctttatttgctcaccgtgaagatggacctggaatcccagcggatattaaactttttgatatattttcacagcaggtggctacagtgatacaggtttgtgtagcatttctcctaagttctcaaaactttgaaacttctctgccttccttttacaattgtttaaaataaattgtgtggttttctaaacattccagtctagacaagacatgccttcagaggatgttgtatctttacaagtctctctgattaatcttgccatgaaatgttaccctgatcgtgtggactatgttgataaagttctagaaacaacagtggagatattcaataagctcaaccttgaacagtaagtcagttacatttttgtaaaaatcctcaaagatatttttgtcctagatttgcttttctttctcaattgttttttgaactgctggcatttgtcttgttttaatcatgcattaagattgtcatgcttagcactactaggggcagaaagtagtgaccaattacttgtttttttatattaaggaaattgtggtacctatggaccataggcagtcttcagggaccagtgtctccaatttggatccctttctgtgtgtcaggggcatccaatcttttggcttccctgggctgcactggaagaagcattttcttgggccacacataaaatacactaacactaacaatagctgatgagcttaaaaaaaaaatcccaaaaaaactcataatgttttaagaaagtttacgaatttgtgttgggccgcattcaaagccat

SEQ ID NO: 19009 - DNA, 1030 bp, Homo sapiens
acatcatcataataatatatctttataaagtcataaaaacaaatcattaaacaatttttggttagtctaatgtaagtcttcgttttatatataagggtattctggatattataatatagaagtgacattttgactgattaaaatatgttaggcagttctgaacatcatattaatgaacttaagaatgaatgggtcaggcgtggtggctcacgcctgtaatcccagcactgtgggaggccgaggctggtggatcatgaggtcaagagatcaagaccatcctggccaacatggtgaaaccccgtctctactaaaaatacaaaaaaaattagccgggcgtggtggtgcgtgcctctagtcccagctacttgggaggctgaggcaggagaatcagttgagcccaggaggcggaggttgcagtgagctgagatcgcgtcactgtgctccagcctggagacagagcgagactccgtctcaaaaaaaaaaaaaaaaaaaaatgaatgtagacttcaagctgaagattgtggattgaagaaacacatctagctctaaactcctttggggaaatctaagaaagaaactgatttttattacacagttacctaaaagtcaggaatttgtgtatcagttatgtctggaagtagaagtgaaattgaggctaaaaatgagaggattgtttgcaagtctttttatgagtagcccaccaggactgtttaccctcttatcccccaggtttatcctttgaaaaaggtaaataatacagtctttggtctcaggaacaccaggtgtctgttgacggccaggataccatgttaagatcaggaagcctaggtgaaaattggacatagtaaatgctgagttcttgagtttggcttattagcgtccaggtaaaaaaagtaaaaaagtttgaacatatcttctctagagaatccgaaggacccaagagaaaaggccccaaataaagatactctcattagagattcacagagaagtggcctaattggatcatcctaatctgatgactacagtcaag

SEQ ID NO: 19010 - DNA, 1038 bp, Homo sapiens
tccatttatggaacaacatgctcttatatcagaaattaccttatctgtggctaaagtgaaaattactcacttgcctagggtttttatatttgttatggatgctttctgtttgatttttattgtaaccttaatacgttatctctaagatcagttttgcttttgcatatttcacatattttaatctttaactcaggtagagggcaaaagggcatgcagtttttttcctttcttaatatttcactatttttagcttggaaacaggaagaaaaaggcagaaaggttgctatggaattgtgtgaacttgtagaggctgaaatttaagctgccaaatgaagaaacttgttttctcttccaagattcctcctacttcatgtgttattgtgatctgaattctattgaatttctttttttcttatgagggtgtgggggagacatatatgttatggttgtagttctatgaaatatgccaggaagcatactctagtgctatttagaaagaaaaaggaagacaatgagaacttgggcaaacagttcttgctaagccctaaaatatatcacttttattcatccatacagaaaacaagcatgaggccaagaggaggcgaacagagagagttaggagagagaagataaattctacagtaaataaagatttagaaaacagaaagaggtctcgaagtaacagccattcagatcatatcagacgaggaagaggaagacctaaaagtgcatctgccaaaaaacatgaggaagaaagaggtatgaacaaatcaagcagtttttttttcaagtattaaattgatctgggatcttaattaggtagtagtgaagaaagtggaggcattgagctcctggacttaaaaatcacaactcatattttagtttgaaagcatttcctctgtggtagatgcttattatttttttaatcacaggaatttaattcttattggaaacctgaaggcttagttaggtaaaatttaccttgctataaactgatgataatagagttcaaagataatttgtatatgacatcctgaa

SEQ ID NO: 19011 - DNA, 1050 bp, Homo sapiens
tagctagtaatgtttaattgactgttggtgtgatacaaatgaaggacttggtttatcagtgtaggtaagtttaatgaataccctacactgttttaaacgtctgttttgacaaaaggtctcttcagtgtataattgggagtttagtggcaggaggtgagcaggcagtacactggtgaattcccttattgccaaaataaggcaggcttcattctggggtggaatgtgaaatctcttacagtatttcattcctgtgaggagctggctttttcctatattatggaggtttgaagttctcttgcacattgctctgttcctgagagcttccttatgtcagttgctctgtatacataggcccaactgtactgcaatagtctctagttattttgatgatcaccttggtggcctgctctcccttactgtactttttgtcctgccctgggattatccttgagaatcctcctttgggaggaacagctctccgttctatagcagctatcacttactcctatttttggattgtagtttattttattcttgtttcttatcagaaccatcaggttgccagtttgctgaaattctgtaattttgggtcattaatagtacctttttcttgtttccagcaccacagatatattttcctttttctccttcccctcttcccatgtttcttctcattcaatgggattttgagaaggtggtaaggtaaatgtgtgtcctatccgattttatttattcaacagtctgtgtaagtaatgttctgggttctgcaaataaggtaggccaaggattcccaagtttcataaagcctatattttgatggaggagacgcattgagcatataagtaaataaataacagattatagctgtagtagattacaggaagtaacttgggctgggagaatcagagcaagtgacctgtatatggatatctgaagagaaaaaaaggcttatcttatgaagagccgtgggaagagagctctaggcagaaggattagcgtatacatagactcagcggaggaaggagctcgttttattaaaagaaaggcacg

SEQ ID NO: 19012 - DNA, 1035 bp, Homo sapiens
ccacagtgcccagcctagtgtatgttattttgattttaacattgcacttgtatatttttaatgtccatattgtatactgtagaccctactcaaagaataaatctggaactattcatgaaaaacccctccagtaatcacctaaattcttgaatgttagaagcacttgataggactctagctttgtacttgatcacatttactcatgtgttcctctgaaaatcattacatcacaggttaaccacctttttagtttgccctaaaattttctcctatgcataagcccaatgaacacggagaaatggtaaatttgtattatgttcagtgaaaggttattctttttaattctaaaaaggtgggcaagctgattatcatttataatttaaaggttatatttgataaagaaggagatcgtccttctgtggtgatcatttcttcaaatagagtaaattttaaaaatcactttaagaatccaatagagaacaacaaagccatattgagatgcaggttttaggaatttggtagtaatccctcacaaggtcagacttgatctcctggacaatcagggcatgctagtcagctttcatgactcagcaaagctacaaattatgtattttggctttttgtggaaattgccaaccctacagatagcaaacgtctcctcggttgtcaaaaagtaagagtagtttttagaattctgcctttgggtcttgtagaatgaaatatttacaagatttgctatttgttaacattttagctacttccttgttccttcagtcttgctgctgtgcacaccaccataccaggaatatgagggagaaagctagcaagacagctaaataattggaaattctgcttggaggttagactgtgttgtaaaatggtacagacagtgcctgggcattttcattgatagaatccttggagtcgtttggggttcgttgtcaaatgatgtctggcagtgcagcagcatgataggaagtgaagaaggaatgcttatttgcagaggaaggatgacttttttttggtttgaggcat

SEQ ID NO: 19013 - DNA, 1710 bp, Homo sapiens
ctaattgctctaaccagaacttccagtatatattcaatagaagtgaaattgggtatctgtcttattcttgatcttagtggagctctgtccttcactactgattatgatgttagctttgggtttttcatatatggcctttgtcatgtgaaggaaattttttttctattcatagttaattgaatgttcttatgaaagcctgttgaattttgtcaaatgcttttttaaaaattcattgagttcatcatgtagtttttttcccttactgtaaatgtgatgtattaaattggtggacttttgtatattgaaccactcatgcattctgggaataattcccacttgttcttggtgtataatcattttatatgttgctgaattctgaagtaataattttcttgaggatttttatattaatattcataagggatattggtctttaggtttttttgtgtatctttttctagctttggtatcagagtaattctggcctcatagaatgagtaactagttctggcctcatagaatgagtaagtagtgtttgttcttcaactttttcaaagagtttgaggattagtgttaatttttttttattattacaatacttgaagttctgggatacatgtgcagaacatgcaggtttgttacataggtatacacctgccatgctggtttgctgcatccatcaacccatcatccacatttctcctaatattatcactaccctaggccctcatcccccaacaggccccggtgtgtgacgttccttcccctccctgtgcccacgtgttcttatatttcagctcccacttatgagtgagaacatgcagtgtttggttttcttttcctatgttagtttgctgagaatgatgatttccagcttcatccatgtccgtgcaaaggacatgaactcatccttttttatggctgcatagtattccatggtatatatgtgccacattttctttatccagtctatcattgatgagcatttgggttggttccaagtctttgctattatgaatagtgctacaataaacatgtgtgtgcatgtgcctttatagcagcatgatttgtaatcctttggatatatatccagtaatgagattgctgggtcaaatggtatttctggttctagatccttgaggagtctccatactcttctacgatggttgaactaatttacactcccaccaacagtataaaagagctcctgtttatccacatcctctccagcatctgttgttttctgactttttagtgatagccattctaactggtgtgagatggtagctcattgtggttttgatttgcatttctctaatgaccgtgatgatgagctttttttcatgtctttcttggctgcatagatgtcttcttttgagaagcatatgttcatatccttcacccactttttgatggggttgtttttttttttttttcttgtaaatttgtttaagttccttatagattctggatattagccctttgtcagatggatagattgcaaaaattttctccgattctgtaggttgcctgttcactgtgataatagtttcttttgctgtgcagaagctctttagtttagttagatccatttgtcaattttggcttttgttgccattgcttttggtgttttagtcatgaagtctttgcccatgcctatctcctgaatggtattgcctaggttttcttctagggtttttatggttttag

SEQ ID NO: 19014 - DNA, 1064 bp, Homo sapiens
aagcccaaattaatgtgggttttttttgttgttgtttttggtgtgatatccaagaaatcattgtcaaaaccaatgtcatgaagcttttctcatatgtttgcttctgagagttttatagttttagctcttgtaatacatttaagtctttgatgtatttggagttaatttttgtatatagtgtaagttaaggctccaacttcattctttttcatgtggatatccagctttcccaggatcattttttgaaaacactgtcctttcctattgaatggtcttggcacccctgtcaaaaatcaattagatctgggcacagtggcatacacctgtagtcccagctatacaggaggctgaggcaggaggattgcttgagtccaggagtttgagaccagcctaggcaggagttcaagaccagcctggtcaacatagcaaaaccccatctctatttttctttaaaaaagtaaaaaaaagaaaaaaaaaaaggccaggcacagtggctcatgcctgttatccgagcactttgggaggccaaggtgggtggaacacctgaggtcaggagtttgagaccagcctggccaacatgacaaaaccccatctctactaaaagtacaaaatttagccaggcgtggtggcacacgcctgtaatcctagcttctcaggaggctgaggcaggacagtcacttgaacctgggaggcagaggtcacagcgagccgagatcgtgccactgcactccagcctgggcaacagagctagactctgtccaaaaaaaaaagaaattatgtgaagatttatttctggcctcttaattccattggtctatatgtctgttgttatgccagtagcaactgttttgataactgtagatttgtagtaagttttgaaatcaggaagtatgagtcctccaacttttttcttgtttttcaaaactggattggctattcatggttcattgagatttcatgaactttaggatgactttttctatttctgcagaaacactgttgggattttgatagggatcattttaaatctgtgggtcactttgagtaatattgtcatcttaact

SEQ ID NO: 19015 - DNA, 1049 bp, Homo sapiens
aataattttttaaagatacctgtgtttataatttctaaaactttatttttattgtggtaaaaaatatacataacaaaatttaccctttaacctttttttttttaagactcattttgtcacctaggctgaagggcaatagtgctgtctctgctgtctgcagcctcaacctcctgggctcaaaagatcctcccaggtcagcttcccaagtagctggcactacaggcatgagccaccatgcctagctctctttaaccatttttaagtgtgtaattcagtggcgttaagtacattcacagtattatgcaactattaccaccatccatttaagccgaagtttagaagacaaattgtaatatgattcagcagaaaggaacttcattcctttttaaggccaaataatattctggtatattgtatatgtgatgttccgtttacctgttcaactctgacagttgatgtgagtttgcaagtagcataaataaattattcactatggaatcaaaaatataaacgtgattaaataaatgtcaatcctgtaagcgagctcctaaatgaccaatgatatgtagttttcaccaatgaaagcttctcttaccttgctatgaaatggaacgttagatgtaatgtaagacatcgaggattaaagtaactatctcagtaccaatgactttcttcttttttctgttacagatccagactttacttacctaggaggtattttaaatcccattccaggtttagtatattaccacttgttcctcttggcatttttgattagtcttatgttcctttgaacacctttcatgtattccttccagattgtcagttcgagctctcgggagctgatggaatagtgcgctctagtcaggtagaacaagaggagaaaacaaaaccaggccaagccgttgattgcatctggaccattaaagccactccaaaagctaaggtattattatgtattgagtcgcttcagagaagaacatcatgataaggcatgatttgcaaaatgtgtaattttggtttgtgtaaatatttattgactacataaa

SEQ ID NO: 19016 - DNA, 1172 bp, Homo sapiens
tacattagtatgtatgaaaaacttctttctctgataagaaacttaaacttactggcatcccttataaggcttaattcaaatttatgtccacataagtgagttcttttcatttcttctgtttatttttctgtgtattgtggtacgttgtatcttgaactaagtattagcttcttgactcttcagtttgaatcactcaaaaatatttaatttagtagatagcatatgccaatggaaaagattactatagttctacagagtagcattatttttaatgtaagatacatttatcatgacttgtatagcaattctcactaagacctttgtctatgaagcagttagcagaacagttattctgcttttctcatttgtgtcaatacatttatattctttcttgtttgtgttgtcctgatttgcttactcttattttctagctgctccacgtcaaagaatagagttgacctttgatgaacattattatatagaaccatcatttgagtgtcggtttgatcacttggaagttcgagatgggccatttggtttctctcctcttatagatcgttactgtggcgtgaaaagccctccattaattagatcaacagggagattcatgtggattaagtttagttctgatgaagagcttgaaggactgggatttcgagcaaaatattcatttattccaggtaaagaataagttatcttttaagtggttgggcatctcactctaactctgattttagaatcttaaggttagaaaagagattaatttggtcaagttaatcaaatcaagattttaaacaaattagcaaagtcaaagggaaattagtccatgaacaaataagaagttaatagaaattggacatagaaacgtatcacttgaattttgaagcatatcagagatggtgccacattttcttagatttttttctgtcttatagcacatgctcaggctaacatttaaaatacatttaaaaataaataattttaaaaataattcaacaaattgtcttgttttcagaattcccacaaaaattgttttgtatgatttttctcatttagctgttagaattaaccactcaactgaatgaatactctagaatatattgagcaatagaaagaatactgctctgcacttggatgtcaaagatctgggtttgaattctttctctgcctcc

SEQ ID NO: 19017 - DNA, 1005 bp, Homo sapiens
acaatctaggccaggcacagtggctcacacctgtaatcccaacactttgagaggccaaagcatgaagaatgcttgaggccaggagtttgagatcagcctaggcaacacagtgagtccttgtctctacaaaaaaattagccatgtgtggtggcatgcacccgtagtcctagctactcaggaggcttaagcccaggagttcaaggctgcagtgagccatgattgtgccactgcactccagcctgtgtggtagagcaagaccctgtctcaaaaaaaaaaaaaaaaaaaaggcacagtggctcatgcttgtaatcccagcactttgggaggctgaggtaggcagatcacctgaggtcaggagtttgagactagcctggccaacatgacgaagcaccacctctactaaaaatacaaaaattagctgggtgtggtggtgtatgcctataatcccagctacttgggaggctgaggaggagaaccacttgaacccaggaggcagaggttgcagtgagctgacatcataccactgcattccagcctgggtgacagagtgagtctccatctcaaaaaaaaaaaaaaaaagataatctagatgaatcaaagatgtgcctgtaatcccagcactttgggaggctgaggcaggcgcagatcacctaaggtcaggagtttgagatcggcctggccaacatggtgaaaccctgtctctactaaaaatacaaaaattagctgggtgtggtgatgcatgcctgtaatcccagctacttgggagactgagacaggagaatcacttgaacacaggaggtaaaggttgcagtgagccaagatcacaccattgcactccagcctggacaacagagcaagactcttgtctcaaaaaaaaaaaaaagtgttccctagaaacacacacaatacaaaactgacccaagaggaaatagacaatgtcaacctacctgtaacaagtaaagagattgaatcagtaattgaaaacctcctgaaaaagaaaactca

SEQ ID NO: 19018 - DNA, 1009 bp, Homo sapiens
gtgtgatttttaagtgtgtctgtgtgtaggacaaatatataaacaaactaacgtatgttactatgattatctcttggtttttggattttatatatttctttgcatttttgtttactaaatatatattgctttttaatttaagaaaaagcttttaaaatatttcaaacatatgctgtatttcatgcataaaatgtattctaagcaaggaagtagcacttaatttaattgactgagggagtgccatcatgaaaccctgccccaaattttaaaggatgaaaattcccagtttaaatgttaagcatgttgaactccaaagaaacattactgggctaaaccgtaccttccatcccatcctaccccatcagcagagaatgttccactgtaggaagaggatgactacatttacgtatttcggaaactacagccttggttttctcctagagcagctgagagtcactcactacccattgtcgggtcataaaattaatgtagtagcttttagagtattttacttaatagaataaaagagaacagtagaaaacaatctattgatcagagtacatcccagatggtaaagtattgtttcatgaaatttttatttagttgtgcgtgcgtgtgtgtgtgtgtgtgtgtgtgtgtgtgtgtgtgtgtgttttcacactgggtaataacataggatgtagtttttattgtgggctgtgatcagaaaagtttgaaaaccactgccagagagaaataacaacaacaacataaattaatattattcagtaaaggcctggcccaattatcctattgcttacagatagattatcattcttacccattactctgcagtcttagtccatttcctagcaaagcctgaatagccaaacattattagagagttacattacagaggagtcattaattttctaaataatagttcctgtaacagatttaaaaaataaaaataaagtacatttattatgaactttttaggagcttaaactcctctggttttgaatctagg

SEQ ID NO: 19019 - DNA, 1039 bp, Homo sapiens
cagatacattgtccataatgtataaaagcttcttcagtcaatatattagcaaggtaaactggtggaaaaaattatgttttcacactccttaataacatcttcacttttattatacttagtctttccatagacttacattggtagattataaaaggttcttatgacaaaaaatgttcactttcaattcttcatatatccctattatgatggagccaactcattatccttattttttagttgaagtagcagagagattgggtgaaattacttgtgttatcttggtcagaaagtgaagtgcaaattagttaattaagttcatcttagaagacgtataaattaagaatccaattaatagtataatataaactactcctagttttttttattatatagaatagaagctgtaatacatagagagggttttttgatatattattataaagaaaaaatctggttatacatttaaataaataataaaggaaaatgtaattaagacaataaaagaaataagattgagcaaaggatgtctgcttttaacagatggctgactgactgaggttagatccaaattacagtaaatataactgtgataattccagttatctaaagaagaaaaggaatctgaatatgcttcttttaagatgcctagagttttaaccatgaagaagtataagcagagttgctgtcactcctctatttttttggccaaaaaagaaaaaggaagaactcattatatggacattgccatgttatgtaatggccttactaaatcaaatataccccagagtgagtttacttttttagctaattgcacacatttaagagtctcagttgtactgcttgcttcagcacagaaacattccatataacaaaatttttttaaaaattcaaggagaaattgacaaacacaattatactttatttatttatttatttgagacggagtctcactgtgttgcccaggctggactgcagtggcgcgatctcagctcactgcaagctccgcctcccgggttcccgccattctcctgcctcagcc

SEQ ID NO: 19020 - DNA, 1169 bp, Homo sapiens
ataacatgcatccttcctttctaaacagcaaattcagtcttatttgagctaagagtttcacctatcttcattattactgcagccacaaaatactgatacatgagtctaatcatttctatacttttaattatccatgtcctctcttttgccattttcaagaaagtattatttggctattttaaagctaaaaaaatttaaatatactgtttatttggtatgatgttaattttggagttgaagtacattccttatctctgtccttcttcaactggacacctctagataagaaggcaagaaattcttaaaacttttgctaacctaattgtgtatgtaattagaataaccaagttcagttaattgaaacaatgagtattggagtaagagtttgggatttgattccttagggataaactactaaatccaggacagtcatttaactgctgcagatttgagttcccaggggaaccaaacagaagtcacacaatttctaggatgaaaacatctcaaaaaaaaatcagtcctcccagcacttcgggaggctgaggcagggagagcacttgaagtcaggagttgaagaccagaccagccaacatggtgaaatccctgtctctataaaaaatacgaaatttagttgggcgtggtgacgcgtgactgtagtcctagctactcaggaggctgaggctggagcctgggaggcagaggttgcagtaagtcaaggtgacatcactgcactccagcctgggctatagagcaaggctctgtctcaaaaaaaaaaataaaaaaataaaataaaatcagttattttacctttgctcacgagcatcatccttcttggtgaaaagcagcgtatttttagtcttcatttattttaatatcacatttaatctctccttcatccatccatttcagaatgcttggcaagcactctgaaatctaggcttatttatttgtgtcattcacattaacatctctcttactcctagtatgctttaatgatctaagcaacttaagagcagcctctgtcttatttgtctttgattgctgggtgcctaacacagggcctggtacataggagacattcaataaatttatgtcaaataaatgtccagctatcttttgaggcatggattggctatcttgattaacagtgttcccttcttctctagtac

SEQ ID NO: 19021 - DNA, 1034 bp, Homo sapiens
tcagacaaagacatacaagtgactgacaagcatgaaaaaatattcaacattactagtcatcagagaaataagaattaaaaccacaatgaaatataccatctttcaccagtcagaacagctgttaagtcaaaaaacaacatgttggcgaggatgtggagaaaaggggccacttatttgctgtcattgggaatgaaaattaatacaacctctgtggaaaacagtatggagattcctcaaagaactaaaaatagaattaccatttgacgtagcaatcctactactgggtacttaaccaaaggcaaagaaatcattataccaaaaggatacctgtactcatatgttttttgcagcactattcatagtagcaaagctatggaatcaacctaagttccccatcaacagatgattggataaaaaaatatatatatcatatacatatacaccatggaatacgactcatctataaaaaagaatgaaatcgtgtcttttgcagcaacatggctggaactgtcttaagtgaaataactcagaaacaaagtcaaatactgcatgttctcacttgtgaatacaagctaaataatatgtacacatggacatagaggatggagtaatagtgaagactcgcaaggctgagggggtgtaagggatgagaaattacttaatgggtacaactcatgggtacagtagtatatattgtaccaatgtagtaatttctcatccctcatacccgctcagcctcatgggtacaatatatactactgtactgtacgtgggtacaataggatatattgtacccatgaggctgaggggatgtgagggatgagaaattattacattgtataactattaactatgtatacaaatagtatatattgtacccatgaagctgaggggatgtgagggatgagaaattatttaatgagtacagtatatactattgtatactaaaagcccagacttcatcactacataatatgtccatgtaacaaaactgcacttgtagcccttaaatctataaaaataaataaatagta

SEQ ID NO: 19022 - DNA, 1050 bp, Homo sapiens
aaaaataaaatagacagctgcagtagcagacttcatcagacttaagaaagaacctttaaatatgtagatctgtcatttcaaattacccagacagagataaaaagaaataagaatgcaaaagagtgagagaaatcctacaaaacttaagttacatcaataggcacacaaatagtaatcttatgggaattccagaaggtgaagagaaggaaaattacatagaaaatctggttaatgaaatagtagatgaacactttccatgtcggtggagagagatggacgtttcaattcaggaatctcaaaggtctccaaagagaatcaactgcaaatggtcctccccaaggcatattgcaattaaatggtcaaatggcagagacaggaaaaaaatttaaaaacagcaagagaatgaggagaaaaagcaaaaaagaacagcaaaacagtcaagtcacatacaaaggaatcccaattagaataacagatttcttgcagaaaccttacaggctatgaatgagtgggatgatgtattcaaagtgctgaaagaaaaaataattgttttacatgatacgaccgagaatactgtaactgtaaaaaccaaagaatactataaccaccaaagctgtagttcagcagagagagagagaaataatgtctttcctagaaaaaaatctgagagaatttataactgctagatcagccttacaagaaatagtcaaggtagtccgagatctagcaggccacaggacaatattcaccatcatgaaaacatgagaaagataatagaacagatattaaaagaaaacagagacaagaattaaaccttgtcgctgcaaaaaactgtgaaaccacattaataaacaagattggaataaagaaacaaagtatatagagaaaaaacagaaaacattcagccaagtgacaggagtaagtcttcacctatcagtaataaccttgaatgtacctgcattaaatttcccacttaaaagatacagactgactgaatggatttaaaaacaaatatggcccatctatacctactacaagatactcacttta

SEQ ID NO: 19023 - DNA, 1050 bp, Homo sapiens
tcttttttaagacagggctcactctgtcacccagtttggagtgcagtagtgagatcatggctcactgcagcctcaacctccccaggtcaagcaatcctctcacctcagcctcttaagtatttgggactacaggcacacaccagcacacccagctaacttcctttggccatgttgcccaggcttgtcttgaactcctgggctcaagcagtccacctgcttcagcctcccaaagtgctgggattacagatatgaaccgctgcacccagcctaaaatatattcattcatgtattgagaggttctttgaatgagagtaacattcatggatttcattgtatttagcaaaatcaatgattaataaaatagaacatgattaaaagccttttcacatactaacactattatttcacaactttcttactggtgggccaaaataccaatatggtaaatggtgtgccagatgatattgtgggtatctaaattgaaaggtactatttcatataaaatgaagtcatgtaaatgtggtatcacagttcattgaattttaaaatctcagttgaaaccattatatttttcagtatttaatattgcttagtaaagacctagtccatgatgaagactgttttcctgcttgaagagcaaggtaaaaagagcagttccttaaagcacgaaacgggtcttatgtccactctgcttcttttgtggattagaaaactgaccatagggaagtacggtaacatacctctagtcctaaagccaaacagctcttggtatgaatcccagctctactgcttaccaacttcatgaacttataaaagttatgtggccattttatattatggttaatacagtgcttatatacttcattaaaagaaaaattttataacgaatgtttgcttttcttatttctaaactaatcaactcaaaataaggtaaaaagtcatatttaagggcatattctccagtattgtccatttaccttcaatccagagaaaaaccatatttttcagctgcttgctaggtctctaattctggatgaacctttgacaaac

SEQ ID NO: 19024 - DNA, 1051 bp, Homo sapiens
aagagtgtacagaaacagcgggattgcttacagcttggtgtttgctttatttaaagtttgttaacagctgacttcctgtgacttgctgaaaatctgtgattggtgttaagaatagtgtgtttacacagctagttaggctgcagtttactttgtaaggggaaacctttaggccaaacttaaaatattaatatgtaaggaggcagacttaggctaaatttgtgcccaatttgcctgccttcctcttttactcaggaagagtgtgaaaggaaagtaaatctcaggacccccaaatcactaagcaaaagggaagagacaagctgggaactgcgtcacacaaacctgcctcccattttgtttccaaataagatagctacaaagacaaaaaaagctacatatctccctcacaatccccccactgagaaattccttgtgggccccaagatctttaacctgtaacagttctgttgaatttcaccccaaccatgtaaattgatagcttattctttacacatacaggacaaaggacagaactcaaagtcatccctctgctcacctgagacaaatgcatatctgatggcttcctgtacgctatatttattttatcttatgtagaaatgcagattcactaagctagatgaatgcgtcagtgactattcctctgctcccctctcacaggtgaatggctgatcaaagactcaaaagaatgcaaccgtttgtctcttgtctactcataccttttaaaatttcttcctctttccccaatatctgcccattcccctttaaatactgaagccctcacaatcatctctggagaacgttgccaaaataaacttctaaactggttgagacctgtctcagatactttctggttttcaaaagcataaaaagacatatagaatttaaacagcatcagaaatactgatcaatattctggcagaaaataatttctggtaatcactactcagatgaagctccgaggcaaactggtgagtccatggaaggacgaaaattacaattaagagctttgtagctatcaaacctcatcttctta

SEQ ID NO: 19025 - DNA, 1059 bp, Homo sapiens
ttaggaagccaaggcaagaggaaggaggatcacttaaggccaggagttcaagactagcctgggcaacacagtataaccctccatctctacaaaaaataaaaaaataagctaggtgtggtggtatgtgcctgaatttgtagctacttaggacagtgaggcagaggactgcttgggcttacaatgagctatgactgcatcactgcactccagacaaggcaacagagcgagaccctgtttcaaaataaaattaaattaaaagaaaaaaagtagctcaacaagatacaagagaaatctgaaaactaatacaaagaagtcagaaaatcagttcaggaaatgaatgagaaatttaccaaagagataggtattttaaaaagaaaaccaaacagaactcctggaaataaaaaattcattgaaggaattataaaatacatttgaaagcttcaacaacagactagaccaagcagaagaaagaacctcagaactttaagataggttttttcaattaatccagtcagacaaaaaaaaaaaagaaaaaagaattttaaaaaatgagtagagcctctgaaaagtaagggattacataagacattggaacctatgaatcataggtattcctagaggagaagaaaaagcaaaaatttcagaaaacctatttgagaaaataattgagaaaaccttccctagtctagcaaaggatctagacatccagatacaagacgctcaacaaactccagccaaatacattgcgagaaggatctcaccatggcatctagtcatcaggctgtctaaggtcaatgtgaagggaaaatccctaaatacagtaaaagtgtctagtcacttatacaggaaacttcatcaaactaacagtggacttctcagcagaaacttcagaagccagaagagacggggattctattttcaaagtgcttaaagaaaatggtcaaactcgaattttgtatcctgctagtgtaagcttcacaaatgaaggagaaataaagtgtttcccagataagcaaatgagggaattcatcaccacttgattggtcctatgagaaatat

SEQ ID NO: 19026 - DNA, 1052 bp, Homo sapiens
gagaggttccagaggacaccagtaactgtgtgaagttttccattttcattttcacctcatgttttgctaatttaagcaaattaaggtagtacattttgtgtttaacagttaataagcttgacattttagtattaactatttgcatttgggtcttcatattcttagcctatagaggtaagatctatagccatatttcttggtccattacacatttgatttatgaggcataactcttgtcctgaaattgcttgttataacgaagacttcctccatttcttatttttggtgtctttcaggaggctgtacatggggtaggtatgggagatacttattaactttgttctattgcttttatacccttaaacttgaaattgtcctatttaatcatgggccagtttggtgtgttaatttttggggaacagtttttcctttgtgagtaatttttattgtaatatgtatgattttaagacccacctttctgcaaacttcaaacgtatgtaagtggctgtagatagcttagctcaccaaaataatagtgtgctgcctccaacccccaaaagctcttcatatttagaaacatctgcagtgattctactaatggtagaattctatttcattcacactcctgattagaagaattggtaagtaatccaaattaagaaaataatggatcaaatccaacatacctggggggtcagtctgtgactgctgcattagaatggacataaaagtaatgtcgaaactcgacagggtgaatagtgtgtgtgaactaccacgcaggactgtggtatttgtgtaggttaaacatgaaaggtacagatagagtgttacagagacccggagtttgaagctttgtcattcccctccccactcatccagtgtgcatgttcaaagcacaaaggagtatttggtagtttactgcttatgatcctaacctgaatttaccaaaagaaacgtacgtttatctaaaaatggcaccatccaaacaaaattccttatcaagcatctactaagatttggtggcaaacagtgtgggttgtagattctaactg

SEQ ID NO: 19027 - DNA, 1033 bp, Homo sapiens
taaatttgacttttctgtaattcaggtttttcctttttttgtaccattttaaagttagtatcttttgatatgcatatttgtttatggtaaaaaatttataacgtgttcaatattttcttttcccccattaatcagttcattagaaatattttaaaatcagctattttgtgaagccatgagttccagaaagtaaaggtgacatcggaaaaataatcaaaagctatttaaagcatctataaggtgctctctttctgtcttctacagatgagtcacacctttgagcttaatctttgaaaggttagagaataaattgatttttataaatactgcaaatcaggcttttgtttcctttttcagatatcttggacaaatcacatattttaaaatttgttcttgtatttattggttttgcagaagaaggcatcgtcatgcacagtatttgtaattaaaagcaaatcatttgtttaaaaaggcagtttgcaaaaaatgtttttggtcttttataattctcattaaaagaatatctggcaaattaaaaaaatcttactgtgtctgctttagctctaagtttgataaaatccgaagttattttcctgtttcattccatactttaattatatagcagaaagctgtgtgttgtcatttttaagtgcggtagacttaactctaatcacagcaaataactgggtatatggcctctggattagtctttcccatgccctgcccctcttgcccacattttgattcttacaactgtcaggagaatgactaaaatgctgaccacttttcacctctttaaaaaagcacaatgatataataaattcactatttcatagcctagtggctaagagccttggttctgcaaccagacttccaggcacctaagtgccagtctcggctctaccccactaaccagctgtgtgaccttgggccccagtttcctaatgtgtaaagtggggttaaattatggtagatacttaaaacctttaaatggggtacaggtatgttacctgaaacagtgctttgctcatat

SEQ ID NO: 19028 - DNA, 1018 bp, Homo sapiens
atgacaggttaaacctctgcacgcactagctgatgcaatgcaaatctgaggcgcaggactttattggggcaagggtagtgcttgtttaaaaacaaaacaagctactctgcgtttaatgaggccatttaagatggctttcccagagtgggaagagagtataatctcttaggaggtttaagtaggagtttaatgtggcagaagtgtgcttactacttttcctgcaaagtcttttcacagtgggtaaggagagtttaaaatatagtgctgataggagtagaaatgaagtgagctagaattgaggaaatatggtagttgatgcccggtaaatagccgttgaatgaattagggagaatgttttcactctaaaaatttagagttcgcacgataaacctggagcgtagcgccagtgtggccacgcatttcccagatacgctgtagctcttagatcgaaaccataagaaactgccgatattcgactgttctgacctaccgaaaatagcgtggttccacctaattttaaactggtggaaatgctgaggaaggttcgatgtcgctggggtgggatggggtcaacggcggggtggcgggggctcccccacgcccccggcctttggctggggggcggggcttgcgggcacggccccacccttgcgcgagcaagacgggcatcgccctgtgcgccgcgcgccctgaactggccctggcgccccgggttggagtaggcgttcccaacgcaggcccagccccggccgaggctccaaatggctctcccggcaggcaggctcctgcagtaactcttgagctggctcagggagcgcacttccttctcagccagcgcgtcgccccctgcatccgtggcctccactggagctgggcaggaccctacccagtgaatctggagaaaacaaacttgggagacagacgaaagcttagggcacattggaggacagcgcagctgtggctcccatttttggagatgcagtcgaatttgagctcacagggaggtgtggttgcctcc

SEQ ID NO: 19029 - DNA, 1020 bp, Homo sapiens
atctgactacatttctccattttaaacttttataagtaatttataaaaggaaacaaagattaccacgtggaattgagaataaaagtttatctttctactgttaagtatgctaaggtggtaaagcaatggctgaatgctctgaaattactaagacaacattaaaggctgattctaaaatgtttttgtttagattgacatctacttaaactatataccaaactgggcttgggacgtaggctttagaaagtgtaggtaatagtgcattcttgctaagttttggatttttgccagttttggattctatgggcttgtcttaaggtacttctgtgaacttttcagctttttgtaaaactagtgtaaatattctacctagttgagaattaaggtttattgtgctaaaaattaaatggtggttgattcttggcagacatgtttgatcacctttgcaaggttaaggcatcttttggagtgtgtttcttggaatctacaaattctgagtctgtgactaattgatgacttggcaattaaatcaggtctcagctgaaaacttaaatattctggaatatgtaccatccatgatacacataaattacccatctcaatctagacaaaagccagttgaggctggaaacagtccagttttacagctcaacaactggtggagccggggtctgaatccaagtgtagatgactctagaatgcttccacttttctgacttaattaagtagaggggcctgtccatagatcagtggttttcagagtgtgctgtaaggctctgtacagatcttttggagtttggtaaacagtgaaatatcttttgcttgagaaataatcagtcatctttttgttgtatacattttggttctgtttggaagagtttctctatatgaaattttcttctctagggaaatttaagacctgtcgaatgaaaaaatattagaaaataaaaatatagactgggcacagtggctcagcactttgggaggccaaggcaggctgatggctttagcccaggagtt

SEQ ID NO: 19030 - DNA, 1051 bp, Homo sapiens
ggatttcagcttttactctaacatgggtagccagcggagggtgtagagcagagatttatgtcatctgatataaaacggagctggattaattaatctaattgctgtgctcagaacatattaggtggtgagggtgggagacatagctgggaacaatgagactggttgggaggatattgtggtaatccagatgagagatactggtggcttggactagatggtagtggtagaggtagggaggaatggttggattctgaatacattttgaagggaggtataataagatttcctgactgttttagatgtatgttgtgaaagagaagaatcaaggctgactcgaaggcgcttgacctgagtcactggaaggatggagtctctattaattgaaaaaaggaagactctgagtggagagactttgggaggtgataaggagtttctctttggccatccccctgaaggggcaattggatttacaaatctggggtttcagacaaatctggagcattgtgtttatttttaaaatctgggctggagatgaaaattttgaaatccttagcatgttgatggaatttaaaactaggagactgaatgagatcaccaaagtaccagtgtacataagaaaagaacatcttagggtgtaagggtgggagacaaggatggaaacagagagactggtttggaagagattacagtaatttataggcagctacaatttcaataatttgggggagaagagcaggaataaaaggaagctgaggagtgactgagataggaaaaccaagagtatgtgaagtcggtgaacagagtttattaggcaggagcccagtgatccgtcaactctgttaggtgttgctgacagttcaaaacttgcaatttaaatacaaacaaaaccacagaaccattgaaattcaaattactgattcactaaaatattggatactgtcaggctgaattttagtcttaaaactgcacttatgggattgacttacggttatgaaattgactgttaccgggcaggttctttttgagttaagcataccttaattgccctgta

SEQ ID NO: 19031 - DNA, 1118 bp, Homo sapiens
tgtgtgattaaggagtattatttgcttatccatgacaaagttaccagctgaatagccatgtgtcccagtacttcttattttattttattataatttttatttttattagagacgagatctcactatgttgtccaggctggtctcaaactcaaaggctttagcaatcctgccgcctcggcctcccagattgttgggattacaggtgtgagctgccacacctggcccttcttttgttttttaagtcttattcttttccctgaccatctcaaatactttctgaccagtatttctagaacgattttttttttccttaaatcttcaggaggctcagcgtggcggctcacgcctgtaatcccagcactttggggaggccgaggctggtggatcacttgaggtcaggagttcaagactagcctggccaacatggtgaagccctgtccttgtctctactaaaaataaaaaaattagctgggcatggtgtcatccccctgtaattccagctactcggaggctgaggcaggagaatcacttaacccgggaggtgtaggttgcagtgagccgagatggtgccactgcacccagcctgggcaacagaacaagactctgtctcaaaaaaaaaaaaaaaaaaagtcttccagaactttaggtttaatgttacagacaagatatgaccagaataaagctggcagaaaccttccattaggtttgtggttgcccagtcatgtttgaactgacttgttttttttgttttgttttgtttttggttttttttgcttattcgtttttgttttgaacagggagtccgggcacatggaataaactagaaagagaaaaacctttggagaactaattatatttataaaacagatcttgccagtgagaaatattttcttaaggagtttaatgccagtcttgaattttgtagaaaatatttcagcgtacttggtatagttatttattagtgtcacatcgaccaccttggtctagtgatggttgatacagtaaatataagtgtatactagcttctctgcaaagactctaccttggaaagattacttcaataatttatttgacaaaatgaagtaatcctctccctgttaaaaacttcttcctggttt

SEQ ID NO: 19032 - DNA, 1058 bp, Homo sapiens
tacgaggttttcttggcatgatgtgttggtatgatgaaagtgcatagaccagaatttgtgaaatcaggtcacagatctttagtgctgggttttttctttcaatgcattttgttgttaaaaaggacaaggagatttgtatgataaattaacagactttctgagatggtggcattttggaaattgctgtggccggggatttgaatggctatatctttgtgattaaaaaaaatcaaattgattaaaatgaggtcttctcttagctagtttagatttattgatcagttcactttcaaggacttgagttaaccaacttagaaaagtgggacagtgaatacttgagtgtgtatctatggtgttaccatcacttttagaagttactgaagagcagaatgtagtgtggtggcaaatgtaatggtctggtaattttatctgggagttgttggctcaaattatggtggagaggattttaattagttgttaggaggactttagactggtagatcttgagactcaaagtagattacacaaattggttgtgtagtgtttcattctgaaaatttaaataaagatacagatttctgtaatcttggatggttagttgcgattatatccagaatttgttccccaaagtttatgccaaacagtttttttttcgttattggcatctttccaacataatttactaacatttaatattttaaactgaaatacgtataatagatgtgaaactgataacttttcaggataagtattccacaaagtacaaattcagaaacaatgttaatgcattttacatctgttaaatattaatctattccctctaagcttcgggaagttcttacgaaattgctgtagagaaatattctttcttaatatctgtaattaaaaagcatgattaggttaaattggagttatgaaggaattatctagctatgtcagtaatgacataaaataacaaataggattttcagtgagtatggtgttttgaaaacagatcttacataactagggtaacaaagtttagtaatttacagagttttaggtgactgcttaaattg

SEQ ID NO: 19033 - DNA, 1044 bp, Homo sapiens
agatggcatcgagctacctacactggtctctaactctggcctcaagcgatcctcctgcttcaacctcctaaagcactgggattacaggcatgagcaactgggccagccaaggaccctttttaaagagcagggagagaaagagagacagagacgggggtggggggtgagaggcgtggagtggagagagagtgtggaaaggcagggccagggctcctgtgcattggaacacctgatttccatggccgaggagaaatcattgcccacagcctttgtcatgttcagaattgccaagcccgagagctggggggaccctgcctcccctaaggctttgacctcctgccaaggggaacctccagagagcaaatctatagaaaaccaactgggcacagctttccaagaaaaatagagcttttttcttttctttaaaaattgtatgaaattgtcagaatcatatgcccaggtggtggagagaagtagcaaaaagaaggcagtttcatgtttgaagttggagtgctggaggaatcgcggccagctggcctgtgctcgggatgtctctgcagccctctgctccgctccctctatgggagtgtgctcctcgcctgcccgtcctgcacttggtaattgcaaccatctgttcagagtggaaactcacacttccaggcccaggcaccgctgctctctggagggtcgttatagggcagtgagggcggatgtccctccccgtgtcacccacagccatctcctctcagtcaagcacagcccagttctggttccagctctgctgtggactcccttgggcttgccccttcccttctctgggtgtcagggtccaagtgcgcgaacatacgtgagagtccccacccggctgctggatggggcggctgtgaacccatggaggactaggagagcactgtgagatttgggagaggcggtgcttcagcatcagctccaggccccctcttccaggaagtctcccgtggagccccacctgagtacatcagcctctggcagcttgtactgtccctccgtgcagctgtcattttt

SEQ ID NO: 19034 - DNA, 1056 bp, Homo sapiens
tgggaggctgaggcaggagaatcacttgaacctgggaggcggaggttgcagtgagccgagatcgtgccactacactccagcctgggttacagagcaagactctgtctcaaaaacaaacaaaaaaacaaagctagttttccaagctggtggtcacttactggcgaatactacttaggttcatcatgtatgtgtgagagctctccctctgaatcacgagtgcctgatggggtcattttgtatgtgtgagtgtctttttacattcactttctaaagtcatttgctttgaacatgttatgcttatattaatttccttactgcttaggaatcactgcctgggggaactgaccattactttctaccttcactgaatggaaaagccagtattcaatatttatctgaaaatgatttggtagtttaggttttctttgttgtagttggggtttgttttgtttttaggacaccttgttagtggttgtttctgttttcataattcttaggtaacagacattaactaaagattcctgtgaacctaacagggagatcatatgaccccatgactgatgtttactctttttaaaaactaaaccaggctgcacttctgtgcattcccagctggtatttgcatgggggtgtgatggggggtctaagctgagaggaagacacacagctctctcagcatttttaggcagtcacactttccagctgatcttttccatttgcaacaggaaccactgggagctgtaggtttggattcagtggtaggtggtgatgggtttctttttttacatggtggtctcttctacctaggagaccactacaatttcaactccctggtcttgtgaatcatttctcttttgagcctttgggttttatgacacagacgaggacttaattcccaaatgccatgcttttctacccacatgaagagaatggcagccattttccacacctgctgtgctcatcagtccatctcattttgcttccccacatctgaacttggaaatcccctgctgggcttcaggcccgaggcctgtgtcagagcatcaatcaggtccg

SEQ ID NO: 19035 - DNA, 1066 bp, Homo sapiens
gaggaaattgaaaaagaaaataaaagattccaagaagacagagaattttcagctggtacagtgtatccagagaccaacaaaaccaaaaataaaggtgtttatagcagcacaaatgagcttacaactgattccactccaaagaaaacacaggctcacacacagcaaaatatggtagaaaaattttctcagttaccattcaaagtggaagctaaaccatgtacctcaaattgtagaattaatactttcagaacagtgccaatagaacagaaacatgaagtctggggttcaaaccagaactacatttgtaacacagaccctgaaactgatggcctttcaccttctgttgcctctccaagtcccaaagaagtcaattttgtttcaaggggagcttcaagtcaccagcccagagttccactttttcctgaaaatggtttacaccagcagccagaacccttgcttccaaataatatgaaatctgcctgtgaaaaacgtttaggatgttgtagttctcctcattctaagccaaattgctcaaccctttctccaccaatgccactgccccagctgttaccttcggttactgatgcaaggtcggcaggaccttctgatcatattgattcctcagttactggggttcaaaggtttcgagatactctaaaaataccctacaagctggaattaaaaaatgaaccagggagaacggatttgaaacacattgttatagatgggagcaatgttgcaattacgtaagtccattctctgcagattattttattttaaatagggctctaaatggtgtctcagaatcacatgtatatgggaactatacatacatgttgtatatagttgatctgtagccttagggtcggatggtggaggggaatgggaaccaactggttggaaaggttttgtcagtccatcttctggattcatgaactttacttcaccctgctgaacttaatttctaagggcaagagaggatagaaaattatcttttcacgttgcattgctcagtgatatgtagtatagtgacttttaagtcattaaattcttaatattgtgagta

SEQ ID NO: 19036 - DNA, 1033 bp, Homo sapiens
tttctggcctctaccctctagttgccaagagcatcctcttggttgtgacaaccagcaatgtctcttggcattgtcaaatgtctcttggcattgtcaaatgccccaaggaagggcaaaatctcacctagctgagaaccatagttaaatgaccaaggccagtccccactcttaatataatacatttacaatctaatagagctgtgataaatgctatagtttaaataataagatactgttacgtatagaaagcagagattaatacactttggatttcttagaaggtacttttggattagagtggaaggaagaaaagtttaaactaggttatagaaataagcacattaaagtctagactgcagggactttgaatattgttctcagaatcttgaacattaatcctacacgatgaagagctttagaaagtttttgagcaaggaagtgaaattggtacgttttcagaactttggtactgtaacagaggagtggagtgtggtaaaactgacagtaggaagaagagtttagaattagttgccatgttcacaagactcagtgcccacatcactgaaaggcaacttgggccaaggatggagtggaagagagctgtgagctctgattcagaactgttaagtttgaggcacgtgtgggataaccaggcggaagtgctcagggagtagtcttgcagcctaaaaaaatgttaatagttgcttcttctttgagaaaacatcaaatggcggatgacgccagtgtagctagggctggtgagggggcaaggggtgcaggagtgcgacccagagcccctgggggtcctgggatgaggaactgcagaggcttccgcattggcatctggggctagggcctcagccaaggacaagaaatatatgcccattaccaagctgggccacctggtcaagaacatgaagatcaagtccctggaggaaatccatctcttctccctgcccatcaaggagtctaagatcattgacttttaactgggggctctctcaaggatgaggttttgaagattatgccaatg

SEQ ID NO: 19037 - DNA, 1048 bp, Homo sapiens
acttcttattactgatttagtctcactcattattagtctcttcaggttttctattcctaattcaatcttggtaggttgtatgtgtcaaggaatttatccatttcttctgagttatccaatttgttcgtgtataattgttcataatagttttttgtgatcttctgtaaatctgcagtatcagttgtcatatctactttttcatttctgattttgtctcctcttttttcttagtctagctaaagggttatgaatttttaaaaccttttcataaacaactcattttattaatattttctatttttatagtctctgtttcatttatttctgctctaatctttcatttatttctaatctaatcttaatttccatctggattttgccatgttgcccaggctggtcttgaactgaaagtggtgtgttgatgttccttacagttattgtattatagtctatcccttcaaatctattaatatttgccttatgtatttgagtgtgtacatatatatatatatgtatgtatagttgttatactgtcatgctgaattgacccctttaatattttataatgactttgtttcttctaatagtttttgacttacagtttattttatctgatataagtatagctacgcctgctttcttttggttttccattcacatgaaatacctttttccatcccttcaccttcagtctgtgtgaccctactggtgaagtgagtctcttgcaggcagcatatacttggatctttttttttttttgtcatttttctttttctatttatattcaaggttattattggaatacagttgcttggttagatacagattggctaatatcttacagagcaacaacattgtaaccttttgggttatttttctagcagactgagatagttggcatctctactggacagaaatctacatttgaatgcatagcttcacagtctagaccctaaccaataatgaataatgtgttaggcaaaggtgtatttcctagagaattaaataatctttgagtaggcctaagagagtactcccttatatttga

SEQ ID NO: 19038 - DNA, 1034 bp, Homo sapiens
tcagcgtatgtaaggtcgggagccagctgccacccctctggacagacgcccccagtgtgccctgggaggaagatgttcatctcatgcactgagtacaaacacatggatgcccatggtcttctggtttctggccctgttggttcaggagttgacccccagtacaacttactgaggcagcctactgcagcagggaagattcacagggtctcagactctccaccctaggcttggaatagttttcctctcatgccatctggtctgtttctgccagctccatgccaggctttttgctgtttgctggggaccctgagctaaggcaaacacagctcctatcctagaggaatatccaatctgatgggagaggtagacacatagatgtgcaaattcctaagtagtatgaatgggttaggaagtgattgcctgtcctggttatgtgtgcgtgggaatagatatgtgaagatagggggtggtcagtggaagtttgaaagaggagaggcatttgagttgggtctctaaagtgatgaataagagttcaccagaagaaacagtgaaagataattcttaggtgataagtacagcaaaagttagaggcattgcaaagagcatgatgctctttgaaattctttttgctagagtcaccggtgactcctgattgtagaagttgatgacttttatagtctttccaggccattagaccctgttgactactccttagacactcttgtcctcaggcatgtctgaaaaccctcatcaatggtgtccagccctaacttccttctctctcctgttccaccccaacagccagctgcctgaaactgtcttcaccctctcccacaccagtgtcaaagccccttgtctcagtgcttctgactcagcagcagctcctagatcagctccttccacctgtccccacaacccctacccacatgtttgttggacccccgatgttcatagcctcactcttcccacctgccaagccccagctctgatccaggtctgtggcacctcaggttattttgccaaagaggcttcat

SEQ ID NO: 19039 - DNA, 1096 bp, Homo sapiens
ctggcgcggtggctcacgcctgtaatcctggcactttgggaggccgaggtgggtggatcacctgaggtcgggagttggataccagcttggccaacatggcgaaactccgcttctactaaaaatacaaaaattgctgggtacagtggctaacgcctgtaatcccagcactttgggaggccgaggtgggcggatcacctgaggttgggagttcgagaccagcctgacccacatggagaaaccccatctctactaaaaatacaaaattagccgggcttggtggcgcatgcctataatcccagctacttgggaaggctgaggcaggagaatcacttgaacctgggaggtggaggttgcggtgagccgagattgtgccattgcactccagcctgggcaacaagagcaaaactctgtctcaaaataaaataaaataaaaatacaaaaattaagccaggtatggtggtgcatacctataatgccagctacttgggaggttgaggcacaagaatcacttgaacccgtgaggcagaggcttcagtgagcccagatcgcgccaccgcactccagcttgggcaagagtgagactatgtctcagaaacaaaaacaaaaaccaaaacctgtaaggttgctgagggatccttcgcctgagctgctcggtgcagaactggggaatggaagcccagggaggggaagggactggctgtgggtctcagggtaagtggaatatggatgtgggagccagaggctgcctctgaggaccacactctcacgtcttcactaggtggacaagtatttgtaaggcttggtcatattttgcctggtttcccttagttgcagagagacatttcttcacatgaaaccagaccctattttgtgtgttggaaatgctcacaagtatttcccaaggctctccctaccctacctcaagatgctgttaggagtaatcctccaccctcagtgtggctggcggtgcctgccctggccagagggcatcagagcccttcctggatggaggagggcagggcctcccttcctttcccttggaggccagtggagttctatgtgtggtgtgtctgttgcaggagaggaaggcataggg

SEQ ID NO: 19040 - DNA, 1077 bp, Homo sapiens
aactttcatgagtatgtgctgctcctgaggctgctgtggtcccgccagggttgtctgttagggtctgtagcacctatctgtaagttgaccctgggctggctagatgtcaccctgcagccattcgctggctcttgggttgcattgcacctaggcaaggggatagcaagctttccttttttttttttctgaggtggcgtctcgccctgtcacccaggctggagtgcagtggctcgatcttggctcaccgcaacctccgcctcccgggttcaagcgattctcctgccccagcctcccgagtagctggaattacaggtgtgcaccaacacacccagctgattttttgtatttttagtagagatggggtttcaccgtgttggccaagatggtctcgaactcctggcctcgtgatctgcccgtcttggcctcccaaggtgctgggattacaggcgtgagccacagccaccatgcccagccagcaagctttccttttattatttttttaaaaatatggttttattgcaaaatgaaacacagatctagaaacccacaaagtcaatgtagaacttagtgaatttttataaggtgaacgccattgaaaccacttcccaggtctagaaatagaactttgcaagctacttcggaaggcttatccttgttccccatccctgtttctccttccagaaagaatcactagcttgacttttatggtgatcacacccttgctttgttttaaagttctgtcactcacgtgtgtaccccttgccactataatttagacttggagtgccattctttaaggaacatgagggagtaatttttttttgtagtgatgattattttactttttttggagaccactctgtcgcccaggctgggagtgcagtggtgccatcatagctcactgcagcttcaaactcctagactcaagcgatcctctcatctcagcctccctagtagctgggactgcaggtgcatgccaccatgcctggatattttttaaaatttttgtagagatggggtcttactatgtggttcaggttggtcttgaagtcctggcttcaagcgattctccctact

SEQ ID NO: 19041 - DNA, 1030 bp, Homo sapiens
ttgaggtttctttaactctttatttctgggtggtgtcattaagcataacgctttgttctcttctccccctgcctcagtcttcatgagctgtactttgaccatgtcactgctctggctctggccaggtgttccccctcacaccctgaggttgtgaaattcccctggggagagggttgcatctctgatagttggagctcctcttggcagggagcggtgcagagaaacctgcagggtcttctggaaagaggaagagcaagcagtcaggtcagaaattcaattttggtggaactggctggctgacacaggattgtatcacctgggatgcttcgagctgcaagatgtgcaatccaagttcggaaaagctcaagcatgaggggctgtgagatctcctaggatgagaagtgtggaggagtgtggctgcagagaacttagctgagcagctcagtactgtcagcagagatcgagctgccttctgtctttatgctctgtcctgctcaactcattggctggtgccctcggatttgtctcctcatgatgaagaaatggctgctgtggtgccagacatcaccccccgacacatcagtgtccaaagaccaggagagagaagctccctgacacaggcctgtctttaggggaaagatacctctcctaaatgtccccatgttccctcccttgtatctcactgtgttgacaacggcatcccttgaacatcctgcaccaatctcaggccaacatacggagctccctttggagttagtgaatctggggatgttcaagcaaaatttgaattaggccagcaagaaagaaggagggggaaaggctgctggggagcacccagcactgtctgggggagcttgtgtgagcggctgtctcttcccatgcaaggttccggagcatctccctcatgtcatgggagctctccctcacatctcatcagtcccccggcctcaactcatgtcctaggactgtgccgttctttcctctgcatggctttccccgtgactgagactcttcctctgtactagcctgc

SEQ ID NO: 19042 - DNA, 1051 bp, Homo sapiens
gcaggcttcctggaacctggggaccctggaggtttctggaccatatcgagttgcttgggtggttgcgtcccttttttttgggccatgccgggtgggggagctgggagagaagctgatgattgggtcaggcccagccaggggtggaggctgcccactggcccgcatctccccggagcagactgtgggcccccagccctgtctctgaggggtctgtggcctggcttcccttcctggctagggggcgtcgctgtttgccatttcctgccttcctcccttttattttgcaccaggtcccccaggaacgcctctgcggggatgtggggcccatgctcacccttcttcccggtgatgaggcctgacttggcctggcaccgccacagtcctgctgagtctgggcccaggatggggttgtctgtattcttctctccaccctcctcagaccccacctcccggctggacagctgggctcaaggccagggctgagccagggggccagcactgattgaaagtgctcctcacagaccccttggctgggggcccatggggtgtgggggctctggaagaggctgagggcctcagagaagagggagccccccaaggccagggggtgggagaaagtgaaggactgactttctggggcaagagccaaggctcagccaccctggtgttaatccggaggtgattctgagactccccccaaggcctcagcagcccctctgccgctcagccctggccccccaaggcgcactgcacacatggttttgcttttccaggcatcttcccctggtcccctccccctgggtgccttctcaagctccttggcccctcccccagccctcctgggccccctccttcctccttgacccactttagtcccctgttgctgggggaggggagcgcacagccggcggctctgatcctggcgctctcccccagcatcccctggggcgggctctggatggagcctgcaggctgagccggcccggccccagggactggcacacagcgtgctccgagtggcagccaccctgccccctccgtggacagacag

SEQ ID NO: 19043 - DNA, 1047 bp, Homo sapiens
ttttccccaaatatttttaattggcagttggttgaatctgcagatgtggaacccatggataagaagggtcaactgtaaaaggaacatttatctgtttttaatgtataaactactcttagttttctttttatcttgtctaaagaattaataaagatttcctgtgtgcagaagagccacaatgatcacctgataatgcgcgtagtcttcagccttggatgtggtgaagaagggctctcagcagttatgcttctggatggcagcttgactttcatgtcccctttttaattaaaaggtaaaaacaatgttgaattaagtgatgtctttttctttcagacactgaagaacctaaaaagacggatgttgctgagtgtggacctggtggaagttgaggctgcctggtatttgattatatattatgtacatactttttcattcttaacttagaaatgcttttcagaagatattaaatatttgtaaattgtgtttttaattaaactttggaacagcgaatttggatgttccagaggttggacttgtattaggtaataaagctggacctgggactcgtgaggaaggaatgtgcttggggctgttgccatacctgtgcagcattctttcaaaatagtgccttccaatgcttcttccttatgtcccacagacaggatcatcactaagaagcgttcttaaaacggccccatccagtgagattttccgttatacgaacatacttgaaataattttagaatttactactgtggttctgcccctgcatacccagtgggaatgatgcccttgtatgggtaattaggcacctcccacccacccctgacaaaagcacactgggagttttatagcactgtcacatggctagtgttcttttttggttttttccgttttttaaagaaagaggagttacttagtactatagcaaagtaataagccaaataagataaactaagtcatccttgaatagatcagggaattaccagattaccaaaaggtgacatttctactttacttactgtttatctgaaatacaaaggtcaa

SEQ ID NO: 19044 - DNA, 1027 bp, Homo sapiens
aacgatgactgctgtaaaatatccgcacttggactgctttcatcacatgacctaaaaaatgaaattttacatcaatttaaaaaatacatatttttttaccatatcctcatcaattaatctgaatgaattaatagtctaacgaaaattgaatatttttcatttggtgaatatggcaatgtgtttcaaaatgtcaagtgtctttgtccttcaatatagcagttcctcttctcagaatttattctagaaaaaatacaaaagttacatataaggttacattgtttataatttttagaaattgggaattggttaaataactcacaacctttcaaagaaagatgacatcattgattgatgtccatgatatatttgtctcttgttcctgggtgcattagctctgaagagcaagattgggaagctttcacattctctgtagcatttgattattttacagtaatcctctgctatctgagaatattgctgtgttcatgcacagtaatccctagaactccttcctgtcttctcgtcagggatttttctgataaaaacagataccatttatttacatatttataagttatttaccaaataccttcttaaacatgtatatagcttttgatcaggcatggaaataacatcaccagtaataagtaccccagctcacagaatcctctcaaaatgctaataattatatttagtcattttggcctgaaaaattatattccagtagtccatatttgtattcattttctcttgccaagaaactcctgacagttttctcttttccttgatattcgccttcatgtgttttcctaaaaagctgtttttcttcatccttatagtcattgcctgaagatgaaggccatactaggacacttgacacagcaaaagaaatggaggtgattttattttacactttacaagaaatatttaaatggaaaataaggggagtaagagaagtcttgagaatgggaaggcccattgggtaagaaggaaaaaggttagtgagtagagttgtgagggcctagct

SEQ ID NO: 19045 - DNA, 1121 bp, Homo sapiens
ccaaaccatatcacatgtactctaaagtaaagaataaattggcttgtccagaaatactaaagagaagtttaattacattttctaatttgatgaaagttaattgctctctgagttcattttggctatatttgttgagcatattttcttcagctttaagaagagtatagaaaatttacaaggacctgaaaacttataatatatatacctattatagatgaggtttttcccatttgagggagtgtcctggtgtgtgttgattccagggaaaggaaccatgtatattaaaatttactatgtattcaaccgccacaaacttaattggtttagataatatctgttttacctctactttgttttacataaccacagtagtgctcacctgacctataagggttagaccctaattggttaccctaattagttattttcctaaaaataaaataagatagtgtctttatggccaggtgtggtggcttacacctgtaatcccagcacttccggaggccgaggcaggtggatcacaaggtcaggagatcaagaccatcctgggtaacacagtgaaaccccgtctctactgaaaatacaaaaaaattggctgagtgtggtggcggatgcctgtagtcccagctactcgggaggctgaggccggagaatggcgtgaacccaggaggcagagcttgcgacagagtgagactccatctcaaaaaaaaaaaaaaaaaaaaagacagtgtctttacttagtcccttttttcatccacatattgataagcagagatttatgaagaatatcagtgtttagtgctctttactgttgagtttataggtaatattccactttctccaaagaatctgaattacattctctcttatttcgagaaatagaaacttttcccaactttttatctggtgaaaattaggctaaaaccgtttatttcagcatatttctgaccttaccattgcttaatgggaaagaatttcacagttttttgttttttgttttttttctgcatgattttcctctgatctttctcttacagtaagaagagtagaagtgtgtccccagagtgtttttaagcaggttagggtttatcataattgaaaggaattggtatcttagctct

SEQ ID NO: 19046 - DNA, 1798 bp, Homo sapiens
caagatcaggaagtggggatccttccagcttctggaatcagtatgcagcagcgctctccaacgggctggcgatgaaggccaacgagatctccgtcattcagaacggtggcatccctccaattcctggaagcctcggcagtgggaacagctcacctgttagtgggctgacgggaaacctggagaggctccagaactcagagcccaatgctcccctggccggcctggagaaaatggcaagcagtgagaacggaaccaacttccgcttcacccgcttcgtggaggacagcaaggagatcgtcacgagttaaagcagctcgggctggagacatagcattcattcctgttcagaatgcgacctatggtggcctcctactccttgccccccaccccgccccgccccttccttctgttccccagatctatgaactacaacattatgaagacattcttttgtaccttgttcaactttagagttctaagaaagcttatttattagcgatataaccttgctttgcaaacagaatgcaagcgttaactttggtcttctgtattttggactaaatactaattgactagagtgctgtaaacttgctgtaacatttatggcaattgcaagttgccctgctaggcagttgtaatctggcattaacttattttctatatccagtttaatatgaatctggtgttgatgcaatgcctcagtgatgcattagatctctaataaagtctgtatatacatgtacactttgatcctgctggaaaattttatcagcaaacacattgtctaatctttcaaaacagatttaaggaaaggactgaaagtacagactgaacagtgtggttctttgaaaggtttggttttttaatttttattctaaaattcaacctttttttttgtcgatttaaccatttccattttgaactgctatttgtattgtgctttttacttgagtcgtcttcaatgttaataagtttctgtacagtaataagcacgcagaattctttagagaaaaagaaaacaagcgttgttttggtagttgaaactgagacgtaacattttgccttgtaggtatattcacgatagaaaatgtgtgctggaatttcacaatgctgctaagtatagcatcttgaacaaccttcagtggagaaaatgtagatgctcttgtatatacaataagaaatatcactttcattcaaatgtacatatgttccttacaagagcaaatgcttcttcttgatcaagagagcaggtatagtgtttgtttattttgtcttaggtatggaagaaaaaaattggactgttacatgcactttcttggaaagttgaaaggaaagggggggtccaatttctttaacatttaatacttactaacaacagagatactgtaattttactcaagtaatcaaatacattttttttgcaacagataaaacaaaatactgtgtctgtgtttttagagtgcatttccatttagccaggccccaaatgcgttttaacatttccccaggcagcagtcaattgtgtatgtgagtgtgtatccctctttaaatgaggaattgtaaaaggcataacaaacggctttgcatgggcctgcgttttcttttattttgaaatttggaggccctagatattttcccagtatctatgatttatttaggaatggattttatagactccactcgctacccaccccacccccaagaaaagcaaaacaacgaaatgacataaaaagatgttgttggaggttttaacccaacaggtaagtttcttttaagcaagatatttatgccgatttag

SEQ ID NO: 19047 - DNA, 1066 bp, Homo sapiens
gtttaatacagtcagccctgtagcatataatagactgatatatgagtcactccttggcaatgtgtttcttaaatttatatagattgaacaactggttggtaatgtacttagttacagttgtacaaacaataactattagcagggctgaaacaggcctagaaaggctgcactgggctggtgtttgtgaggatcccgaagtattgctgattttcagaataattcccctttgaggctaagggagactctatttcataaacatgagtgtgcttttttagcaaagtagcaataaaagttttatgttacagttttctgtttctcattttctatttgcttaaaattgaattggggaacctaatttccttcaaaaattaaacttaacatccgtctacattaggggcaagataatttgattgcaggggttttgtttttgtttttaaacacttgctttttttttttaacaaataaataacataggtataaatatgtattttctgtttttttttccccaggttagactgccgtgggcactaactgttcatgggttgaaagaaatctttctgagcaacaaagatcttttcttaagggaaaagcttgtgctccaagttcagttcatgtttatttaaaagattaaaatcattagaccagatctcacttttttgtccaaaagaaaattgattttgcttcccataaaagtgggatctgaaagaggatattcaggaatacgcaaatagaggcaatgtcgaaatctgtttgtgcagctgaacaaagcaattctgtttttaccgctgaacatttacttagccttggtgtgaaaatttctgaacagaattgtcacctgtctttagaaagtacttcttttgtaaggcaaagaggatcattttgatctgaaatgttttaatgctttttctttttaaacttctgccaactggagcatttataaaataacgtaccctgtaaatattgaacaatacaaagacatctttcataacagtttatagtatgttgcgtgtgctcagtggaagccaggcagcagttagtggcaaatgatatgccaatcaaaaattat

SEQ ID NO: 19048 - DNA, 1059 bp, Homo sapiens
taaggccatagtcaccaaaacagcatggtacttgtataaaaataggcacatagaccagtggaacagaatagagaacccagaaatgaagccaaatacttacagccaactgatcttcgacaatgcaaacaaaaacaaagtggggaaaggacactattcaacaaatggtgctgggataattggcaaaacacatgtagaagaattaaactggatcgtcatctctcaccttatacaaataattaactcaagatggatcaaagactttaagacctgaaacaataaagattctagaatataacattgggaaaaacccttctagctgttggcttaagcaaagacttcatgaccaagaacccaaaagcaaacacaacaaaacaaagataaataggtgagacttaaactaaagagcttttgcatggcgaaaggaacagtcagcagagtaaacagacaacccctagagtgggagaaaatcttcgcaatctatacatctaacaaaggactaatatccagaatctacaaggaactcaaatcagcaagaaaaacacaatcccatcaaaaagtgggctaacgacatgaatagacaattctcaaaagaaaatgtacaaatggccaacaaacctatgaaaaaatctcaacatcactaataatcagggaaatgcaaatcaaaaccacaatgcagtgccaccctactcctacaaaaatggccatgatcaaaaaataatagctgttgctatggatgtggtggaaaaaggaccacttttaaactgcagatgggaatgtaaactaatacaaccactatggaaaacagtatggagaatccttaaagaactaaaaatagaactaccatttgatccaccagttgcactactgggtatccacccagagaaaaagaacccattataggaaaaagatacttgtacacacacaattcacaagatagcagcacaattcacaattgtgaaaatatggaaccagcccgaatgccgatcaattaaggagtggataaagaaattgtggggtgtgtgtgtgtgtatgtgtgtgtgcctgtattgtatgtgtaca

SEQ ID NO: 19049 - DNA, 1050 bp, Homo sapiens
attctgtctataccactgggcctccctgtcctggggcctgccatctccgagaagaatcttgctctcatccaactctgcaaatcttcataacaactcgttcctctggaaccttctggagaccacaaacatctgcagactaaacctctccagtcctagtaaacaaccacatgtttgttgtcacttcggctggctctgagctcatttttttggcccctttttctagctttctttggctttatgcagttacagtgtcattaaggcccataatattccctgcagtaatttaaaacagccagattataccctgggattaactgagtggtttttgagacatttattgtggtattctcccaggaggtttgtattattgttgtaaaatgttacatcccaaactaaataacccttctgcagggagaagaaccagattgcactgacttcttaggatcattaagtggaaaggaaaagtttttcttagaaaacttatgggacccagtcacctgtatggaatgtatatctcagacaagatgagagaaacagccatgtttctgtcacattgtttactgtcatattaaagatatctagttttaaaatattcagtttcaaactattgcgaattttcacaacactcattttcatagctaattgctgctgacacattttgaagtggcgaggtagtattgaacgctgtcatgtggatacttcagttgggtttcataatctgtttgagaattttgtttgttttatcttgtggtaactggaggccattgaaaagcttaccaccttttgggttaaagagcagtggatttctcttggtgagccaaactggatccattgaagagggcttggcgtcaggggccaccagcagtggccttgccacacagataccagcttaaggtgttgctggtgtgaacatacacttcttggtgtaactagaccagtgcacgcagcacttttttgggctgtaatgcttttagtttggaaatacaaatagagatgtgatgtggtatgtgggagagtgtattttacatgtatttttgcctactgtagtag

SEQ ID NO: 19050 - DNA, 1032 bp, Homo sapiens
aattgatagtggaaagtaatagtggatctttttgttcaattattttatttctttgttgttttttgtttttgctctttaaacagccatcagaaaaaattcggattgagatcatagctctaagccttaatgattctcaagtaaccatggatgacactatccaacggctgtttgttgagtgtcgattctacagtcttcctgctgaagagacacccgtgtcacttccaaaacccaagagtgggcagtgggtctactataactatagcaatggtatgtatgattcatttgtaatatagacttttatgtttgtcttttttatttatgaaagaagtggaaagaacagagagaaagtttatttctctaatattcacataaattcatggaagtcttgtcagaattgattaataaaagtcaaaccagtagcataaagattaagaaaataaagttgggccaggcacagtggctcacacctgtaatcctagcactttgggagaccgagacgggtggatcgcttgagctctggagttccagaccagcctgggctacacggcaaaacctcgtctctacaaaaaaaaatacaaaaattagccgggcatggtgttgcgctcctgtagtcccagctactcaggaggctgaggcaggaggattgcttgagcctgggagggtgagcctgcagtgagctctgatcttgccaccgcactcttgcttgagtggcaaagtgagaccctgtctcaaaaaagaagagaaagttgaagtaataccacagttaagagaaaacaaaacaatgtgaaaaaatatttctaagatggtcctgctatgtcatagttcaacagaaaaatgtcagctaggtctataattaggaatttaatttaaatatatgatatttcaaagaaatatctttcaaagaagtcattttttaatcatatgattcgaagctttcaatgttctatttattgtctacctttctgatcaatgtcatcacatggatgtttttacaatacgtgtatatatctctctcagtgtctagatgttcaa

SEQ ID NO: 19051 - DNA, 1057 bp, Homo sapiens
ctggcggggaaaggagaggacgccgagcaccacgcacggccttttgccccggggtaggggggaaccctgctgggacgcattttgtaaaaggggacgaaagtcactttttcagtcgcccctgtcggccctgcgacagctctccaggtccagcccaggcaccccaggcgcggccggagggtacagcgcttgtaccttctaggggaagccttgcgtggctgggcccacaggcccctggggcgggtggcggttctctgacgcccacctctttccagccccagacctcgggtcctgacgcctcgtgcccaccctacagttaaaccccaacacacacatctacaactggacataattttacattgcgacaccttcctgacgatcggccccaatccaagtaggatctccccgccctaggcagcctctgcgctcctgaatctcacctcttttgctactactgtctctctcttccaggccccagaaccatctggacgccgccctggtcttatcggctctctcctcatcctagttctttaaaaaaaacaaaaaaacaaaaaaaactttttttaatcgttgtaataattgtataaaaaaaatcgctctgtatagttacaacttgtaagcatgtccgtgtataaatacctaaaagcaaaactaaacaaagaaagtaagaaaaagaaataaaaccagtcctcctcagccctccccaagtcgcttctgtggcaccccgcattcgctgtgaggtttgtttgtccggttgattttggggggtggagtttcagtgagaataaacgtgtctgcctttgtgtgtgtgtatatatacagagaaatgtacatatgtgtgaaccaaattgtacgagaaagtatctatttttggctaaataaatgagctgctgccactttgactataacccgcctgtctgccccctcgacggatctgtttggtggttttttgttttttgggttttttctcccctcggttgtttgaagaattcgcgggaaaggacgagagacgaatcgggaccgagtagtcaaaggacagcaatagctgaggaggcgcaga

SEQ ID NO: 19052 - DNA, 1032 bp, Homo sapiens
cactcgcgctccctccgcgcgtgtcccttccttctccatgtgcgtacagggcgcgcagtatgagctgaaggacagccccggggtgcagcatccggccgcggctgccgcgtttccgcacccgcaccccgccttctacccgtatggccagtaccagttcggggacccgtcccgtcccaagaacgccaccagggagagcaccagcacgctgaaggcctggctcaacgagcaccgcaagaacccctaccccaccaagggcgagaagatcatgctggccatcatcaccaagatgaccctcacccaggtgtccacctggttcgccaacgcgcgccggcgcctcaagaaggagaataagatgacttgggcgcctcgcagccgcactgacgaggagggaaacgcttatgggagcgagcgcgaggaggaagacgaagaggaggacgaggaggacggcaaacgcgagctagagctggaggaggaggagctcgggggggaggaggaggacacggggggcgagggcctggctgacgacgacgaggacgaggagatcgatttggagaacttagacggcgcggccaccgagcctgagctgtccctggctggggcggcgcgcagggatggcgacctaggcctgggacccatttcggactccaaaaatagcgactcggaagatagctctgagggcttagaggaccggccactaccggtcctgagtctggctccagcgccaccaccagtggccgtggcctcgccgtctctgccgtcgccccccgtgagcctggacccctgcgctcccgcaccagcccccgcctccgccctgcagaagcccaagatctggtccctcgcggagactgccacaagcccggacaacccgcgccgctcgcctcccggcgcgggggggtctccaccgggggcagcggtcgcgccttccgccctgcagctctctccggccgccgccgccgccgccgctcacagactggtctcagcgccgctgggcaagttcccggcttggaccaaccggccgtttccaggcccacc

SEQ ID NO: 19053 - DNA, 1039 bp, Homo sapiens
ataaaactgaataatttatttttacttactatttatcatggaattactttgaataatttatttttaatggtataattggacagtaaaatttataaactcagtgcttttcataaaaatcaaagtgaagtttgtaatattttatacaaatagaattattatttaagagaaataacctgtttatgcctaattacagtttttaatcatttcagttacctatttcttttaagaataaatttagtgggaatatcagttccagtcatgggtaccaaacttttttagtgacagagtacacacaggtatgtaaaacttgtcatttctcatcaaatagaggctgctgaatataggcaggtaagaaaagctatgagaaagaattgttttgcagaatatttgtctagttgtcagagcaaggaactgaatttattgacacagaacattttattaagtaaaaaaaatggttcttataacaaaaaaaaaagctaattttacagaaggcagtagttaatatagccgccaataaaataaatgtttctctgaatactttccgaggcattacagtgatttttaactaatatgaagtgatatataataattttaaagtaacatccttgagttttcctattattaattgcttatggaaattgggtttcacgtatgactgagagctaaagcattacagtgagttagaaaacacaacacaaatgtaaagaaaatgttaggtggtgagtaatctgattcctttttgtttgcctttaagcttagttttttgttttgttttactttgttttaaaccatgtataaaattgttgaatttaaaagataagaggattaagtaatttcttttttcctcctaaggataaatgtaggaaaaatctaaacacataggcagattggttgagttttatatctgttatcggccacatttattaagattcatatttcatgtatattagaggtattcacatgtattaaaattcttatattccttctatataaaatagatgtagggggttcccactcttgaaaatatgaagaaaagatg

SEQ ID NO: 19054 - DNA, 1074 bp, Homo sapiens
agagtgtgggggaggcgcacagtgtgagcccgcccccacgtcgtggggtaacatctgttatcaaactgctgtcgttgttgtggaagcatgtagactgtgccagaggccagacccacgggctcatgcacccctgagccagcagggcatcttggaaaaggaactcttggttcgatacctggagcagaggaggggaaagtccagggctatagggtgtgatgaagtcacccctttctgtcccactacatctgggactgactttccgagcctccagtccaaagccggcttgatttccgtgaactctggtgctcctgcatctcatgagtgtgccccatgggtcccctcccctctcagcatttccttgtcccgtctggacctggggagtggttaggcagcaagctttggtttatggttttcattcattggtgaagtaaattaggcagtgctaaagcctgtgggtttggtccttgaacaagatgtgggccttgcaagatgggagagtaaaccttgaagggctttattaaagaaataaaaaagaacttttgtatcttttatcctgggagcactgcgttttcctagctgtgttattcctggtttaattcagcagagaaggtaaggtgtgaacctacctgccttggagagggcccaggtcccaaatctcttcaaattcttcacatgtttaactttaaggatttgaaccatgaagtcataggttacagacctcagttttatgccccattggattactttttttttttttttttttttttttttttttactctttgaaagctttgttttgtggtagtccttttgggaagaatccagtattatccacaattattggcaaagtttaaatgtattttacataacggaaagtttttagaatgttgaaaagtaattgaaaaaggtgataggtaaatttttaggcaaagataatttatttcaataaatctttcaaaagccttaccttgaaatgctgttagtaaatttctgtgatttttttttttaatttgttttgctgagagcatagctatttgtttttattgtaaaacaataataataataaaaagcaaact

SEQ ID NO: 19055 - DNA, 1049 bp, Homo sapiens
cagacactcaacgccagtctgtgaaagcagccgggagggaggctgtaccctgcacagccacaggggtggagctgcccaagaccacggaaacccgtctcttgcatcagcgtgacccagatgcgagacatggattcagcggagatcattttggagctttaagatttgactgccctaccttattttggacttgcatgtggcctgtagcccctttgttttggccaatttctcccatttggaacagctgtatttacccaatgcctatacccctattgtatctaggaagtaactaactagctgttgattttacaggctcatagacgttagggacttgccttatctcagatgagatgttgtactttggacttttgaattaatgctgaaataagactttgggggactgttgggaaggcatgattggttctgaaacataaggacatgagatttgggaggggccggggcggaatgatatggtttgactgtgtccccaccccaatctcatcttgaattcccacgttttgtgggagggacctggtaggaggtagttgaatcatgggggcaggtctttctcctgctgttctcgtgatagtgaataagtctcacgagatatgatggttttaaaaagaggagttcacctgcacaagctctctctctttgcctgccaccatccatgtaagatgtgacttgctcctccttgccttctgccatggtcgtgaggcctcctcagccatgtggaactgtaagttgattaaacctctttcttttgtaaattgccagtctcggatatatctttatcagcaatgagaaaacgacaaatacaaatgctaaacagcatgattgctaggtcaaatggtaaaattgtttagttttgttagaagctgccgaatcatcctccagagtggctgtatcatcttgcgttctcaccagcagtgaatgagagttcctgttactccacatcctctccagcatttggttttgtcagtgttccagattttggctattctaatatatatgtagtggtgtcttgttttaatttgcatttatctaatgac

SEQ ID NO: 19056 - DNA, 1080 bp, Homo sapiens
ccactgtccatctacagaactcttttcatcttgcacaatcgaaactttgtaccaagcctgtccaacctgcaggctgcatgtggcccaggacagctttgaatgcagcccaacacaaatttgtaaactttcttaaaactatgagatttttttgcctttttttttttttttttttttttttagctcatcagctatcgttagtgttagtatttttatgtgtggctcaagacaattcttcttccagtgtggcccagggaagccaaaatattggatacccttgctctatacccattaaacaattaactactaattctcccctccctctagcctttggcaaccattatgctacttgctttctctatgagtttaactacgtaggtacctcatataagtagaattctacaatatttgtcattttgtgactggcttatttcacttagcataatgtcatcatggttcatccacgttgtagcacaagtcagaattttcttcctttttaaggctgagtaatatttcattgtatgcatataccacattttatttatctattaatctgtcgttggacactcacattgcttccacattttagctatcgtgaataatgctactgtgaacatgagtaggcatatatttctttgagaccctgcttctaattcttttgaatactcatgagtcttttttgtttgtttttaagactaattttttagagcagttttaggcttacagcaaaattaagaagaaggtacagagattttctgtatgcctcctgtgcccacacacacacagccttccccattatcaacatccctcagcagagggtatgtttgatagagttgataaacctgtgttggcacatcataatcacccaaagtccataatttacatttgtgttccctctataggattggacaaatatatagtgacacgtatccacatgatacagtcttttcactgccctaaagattctgtatgcactctgcctttcctttcctccccctagcctctagcaaccactgatctttttactatcttcatagctttgcctattccagaatgtcatacaggtggaatcctgcagtatgt

SEQ ID NO: 19057 - DNA, 1029 bp, Homo sapiens
agagacagggtttcaccattttggctaagatggtcttgatctcctgaccttgtgatctgcccgccttagcctcccaaagtgctggattacaggcgtgagccactgctcctggccacacttgattttctgttccatgcatcagtgtttctttgtgaaggaatgaaaagcagccttaaatgtgtagcttgataattgggttgttttacagccaattcttggtgctgttgtatcttaggctcctgttttcttcgggaaataacagaagcagcagacttcttggtgctgttagtctacaagcctttttgtagaatagaacaatttaaaaagaattttgaatcagaaaaccacggcttttaagattaaagaaaaaatacttcctaaaagtaaatgtgaaaatgcctccaagtgagtagtcatttgtgtagcttgtgaaagaggagccaaagctcatgtgttgtagaagctttagagccttgaaaagcttcctcatctcccaggctgagcgtgtgagggcgctgggctgggctgcatccagcccccctggaaagcaggattgctcagcagtgaagggttctagagcttgcctgtctggcttcacatcttggccatcatagttaaactgtgtgatcttggacaagtcccctaacttctaagtgcctcagagaccaaagaccaagggtactagtgctatatctttgagaaggatactataagaatgataataggaggtaccatgtggagtgtagtgaggattaaatgagctagtccacgtgaaacacttggcatgagaagcctgccatacaagaagccctcagtgaacaccagccattacagtggctaccgtgagagcagatgacgggggaaagagtcagggctctgaaacttacactggattcttgtttgtttcagggtctcggattgcgagctggctgccgagtttttcggttgaagtgatgcacaccaccaacattcttggcattacgcaggccagcaactcccagctcaatgcaatggtaaggtctgctagct

SEQ ID NO: 19058 - DNA, 1095 bp, Homo sapiens
gctaacggcctcgctgcagcctgagccgccggcgcccgcccggccgagcgccgggggaccccgggcccgcgatgtggcccagtacctgctctcagacagcctcttcgtgtgggtgagcgaggcggccgggcccgcggggcaggggcggggtccgctgcgtcaccctttatccgcgggggcgtggtgggcctaggggcccctccgccagggacccccgagggcgagcgcctggggggcgcggccttgctcgcgggagcgctgctgagggagagtggtgaggcgcggggagggggagggggccgcgggcgggaggaacatcgcgtggggttgcgaggaggaggccccgaggggcaggccagcgttgagggctccgggaagggggtcggggaggcggcgggtgatggtctgcgctggggcgcggacggggcctggggcaggggaaggggttaaggggcagtggggaggaacgggctgggttttctgagggaccctcgggagaaactagaagatctcagagggcaggttcaaggggaggtcgggatctgggagtgcgttatcccgagggttggacgaagtagagtgaagttgaaagcttttcccacttggtcaggcatgggattgttagcggattttcttccgacgaagaggagagggcagaggggagaattcagacgttgagtatgggggaattttcggcactcaggtgtctttggacattccggttggagagaggccgtctcccacaacttttttgccgcttagtattcgattgtcccctttgggagctgtgtaatgaaacaaacaccaaactgtgcttccttttctgctgcctttacctgatgttcatgacagttttcctttgatgtctgaacgcagcaaaacattcacagtgtcaagaggcagcccatcattttaactgaatgtttcttatttgaggatctattctaacacagtttccaggttgtctgcccctgcgagataagcagcattgataaggcacacatgctggtttcgttcattagaacagataatttcagactgatcagatcaacggtattttggctagagaattttgctttcatcttggccttgaat

SEQ ID NO: 19059 - DNA, 1021 bp, Homo sapiens
atggtttgggaacttttattgtatgtgatccacagatctcttagcttgtgctattcaggccactttctctgtgactgttaatgtatctggttttcatgacagtttaaggaacctccaaagcctgggacaattgcctcaattcattgtaccctagggatggctctgatatataattattctaactggaatactggttaggtgccaatgagtaacacagtgggaaataacataggcttttataattagataagagttgaatagatacagttaaatcttggcttcacaacttggctgagtaatcttgggaaagatacttagcctctcttagcatgtgattctgtgtaaattgaggatgatgctaatacctccttttggcagcttctgcttttatctcactttccccttatatctgttttcagcaattttaaattccccagctctcagatacaactccaacagcaaaagtagatttctgaatgtattgtggagagatttatacaagaattgtataacccttagactttttttttgttctgtgtcagaatttttccttcccgggtagcaacttccctctctaattctcttcatccctttaaattctctaaaatatacatatatattatatatatatttttatatttgtttcctcgagtaatttggctttgcccatctggcaaaacttcacttagactgctcttctggtattcctgaagcatgcaccttggcatacggggaggtttgaggttggggctggaaggaggagcaagaagcatcttgtcaaatgcctcacagcttatatttgaatttttaatgtaaacaggtctacaacaggattctagactgtttaacttactgatcatatatatatatatatatatatatatatatatatatatataatttttttttttttttgggagacagagtctcactctgttgcccaggctggagtgcagtggcatagtctcggctcactgcaagctctgcctcccaggttcacgccattctcctgcctcagcct

SEQ ID NO: 19060 - DNA, 1022 bp, Homo sapiens
tttgatccgtaactatttgactagattataccaaaaagaaaagtctccaatacttagatgacgttcttgaaaaagtttcccattctttaggcctaaagaatgtgatccattcctctctgagcatttctagactccattatcatcagatagctcccagagaggagattgggatggactggtggttagcaattttgtttatgtttgtgctatgttatatattctgtttgtttaaaactagggtttatgtgatgggtacatatggacataaagttggaaaaaataaacactgtatactccaaaggtggggagggtgagggggaggcgagggttgaaatacttcctattggatgttatgttcactgtttcagtgatgggttcactagaagcctaaaccttagcattacacaatatacctatgtaacaaacttgtacatgtacccgttgaatctacaataaaataaaaataaatatatacgaagaggaaaaaaacctagggtttgtatactgttagtctggggaattgacatgaattcaagcatattctcccccttcactttgatacttgttttgattgccttattatgctgaaatatgttcttagtgacttggtagaaataacaattattgtgttatttgttatctccaaattgtattaagttgaaagctgaaattcttaacttttatacagacctggtggtgaacttaacccaggagaagatgaagttgaaggactaaaacgcttaatgacagaggtatttttctgtttaaccactttgaataccatcaacttactagttatttggcttttaatgtcttgtaaaaaggatgcttattttggaatatttagttttcaataaatacaacttaaactccagaaggttagtacaatgttgatttttttttacaagttgaagttacacttatttcaatttttaaaatgttaaactgtgtcacagcaatggtaaattaaaactgacatttaagtattactgtgctagacactgttctgagtgctttacatg

SEQ ID NO: 19061 - DNA, 1049 bp, Homo sapiens
ccgcctgcctcggcctcacaaagtgctggcattacaggcgtgagccactgtgcccggcctcataatcttcattttaagtgatggtcacttattatcacttttgagatgcatttgtttctgatcagtcatttatttatttgttctctctcttggaaatgggagacttagaggataggagagctctctaaagtatctgaatagtttttatgtggaagaggaactcttaacagggttgttgtaaaaggttgcatggtggaagactgggctaactccgtagtttctgaacttcagattcaacatactttatacatttatatataataaagatacaatttttatatagagctaacatttattacgtacttctgtgtgtcaggccctgttgatatatgttaacttcattaggcctcagttatacccaatgggatatagtactgttaatttctccatgttctggttattgaaccccagatgaaaagaccaagcacagaatggttaagaaacttgcaagatgctgtggatagtacgtggcagagctagattctgaacctgagcggtttggccattaagcccatgcccttttgcactgtgctgtgtgtactatatgtactggctcttagcagacccgtttcttcaagtgaagcattgtgtgaaggcctatgaaaaacagcttttatttaaaaagaaggaagcacagctggttgaggctctttagggtccctcttggccccagcagtcataggtatctcctgagaagttgtagggcttcatagaatactcttgaaaactgctagactaaatgacctttaaagctgatttttatttttaaattttgtggtttttaaacatgtagcataagcaacttttaaatttgtgttttatttgtaggttgatgctcgaagtgaccgaactggggaggtcatctttaaggacaatttttcttctgcaattgccggtgtggtagagggagattaccggatggatggccacatacagttaatctgctgctcagtggatggggaaagtaaattgggatgagaaaaatcctt

SEQ ID NO: 19062 - DNA, 1038 bp, Homo sapiens
gtaactgggattacaggcacgcgtcaccacacccagctaattttttgtacttttagtagagatgggatttcactgtgttggccagtgaactcctgacctcaagtgatccacccaccttgggtggtcttgacctcctgacctcaagtgatccacccaacttggcctcccaaagtgtgggattacaggcatgagccacctcacttggcactgtctaatttttcaaaacattttctcgtagagatagggcctcactatgtttcccaggctggtcttaaactcctgacctcaagtggtcctcctatctcagcctcccaaagtgccaggattatacgcataagccaccatgcccagccaagccctgcattgtctagattgaggtctttgtcattgaggtggcagagtaactgtgggtttcctgtaagaaaaagagtcccagctcctagatgacattctgcatggccttaaaatgttacctgacaggcttcagttttctcatttgtaaaagaacacaactggaaagcaaaggttgtgttaaattggtttctgaattgctcctctctcccacttgggaaaagcggcccttcttaataaagaacgttattctggtgagtccttctgagcctattctagtccagggggctacccgattttttaaaatgtttaaaaagaaaagaatgttattttgtagctgatgtttggccttaaaattgtatctgtgctagctggcttattggtcagtaaataagaaatggtgtaatacgctgagaacttaatggaattgttaatattgctcacagtgtctctcttaatctgttttcagattctcacggctgtgtgagcacagggaaatcaaagcactctaggctacactccagagtagcttgttctccaactcggatttgatggggaacaagagagtgtagtcaggctctggggttaaaaagaccttgattcaagtctcagctctgcccctttactttcagaagtcctttcacctcctggagcctcccttcctccttcagtttccccatctctaaa

SEQ ID NO: 19063 - DNA, 1023 bp, Homo sapiens
ttggcaaccagccatatgttttgaagggagtgtattgatgcagtcttgtggtttggcacaccacccatctgctgcagatgttcttaggaacactgcctacatgtaaaaatgtcatgctggtatagcaacagaggggaggagttatcctgagaagggctcgctacccaaaccatgaattattcctttcaagttctcacataagctttcctgcaagactagggactcgcaggatttggacctgggtcagttttactggaatatgccaagggagggctctccaggtgatcaatttgttatcccttgagactgctcttggtggtcgcagaatgggtgttgtaactgtttcccttagttcttagatcacctttagaaaaggctctgtagtagcgtatttggtgacctgcatataaccccttttgggttttgaaacaacatcatttaatgtttctttgtgtagtaaggtagtctcctggggcaggagttcctaatctgtccgaccctgagtttattggaatcacctgggagtttgttaataatttatattcgcaggccttgcactaattctggttcagtaagtttgaagtgaagtctgggagtcgtagttttcaaagttccatgagtgattctgctgcctggtgaaggtctggaagccattggcatgtatatgtcatgaagcataagaccaaaacaagcagcaatttcttaccttcttcaaaggaatattctttactctcttctagtttattcttttatttattgttagaaaaaactgtcagatacctagttcatgaatgtgcagtctttttagttatgagcatctgaagctataaattttccttaactttcattgtatatgagttttatatttccttctaagtattttaaaatatccattatgatttcttctttgactcaggaattatttagaaatgtattttttaaatctccatattgaggtaacaaccatatttcagtgaggggaaagataagccttccccctcgccacacacgttttaacacctt

SEQ ID NO: 19064 - DNA, 1030 bp, Homo sapiens
tttatttatttattttgagacggagtctcgctctgtcaccaggctggagtgcagcggcacgatcttggctcactgcaacctccatctcccaggttcaagcgattctccttcctcagcctcgtgagtagctgggattacaggcatgcaccaccacacccagctaatttttgtatttttagtagagatggggtttcaccatgttggccaggctggtctcaaactcctgggctcaggcaattcgcctggctcggcttcctaaagtgctgaaattacaggtgtgagccactgtgcccagccgaagtcaacattttaaaagaaacaagagtgtagtgacttcgcttgaattcagtctgtatctgtggtggcatgattgccactgagttggccacctctgcagaagtctgaagtgttcaacataaaactaatccattttgactcctctaccacaaattgtttgtttcatttatttgagctattttaaattggaaactggtgtcattaatgtttaagaaagaaaggagaaactgagtagagtactatctcttgacctaatttctttgtgagcatattatatactcacctaagtatcaagtggaagaggaagttgatccctggagggaaatttccataggttaaaagcatgggatttacagtcagatgaatttgggttcaaatcccagctctcactttatccatgtagcactcactagctgtgtgacttgggcaacgtaaattgcctcagtttccagactgtaaaatggtaataatatctagtttaaggctgttctgagattcagttgagataatgtttagaagatgctttgaacaatgtagctaatattaaatggtacagacatagtaagtattcttgatcactgcagattcagtggaattaaattttcatattttgatgaaagggaaaataaccagtattcagtttgcaaatttaaatgtgttgtttctttttaaaaacattgaatctgtggttgggttatttctgtcaatttatttgccttccttgccaagtcac

SEQ ID NO: 19065 - DNA, 1043 bp, Homo sapiens
ccggataagctaggtaaccgtggcttcctcatggggtgcacacccccttccccctataagagccttggctgccacagctttcctgcaaggcagattgggagcaggggtggacacaggttctgagtgtgccctgaccactggcagacccatctccacaggctgacttgccagagaccaccccaagtggaaaattctgggggctgggccagggtggatctagggctcggaggacctggagtatgtaccatctgggggcccttttaaagagagagaacataaaattacatagacacaggcaggtacaggactttgggaggggctcgtgtagtgaggggtcctgagggtgggctgccgttgggtgggcccagggggcatcggggtggccttggttgcacttgccctctgggctttcctgaagagctggggttggctctgtcctgtggagggagagggtgcgggaggctgtcagcaccagcccaggtttctctcacctgaagtcccaggtgtgatgggatgcttgaacataggggaacctaaggccacagccttagaagaagccacagccacatcagtcatccctggtgctgggcaggaggcctgggtgtaggctggagctgaggactgaggctcaccttgctcctgactctgtgcccacaggtagaacacctgaaggagaagctcattagccaggcccaggaagtgagccgactgcgatctgagctggtgaggccacaaggctgtcctggggtagcgcagggcctggcctgccttgtgcagatgggccctgccaggggcaggggtgcgaccctctctctcctgagcccgcatatcccaccctgtctcagaaacacaccgagagccttatccccacctcctagtaccctcagaggccttgtggctccagggggtgggaggttccttctctgttgctgacattaaacgggagtgtgaaccctggtataaatatgtctctccttgtgactttcacactcagaatagggtgggggcagcagggagagcaggctctgggtcaccacccttct

SEQ ID NO: 19066 - DNA, 1047 bp, Homo sapiens
gggaggcggagcttgcagtgagctgagattgcgccactgtgctccagcctgggccacggagtgagactccgtctcaaaaaaaaaaaaaaaaaaagccagtttttatttttcttttaacttcttaacataattttggacttaaaaaaagttgcaggaattcccatatctgtttcacccagactcctcaaatgttaacatttgttttatccttctctttctctctcatatacacacacatttgtgtacatatacacacacctatataatgacatttatgttatgtatttcttcctgacgtgcttgagagtaaatcgtagtcatccctaaatactttggtatgcatttcctaaaaatagtttcttacataaccctacaatgccatattaaaaaattagaaggtaaccattgatgcattgctgttacctaatctacagctctcattcacatttgccagctatccttataatgttctttatagcaaaggaaaatcccagattacatgatgatattcagctgtagtcatgtgttacattcagttgtcacattttaaaagtctggatcagtttgtttcatgaatgacattgacgtgtttgatcttacaggccggttattttgtagtgtgtccttccctggctattttttaatcagattgtacagtgcttttttcccccaaagtttcgagctccctcgttaatgaaaaagggactaaggagtaaggtttctaagtggagtcggggaacatgcacagcagccacatctgctctcctgggaaccctggcacagcgggcggagagcgggtgtcatcatggcagctggctcacaaggacgcagcgagagcccagcctgtcagttgagccccctgttataggtgatgcaagtgctcttgtttcatagtcctctccttctctgttttgttatgtgttcaaagctgtatcttagtgaccaacaaaagatgaaggtttctctggcatgtgtgtatgttatattttccccctcccctccccttccccaccccacacacaggcaaaaaaagtcttgctttattat

SEQ ID NO: 19067 - DNA, 1113 bp, Homo sapiens
gggggtgatgtgtgtagaggaaatacgcatataggtgtcctctcagcctcagaacacccgccacaacccttcccccgtccacagccctgcatgttttcactgctctctcccgttttggggtttgtgattattgatttagggtctgagacaaatggctctggtttctgggccgcaagatgctatggggtaaggtgagtggatggaaagcatacaacgcagtcctgggcttcaggggacagcaggaggctggggtgtaggggaagcctttctcttctacctgacccttgttcatgtccagaaccttcagcccccagtaagccccagcccaggcggctatggggtgtgggactgtagaagcctcgctgccttgggccagttgactaaataaactctctcttccttagtgatgcgtccgggacacactggcacagcctggccagagctctgcctgaaacaccacactgctactgatggcgttgccctctggggaacctgggggcaaaaaaggggtctccaggaactcagctacccctgcctctggccacctgcgggctcccaaaggcagtcaccacgaagttctcaggggcacacacaccacacatgggctctctcctccttctccctcacccccagtcaggtcactgtggggacagaggaccaggcaacttctgcctcggggaggccttggctcagaattgggacagggccaggaggtggcagagtgtgggctggaagggacagtctgtggggttcctgccctgacggttctccatgttctgtcttccttgggcagagaaaccccttgacgcccctgcctgcgtggccctacagcaccagctgggcccagagagcaccaggaaagtggctgcctggtccgagcgcccccttgtggctgttgtccagatgattgtcacatgtgctatgagacagaaacaggtgtgcttggtggagggtgggggaaggggtctcccagggctcccacgccagtgcctgagctggccccgcacccctgtggcccagcacccaccctctcgaagcctctctcatctccaaacatgcctgcccaagggctcacccaggaatggcctggatccgtagcgaatctccctccct

SEQ ID NO: 19068 - DNA, 1869 bp, Homo sapiens
gaaactttaaaaggtagccctttagaggggtgtgtgtgtctgtgtgtgtgtgtgtgtgtgtgtgtgtaagagacagggtctctctctgtcaggcttgagtgcagtgatgtgatcatgggcttaagtgaacctcccacatcaccttctcgagtagctggtattacaggtgctcactgccaagccaagctaatttttaatttttttgtagagacaggtcttgctttgttgtccaggtcgttctcaatctcctgggctcaagtggccctccctcctgagcctcccaaagcgctaggattatagacatgagccactgagcccagctgccctttagattttgagggacaagttgatccaataatttggatcagggtaggtagggagccctggattttaactacagcagagccttttatgacaatgaagagcacagaatgaacttaaatcagatagaatttagagtgtgtgtgataggcaactgaaagggatgtttggagagtggaaaggacagggaggctttggaaggtatttggtacttggcattgagatttggtttctggctgtgatagttgggccaagcactgtatttttcatggttttgaacgctttctttctcccataggctgtagagggcttactagatgccacaagtggtgctgatgctgaccttctgctgcgctacagggaatgccacctcttggtcctaaaagctctgcaggatggccgggcatatgggtctccatggtgcaacaaacagatcacaaggtcagtagccatcttcgaaaagtagtgagtattggactgcgactgccttttgacatagatagtactgtttatgtccaggggtttcccttttttctagtaggtaggtcggacacttagacttcctacttctgagaggtgagaattgttaagtagttgttttccatctggtctctaccttctccccatgttggatatagaaaaccagtaccttgttttggggaataaattgtaggtcattgttttaaaaggttacagtgatttctcagaagtggtattcgtgtataagtattttaatgtcttaaatggaatactctgtatcctaggatttgaaaggaaagcttgggctatctgttctatttcattactggctgtttttaaatttggacactgatttggagttgaatctcaaggcattcttagtttggagcaaatttccattgagtaaaatgggcccttttacagtatggttaagcctatatgagtaaagatattgaactttttctaggtgcctaattgaatgtcgagatgaatataaatataatgtggaggctgtggagctgctaattcgcaatcatttggttaatatgcagcagtatgatcttcacctagcgcaggtatggaaggaatttacttgcacggacaaaaggactcagggaagtacgtttgctcttaagtgttttccctctcacattatgttttctgtgttgccagtcaatggagaatggcttaaactacatggctgtggcatttgctatgcagttagtaaaaatcctgctggtggatgaaaggagtgttgctcatgttactgaggcagatctgttccacaccattgaaaccctcatgaggattaatgctcattccagaggcaatgctccagaagggtgaggatgaaatgctttgagatccctgtgcatttagtagtcttctaatatctttaggaatgaatatgcagacttactaacattacttgttataactgctttaccaaccacatatgggtgggtagctttggtaagggctaatattgtcacttgaagtatgaaagcctaattgactgccaagtcttcttggcacagagcagtacatacggtaccagacttagtgtca

SEQ ID NO: 19069 - DNA, 1028 bp, Homo sapiens
ttaattttaatagtttttgtaagaagtcttttttctataaactttattctttttacattttcccaagctagtggagaagttgctttcttttaagagcacttgagccacaaattttaaataagccagcagtgtgtctttaagtagttaatgcatattgtaatgaacagtttgtccattaaacttggatttaaaaaaaagacatatctattattgtgtatcacagggtatactgaatacatttccctgtatggagctcagtttctgttacccgaattttccattggttaactttaagtagaaactggtagtttttggttaatcttgatttacaaaatcatgaatgtgattgccagtaggaattggattgtcttatttaaacaaggtgttgactttgtcctccccaaccccccagattcccttgtttcaggcccatccacagttgaagcagtgtgtgcgtcaggcaattgaacgggctgtccaggagctggtccatcctgtggtggatcgatcaattaagattgccatgactacttgtgagcaaatagtcaggaaggattttgccctggattcggaggaatctcgaatgcgaatagcagctcatcacatgatgcgtaacttgacagctggaatggctatgattacatgcagggaacctttgctcatgagcatatctaccaacttaaaaaacagttttgcctcagcccttcgtgtaagttggctatttccttggtataggtacaaaacgtattactgcttgtctgtaataatttttttctttgtctatatatggcactgggcgttaccacttattcttaataatcaccatatttgtttgatgtcttccatcattttagattgtaattctgtgaggcaaagcatcatgtctgtgtgtttttttttttttctgttatattctcaacacgatgtttgacagatagtagatacccaaatatttgttggtttaaataaattaagatttaaaaaggaaatgtgatatctgacaatctcatttctgttaaccaggaagg

SEQ ID NO: 19070 - DNA, 1012 bp, Homo sapiens
gcaaggactagacattatgttgattcctgttttggggataagcttggcaaaatacttttctttggttttgttataccattttggggggtatattccccgcttttgaaagtatttttcttattctaggacttggatgtgaaatcattgctgctagaggcttatgttaaaggacaacaagaattgctctatgtagtgccctttgttgccaaagtcttagaatctagcattcgtagtgtggtgagtagattttaatattttatttatgactaatttctaagcattgctttgttttagcatgaggtcaagagattatattcttagttcttgtgaggtaaagctagttaagtctgttttcctctatggcacttggatttccaatttgagaggctgggtgaaataagaaagattataatggttggctttggtttttggttttttgttttgttttgtttttgaaatgtgatataggtgagaaggctaggggttttgttatggctacagaggtataagtgtttaactatgtttaactgtttttggttattttttaatccttgttttttgttttttatttgtttgactcccccctacccccttatgttgtattgaattgttttaaataatccaaattaaagggcacattttgggccagcttaacataatagcttttctttaggtttttaggccaccaaacccttggacaatggcaattatgaatgtattagctgagctacatcaggagcatgacttaaaggtaatttactgcttccttgtcctctggaacattctttgccttcacattattaaaacttacagtgaaggcagggtatttcgggggaagtactataataactgaaagtagagtatattatgagtaaaactaaagttttcttttaaaaattctaatccaactctggaactgtgcagttaaacttgaagtttgaaatcgaggttctctgcaagaaccttgcattagacatcaatgagctaaaacctggaaacctcctaaaggata

SEQ ID NO: 19071 - DNA, 1213 bp, Homo sapiens
ctccacctcccaggttcaagcagttctcttacttcagcctcccgagtagctgggattatagttgtaccgccatgcccagctaatttttatatttttagtagagacggggtttaatcatattggccaggctggtcccgaactcctgaccttaggtgatccaccctcctcggcctcccagagttctgggattacaggcctgagccactgtgcccggccagtcctcttttttaaaaaacagaaaaatatagtcttgtagaaaaccattgtatgtatttgtattgctgctgggcatttgtgttgttaatcacttaaactattataaacaatgctgtcctgaatgttttcgtttgtatcttgtagtattcaagtgcaagatatctttagactctaaatctgtttgtggaatagctgttgtctaggagtctgtgcagtttaaggtcaaattctactgagctgaggcttattcaacaaaattcaagtattttaatttctaaaccatcatttatttcttaggaggaaaaacttctagaaccagcatacagctgtggtcattctttgctcaataacttgggtcattggcttaggaaccagcactatatttaaacctgtggatgggaatattccccattcttggttacgctgtagtgcaaaagaattcctggctctctgttgcacagctgacttgtgccattctgctgttgctgtatagagttaaggaacatggctctatttcgtttttattatctgatagcaagggtggttgggatacataaaagtttccacatactctgtagcaaagtttcaagaccatgttttttaaacagaagtttaaatatagccctaagtcaagaggtaccacagagtagatgggtatatacatgtgtgcatacctgcagccaaaacactctcctatgttagttctgcccccccttagaaaaacagtaaccggagaatcagttaaatggtttgggttttttagaaatttgaaaagaagtatataaacagtattatactatatctcagaaagttatcttggttggctgcagagatttgttaatgacctgggtatactgaagattgcaataggaggctaatttgattatattcctttgtatgcttgctgcctttaaggacttaagcatggctatcatcctcatttaaattaatttagcacttcaaaatagctttgtagttaggtctctgctttaaacct

SEQ ID NO: 19072 - DNA, 1030 bp, Homo sapiens
ggactgttgaaatagcttcaggatccttatcactctaaattgtggggatgggctatgtaaagtgagttttttttttttcgtaataacagctttattgtgataataactcatactaccatggtttttgttttgttttttaaggcctttggtttctcattgctgcctaattagaaaacagatgagtttcctgtatgaattattaagacttttaaagtttgcgtttttaaagaagtttaaaggcatttatatgcaggtatctggggctgcttctttagaagttgttttgctgtagttctctcataaatactaagattttatcgctgaagttcatggaatctacttatgtattagtgccagggtatggggcaaagagtatgtgagctagatgaaccaaaagagcactcagacatgttttttaccctctcagaaaagagggacgtataatccagacttagcaattaaggttaactctttttcctctccctacccttttagtatattgagtatggacagcagtctagagatcctcctgtgaaaatgcaaggctctatcacaacccctggaagtattgcactggctcaggcccaggctcaggcccaggttccagcaaaagctcctcttgctggtcaagttagcactatggtaaccacctcaacaactaccactgttgctaaaacggttacggtcaccaggccaactggagtcagctttaagaaagatgtgccagtaagtagatctatcttttttctcttccaggatttatgattatattgtaataatcagtggtgaacatgtattagaattttatcataacacatgcctactaaaaaagatataaaagactgacatgtcttcctttgtatctcccatccttatatttcccagaggcaaacatattaatagttcactattcttgcctacatttctaatacacagtcataccatgtgtattttttaacactaaatctgtatacattattggatttttttcagggaagcatttcaacttatttgccttatgtactttatt

SEQ ID NO: 19073 - DNA, 1057 bp, Homo sapiens
agagctataatagtctctggctggctgtgttttatggggaagtggaggaagggcttaaatgcccactgattccttttttgtttccaacagcggacttgtctcaggtgtggccagaggcaaaccagcactttagtaaagagatagatgatgaagcaaacagctatttccagcgaatatataatcatccaccacatccaaccatgtctgttgatgaggtgagtgtctaggatgatctacttatttattgtttaggccagtcttaaataaatgtccttttcaatgtttttagaaatccagctcaaagtgccctgatatagcggtttgtgttttgaaaccttaatatttgtctcaagctcttttggtaaatgttctacttaatagtcttttgttaagcatatttgagaaaggctcttagtaattgtttcctttatgtgtgcgttgtttttgtcttgcttttccaggtattagaaatgctgcagagatttaaagactctactataaagagggaacgagaagtatttaactgtatgctaaggaacttgtttgaagaatatcgtttttttccccagtatcctgataaagagttacatataacagcctgcctatttggtggtataattgagaaaggactggtcacttacatggcactaggtctggctctacgatatgttcttgaagccttacgcaagccttttggatccaaaatgtattatttcgggattgctgcactagatagatttaaaaacaggtaagtggataggtttcctgtgaaggatctcttccctgaccccgcagacagggtcttaactctcatccaggctggagtgcagtggcgcaatctcggctcactgcagccttgaccttgcgggctcaagtgattctcccacttcagcctcctgagtagctgggaccacaggtgcataccaccattcccagccttttgtaatttttgtacagacagggtttcaccatggtctcaaactcccaccttggcctctgaaagtgctgggattattggtgtgagccactgtgcctggcctgaagctttttttttttt

SEQ ID NO: 19074 - DNA, 1033 bp, Homo sapiens
ttgcccaggctggagtgcagtggtacgatcttggctcactgcaacctccgcctcccaggttcaagcgattctcctgcctcagcctcccgagtagctgggattacaggtgcccgccaccatgccatgctaattttttgtatttttagtagagacagggtttcaccatattggccaggctgatctcgaattcccgacctcaggtgatccacccaccttggccccccaaagtgctgggattacaggcatgagccactgcgcttggccacattttcagtttttttcccagatattgttccatgtaactttacattgaaataaaagctatattttttttgttgttgttgttgtggttgtttgtacctacatcttcttagccccttgtaccttttatgttgacactgtaagtttgggcactaaaacctaaggacttccatgttgtcattgactctaatctagttagcgttgctactgtatgcttctagctttgattaattcatttaaataaacgtcactgaacttattaaggccttcctagcaaagctctaattattgtaagattccttttgtcggagttgagaggaataaagaagttttgagactcatggtaactttagaagatagtatcatgaaattatttgatttgaatcattgagaaaagccagccagctccttattttaactaccttgggtataggagtatgtgctttgagaatgtatacattaattttttgcacattatcaagaatataaataattccagatgctaaagaaatttggggattatccgttactgcctagtttataggctctgtaaaattgaatagatgtaataagggaattaacaaagactctgacttttaaagtaagagttactatgactttattttaaaagtctgtcttattaatatatctgagatgtgaataaaatcaagaatatgaataatgataggatttgtggctgccttcgttctctctagtaggtggtcttggcacaggcagcctgactggtataggaactggtgctcttggactc

SEQ ID NO: 19075 - DNA, 1156 bp, Homo sapiens
agcactcctcccgcctcagcctcccaagtagttatgactacaggcatgtgccaccacacctggctaatttttaaaattttttgtagagatgaagtcttggctgtgttcacaggctggtctcgaaactccttcctcaagcgatcctcccaccactgcctccctcccaaagtgctgggattacaggtgtaagccacctccacctcccagctaccatgtagagcctctttttttttttttgatacggagtctcacattctgttgcccaggctggagtacagtagtgcaatcttggctcctgggttcaagcaattctcctgcctcagcctcctgagtagctgggattagaggtgcccgccacatgcctggctagtttttgtatttttagtagagatggggtttcaccatgttggccaggctggtcttgagcttctgacctcagcttctgacctgagtttctgacttcaggtgatctgcctgcctcagcctcccagagtgctaggattataggcatgagccaccgcacccggcccgagtagagcttctgaatacaagggaccccatagttgtatgaggcaatacagattgagtatcccttctttgaaatgcttggggtcagaagtatttaggattttggtttaaaaaattttttaaaaaccatttgcattatacttacttgcttaatatacacctcaaattccaaaattcaaactccgaaatgctacaatgagcatttcctttaaacattggcattcaaaaagttttagattttgtagcgtttggtattcagattctcagatttgggatgctcaacctgtaatagcaacctaagataggaaaattggtttaattgtcaagtaaacatttaccctacttgacatttgttttagaggtcagtcactgcttcatgtgcttgttaaaggtaattactatgcatggtgtttttgtctataagtacatgtattatcttagactgtgatatactagtataaaaattgcatgcctgtttgctttgatatgtctgggtttgggcataatttttgacaaagtggttgaagctatggaatgttttctggaaaattttaatatattttggttgtactatatactagttcatttcagaggtgcaaattagtttcaagagaaagccagtactcag

SEQ ID NO: 19076 - DNA, 1027 bp, Homo sapiens
aatctgtctttgttctgtcttttaaatttattttttgccattgatttgatagagaaatacagcatttgttctctagtctaccccatgttattttcttacctgttttctcatggtgtttacttcattctctatccccatggttttcatgggctgaggatagagttagatcttcaggctcagttaaagtcaaccagtttcaacctcttggggcaaaaataattcttaaagagagtgctgtggacttcaaacttctaatattaaaacatgacaccaacttggttttgtgcttacaagctggtatcacttattttgaaaattaatctgtatacttggattttcattgataaagcatgtttcttcctttctcgttaggaagagcttggatttgattgaatctctgctgaggcttgcagaggttgggcagtatgagcaagtcaaacagctcttcagcttccctatcaaacactgtccagacatgctggtattggccttactacaaattaacacctcttggcataccttgcgccatgaacttatctccactctgatgccaattttccttggaaaccatcctaactcagctattattttgcactatgcatggcatgggcaggtaagatgtgaccgtgtgcttaccattttttcatctgaataattgatcttctttggagtgttgaggaagctcaaccagagaaatttttttttacatctctgaattattatgactttaaaagtcatactgtcataaaacttgttttatcttttagaatcatgtgagcaataaaatacaagatcccaaaagcaaggaggcaaaataatatttaataattttattttctttccttttttttttttttttgagatggtgtcttgctctgtcgcccaggctggagtgcaatggtgcagtctttctcactgcaacctccatctcctgggttcaagtgattctcctgcctcagcctcctgtggagctgggattacaggcgtgcatcaccatgcacagctaatttttgtattcttaatagaa

SEQ ID NO: 19077 - DNA, 1026 bp, Homo sapiens
cactgcacctggctctagaatggaacttttagatattaaaaggtagtgtgataagccggttgtggaggctcactcctgtaatcccagcattttgggaggccgaggcaggtggatcacatgaggccaggagtttgataccatcctggccagcatggcgaaaacctgtctctactaaaattttaaaaaattacctgggcatgttggtgtacttctgtaatcccagatacttgggaggctgaggcacgagaatctcttgaaccaaagaggcagaggtttcagtgagctgagatcatgccactgcactgcagcctgagcaacggagtgagactctgtcttaaaaaaaaaaaaagaaaaaaaaagaatgggtttcttaaaattcacattaaaaattttgtaagtagaacatctaaattgaatttcagatttaatttggccttttggataatgtatcaaaatatacacacattcattacattttaaactgctttggtcttttttagaatccaagtttgaatttcaaggaagtaacttatgaactggaccatcctggatttcaaattcgtgacagtaaaggacttcataatgtggtttatggcattcagaggggtttgggtatggaagtgttcccagtagacctcatatatagaccttggaaacatgctgaaggccaggtgagtaagtggtatttagctatagatgggggaataaaacatgacttattctttatgtagtgccatctacccattgatcgaaatattcttgtaaagtagaatttgttatacatagcacagaaaagcaaggactgtccataagtattgaaggaatattatcatagttttagtattaggcagactcctttaaggtgtaactgtcaaggtgttttcccaatagtttaatgatgttcatttccaaggcaacgttaagtttccctaattggctcagaaatgtcttttaacagtcaaggtgttttcccaatagtttaatgatgttcatttccaaggcaacgttaagtttccctaattggct

SEQ ID NO: 19078 - DNA, 1052 bp, Homo sapiens
acattcctagctgtataaatgtaacaagaaataacacttactgctctgcctgttttatttagtaaaactaaggctttcaaacaaggttcatttaatgccagaatttctcaatctcggtgttgaggctggtagcatttttctgaagttatatttctgtttcagtattgaagaatgtcgcaatataatcgtgcagtttggtgttcgggaggtcacagctgcccaggttgcaagggttttgggaatgatggctcgaactcattcaggattaacagatggcattccattacaggtgtgttgaattcagctattttaccaagtgagttaatgtcctgtcctctttatttttttttaattaaattacagtatgattgattgttctatcgaccagaagtgaacacatggagtagttgggtttgtttaattcaagttttacttctacagagtatttctgctccgggcagtgggatctggagtgatgggaaagataaaagtgatggagcacaggcacacacatggaatgtagaagtcttgattgacgttcttaaagaactggtgagtatatgtgatgatgatttttgatttgtggtatttgaatgatatagtccaaagaaagcaaatttttaagaattttccaccttcgttaactcaaaaagtaataaagtgtccaagttaattgtgtactgcaggcagtacgtaaccaaatttaaattttttcattagggttgttaccttgtaatttggggtgctacttctaagttactcttgtttatggtggataagaacagtgaaaatcataattatcttgccacttctacttcggttgcaaactgaataaaaaataaagtacctctactaaaatattgaagggcttaaataagacataaaggaattgaactctatttatttttccttttgctgtgttgcccatattggactttaactcctgggctctagttagtgatcctcccacctttgggagcaaagcgttgggattacaagcgtgagccattgtacctggcctagaatggaacttttgtttttgtttgtttttt

SEQ ID NO: 19079 - DNA, 1688 bp, Homo sapiens
aattcttttcacaacaaatctgatagtggattaacatccattctcatggttacttttatttacttcttaatgtttatagagtttaattttaatgtacattaacattctcactaatgggaaactttccacttgccagtgaaataaatagactgatattctaattgtttgtttttgatgctttctttgtatgggaagtgatagccctattgtgcaaatttaaagtaatatttagggtacgaattggtcagtagatggaatgccagtgtcaaatgttaaaggtacactgatgagcattttttgtgatataaaagtattcaaattttggaattgatgttaaagtcgtaacttcggctagtaggctggaaaaatgaaataagcttggctttgaatatgaacttgtgagagaattgggtttgaggggattttggatagagcaaaagaggattgtttgtttttaattagtatagcagttgtaacctttttcctctctcagattttccccaagaacgctgtcccgtggtgctcgcaccacttttataccctgaaaaacgggacattctaatggacaggatcctgcctgattccggaggggtagctaaaaccatgatggagagctctttggctgatttcatgcaagaagtaggctatggcttttgtgcaaggttggtagtaaaatgtgttaagcttctgattattcttgtgccaaacatgatgtaattctttaaaaaaagtctctaaaattccttaaagttaatcatcttttcttctcaagaggcatgcttctaaattttaatcttccacgaactagtgtgtgtgacagctgtaaacatcctgggtgttaaatgtttatctccttcccctcaccagtttctcaaaattaggagccagaggtttccaggctagttgccacaataggcatattttggcttttggaaggaagagagagcattgaagcaagttagtgtttatggaacttgtatcgctttacacttaatgtgactaattttctcctctctgacccccacccctctaatttcttcattctgccttcttctgtggcttccttccttttctgcctcttgcgtatttttctcacttgcttagggcaccaaaggatattgtttcacactgttagtagcacttaagactgtgatacactggattattaatatttttctaaaagcaaattattaaggggattaatgtgctttgctttgacttaaaaatccttatgttttaaaaactctcagacaaatcacattctcactgaggtttgaaatagtgcatttgtgagtgttgtacttgtgcctggcatataatttttgttaatcaaactgaataagatgcatagtgaaaagttaggatgcaggctgggcacggtggctcatacctgtaatcccagcactttgggaggccgaggtgggcggatcacctgatgtcaggagttcaagaccagcctgaccaacatggtgaagaccctgtctatactaaaaatacaaaaattagctaggtgtggtggcacgtgcctataatcccagctactcaggaggctgaggcaggagaatcacttgaacccaggaggtggagattgcagtgagccaagatcgtgccactgcactctagcctgggcaacaaagcgagacttcgtcaaaaaaaagcgagactaacaaaaaaaagttaggatggat

SEQ ID NO: 19080 - DNA, 1049 bp, Homo sapiens
actttttccaaaaatatcacgaagtgagactttaaaatacgtgggtttttaatcatgaggctctgtgatttagacttagagagtaagataatctgaaattaatttctctttatctgtggtaaaaaacatgtaatataaatgttaccctcataaccactttaagtgtacagttccatagggataattgtattcaggttgtgtaacatctctctggaactttattttgccaaacagaactatgcccatcaacaactctctattttcccctccccactgccagtccctggccattggtttctttatacctgtcagctagagaaagcattagagagatgggtgaactggtgaatgagaagggtgattatctgcattttgatggtatatgactttttaacccattgtggtgcaaaagtaacttgcggtttttggtttacctgacttctagctgcccagtttatcaaacagaagcttccagatcttctgcgttcttacattgacgcagacgtcagtggaaatcaagaaggtggcttccaagatatagcaatagaggtcctacacctcctcctctcccatctcctctttgggcagaagggagcctttggagttggacaagaacagatagacgcttttcttaagacgctgcgcagaggtaagggagtctttgtagcctacagtgggtggttttcttggatgaccacagacacatcacaaaagcattcccccctcccctcccctcaccctcccctcctccctgccctcccctcccctcctccctgccctcccctcccctccctcccctgccctccctccccctccccctgccctcccctccccctccctccccctcccctccccttcccctctccctctcctccccttcccctcccctccccctcccccacccccacacctctcccccctccccctcccctcgcctcccctcccctccgcctctttctctttttaaaaaagagacaacatcagctgggcacagtggctcaggccaataatcccagcactttgggaagatcaggcgagcatgacaccat

SEQ ID NO: 19081 - DNA, 1525 bp, Homo sapiens
acttgaaacttttttattctttggccattgactgtgtgatgaaatgtgccttctatttttttaggttgataacacagtctcagacaagtcagtgtattcattaaccatgatctggccctctgattccctctgaccctttttctgatcttcagagttcttttctgtctctgtgcttttgcactctaggtttttccttctccctggattgttctttcttcacctgtatctatggttgtctcagctcacaggtctcaccttagaaggcttctctgaggtaaccgcctgcatcaatgttagcaagctctgttttactttctttttgttaacagataatgttgtcagaaattctttgcctgtacttctcccacaaaaattgactttgtgagaatttggaacctattagtctctgctgctgtgtttacacctagactagtacgtagcatatactcagcaagtgtaggttgaaccagattattgtattttttcaagggtgagagatctggttaattggatcatagttaattctgttcttttttgttttattttttattgagacagggtgctgctttgtccccacaaggtgggagtgcagtggcaccatcatagctcactgtaaccttgaactcctgggctcatgtgatcctcctgcctcagcctcccaaggtgtttggattacaggtgtaagccactgcacccagactctgttctatttttttttttttggagacagagtctcactccctcatccaggatggagtgcagtggtgcaatctctgctcactgcaacctccgcctcctgggttcaagcgattctcatacatcagcctctcaagtagctggaaattataggtgtatatcaccatgcctagctattttttttggtagagatggtctttcttaacttccatattttctgaatgaagagaagggaaactgaaataagctaagaacttagacagctttcatgttattatcatgatatagtgggaagatcataggctttgaagttggactataaatccagattcttcaactcatagacttggattttaggctcaaggagtctgttttaaatatgtcaaccccttatccgtggggatagatggtggtaaattttagcagtttttgaagattaagccaggaaagctcagtgcaatatgtagcccaacgtgtaggtagtatgtggctcttagcaaacgtgattactctgcacatacactgtgctcaattattttctagactagatgtgcagaagtgaacacagctatacaaaatttcaataaacaaattagcaggtagtggtaaatgctatggagaaaaagtaaagcagaataaggagtgatgctggggcaggtcatatttctgttttaggaatggtaataagacctcactgataaggtgactttagagtagaaacctaaatgaagtgaaagaacaaaccatgtatagccatctggagtttttcatttagaaagaataacaaatagaaacaaacatgggtaaatttgaggaagggcaggaaact

SEQ ID NO: 19082 - DNA, 1029 bp, Homo sapiens
gaggcaggatcactgactctgtcacccctaggagtcattagggccccttccctggaggatggcctgctttttctctggggactagtcctcatttcccttccatgatacagtggggcaggttatttttattaagcaaacatttatgagaaccccctccccaaaataaagtccccaagtaaacacaaccctgaatggttgtggactatgaattgtttctagtgaagataaatttatgcaaatatatcttaatctttccctctgtctgtcttgtgattaaggggttgctttttggtaaggaatttttttgttttgttttttagatggagtttttttttttttttttttttgagatggaaaaatagttttgatcatagagttaggcattatggaaattcaagccagatttttaaaaacctggtcatctccaaagagaaatagtgacagtaatagtggtgcggggaacaatatggtagattattgaatgaaatggattaacttgaacaaaatgctgtgacttgtctctaaaattataaaatgtgatctgacttgttttggtctggttcctcttttttttcttttttggttcctttatttttcacattaaaaaaatgaaatatccataggttgtaaaattcaccttttttgtttttttttttgacggagtctcactctgtcacccaggctagagtgcagtggcgtgatctcggctcactgtaacctccgcctcccgggttcaagcagttctctgcctcagcctcccaagtagctgagattgcaggtgcctgccaccatgcccgggtaatttttttgtatttttagtagagacggtttcaccatcttggccaggccggtcttgaactccttacctcatgatccacctgcctcagcctcccaaagtgctgggattacaggcgtgagccactgtacctagcctttttttctttttctttttcttttttttttttaatgagacagtattggtctgtttcccaggctggagtgcagtggcataatctcagctgactgcaa

SEQ ID NO: 19083 - DNA, 1038 bp, Homo sapiens
gcctgggaaacaagagcgaaactctgtctcaaaaaaataaaaaataaaaaaaataaaaggactgaagtagattactaagaaagtgaatctagagaagaaaagttcaaggactccaatattgtgaagccaaaagtcatcagagtagactagagagaccagtaaaatgccatattaggaacaaaataagtgtatccatcatctttttattatttacttaaaaatattttacttttttttttttttaatagacagggtctcgccatattgcccaggctggcctcaaactcctgggttcaagcgatcctcctgcctcagcctcccaaagtgctgggattacaggtgtttgccaccgtgcacaggcttttttttttttttttttttaaggtgggtatggagcactagcatatgtagaacctttgatttgtgtacataaaactatgtatcctttatacattaagaagctgttaactttgctttgtcttgataaaagtgtgtaacctttatacattaagaaactgttagagataaaggttttaaatggccttttaaaggggttttaatcttcctgagtttcctgcatcttacatggtgagttttgattgtaatgaaattacaagcggacttcagaacaggaagctgtggataagctcagctcctttccttcagagatttttgtgtttcagtggttcttggtgaatttcttaaaaaatgggtgttgtggctggacgcagtggctcacgcctgtaatcccagcactttgggaggccgaggcgggcggatcacaagctcaggagttaagagaccagcctggccatcatggcaaaaccctgtctctactaaaaatacaaaaactagccaggatgtgggctccatggctcatgcttgtaatcccagcattttggaaggccgaagcaggtggatcgcctgaggtcaggagttcaagaccagccaggccaacatggcgaaaccccttctttactaaaaacacaacaaattagctgggcatggtggctgttgcctgtaattccagctacttgg

SEQ ID NO: 19084 - DNA, 1049 bp, Homo sapiens
accttatctttcctttcttggtatttcccatcatcaagagtaacttctaaaaatgttcatttgatcattttgtctgttattaggcaaaacaggcctaaaacaaatccaagataacagcggcttaacagagtaaaaatgtatttcttcctcaaataattttcattgaggatgtttcattgaggatcctgtgcaataattcaagaagtctcccttcgtctgtcatctcatgacatcatcctcctctaggtcttgggggtttattcatcgggcagatagtcaaaaacagagaatcatgagtgaggttttgtgagctaggtctgaaagtgccacataccatatttgctgtatactttgtgggttaggaactaagtcttacagccaaaccaatgcaagagaagctgagaattgtattctaattctttagctgggaagaggaagcagtttggtgagcatctagcccatctctgcatctccctgtttactaaaacagacccaaaccaatcaaagtagcttcccagatcatctttgtgataagattcaaaattctgaaatggattctccatgtgctagacaggaaatccacaatttgggtcccacttacctctagaagatatttcatctctgctgggcaagcgtgttggggacagttcccaagtccacctgcaggttcagtaattcactaggagaaaagcccagggctgatttttttttttttttaaatagcaaaggatacaggcccagtgctgtggctgatgcctgtaatcccagcacgtcaggagaccgtggcgggcagatcagttgaggccaggcgttccaagaccagcctggccaacatggtgaaaccctgtctctaataaaagtacaaaaaattagacgtagtggcatatgcctgtggtcccagctactccagaagctgaggcaggaggatcgcttgagcctgggaggtagaggctgcagtgagcccagctcaggccactgcgctccatcctgggcgacagagtgagaccccgtctcaaaaaaataaaatacaataaaaagtgtttttctat

SEQ ID NO: 19085 - DNA, 1740 bp, Homo sapiens
catttttagtagagatggggtttcctcatgttggccaggctggtcctgaacccctgacctcaggtgatctgcccacctcggcctcccaaagtgttgggattacaggtttgagccaccgcacccagcctcttcgtctttttacatctggaatgtcatctctaccaaaactttatcattctagtccaaactcaggtgtactgtctataaatacctaatttccttaagcaaaattgattttttgccatccttggccagtttcacttaagtgcaccctacaatgccttttaagttttctgtcccatagtgagtaaggagtctctttccccagtgcatatatacagttgaactgtaattgaatagtgcttcatttattacagttgggtaaattgatagaatatagcattcttggaaatcgatactctggtttttctttttttcatactgcttgaatgagcaagtaacatttcagaggaaaagatctatcggtggtggttcattatgtaggtcaggattttagtttcatttgtgcattggattttagaatatcatgactatctctagtaatctacagagttaaactatttacatcttggcaatttcttgaattaattagggagatctttctttacccccaaccttttatttggatagagttttcttagttgtgaccaaagcaaataaggtttttttcccagcagttttttggacgactagaaacaagatttgaatttttcatttcctcactatgaaaatgcaaaacttggctacgcgcggtggctcacgcctgtaatcccagcactttgggaggccgaggtgggcagatcacaaagtcaggagttcaagaccagcctggtcaatatggtgaaaccccgtctctactaaaaatacaaaaattagccaggtgtggtggcgggcggctagtcccagctacttgggaggctgaggcaggagaattgcttgaacctgggaggcggaggttgcagtgagctgagatcgcgccactgcacttcagcctgggtgacagagcgagacgctgtctcaaaaaaaaaaaaagaaagaaaatgcaaaactctagtgtgaccaaaagatgctcttttacaattaatggtcagtgtaataataataaatttgcagttctgctgagactgcctaaagatgaagggacttgagttttaacaagttctttagcatcgtaaattgaattctgagatttgagagttttctcttggtgtagttctttttaaaataaaatagcttcaagaaggctactctctgttattttgttttttgagacagggtctctgttgcccaggctggagtgcagtggcacgatcatggctcactgcaaccatgacctcctgagttcaagccatcctcccacctcagtctccccagtcagtggctgggactacaggtgtgcaccactacgtccagctaattaaaaaaagtttttttatagtgatgggggtctcactatgttgctcagcctggccttgcactcccagcctcaaaaaatcctcccaccttagcctcccaaagtgctgggattacaggcgggagccaccatgcctggcgtggattagattaattcttgtaaaatatttaaggcacatacacaaggctgttaaatgttacaagttattgaaggcactgtagcattgagtgaaataaattgcttgattaatatgtgtatataaaaagcaagtcaactctttttttcatgtcagacaggtaatgtgc

SEQ ID NO: 19086 - DNA, 1046 bp, Homo sapiens
tggtcaggctggtctcgaattcttgacttcaagcgatcgacccacctcagcctcccaaagtgctgggattacagacaggcatgagccactgtacccggccaacacttaggttcaagagtttattataaaggatatggatgaggaggtgcgtaggagaagtaagggccgcggagcttccatgccctcccctggctacactgtgcctcagctatctggaagctctctgaacccagtcatttatgggcttttatggaggcttcattacagaggcacagttggttaaatcattgacctttggtggtcaccttaacccttagcaccttttccctccctggagtttggaggaggtggggctaaaagtcctaatcctctcatcttgccttgatctttcaggtgaccagcacccatgcagaaactacctagaagttgccaagctatcagtcaactcagcatacaaaaagaaacttaccattctaaggatcttagaagttgtatgccaggaaatgggatgaagaccaaatgtatatctcacaataaatattacagtaatgttgaagtaattatttgaaatataaaagtgggatggaagtattttcttttctttttttttttggaggcagagtctcgctgtatcccccaggctggagcgcgatatcggctcactgcaacctctccttcctgggttcaagcgattctcctgcctcagcctcctgagtagctgggattacaggcgcctgccaccacgcttggctaatttttgtatttttagtagagacggggttttgccatattggtcaggctggtctcgaactcctgacctcaggtgatctgcctgccttggcctccctaagtgctgggatttcaggcgtgagccactgcacccagccaaaaggattttcaaagacgctatctaacattcttttttctttttctttctttcttttttttttttttgggtcaagagtttcactcttggcgcctgggttagagtgcagtggtgcgatctcagctcactgcaacctctgcctccaggtttcaagagacga

SEQ ID NO: 19087 - DNA, 1084 bp, Homo sapiens
acctccgcctcctgggttcaagcgattctcctgccccagcctcccaagtagctgggattacaggcgcgcaccactgcacccagctaatttttgtatttttggtagagacggggtttcactatgttggtcaggctggtctcgaactcttgacctcgtgatccacccgcgtcggcctcccaaagtgctgggattacaggcatgagtgaccgtgcccagcctagtagtctgccattttgaaatgctgtattttatgaacttggtatatctttttttttttttttttttttttttgagacgcagtctcgctctgttgcccaggctggagtgcaatggtggaatcttggctcactgcaacccctgcctcgcaggttcaagcgattcttctgcctcagccttctgagtagctggattacaggtgcctgccaccacagccagctagtttttgtatttttagtagagaagaggtttcaacgtattggccaggctggtctcgaattcctgacctcaggtgatctgcctgcctcagtctcccgaagtgctgggattacaggcgtgagccatagcacccggcctgaacttggtatatacttttataaaagaaaagactttcaagtcatatatattaactgaggcatttctttaatgaccctctgaccaaactaaaacttcctgctgtgaagtttcaaaatggcatcccattgagtgactctatatatagaagaatctagcaattccttttctgtttgctcacaattttaaagatgaatctttgaaagttaaaaggggctcaacaccttctgccccccagtgtatacaatagttttttttttttttttttttgagacagggtttcacttcaatgcctaggctggagtgcagcggcacaatccctgctcactgcagccttgatattctggtctcaggtcagtctctcacctcagcccctgagtagctgggactacaggtgcatgctaaccacacgtgtcaaaaattgttttttttcttttttttttgagagagagttttgctcttctccctcaggctggagtgcagtggtatgatcttggcttgctgcaacttctgc

SEQ ID NO: 19088 - DNA, 1019 bp, Homo sapiens
ttctgtctctgctccctgatggttgcagtgggcatcggcttccgaggcctagggcttctggcgggggggaccgtgtttggagtttttgcatgtttccagttcttctccgtgtactcggagctgccactctccccgtcttacgcccccagcacgttgtcaaagccccccaggtttcgggtgtccccggatgggaagggcgggcgggagcaagcacttccttattacttgctacaggttttgttccactcgcgcgcctgggcgctcacactttctttgaagttggcccccacctactcggtccggtgtctgcagtagtggcggtcctgctcacccaggacaagtgtcccgctagtgagctgagcacttgtaggcctcaaggctgataagatccacggcaggtcttgtagaggtacttaaggccaaacacaaataatactttttcagtaccacctcctttgcagaattcacccaagagggctcacagatactaactccccgaggagtaagctttgtagattaaaaaagaatgcttgacatctgtgcgtttgaaaatgttgtatttaaaataaactttatgacaaacttttcccatgaagttaatcaaatgtcacatttcttaggactctaataaagtctgttttcttcctgaaaactgagtaacaatgcttaacctaccctgccgatttctctacaattcgatagcctgtgactacttgggtttttttttttttttaagtcagtgattgagtgaatataattatactgtttgaaacaatgccgaacgttttccttatgacagcccctttgataggaatagggaatacatggattaaaaaaatgagggaaggcaagtaaaatattaggaggaaggtcaaacagattaagaacaatttttttctataggtacttgggtttaatacttaagtgatctgtggtcccggttggtattcctacccttttaaagattggcagcagagtattttagctattaagaagacatgtggtaacagtttaaataa

SEQ ID NO: 19089 - DNA, 1025 bp, Homo sapiens
tcacccactggaaagaaccaccatctgctctaaccatgtagacttattgcggcctggtttctctgttacaataaaattactgtagacccaactactgtctactaagttatcttttttctttaatgggaggaaggggtaggagtgggtaaataaataaaggggtaggagtttggaatcgtgtagctgatcataagccagtagatgtatccactattccaaatattggctgaagattcgtcgttttcttcatgttgccattcagtttgtccagtccgaagatgctgagaatgtgggtgtaatcccttggaccttgtggggaacaagtggagtcccatgaaggatcctgtggatataggcaaagggtagaaggggtggaggagaagtgacaacttcagtggtctataggagccaagaaggtaacgtaaataaaaaagtgttgtgaactggatttaagttgatcagtggtgatcaaccctcatcctcagcattgaggagcagtagtgaagtgacaggagctgtgaggatgaacgcccaaggtggtaggtcttacatttttcaagaaaaatggaaatcttgatttctatggttgatctgttggtgcttaaaagttggcaactggttcaatttttaaaaaattatttgggccaggcatggtggctcacgcctgtaatcccagcactctgggaggctgaggtgggcagatcacctgaggtcaggagtttgagaccagcctgaccaacatggagaaaccctgtctctactaaaaatataaaattagctgggcatggtggcgcatgcctgtaatcccagttactcaggaggctgaggcaggagaatcgcttgaacccaggaggcggaggttgcagtgagccgagatcgcgccattgcactccagcctgggcaacaagagcgaaactccgtctcaaaaaaaaaaaaaaaaaaggaaaaaaaatgatttggaagcagggtgcagatggtagactgcaagtctgtgtcctctgatgtaggtcacatgcccctgtcag

SEQ ID NO: 19090 - DNA, 1033 bp, Homo sapiens
agccccaagttgttttcgtgatgaaaacacgaatgtgaggaggactgtgggagacagccaagctgagaaggtggagcagatcgtgaagcaccctggttgatactgtaagaagtcaacacttgattctccaggcaacaaggaggatggaggggtttggctaagatggctccacatctagccctgttcatgcactcaatatctttgggatccaggcctcaaagtgaatgaagctggacgatggaaactgtaggaaatttaaaatcagatgccataactggaggggccaggggctcctcagctccagccagtaattattttgctaatacagtgctatcgtttctcatttttcaagagaaactacaggtttcagcttttaggcacaagtgcccaatttaaaaacgtttcactgggtgaagtaaaacattactaggtcccatatttggtctttaattggcagtttgtgatctctcttctaaccgtgcataacatcattatacagagatggtttaggaaagtgaacacctaagaacagggagataaactgtaaatgggaatgtcattggtgagagccaagaatgtcccagagccatgggaatggagtggaaagggtagattctgaggaaggggaaggttgtattcagaatcaggtgatccccgtgcacagtcagaggactaccttctccagtccctcagacagaatttactctccttggggcttttagcatagcagtgtcctatgtgttttacattttgtggccgtattccatacttggtttacaggtttggttacaagcaccccttgcaagcttttgaaggcaaggactatgtctcagtcctcaccacctaaaatagcttggctcattgtagattcatagtacattgtctcaattgtgaagatgggaatgtatatttcatccatgtcaaaaataaggtcattttttttttttgtttaacccacagcttttaccttaatcttagtaggttttagagtgattcattcacttttctttttttttttttttttttttgagac

SEQ ID NO: 19091 - DNA, 1049 bp, Homo sapiens
gtttttttgttttttgtgtttttgtttttgagacagagttttgctcttgttgcccaggctggagtgcaatggcacaatcttggctcactgcaacctctgcttcctgggttcaagtgattcttctgcttcagcctcccaagtagctgggattacaggcatgtgctaccacgcccagctaattttgtatttttagtagagacggggtttctccatgttggtcaggctggtctcgaactcccgaccttagcacttcggcctcccaaagtactgggattacaggcgtgaaccactgcgcccagccacccattgttatctgtagttgtgacatactgttatatatgtatgtgcaggactggttttggttttgtcacttagaattatactaagcttttttacttaatattttcaatgtttttaaaaatattttcatattctctggttatgaagattttttttaatgcatgcatttcaatacacaatttgagagtctgtagtagacaaagatgccagactgtgttaatgactaccctcagggtggttataatctgatgagaaagatacacacatgactttcttgttcttgttgttgttgttgttgttgttgttcttgttgttgttttgagagaatcttgctctgtggcccaggccggagtgcagtggcacaatctcagctcactgcaacctccgcctcctgggttcaagcgattctcctgcctcaggctcccctgagctgggatcacaggcacccaccaccatgactggctaatttctgtatttttagtagagactgggtttcaccacattggccaggctggtctcaaactcctgacctcaatggatccatccacctcagcctcccaaagtgctaggattatagacgtgagccaccgcgcctggccacacatgatatttaatataagacagaatggaataaatgatgactaaagggagagctgttgattctagtggggagttagagaagatgtaatgaggactgcggcatgtgagctgtgcattaaagaggggaaagggcttttttttttgcaaag

SEQ ID NO: 19092 - DNA, 1016 bp, Homo sapiens
cctccagcctcagcctcccgagtatttgttagcactttgaaccaagttaattgatatttctctgtaagaggcagtcataatttttaaatggtagttccttttattccgtcatctccgtgttaagtagaacctgctttcccctaaaatcagtttcaaattaagtaccttacataggaaaacttccttaaaaacatcatatttttgtttgtgtcctaataattgctagcattgaatccgtatttttgcatatgtttgtattttattgtagagacagggtcttgctgtcttgcccaggctggtctcctcaaactcctgggctcaaatgatcctcccaccacagactccctaagtgctgggattgcaggtgtgagccactgcactcagcttgttttttattatctgtactatctgactctcaacatctgttctctgaattagtgttactaaatttttttgaccacaatccacataagaaatatatttaagtctgggcacagtggctcacacctgtaatcccaacactttgggaggctgaggtggaaagatcgtttgagacaagcctgggcaacatactgaaaccccatctataaaattttaaaaatatatattttacatcatgaccttgaacatattatatacttatatgtgtatataactgaaactgtcttccagactcaatactaaaggcttcatgtgctttactcgagttttttgttttgttttgttttttgtttttttttaaacagtcttgctgtgtcacccaggctagagtgcagtggcacaatcactgcaacctccacctcctaggctctagcaattctcgtgcctcagcctcccgagtagctgggatcacaggtgtgcacaacgagacccagctaatttttttttttttttttgagacggagtctcgctctgtcgcccaggctggagtgcagtggcgggatctcggctcactgcaagctccgcctcccgggttcacgccattctcctgcctcagcctcccaagtacctgggac

SEQ ID NO: 19093 - DNA, 1027 bp, Homo sapiens
catgcgccaccatgcccagctaatttttgttttagtagagacagggtctcgccatgttggccaggctggtctcgaactcctgacctcaggtgatccacccgccttggcctcctaaagttctgggattacaggcatgagccaccgcacccagcctctcagtgtctttttatatcttttatataattcacccctttttcatattgaggaggaatttttgtgttctgaaagtttcccgtgtaacatgaaatgatactgacaggccataaagaatgagcttctgaagtatgaaaggtcctggacaaagcagtggccctgggtctgggcctgtatagagagtgttgcacatcactgaccgtgggtatctctccttcagtttgtcactgtgcagaccatttctggaactggagccttaaggatcggagccagttttctggtgagtctggaagcttcttcaggaaagaattataaattccagatgacagggcttcctgttgtgtgtgtatttgactgttgatgcagaagtagatttcttctttccgtgaagtttgcagatgtcctattctcatgaaaaaatgaaaggactttgaagaaattacaggaaagatatattagtgatgatgataaattcagttcactaggaacttactatttactagggagcttttgcattttaacttgtttaatccctatgagagaggtacaattaaccccctttacaagtgaagaaagcaagacccagaaaggtccttggctacatggccagtataactgtcagagactattccaacccaggcagtcttactgctgagtcaatactgcttctcaaccatagagagaaactgggtttcagcagagaaaaatgttctctcaataaaacacatcaacatttttttgcctctcctttgttcatttttctgtttcctttcgtcccatcttttagcaaagattttttaagttcagccgagatgtctttctgcccaaaccaacctggggaaaccacacacccatcttcagggatgctggcatg

SEQ ID NO: 19094 - DNA, 1035 bp, Homo sapiens
ggcagagcccccagaacgtcacccccaacccgaccctcttggggctgtacctcatgcatgtggtccctctgcttaagcaaactcaccctatttaggtccgtggtagtcaccacatgttgcctcaagtggacagctttggatggtttctccagggcttgaccgtgttctagttgagactcacctgccatcaaagaggcagctgctgatgagccctcagcctcggcattgctgggccatgcatgcagctttggggtgtggggcaggtcagggtggaagggggacacagcctgagcctggtggcagatgtggcttctcctcccggcaggggagtgaggaggtcctcctgcttcactctctctgccgccttgattctcatattcagcaaagtccccaggcagggggagtaacagacatttctcaaggcctcctggctgtctccttttcccctgagttagtgattctctttttgttttcctttaggtgtcatctgtacggttgatggagaggtcgattcacagcgcaagatacatttttgtagaaaacctgtatagaaggtactgtagtttgaatagttgataatttattaaaccactaatttttcaaaatgaaatagaaacttgtttattcgattgacagatatggagtacccgctgttgtatcagttatccattgccatagcaatgcggtgtaacaaacagccacgaatcctcatggcagacagctatctgcattcattgcccagtcagccagggtggtcaccaggcagctctgcttaccttggctaggctcaatgagatgtctggggatcagccgatgtaggatagcctaagcaagggtgactggaggtggctcatctcttttcctcttgcctgtcactctccttctgggaccagcaaaccagcccaggtgtccacttctcacggtgacaaagggtagaagcaacagcagagatgcaaggacatatttttcaggcctctgctccaagtttgctagcattccattggccaaagcagatcacatggtcacatgagccca

SEQ ID NO: 19095 - DNA, 1046 bp, Homo sapiens
agacagcatactgctgtcacaagtgcaaacacctggaaagaaagacaagtgtcactgccctaaccatggtccccactcctgtcattcacacaagttttaagtggtctgcccaccagattcctctcttgctagggtactcggattgctccctgtgcttcatctaatactaacatggagagacttcagagatcatcttattctcctcattgctaagttttctaaatacttgcctatagaaagagaaaagataatttaagtgagcagaaaaataataaagcagtgtgggctctgaaatccatacttgtttgcttttatctcttgacctgctcttgcatgtattcttttaagccctactgaggatatttagttattaatatttctaaccccagtgttcaactctgacttctctactgacaaactctacagaagaaaaggtcaaagttaacaccagctcaatattaaatcatggggactgtagctccagaaaactggagttaataagatgatccaaagtgaactctcaaaggctaggctacatctgcttaaagggtgagattctaaatagaccttaagaaagtaaaattagataaaaacaataactaagaacacgtgggggccttcagacactctgatggctatctgagagctggtgcctggggtgggagagggggatgtcattccttgcatgctgtttggtcagcttcttccagtcatcaggaagtttggcttcctggctccagacatggctctcacagtctccttttccacccagagtctcaagccactgcctcctaggttctgaccacactgaatacctcctaccaatcttttcatgactggcactctgtacactattggctcctctacctggaaccttttccattttttttcctttattctcagcaaacagcaattccactgccagagaggtagtttcctcttttctgcaccatgcagctccctgtcaacagcttatatacagcggtttccacttgtgtctcctgtgttaagctctaagcaacttgaggacggggctcacactctag

SEQ ID NO: 19096 - DNA, 1192 bp, Homo sapiens
aaacctcactttagctctaacattttgtgtttagccctcaccaaaaagcacttactgtggcaggaagattttgcagtaacatggagaaatccccaagatcaagtgctgacaaatgttgacagctttagcagcgtactgtgtaataaataactccgagggggcggcggggggtctgtgcaagaaagcgtcaccttatggacatgtggcgtctcattccccagaaaaggacagcatctgagctcacagtgttgatcaggcaacactgctgggctgggggtcggagttggggttagcttcctgcaccaacaccttcagtacgatctgagttgggagcagtgtcccaggctatgtggctgagcaccacgtctgcctcaggggctgaccctgctagcctgttaacaactcgtctcccctctgctcccacagagagggcagccaggccagctcacagctgggtgtgctgcctgtcaggtctgttgagtgtgtttgcaaagtcaaaattgggcttatctctctttgagagttccttttaaaatagggccacaaaggctcagccttgcattaaatggggcccacttggaaggaccatcctgagctttatcagaaatctcctgctgggaatcatgttacttggcccccaaaaaaggccatctttgaagtgagattgaaaacaagaacaccattcaggtgggcttgttgcccaagttttcccagctcacttcagtaaaaccacttgatcatctggtgaaagaggggggcaggtggttggcctcctgaggatatgttgtcagctgcaagaaatagttctgaagtcactgaaactaaatgcagatgaatgaccaaaaaggatgacacgccagagagtgacttaggagttaatttgcatcttcgtgatagactcttcagaattatttatgtccctgtaactatttaatatcctttgtgccgtgaggctcctcggtggttttgtaaatgttctccttgtatttaattaactcccactagaaccggaagtggtgctatggacgctttctagttgatgtaatgtgtggttgcacatgtcatcatgtatagaccacgtggtgacgaaagttctggagggaatagggttatccaaggtgaatatgaagacgcctatatttttcttatattgcctctatatgcaaacagaagacaatcgatatctgggggc

SEQ ID NO: 19097 - DNA, 1044 bp, Homo sapiens
ctcattgaccctccctcttccaaatcccagcagcactttttgtctcgatacctccctgggcaccgagccacgcacctggttagttctttttgtgtataatagcgtgtgttggctggactggaactgagaccttaagcacagagagtctccaagtgccacaaaacgatcagggttgagggagaagttgtctggcctcaccctgtttgcctggggcgtggcctttcttatacatgtctgtgatcctgacatgtacagggattaggggccctgaaagaagccatactcaggagaggagggcagcagacgagtgccagtgagagccctgcccctgccccccatgaggagggagtcgggctctggacctgactcatgttcataggagggtgtgaacccagtgcaaggctgaggttgagcccaggcttagggagtggggaggctgctgaggacggaccatacctgctcccactgtggagtctgcaggacaccaggtgatataagtcatgattaaattgggatatactcttcaatagatttgaaatgacctgtcatggaaataatgcatatattaggaagaaaaaaaatcagggatagatagatagatagatagatagatagatagatggatagatagagagaaggaatcaagaccaaaagaaaaaagcagcatatttgctccctaaggagcttgttcaccaatgcatccctagagttaggatcgtgcctggcatgtagtagatcctcagttaattttagctgaataaagggatggtacttgcctaaatactactttaaaaaaaaaatggacttttaaaacataaaggcaaatgtccacacccacctcaggaactttttctttttttaagagacagggtctcacgctattgctgggactgtagtgcagtggctattacacagccatgatcatagctcacggtaggcagcctcaaactcctgggcacaggcgatcctcctgcctaggcctcctgggtagctaggactacaggtgtgcaccactgtgcccagcaacctcagtcactgtttaga

SEQ ID NO: 19098 - DNA, 1047 bp, Homo sapiens
gctcaactaatcactgttgactaattagtcctgctggccagcccaggtggctttagctcctgagggccatctctgcccttccagagcaggtaattttctattacttctttgctaccctcaggtcctagcttgggcactgctagagaaaagcaatgaaaccaaagatcacatgcaaacaccttggttgcagattgaataatttacacttgcaattagctcctttgtttcagaaccaaacattatttgctcattgctcgattgtcttaagggagaggagggtgatattttaagtttatcatcctcatgggatggcctcccttgggaggggaaaaaactcatggattatttttcttagaaaaattaagatattactacagctagatccctttgagaatgagcagtcatgttgtgggctttgtcagagtctcagcactggctaccccaggtcttgtattgctttccttgaagagaaatcatacatggtgatttttcccatggtgaaaggggtgggaagactctggataagtcatatgttaggcatcttatctaggagaatgaggtaggggaggaactagctttgggacctggccacacgatggaggtgctgcctgcttcctgagtcggggtgtgaggatcagagatgtttggactgtgcctggtgcagagccctgtagcttccttaccttattgatgctccctaaatggaagccgttgttattcggaggtgcctggcattgcagaactatttgcccccgtttgcagaccatataaatggcttctggcctgggaacttatgttttaaggtgatctgttgtttagcgtgtgtataaagagtggcttaaaactccccatctcaacaccgtgaaagatggtgcggagaggcttcgtgcctcttctgtagttccggctccaggagcccatcttaacatcccctgttggttgctaagagaggagctggcttcggaagcacagtccctgctttgctctctgctgccccctctggattctctgttctgcacattctgaggtcttccagcagccgttaac

SEQ ID NO: 19099 - DNA, 1051 bp, Homo sapiens
agggagccttggaagggccaagcagctgggcctcaggaatcttggggactcatgaatccaaagggactcagcttttccatctatctggtcaagtgcagcctgtggcccctgggtcccaaaggcctatgtcctcccttcgcagaccagactgtgacccaactgcatctgaaagagaacttggctctgcctagctccatgctagcctcactagcctaaagccaaccaagtgcttcctcctctgccaactgggcatgagagggatctgcccaccaagcttgtctggcaggggctgatgagcactggctgccttgctctgagaacttgggggcaaaaactggctggtggaatgcagtggccatggccccattgtggaagacagcacatggcactttgtctcagataaccaaggactggccaccattgacctcaaagaatcccacgaccaagactatttcaggacctgagcggaagttgcaaacatgcaaaggaaggtggtgttctcaataaaatgtcaatcccctgtttggttactgccaagaagagaacactggctgaggaaaatactgtgttttaaagtaagtaaactgcaaggagtatgtaaaaaacattgctgtctggcttgtttgcagtgggaaacacaatctcttgctttaaggaatgccatattaagaggccctgtggaacaaaccacatttcactgttaagtagctgcacaaaagtacagtacaacattgtgaatctgcagtgtgcacactgaggcattttctgtaaataatagtataacgtgggccgggtgcagtggcttatgtctaattccaggactttgggaggctgaggtgggtggatcccttgcatccaggagttcgagaccagcctgggcagcacagggagaccctgtctctacaaaaaataaaaaaattagctgagcatggtggtgtgagcctgtagtcccagctacttgggaggctgaggtgggaggattgcttgagcttaggaggttgaggctgcagtgagctctgattgtgccactgcactccagcctggatgacag

SEQ ID NO: 19100 - DNA, 1094 bp, Homo sapiens
gagaaaagcccacctttgaatacgtggctgaagataacagccaagaattggtctttcctaaaaatgcaacagataatgctgctagattgttattttgtttgcacttttttttgattggcattttaaaatcggtatttaaactgaagacattgtcatgttttattaatttaacaaagttgaaagtgactgctctgtacatcatgaccttaacaatgttaatgctgtaagtgaaagttcactgtcgtctgtatactaaatttattggtgtttctaacttaaaagtaagactgcagattatcccccaccagccttagtccaggggtgtggctctgtccgggtgcagtatgcagtcatgtggaaccttgctttctagtcctgggaaaaaaagatgtctctaattactggcttcaataaacacgaatccagactgcttacaagttttggtggctttctttatggtgaatcatcccactggagatacattgaattttctgctaatcatatggggtatctgatcacataactaaaaatgtttacctgtctcacttgaaattgtcagaaattctggaaagaataacattgtaaagccatatttattttatcttattttttagagctgggggttgtcaagtctggtcttgaactcctggcctccagtggttctcccgccttggcctcccaaagtgctggagttataggtgtgagccaccacacccagcctggtttttttggtttttaaaaattacaaccatcctcatgagtatgaaggtggtgggtatctcagtgactaacgatgttaaggagcatcttttgatgtgtgtattggccatttatatatctttggagaaatgtctattcagattctttgctcattttaaaattaggttatttgccttttgtgttttttgtgtttgttttgagggtcttgcttgtgtctcagcctcccaaagtgctgggattatagacatgagtcactgcacccagcctatttgactttttatcattgggttgtaagagttatttatgtattctggatactatactcttaacagatataactctttccttttgatatgctccccttaatctctgag

SEQ ID NO: 19101 - DNA, 1025 bp, Homo sapiens
acctctggttttaccataatgcaatgtgccacggaaagtttgggggaggtttttaatgtaattgcactctggttaattggctcgtaccaagccctgccttatgacttgtggaaagcttcaaggagttccactgatgcaaaagggtcttttcctagcttcctggtctgatcagtgctatgagatggacagataagtgtgaatgttttatacagaaaatggaaatgatacatttctcttgttaggtgttttcataaaatgtagcattttttttcttatggaaataagagtttcaggtgtctccccacctagggcaaattcatgcacattgtcatgttataccaccattctggaaatgatttctgtggatttgaaattgcacttttaattttatatatgacagcatttaaatgcaaacactaccatgaatttaatgtataaaatgttgtcaaaccaagggaaaaaaccacagttcaccatgtggagtttactttttttatatgaatgtttgttgtactgtgtctaagcataacttccctaatgtcattacttttacataccagatttgactgaccactaatgtagtactggggataacttaatatcctatgttgtgtcaagactctttgaagactttcttgaattgctttcgtaaaggtctgaacactgttaaggagaaagctgagtatcaacttgcctttctgatagaaatgtttcttgtgccagttttattgttgagatatactatttttttccttttttaattcagttttttaaaaaaacaaatgtattgtggcttccagttaccaggttgtctaggtaatgacagtaaactgactgtagaatgataattgtggtatagtgaccaatagatgccaaacagcttgtggcctcactaaaggtggggtcgcttagtccccgggagtaaaatgagtgacctcagaaacaagaattcctggaaaggcacatgccgaagaggaatatggtataattttaaattttaatgcaaaattttaatttgtctttat

SEQ ID NO: 19102 - DNA, 1026 bp, Homo sapiens
tcccagacctgtgttgaagcctgagcctcggactctcctttcggcatgaagtttgacagtggttaggagtattcttggcctgtggccacaaacatgtatgttgtttcacagctggtccacgacaaagagttggcagcagaagatgagcaggtgttcctaatgaagcaacaggtaagaagaccagtgaggttagaacagaggccttctcatgcatgaaatgccagtccctagggtggggttgggggtgtctgcatgtgggaagtcacaaagagcttgcagtggtagaggggttgagaccaggtctcctcattccctccttatttctaggattagttggggatggaccacctccttaggagatcacctacctgccttgcagactctcctacaggaatagtaggattcgcatcttttaagtgctctttctttggaaatgtggttttctggcataatacttcctatgttgacagttaaccaagtaacctgaccacacttccattatttcatgtagcctcacacagccctgtacataaaggcaggtgatgcctgttttgcagatgaggagagtaacttccccaagctgacagtttagaatgcagacttcccatttctgtcacccagattattgttagatgtgtcctgggtccacctatcatctgcccagtggtacaggcaggtcagcaggaagttttgatggttctttttccaactgtttccttctttttccatctttttcctttctgtcctttgcttgcttccttagcttcaaaactggttacttggagtattttttttcaccatataccaaacggctcaattaaaattttttggcatctgtggtataaaacataggacttagttgttgttaatagtgccctctagtggagtacttggagtaagtttttctctagaccttcagtgctctctgcaggccttggttaatagccagtttgtccctctctttgcagtcactccttgccaagcaaccagccactcccacgagagcttctgtgagtaccttacact

SEQ ID NO: 19103 - DNA, 1079 bp, Homo sapiens
atatgtttatgttttgtgctgtccatgatagagaggtggtgtctgtagtcttttgagtcctgttaactataaaaagccaatagcagttggtgccgtggttccacaccctggggtggaggtgagagatgagttcctgccatcttttttgggatggcccattagcctgttggcacccatccctcaaaagatgggtttaatgataaatttggtcgcatgtaggcatctgtctgggaaggaatctgtgtaccttgatactctgagagtgttttcctgggctaacctcagagccaatactttacttctcaggaagtaatctgtgggatcaagacaacaatttacacgttaaaaaataaactctacagcccactagcatcaacatagctttatgcttttgacttcattcatctgctactatgacctttttacttttttatttatttatttatttttaccagtgtgcagtatgcctatgtaatactataagcgttttagtttttaaaattgtaatgctttctgttgctcatatattgatcaaaaactgatcaacctatgagtagtactttgaggttgtatgtgttcgattttgtctcctcctgcagtgaattgatttttcttgagcagattgattagatggagctgccttgatttacacatcagtgaaagaagagaaaaacctcgacttgttgtataagtatattgttcataaaacatacggtttccacttcaccacacctgccttagttgtggaaaaggatgccgtttttatgtgagttattttgagctgatgctttgaaactcttctttttaaagtacatttgctttttacattttaccccttcaaggaaggtgccttctgtctgtgtcttctacagccagctctctcactgcaccttctctctgttcctttccggattatgaggcatctgcctgagggaagtgggtggtgtggtcaggggtgctgcctttcttcctcgagagcaagttgccaaaacctaagccagccatttttggcactcactgtcaactctggtaaaatactggctggggagggaatatagggaattgtgcttgggggatcc

SEQ ID NO: 19104 - DNA, 1057 bp, Homo sapiens
acctaaaattaagcttgataatggaatgtatgtttttccttcggttactctccgctctttcccttttccatcccctttccttttatttttctccccgctctgcacctgccagctggcccccaaggaaattaagggctcctcttctggtgtgaaatgctggctccctgaaaacatcattttaaaaagcatgttaataaagcaaagccaagtgtattatgcactgcggtcaagagcactacttcacagtctttagtcttcggaggaggagggggaaatgcaggatatttatgaggattctggggtcttccttaaggctagtctttcaatgcagggcttgagtagggttaggccaagttcatgatataatggtccaaggttggggaataaattagaagtaccgaatgttatcttctagccttgggtccttgggtgggtttcttaaattttttgagcttcaggttcctcatctgtgaaagggttagataagattcagtgagataatgtgtgactctggcacatggtgagctctagataaatggcgcttttgtgtccatcagtctcattcccaaagcctaggctttcgggtcggtcatccggctgcccgacccgcgacggcgcaggggaatcggcgagcgtggcggggtgctgcgctgcgcccctcagccggcagaggccgccagcgcgccctcggtccggacggtgcccgcccctgccaccgcctccccgcgcatggctgccccggcggctgcctgaccgccgcccgccacctcggcggcctcgcaacccgtgggagcccgtggccatcgcagacctagaggacacgttgggcggcgcagtcgccgcggcaaggtcggcgggcggcgcggcgcgagggacggcgagcggggggcggcccggcccgggtcctcgcgggtcctcggcgggcccgggggagggccctctttgtggctgcagttggcaagatggcgccggtgggggtggagaagaagctgctgctaggtcccaacgggcccgcggtggcggccgccggcgacctgaccagtgaggaggaggaagg

SEQ ID NO: 19105 - DNA, 1047 bp, Homo sapiens
caaatccaaattaaagcctgattcagaataatttattttaaactaaaaccaagtagtctcttgtgccaaagtagcaaaattttctgccaattcacagaaaagggcaaattattatttattcagatgcagtccagaatctaagaagaggtacagccagatggatggactggatgacttaactatagcagaaaaaagtataaattgaaggttttctttgtttttttttttttgttttttacttctgtgcattctgtaatcattttgcacagtgccattatatcccttcacttccttcaggttttattcaaatgctgtcttctctgcgatgccatccctgactctcctatttaaaatacaaaccccttctcttgtatttatatctcccttatttgctttttctccttagcacctatggtcagttgacatactacacattctatttatttgtaaataaattctctctctcttgctgctaaaaagtagcatgagggtaagtggatcttcttgtcttttttccttactgtatccctactgcctagaacagtatttggtgcacagtagtctcaaattctatccagtcggctgagcgcggtggctaatgcttgtaaggcctccgctttgggaggctgaggtgggcggatcacttgaggtcaggagttcaaaaccatcctggccaacatggtgaaactccatctctactaaaaatacaaaaaaattatccaggtgtggtggcaggcatctgtaatcccagctacttgggaggctgaggcaagagaatcacttgaacttgggaggaggaggttgcagtgagccgagatcacgccactgcactccagcctgggtgacagagtgagactctagtctaaaaaaaaaaaaaaattctatccagtccatgaatatttgggaaagaggaatcttcaggttatagaagatgcacaagtttttttcttagtagtttttttgttttgagtaaatatagcggtctggcgatatttaatatagatccttcctaaattacaaatgcattcagaacaaatatacctttct

SEQ ID NO: 19106 - DNA, 1040 bp, Homo sapiens
tattagccaggatggtctcgatctcctgacttcgtgatccgcccacctcggcctcccaaagtgctgggattacaggcatgagccaccacacccgccggtgtttcccaaacgtttttagccaaggaacccttttctctcagaggatcttgtgaaattcacatgctgtggtacacaatttgggaaagaaacattgatttattagcctatctttctttataagttccatctgattttcttcctccaggaaggccattacagtctgtaatcacaatatagtttgttttatactgtgaatgaaatatgcatgctattacaaacaacttttcctttatagtcagtaagctttacttttttttcctttattctgttcactttagtttcttccttcaaagaagcagtatcggcaaggtaaacaattagagaatatagttggatgtgagcatctaatgatgcccctgtgttttgattgcttgaaaagctttgactttaaaaacgtgtattatttctctgagaaaaaagttaactaatttttgtaatcttgtaaatcttcatatgtttggtagtttaagaacttagaggtgtactgtctgtgtttatacattgcatcctgtattaaagctaaatcttgagtaatgttaatattcattctggttaacaaattttttttttttgagacggagtctcgctctgtcccccaggctggagtgcagtggcgcgatctcgactcactgcaagctccacctcccaggttcacgccgttctcctccctcagtcttccgagtagctgagactacaggcgcccaccaccacgcctggctaattttttgtatttttagtagagatgggatttcaccgtgttagccaggatggtctcgatctcctgaccttgtgatccacccgcttcagcctcccaaagtgctgagattacaggcatgagccaccacgcccagcctaaaaaatcttacaaaaccatgttagtcaacttagtgaaatgacttttagcttagtgattaaccactcttgtacaggattatagatgt

SEQ ID NO: 19107 - DNA, 1030 bp, Homo sapiens
gttttggctctcaggtattggttcgtttacaattattgatggaaatcaggtcagcggagaagatgctggaaacaagtatgttctattctcttcaaatatattcacgttaaggaaggcaaggcctgagtcttagcttcacctcctcagtcagggtgactcgactctcagtggaaatcatccttatgtttgggattatggtgaggaagtgagataatataggtaaagtgctagtacagcatctggcaaatagggcattaataaatgttacccatcattactgtctttattgttattaatacaaaggagtagtcgttattcctttattcatggaatatgggcacttcctaagctcttgtattgatccgtaggtgttagcatataattaacaataatgcctgttgtttgtgatgtcttttaggcttagtctaggggtatctctctttacagtgtcaacaaaaatgctgttttaaagatggcctgtatattattctttaaagattatatttagactttcagaacatgcccaaatttggatttaaagctcaccttttcagggacttgaagtctggtatctctcattgtgtttgtcagtaacaacaacagtgagtaaatataagggaaaccagcaattagttcatatttagttttgatgccttttctttggatcgtagtgccagtttctgccaggcacagcacagcttttttattgatatataccaagaagtcttgttatctttgcttacttggtgggttagagtagaaagtgataaaaataaggtttcttcttatggagccagtgagcttataccgaaaagtggcatcctgactctgatcagcagcctcatatctgggccttgagacatgtcaagggtatgtgtgggaggaagcctgaataaatctgttacagttacgtgcaaaaacaaatggttcaatacaccgagagtggtctgtggaacaccggttctagggaacgataagagctgttaaatgggccaatgggttccatagtgaaattagtttgggaaatgga

SEQ ID NO: 19108 - DNA, 1094 bp, Homo sapiens
cagggccatcgaggcaggagaagggggtaggctaaggtcggggcatgggtcaggcccttctctgagctaacaggaagggaagcttctctcagcacctccagtggggagggatttggggaacaggccccaggcttaccctcctgcttccccctcagtccctcccagtttcttgccacccgtggccaagcggaacctccaccaccctcttccccagacactctcgccctgcctccccggatccgaccccaggtaggagggactgtgctgggcctccggtccaggtggagtgggatagaaagaagcctctaccctggcgctcgcctctgcttcttttggcgatgtggggccctcaggctcccccgtgtctctgcagaaaaagaggaagaggcgcgtgtataaagtgcgaacgtctgagacctcggatccggcgtcgggtgagcgcctctccctgtccgggtcctgctctgggaactcgagggaggggaaggcagagccacaagcgagccgcagccactgggctcatgttcccttcccttgcgcagggcctagggcccccagccgccgctccagctcgtcgacggattccgcggacgccagccctgtgcacgccgctggccctgccggcgcctaccactcggcgtcggcagagtccgtggacgagattccagtggcgcagacgcgcctgggcagcgccgctctggccgccccgcggggccggggccgacagcccacgctggcgcggcaggcgcgtgcgcccgccgttttcgtgagcccgagcagcggcgagcccagggcgccgggcggccgggaggctggtctggcttagctgggccgagaggccggagggccgagttagagcggccggcctgactctctatgcaacaccccatccttgccgcaccgagtgcactttaggggcccctacggccggcgggatcggcctccctcccccacgactcagcaatacccgccccaccggctgtgatgctccaataaacttttttatgcttttgcggacgtcgcgcttactttcttaatggcaggggccacgggccatccagaagcccgaccctggccagtggaccgggggcggg

SEQ ID NO: 19109 - DNA, 1067 bp, Homo sapiens
cagctgggattacaggtgtgcgccaccacacccgactaatttttgtatttttaatagagacaggatttcaccatgttggccagggtggtctcaaactcctggcctcaagtgatccgccctcctcggcctcccaaagtgctgggataacaggcatgagccacagcacccaccctcatcttctatttattttattttttgagataggatcttgctctgttgcccaggctggagtgcagtggcatgatcatagctcacctgcagccttgatctcctgggctcaagtgatcctcctgcctcagcctcccaagtgtctggtattacaagtgcatgccaccacacctggctaatttttttgattttttaatagaaatgaggtcttgctatgttgcccaggctggcctcaaactcctgagctaagagagcctcccacctctgcctcccaaagtgctgggattactggtgtgagccaccatgcctggccctcactcatcttgatatggaggagaaactaagtctcgagaggtggtgtgctgaggccatggacagagctcagaaacagtgatatttctgttcactttccactctgcacagggctcttcaggacccagaagtgattgaatacagatactgtcattagcagctcactggagcacctgctggggactgcagtggacaggctggcagggttacccaggcatcatggctgcctcaccagcaccagaccagccacccggggttgagaagccatattgttccagcaggtggcaccaaagggcgcagcagaggggcagagttggctagggactctgaaggcttcttggaggaagtggcttcctaaactccaacccaagatgtctgtgggcccaagctgagttttgaaggcacagggcaagggagggcctctgggcagaggaatacagacggccccacccccaccccacaagggcctctttggcctggcgggcagccggccctccactccccagctgtcttcccctggagggagatgctgaccagctggaaccttattccctcctattgaggccaaatgaggggaggaatggtgg

SEQ ID NO: 19110 - DNA, 1032 bp, Homo sapiens
ttatagtagtaaacaaaaacccagggaagtttagaaacttcccagatcatctagcagtgaagtgagagagccaagatttgagcacaggaatttctggctccaaagcttgagtccagcaccagtaattgactcttcctgggtagtcagttgtcctggggcccatccatcatgtgggacatcggccatttctttttctttttcttttttttttttttttttgagacagagtttcactctcgtcgccaaagctggcgtgcaatggcgcaatcttggctcaccgcaacctccacctcccgggttcaagtgattttcctgcctcagcctcccgagtagctgggattacaggcatgtgccaccacgcccagcgaattttgtatttttagtagagacggggtttcttcctgctagttaggctggtctcaaactcccaacctcaggtgatccacccaccttggcctcccaaagtgctgggattataggcgtgagccaccatgcccagccaagacattggccatctctatgaagttttcttagtttttgttgcaagatttattgtctgtagttactattgtttctgctgtaagctggcccctcctgagcctgtgtgaacagaatccatcttggtccatcagggtaagctgcaccctgcagtgagccatcagaaataatctgtgtcttaaccattacctcatctgaaaacattcagaaaatgtttgggggcctgagggaagatgagcaccatggttactgaagatgcacatacctggagaaggcacattcttgtgaccggttgccccaggtcacaggcatccaggcctaaggctgcccctccaaccaggaagtacctgtggagtgccagagtggagcctggatggctgtggaggagaagcccaggtgcacacattgcccagatgggcttcaactagaagggtaagcacatgaattagtccagcccaagacttggtatccagttttccacattgcatgtaggctctgtgtaatgctttcagtctcgtttcctaacccacccct

SEQ ID NO: 19111 - DNA, 1092 bp, Homo sapiens
tcgattccctccgcctcagccaccaccgccactgccgccttctgactagtgttgctataaataaggctggcttattcctgaatttcaaaaaagtggaattctacagtatgggtcttctgtgtgtgggcctgccatctttcactctacataatgtttttaagattcatacaggctaggcgaggtggttcattgtaatcccagcactttagaagactgaggcagggggatcacttgaggccagcaggttgagaccagcctgggcaacacagtgagactcacatctctacaaaaaaattaataaaatttttaaaaagaaaaaaattcattaatagttaattcctttttactgttttactgtattccattgtgtgacatcataatttatgatgtgaacatttgtttctagtgtggggccattatgaataaggctgctgtgaacatttgtataattttttttgtggacttatgtttttattttcttagataaatatctataagtggagttgctgtgattgggttgatatatgtttaactataagaaactgtcaattttccaaagtggttgtactgttttacattcccaccaagaatgtatgggagttccatttgccgcatatcctctccaaacttcaggattgtaagtcttttttttttttttttgaaatggagtttcactctgtggcccaggctggagtgcaatggcgcgatcttcactccctgcaacctccgcctcctgggttcaagcaattctcctgccttagcctcctgagtagctgggattacaggcatgcaccaccacaccaggctatttttgtattttcagtagacatggggtttcaccatgttggccaggatggtcttgaactcctgacctcaggtgatccacccatcttggcttcccacagtgctgggattacaggcgtgagccactgcgcccggacatttttttttttttttttgagatggagtctcgctctgttgcccaggctggagtgcagtggtgcgatctcggctcactgcaagctccacctcctgggtttacaccattctccttcctcagcctcccgagtagctgggactacaggtgcccac

SEQ ID NO: 19112 - DNA, 1035 bp, Homo sapiens
aggggcacttgctggccttcctctctctccagcagtaaggtctggtcttcctacgactcttagcaggtgacagtaatttgtggcacttccaaaggcagctgtggggctggggcgggtagggtggtggaatgaagatagctccatggctcaactggtctaaaccagctgtgtgtcagctggggtgcagagtgtagggaattgttcctgaactgtgagggaacctagtccttgtacatacccatcagagatccctgaggaaagttagtgccctaggggaactcatctgctactatctagggcacccccaagccagagaggtgagctttgtggggtcttctcttcttagaaaaggatggagttttctggccgggtgcggtggctcacacctgtaatcccagcactttgggaggccgaggtgggcaaatcacgaggtcaggagatcaagatcgtcctggctaacagggtgaaaccctgtctctactaaaaatacaaaaaaagttagccgggcctggttgcaggcgcctgtagtcccagctcctcgggaggctgaggcaggagaatggcctgaacccgggaggcagagtttgcagtgagctgagatcgcaccactgcacttcagcctgggcgacagagcgagcctccgtctcaaaaaaaaaaaaaaaaaaaaaaaaaagaaaaggatggagttttctgcttgcttagttcaaaaaaaaaaaaaaacagaaaaggatggagttttctgcttgcttagttcagggcatatcctcacctccagccatcccgcacctgtactccagtctctattatgagtcatcacaggcctaatcacatgcagggcctccacccaggatgctgggagcctggcctggctctgtgtgttctggttaggttctggaaggaaggaaggtttgctgactctggtggctgctttgggatcccaaacaccccagtgatgccccaggaaatgcctttgtgatcttatgggcctctgaagcccagaccatagcacccagggtcctgttaaaacctccagtc

SEQ ID NO: 19113 - DNA, 1050 bp, Homo sapiens
gtcactccttctgggaacaagcctctgctcccctggcatgattgggcactctgtcagccggtgcctgactgaggctggtagggggaagaaaccaactgattgtcaccctgtagttcaagcctatagggtgcctccaggcagccctgcctggaaaagggctcatgacacaggagggtctctgaattagctggagcagctgttcagcaccagggctgtgggaagataggttgggtttgtgtacctggtgctgccttgcccctctctgcctttctcattctgttgtttctcgttccgagagacccctggcacatggcctagatgggagtgaaggagtagacgtcccaggccttgtagttctgagcagcaacaggttttccagggccgtccagaacagagggtggtttggtatttgggccccagaggtacttagctggtgattcaagcggtggctaatggtgtaagtgctgcaggacgctgtggtccatgctgagaagcttgtttcagataatttgctctctgcttccctgccactcctccctgggctggcagcaccctcggccctatggccagcaagtgcgtgttccttttctgtgggcctcctccctgacccacaggagacctgtatcaccccggcacaccagggctgctcagcagccttttcaagcgaggcagctcagccagacctaaaaagtcttattctgggcatgggattcctcctctatactgtcctgttttcgtcttccaaatactagcccccagcctctctcacagaagtaaacattctaagactggatttttcagggcaagttaagtcctttgatagaaaaggtttcatcgacagcagagggccagttctgaaacctgagtttgtcagtgtctgaaaacagagattctcaattgtactgggtgaggctgaggccacattagggtgaagcagagcggagaccagttcccattcagtcccctgccttcctagtgccagcagaggatctgtatcccgagaccctgggaatgtggggatgccactccgggagctcctttcgagaaggg

SEQ ID NO: 19114 - DNA, 1035 bp, Homo sapiens
tccactcagattctcaagtcgaggcaggggtttgtacagaggctcccgagccatccactaataaacaccatcttacctgtggagcagagtctgtaggaaggtgttgagggctagctgctggagaagggagaggcgtctcctgtggggaggcctaagcaagttgtgttttgagcacaggtgctttagtgattccccattcccatagaatgttgtggaaccagagccctgttgcagcgaccaagcataactcttcttgagtgacctttgacctccccgtttgcacatgtgctccaaacataaacccttacctagtgtcaggaagcctatgtgctggggatgggatgacatgtggtgttgggcatagccccaggcccctctgaacagggcatggtgagtggctgttgtctaaatcagggaaagccctgactgttgcacttgtgcctgttggactgctgactgcagggcagctggggtcgtttgctgcttggtcagctgaggtactgaaggaatggagactgacttttggcagcctctgccatgtaaagtcaggaagctgattatttgggctgcagtttttctggaaaaatgtgcaagttttaatctaatgggaattctgccagcaggctaagacagcttctgctcctgatggtccttgaagctagcccctctggcaggaggaggcaggcagtttgtgtgtttctgggaatgactgagcagtcctgtccagctacaggctatattggttcatgtctttgacctttaaggatccaactctgtctcaaatgctgcttaaaacaaagcagaagacaagttcccttcgaactatgaaactccctctttgaagtgctgttccttttgctttgctcctttcccttctctacctttttccctaagccatgtgggccacgttatcagggccatatgctgggttgtttcctttccttgttcctgcccagcatgattgggatagctgatttcagaggcaggtgagtaggtcagagccttccctccctgcctgaccctttattttggtag

SEQ ID NO: 19115 - DNA, 1036 bp, Homo sapiens
gttaagggtagtgtctgtgtaccaaaggacatttgtggtgttcacacactgctatgcttgtgtgcttcagctccgtaattacacagggccatagaggtggaggttagacccctgtggggtctaatgggaactctctcaaattaagctggggcattagtggctacaccctccggttacgggcagtgcctttgggtttttgaatgtggcaggctctggaaagtcaaggtttggtacttgagactctgttagtacattagagaaggagctcagaaccaaggatgtgtaacctgcctagggccaccaataggggctgttctgccccttttgtctggtaatctctcggggtgctttgatagtgctggtgacattgggcacatgagggtctcctgacccatacacagaaccacatttctccatacgagcaccctaacttgaggcccctttgctttctggcctattctttttttttttttttgagacggagtcttgctctgttgccaggctggagtgcggtggtgtgatcttggctcactgcaacctctgactctcagttttaagcgattctcctgtctcagcctcctgagtagctgggactataggtgcgtaccaccatgcccagctaatttttgtattttgtattttatggggcttcaccatattggccaggatggtttcgatttcttttttttttttttgagatggagtctcgctctgtcacccaggctggactgcagtggcgggatctcggctcactgcaacctctgcctcccaggttcatgccattctcctgcctcagcctcccaagtagctgggactacaggcgtccgccactacgcctggctaattttttttttgtatttttttttagtagagatggggtttcaccgtgttagccaggatggtcttgatctcctgacctcgtgatccgcctgcctcggcctcccaaagtgctgggattacaggcgtgagccacggtgcctggtctagcctatattttttgaatagttctaaggcccaggtcactcatctctgtaat

SEQ ID NO: 19116 - DNA, 1050 bp, Homo sapiens
cagccccctctgtccactgttgccctcagcttatcttcagagcctgcagagcctctgttggtcaggcatccccctaggccccggaccaccggccccaggccccggcaagatccccacaaggctggactgagccactatgtgaaactctttagcttctatgccaagatgcccatggagaggaaggctcttgagatggtggagaagtggtgagtcctgggcacatggggtagggagaggaacccctcgggtcatgatcagactgttcagcctgctctatccccaccttcttgacagcctagataaatatttccagcatctttgtgatgatctggaggtatttgctgctcatgctggccgcaagactgtgaagccagaggacctggagctgctgatgcggcggtgagaaggcggaaggtgtgggggtgctggctgggggagttttggtgctgattctgcctgtcccttctcttcctccactgcaggcagggcctggtcactgaccaagtctcactgcacgtgctagtggagcggcacctgcccctggagtaccggcagctgctcatcccctgtgcatacagtggcaactctgtcttccctgcccagtagtggccaggcttcaacactttccctgtccccacctggggactcttgcccccacatatttctccaggtctcctccccacccccccagcatcaataaagtgtcataaacagaatattctgcattttggtgcatgtcctggggccagccaggcagggactgattcccccccacaactccccagcacagtctggagaatggcatggattcagacaaacacttttatattaaaagctaggggttagcaggactggagtacgcaggctgcccacaagttcctagcttgcaggctctggctctcgaggtcccacacgcctgatgtcaatcacctgaagccgctccagggcagtctggaggatttccaccacggcttcttccttctcgtcaccctcctctggcatttccgactcagggagctggaaggcctggctcatgtaggtgttcactgt

SEQ ID NO: 19117 - DNA, 1078 bp, Homo sapiens
ctcctgacctcaagtgatccaccgcctcagcctcccaaagtgctgggattacaggcgtgagccacggcgctgacctattttttatttttttttgagacggagtccccctctgtcacccaggctggagtgcagtggtgcgatctctgctcactgcaacctctgcttcctggattcaggcgatcctcctgcctcagcctccagttgctgggattacaggcacgtgccaccacgcccggctaatttttagtagagatggcgtttccccatgttggccaggctagtcatgatctcctgacctcaagtgatcccccacctcagcctcccaaagtgctgggattacaggcgtgagccactgcgcccggcctcttttaggtactcgtaaaaagaaaaccaaaacgacaagtttcactttccaaataagaaataaaaccctccttatccatcttcttgtttcagacctacattgccccaccagctgccattttttacccatcgggtgctcatgacacgtcgaatgccactttgaacaatatgcgtgtgtatgggaccattttcctgaccttcatgaccctggtggtgtttgtgggggtcaagtatgtgaacaaatttgcctcgctcttcctggcctgtgtgatcatctccatcctctccatctatgctgggggcataaagtctatatttgaccctcccgtgtttccgtaagtaacccaggaatttatctgggcattgcatggacatccctcccatgtagccagcctttgatgccccagatcccagagactgcagggtgggcacaggcaggggctttgacctgagcaggtgccggtgcttctgtccctcacagggtatgcatgctgggcaacaggaccctgtcccgggaccagtttgacatctgtgccaagacagctgtagtggacaatgagacagtggccacccagctatggagtttcttctgccacagccccaaccttacgaccgactcctgtgacccctacttcatgctcaacaatgtgaccgagatccctggcatccccggggcagctgctggtgtgctccagggtgggtcctccctcccgtc

SEQ ID NO: 19118 - DNA, 1075 bp, Homo sapiens
ctgggattacagatgtgggccactgcacccggcctttttttaaaaatgtatatttttatcatttcctttttttagtagagacggggtctcgccatgttgcccagactggtctggaactcctgagctcaagcaatccactcaccccagcctcccaaaatgctgggcttacaggcatgagccaccacgcccagccaagattgactctttgaaagaatttcttgatccctgttcccagattttcaccagagacattgtctcagcagcagatacaaccagcaacatgagatgactcttgtccccctgtgcttgtcaccctggggcctggtcatgactctctgagtcttttaagggtgttagactttgatagaagcacagattcagggcagggagccgtggacactcacctggtggcaggcactgtgcggggccttagggccaaaaggctggatgagacagtccctcctctggtctggaggagtcagactaacaaaggcacaggcctcaggagggtgaggtgggctgagataggacacacccagccagaggaggctgtgggctgtgcacagggcattggaggatggtggccagtcagccactgctgcagactagagctgctcccgcaaagcagttatttccacgggccgtgctggacattcgagtcagatggggataggatcgaatgtcagcctagatgcttacccaccgtgcagccctgggtaggtctcccagcccctctactcatccacaaacaggaaaagcagtccctgtccctctgggtggttgtgcaggcttgtcacagggagaccccttgaagaagaaccagccttgacctgtgcacactttcatttctctgctgtagctgggggctcctatttcatgatctctcgttcactggggccagaatttggaggtgctgtgggcctgtgcttctacctgggaacaacattcgcagcagccatgtacatcctgggggccatcgagatcttgctggtgagtcaggctgagccctggccaactctggccatgtccaaacagtccctttggactccaaacagaaggctcaggctgttcatcc

SEQ ID NO: 19119 - DNA, 1029 bp, Homo sapiens
ccgccattgcaggtcaggccgcgggcggggggcacgggaggctgcggggagcgagggccgagccgggattgggggcgagggcgcgagggagcgggaagctagggagccggggccgggcggggcgcgcggctcggagagaagaatggcgagccgaggggcggggagcgcgggcgggggaggggtggccgggaagggggagggcggcgggagggcggcgcggaggtgggggcaagcccggaggggcctccggggtgggagggccaggagtgtgggggaagggagcggtgtggagacggaaggcggagggaaggaagggagcgagcggggcggagcgggagaagggcggaaagggtggccgagcgcgggcggaggacggagaagggggcggcgagggccggaatctcgaggtacgtgcgggaaggggctcttcccggggttgggagggagcccagcccgctatgcttgcgggagcggagtagaactggaacctaggaagtagcgggaagagcagaaaggggagttcggggtgggggttaggaccgtgaggttttgttccaggtaacatttgtaatcgtggaggggggaggcttctgggagaggtaattggaagggtggttggagagtcattccaggttcttttgtgggagggaagccgagagacgagtggggtggggtcctggaggagtggagtacttgagaaccgggaacaatttggagaacgagggtggtagagaaaggacgtttaaagagtaatctttgggaagagggtgaacggtttggaagaccactccagtgggtggtgtggaggaaggcggtttaaagaatagtttccctgggaggcaggaaaaggggttaaaacagcttgtaatttggaggggggtggagaagaggggggaagcggattgagaagtcccagaaagtgggtgggactagaaataggaagtgtttgtagctctagcagaaagggtgggagggggccgagagggagtgggtggagaagatgggggtgggtgggaggaagagcacaga

SEQ ID NO: 19120 - DNA, 1052 bp, Homo sapiens
acaactggaaagtcaggtgtcttcacgctctaactagagcacagggatggaccatagccatgctaacctttgttaacccctaggacttgtcaaggtgtttaagcagtaggaatgaggaaacaacgttctgattcaagtaaatgtaactagaagtaaaaatttaaaaacttgtaagctcactaaagtgaagctctgcagacacggttcatatcctggtggctgagggcacataaccaagaacttacacaagcacccccaagccacaaagatcccagctgctatggttgaggggtaacctgccagcactggagccaagtgttggagctactgatccaaagttagctcacttctgcagaggctctgaaccagagcaaagaaatggcccagtgcaagcccagtgtgagccaagagttggccatgtaatcagttctggcccaaccaggtttgaaaggtagaggagcagtactgggttttggagagggaaggttggaacaaagccctttgcaggctataagcttcatttactaggccaggtctttctgtgtgaatgtgctttgactttggtctgtttatatgcatggggtaaacgtgggacagcctctgcagcttcactgcctgccggacgtgggtccagggctgccagctctgggtccttggtctgttgggggtcgcaaactgaaatggccatggggctatctgggcaggcaacacagatgagtggggatgggggaccccttctgtacagagcagcctctacttagtggccgctgacaggctgccccatgaggacgcaggcccaacattacctaatttaatcttctagaagtcagaattctgaatttttatgtcaactctcgactttttttttttttttgagacagagtcttgctctgtcgcccaggctggagtgcagtggcgcgatctcggctcactgcaagctccgtcccccgggttcacgccattctcctgcctcagcctcccaagtagctgggactgcaggcgcccaccaccacgcccggctaatttttttatttttagtgagacggggtttc

SEQ ID NO: 19121 - DNA, 1052 bp, Homo sapiens; identical to SEQ ID NO: 19120

SEQ ID NO: 19122 - DNA, 1196 bp, Homo sapiens
agaaagatgatttctcatctcagctctacagtgagctcgataacctaattaccagagttgggaaccaggttgaacgcttggtaatggaccgagatgagggacgttttccagttagaagaggagctgctgtctacatttgccatctgctgttgcctcttgtcaatgggaacagccaggaccgggggcaggggtagggaggttgaggatgatgcagttcagctgttcccactcaccagggctgtaacttcctttgcagggctggaccccaatggagaacaggtggtgtggcaggcgagcgggtgggcagcccgcatcatccagcacgagatggaccacctgcagggctgcctgtttattgacaaaatggacagcaggacgttcacaaacgtctattggatgaaggtgaatgactaaagctttgctactggggctgaggattccggataccaagacgcaaacactttcactttgagctgggcaaatcttacttggcatcaacttggatggctcgcatatgacaggaaactggattgccaaggcatggcagactgagctggaggaagatgtcagaaatgtttgccctgaaatcagttacggacaaaatgttggctacaacttgaggagaaaaatcacccccaaaggagtggacatttcctaacaattctgtatggaggaaggtggggtaattgcattcgtctgcagtagacacgagttcctcggacctgtataatctcccaaagccaaggtttggtaataatgtagtccccaaatacctgaaagctgtctttaaaaatgcaggtaagcatgtgactggccatttgtgccgagttcttatttttacggagggcttgtggccttagacgccagtttgcttatggaaatgaaagagaatagtccctgttcaaggatgtgtttcatgacagcacgagtgtaaatgagtgcccacacattttaacagccttgggcaggattttgctgctgagatccctagagcagctggttcttggctcattcttggggtagaggccgtggatcagggctgggggcaggggtgacaattgagaagtgcactgagccctttcctgttaacaattgggcatagaaagcaggattagtacttcctggttatacacttattttgtaaaaatagaattaatatcacagcaaccaatgtgtaggtttaagaaagtggccag

SEQ ID NO: 19123 - DNA, 1067 bp, Homo sapiens
cctgggcaacaaagcaagaccctgtctctacaaaaaattttaaaacttagccagacgtgatggtgcacgcctgtagtcccagctacttgggaggctaaggtgggagtatcccttgagcccaggagtttgaagctacagtgagctgattgtgccgctacactccagcttaggtgacagagcaaaatcctgtctctaaaaaaaaaaaaaaaaaaaccaaaaccatgtattctctctatagttttatgacactcctccactggaaccggaaactatacccgtaatgtaacaagttgggtctgaacttcacattaataaagtgacacaattgtggacaatgaccataattctgagtttaaatgagacagtaaaataatgtactgttaaattactttgttcaggaaaactggaggggcatacatttttttgcctagtttcatgcactgctgtcccagtggtgataggctgtcccagtaattgacggtgcccttgtctcttaggtaactaaaataatcctggccttccatcgcgctgaagaggctgccttcagcagcggggagcaagagctctttgtccagttctgcactgtcttcctggaagaccttgttccgtatttaaatcgctgtctccaagtcctttttccaccagctcagatagcacagactttaggtaagagaatgaaaattctgtaaactgccttactgatgtgtaattcacatactaaataattcatccatttgtgtaagtcagtgttttttagtaaatatgaatccaattttagaatatttccatcactccaaaaagatccttcatgcacgtttgtagtcattcctcgacagcatccttagtccctggcaacctactttctgttgccatagatttgcctcttctggacatttcataaaaatggaatcatacattatgtggctgtatctggctaagcggaagaagccagtcacaaaagaactacatacgtatgattccatttatgtgaaatatctagagaaatggtttttacagtcttttttttttttgaggcggagtctcgctgtgttgccaggctggagtgc

SEQ ID NO: 19124 - DNA, 1029 bp, Homo sapiens
catttccacttcatcactgttggagatcatggagctaagaagcagagccaagtccacccatgtccttggcagagatgacaggcacacagcttgtgcagtgccagaatatcattagcgtttcccttctttagtggtttgcttaaatttaaatccctggtaatctgtagaaccttctcctaggaaatggtgaagtctattaggagccacttgtgactccatgacctgttaaaaccagcaatgtgagtattatttggagtaaatttgttccacgtcaagttctggccttctgatgcaaatgcaaaggaacttagtctgttatgaacccaggttgatgacagaccagtccttgtggaataagattccctttaaaaactctttagccagtcgtgacatcaaccctagacctgtctgccttggcatttgctgtcaacatctgctgggctatgtaggcaggttaatcctccacttctcatgtggttgaaccagtgtgttttttggtaaaatggtgattgtagataagattagttccctgatcccctgccccctgtcccctgcctcttttcccaattcccttccttatgctggacttttaaagcttaaaaaaaatccgattgaatataaatgcctaatttcattctttgtgaaatggttgcttcctcctgattccctaattgtgctgtgttcgtgtcttgcactggaattcaacattcccttctccttttgtactgtgttgtgcttgctgtctctcccggacacccttaaagactgtctttttagcaaaaaatttcagtaaagtgttttctgtaatctttttttaaaaggtgagaactaattattgtccatacttgtagcattcttcattaaagtcttgcttctctcaactgtaagtagctgtttaattgcagcacagcatgtatccacagagggaggtagcaaaatgttaaactttgctgaactattttgatcaagaagctgatgtcagactttattgaatgttttaatccttggaagctatgtcaaacagatgat

SEQ ID NO: 19125 - DNA, 1034 bp, Homo sapiens
ttgtattgttgaaaagtgactaccttacaagcagaaagagacagcttccagtggttcataacacttgaacaataattgtttgtttgttttttttgagatggagttttggctcttgttgcccaggctggagtgcagtggcgcgatctcggcttactgcaacctctgcgtcccaggttcaagcaattctcctgcctcagcctcccgagtagctgggattacaggcatgcaccaccatgcctggctaattttgtatttttagtagagatggggtttctccatgttggtcaggctggtctcgaactcccgacgtcaggtgatccacccgccttggcctcccaaagtgctgggattacaggcgtgagccaccgcgcctggctttataattgttagtttttaagtacagaaatttgatatgatgtgagagagagttattttgatgtttgatattctgattacacctgtcattacaaaagtaaaaaaagatttttcccctcctttttaggctgtcattatttgtatcaaaaacaaagaatttgaaaaggcttcaaaaattttgaaaaaacatatgtccaaggaccccacaactcaggtaaatttgatacatttttgctcctgtgacttaaattcatctcattgctttttgtggggaaatagggaaagggttcttggtcaggaatattacttaaatattctcctttcaacatgtaacacctgcagcaagttatcttttatatccaagataactcactgtaagattggcttttcaaaatttagtttttattagagaaattgacataaattattcacttgccttatttctgtctagtttataacagaacattgatttaaatgatcagcaccaggtatggagctgacaaatgtaacacttctaactttatttacattaaatggtgatcctgcagatgtgaggaaacttctttggtgaggacatagcacctgtttcctggtgtcaaaagttctgttggtcccctgcttttattttttcttcttcctttttattcatttgtttattt

SEQ ID NO: 19126 - DNA, 1033 bp, Homo sapiens
gtcacggaatctgttaatgatcgggaaaattctacagacgcctaggttcagtgagccttgctcatgcatttaagctttgtaaagtgccaaaacaatttatttaaaagtatattgaatctttcgcaaagtttatcaagtaagttatttgttaagttagaaccctcagtgcatggtctagggatctctggaggtccccaggaccctttcagagaagccatgaggtcaaaactgttttcataagcagaaccaaaacattatttgactttttcaatgcattggcatttgcattgatggtacaaaagcaaggatgagtaaaatgggtgattccttagcgtgatcaagatggtagtaattgtactagtagtcattgtattcttcactgccacaattttttttaaaactaccaattttaattaagaatgttagtcacagttgtttaaaagctcagaactcccattaaaaaaaaatttaaaaaagaatgtctttggtaaagcagcaaaaactggatgaattttattaactctagagccttgagtaaacatcttttcaggattttgtgtgttgaaatagaaagtatgggccaggtgcagtagctcatacctgtaatcctagcactttgggaggctgacgtgagtggatcgcttgagcctaggagttccagaccagcctgggtaacatagtgaaaccctgtctctacaaaaatacaaaaaattagctgggtgtggtggtgtgcacctgtggtgtcagctacttgggaggctgaggcagaaggatcacctgagcctgggaggtggaggttgcagtaagctgatatcatacctctgtactcgagcctggacgacagagtgaagaccctgtcaaaaaagaaaaaaaaaaaaataagaggaagtatgactaaaatgtttctgctgcataccaaaacatgatggttaccaggaaaagcacttgtgttattattagagttgcatgctgaactagctgcttttttatggaatactattttacctgaagaacaactgacaaattacagttg

SEQ ID NO: 19127 - DNA, 1046 bp, Homo sapiens
cctattaaaaaacaactagtgtgcatgaggtgcacatattttatttatttaattaaggaccttgggcagatactacttttggtctggtaaagaaatgcttaaatattagtcatttccaaggaagaataatttcaagagtacatttttagtataggaaaatcaggtttaggttgaggggaggcatatgccagaatagacattatcaagggaggagaaattcatgcctactttcagaactgttaaggatcttttgaatgggtaccagtttagaataattcatttaacttctattaagtacacattgagtatcccttatccaaaatacttgggaacagaagcattttggatttcagattttggaatatttgcattaaatttagtttgagcatcccaaatccaaaaatctgaaatcccaaatgccctcaaatctgaaactttttgagtgccaacatggcactcaaaggaaatgctcattggagcatttcagatttcggattttcagatttaggatgctcaacctgtagcaactcctttagaacacaagggctatagatttgccatctggcccctcttctggaagagtctttgtgggctttcatctttcagctgcgtatttattattattatttaggctcatagagctccttatttgggtggttcattaggaaaaatctattagaaaaatctaagctctcagagtagccattttcttacgttgactctgttctccttttccagtctccaccacgtactagatcttatgcttattgttactgcagtgtaacaagttactccaagaataagcagctcaaaacagttaatattatctttcagtttccgaggatcaggagtctattagtgattctggctcagggtttctcatgaggttacagtcaagctgtcagctaggtttgcagtcatttcaagactcaactgcttccctactcacatagttgttaacaagactcactttcctactggctgttggctggacacttcagctcctggcctcttcacagataaggctgcttgcaacatggcagctt

SEQ ID NO: 19128 - DNA, 1033 bp, Homo sapiens
tgagcaccggagcgcctggctgcctgccaaggaagtgcaattgcataaaaacagaaagaacaacgccctggagccaatcttcaagaaaggaatttccaaaggataatatttttctaataaatgcggctgcaacctcctgtgcatttaattaaataggccaaatttttgctgcttaggtcatctcaaggctgatacttgagctgtgtgcccagagatcatgcatttagatttatatttttgccagaaaatacaaggttataataaaactaagaactaccatttctttcttttcttttaacctgttctttttttgagaatagtttctattcgtctggaaagtgcaacgtggtgagctccctgatggcctttcacctggattccccacggttccgcctcatgtttctctgcacacacagtcacaaagtatgagtcgtctaggaaaaggatattcttttgcataaccacggtagagttagcaaattcaagaaatatcacattggtacattactattatgtaacatgacagcactggaagtcaccctgtatcagttcgttcttcagctgcctaatgttccattgcgaagagctatgaaacaaactctgttaagtacttactctacattagcccatttaatccatagaacgttaatacagggtacggctgctgttatttcgagcagtcctgagctacaagaggtaagtgacacagcatgtgagtggctgggccaagatttcagcttagtccatctgtacttttttttttttgaggcagtctcgctctgtcgccaggctggagtactatggctcagtctcggctcactgcaacctctgcctcccaggctcaagagattcttctgcctcagcctcccgagtagctgggattacaggcaagtgctgctgtgcccaactaatttctgtattattattatttttttaaatagagactggttttcaccatgctgcccaggctggtcttgaactcctgacctcaggtgatccacccaccttggcctcccaaagtgcggggattaca

SEQ ID NO: 19129 - DNA, 1024 bp, Homo sapiens
gtatttttagtagagacagggtttcgccacgttggccaggctggtctccaattcctgaccttgggtgatccgcccacctcggcctcctaaagtgctgggattacaggcatgagccatcgtgcccggccaaaaaaaaaaactggatatctttaattttgataacaagaggtatatgttttttgtttttttaaaggttaaggtgagctcatcgattcagcacccagaaacacctctgcacatttctggtttccatctgccctacaaggtaatttcttagacaagccaggccgttcatgctcttttctgaaacatgtcacatctctctaagtcatctcttcacagtgaactaaatttacgcggaccaataacatagtttgtccagccctgtctgatctgacttgtatatcatatgtgatttcatctgtgacctgagaggtggctacagatgaattttcaggttttaaaattgtttcttttaatttcagcctaaacccccacaagaaacagaaaaaggacactcagcttgtgagcctgagaacctggaatttagttccttcatgttctggagaaaccctttgcccaacatcgatcatgaactgcaggagctgctggtgaggccttgacttttggtcttctgacgacagctcaacttctcctccactgctcctgtgggttgggagtttgaaaggtctgttgatgtttcagattgacagaggtgaggacgttccaagtgaggaggaggaggaggaagaaaacgggtttgaagacagaaaagatgacagcgatgacgacgggggtggctggataacccccagtaacatcaagcagatccagcaggagctggagcagtgtgacgtccccgaggacgtgcgggttggctgcctgaccacagacttcgccatgcaggtgggtagggtgggcctgggccgtgtgtcacacacgtcatcggcagtggtcctaccgaggtgtacagatgtacacggaactggtgctgtgcagcgcttcttttcctggttctggaaac

SEQ ID NO: 19130 - DNA, 1402 bp, Homo sapiens
ggcaacaggccagcagccaaaatgaaggctttgactatttggcctgaagaattttagaaaaccaggagagaagaccttcacccaacgaagccgtctttttgtgggaaatcttcctcccgacatcactgaggaagaaatgaggaaactatttgagaaatatggaaaggcaggcgaagtcttcattcataaggattaaggatttggctttatccgcttggaaacacgaaccctagcggagattgcgaaagtggagctggacaatatgccactctgtggaaagcagctgcgtgtgcgcttttcctgccatagtgcatcccttacagttcgaaaccttcctcagtatgtgtccaacgaagtgctggaagaagccttttctgtgtttggccaggtagagagggctgtagtcattgtggatgatcgaggaaggccctcaggaaaaggcattgttgagttctcagggaagccagctgctgggaaagctctggacagacgcagtgaaggctccttcctgctaaccacatttcctcgtcctgtgactatggagcccatggaccagttagatgatgaagggggacttccagagaagctggttataaaaaaccagcaatttcacaaggaacgagagcaaccacccagatttgcacagcctggctcctttgagtatgaatatgccatgcgctggaaggcactcattgagatggagaagcagcagcaggaccaagtggaccgcaacatcaaagaggctcgtgagaagccagagatggagatggaggctgcacgccataagcaccaggtcatgctaatgagacagaatttgatgaggcgccaagaagaacttcggaggatggaagagctgcacaaccaagaggtgcaaaaacgaaagcaactggagctcaggcaggaggaagagcgcaggcgccctgaagaagagatgcggcggcagcaagaagaaatgatgcagccacagcaggaaggattcaagggaaccttccctgatgtgagagagcaggagatttggatgggtcagatggctatgggaggtgctatgggcataaacagcagaggtgccttgacccctgctcctgtgccagctggtaccccagctcctccaggacctgccactatgatgccggatggaactttgggattgaccccaccaacaactgaacgctttggtcaggctgctacaatggaaggaattggggcaattggtgaaactcctcctgcattcaaccatgcagctcctggagctgaatttgctccaaacaaacgtcgccgatactaataagttgcagtgtctagtttctcaaaacccttaaaagaaggaccctttttggaccagccagaattctaccctggaaaagtgttagggattccttccaatagttagatctaccctgcc

SEQ ID NO: 19131 - DNA, 1089 bp, Homo sapiens
tagagtcatccgggagctttacacacaaccagtggccgcccagaggcgggcggatcaagaggtcaggagatccagaccatcctggctaacacggtgaaatcccgtctctactgaaaatacaaaaaattagccgggcgtggtggcgggcacctgtagtcccagctactcaggaggctgaggcaggagagtggcctgaacccaggaggtggagcttgaagtgagccaagatcgccccactgcactccaccctggctgacagagggagactctttctcaaaaaaagaaaagaaaagaaaagaaatgctaagcaaagtgttccggtgtgttttgcctgttttggtagtggaagggaagaaaatcagtctttttctttcttctcccccttaaaactatttaagaagggaactgggcacggtggctcatgcctgtaatcccaacactttgggaggtcaaggcgggaggatcacttaggtccaggaattcaagaccagcctgggccacatagtaagacctcatctctaccaaaaaataaaacattagggctgggtgcggtggcttacacctgtaatcccagcactgtggcaggctgagggagctggatcacctgaggtcaggagtttaagaccagtctggccaacatggcaaaaccctgtctctactaaatatacaaaaattagccgggcatggtggtacgcacctgtaatcccagctactccggaggctgaggcaggagaattgcttgaaccgggtaggtagaggttgcagtgagccaaaatggtgccactgcactccagcttgggggacagagcgagactctgtctcaaaataaataaatattatttttaaaaaaagatcccctgggcatgcaataagtaataccatactacttaggcaaataaagcacaattctatcatttgggaatcttaagatcggttctaccactttgtggatcttcagactcaatctctattttagagatactaacattgattgatcctactatgtgccaggcactgtctttcacaacttcacatatatgatctcattcaatcctcatttaattttggcagagaaaagttgagctcctt

SEQ ID NO: 19132 - DNA, 1030 bp, Homo sapiens
agatattcagtacagaggcacccatctttttaaatttctgaagattttttactcatgcttggtttaatccacagatgcagaacccacaggttcagagggccagctgtgctttgaaaatattagcttgcgttttattagaaagaaaactctgaggccaggcgcggtggctcacgcctgtaatcccagcactttgggaggctgaggtgggcggatcacaaggtgaggagatcaagaccattctggctaacatggtgaaaccctgtctctactaaaaatacaaaaagattagccgggcgtggtagtgagcacctgtagtcccagctcctctggaggctgaggcactgcactctagcctgggcaacagagcgagactctgtctcaaaaaaaaaaaaagaaagaaaagaaaagaaaactctgtcataaggaagatgaatatgtgctatgaaactgaaatttgttttattctgtgataatcctggcagtactaaggaattacaacagatgaaggattcagtaggagacataggactagtggcattgggtttatgctgttacttttatggagaaggaatgtttgcctaacttgagacatttatcttgagagaccctcactttcagtgttgggaaagaacttggccaagcaggagtataagtttgcccaactttattaaaggagcagtgttctgttgttctagtaaaaatctattgcctgtaattgaaattgtccctcctcctctaggagatggagcctcagcagattatagtaaaaccaaaagctagcctgactagcttttttatttttttgagatggagtcttactctgtcgcccaggctggagtgcagtggcacaatctcggctcactgcaccctccacctcctgggttcaagtgcttctcctgcctcagtctcccgagtagctgggactacaggcactcaccaccacacctggcaattagtagagacagttgtttcaccatgttagctaggctaggctcaaaactcctgacgtcaggtgatccacccgccttgg

SEQ ID NO: 19133 - DNA, 1307 bp, Homo sapiens
acccgcctcagcctcccaaagtgctgagattacaggtgtgagccaccacgcccggctgaaaagaacattcttaatgtcatggttgagaccctccagggtctcctgcaggcctctggcaggcagggagcaagtaggatgtgcagagagtaggataggggcctgggggattgagttcaaggcttttctgcccagctgaattgggccttcaaacgagtcccactttgcctgattacctgtttgctcataccctttagactacaggaaacagctttcaaaaactttataccaagggttgggtatgttgcctcatgcctttaatcccagcacttagggaggctgaggcaggcagatcacttgaggtcaggagttcaagaccagcctgtgcaacatggtgaaaacctgtctgtactaaaaatacaaaaattaggagtggtggcgggcacctgtatccaagctacttgggtggctgaggcaagagaatcatttgaaactgggaggcagaggttgtggtgagccaagatcacaccattgcactccagcctgaacaacagaacaggactctgtctcaaaacaaacaaacaaaaaaaactatactatcttcaaagaatgaggatgaattaatgaacatttgaggttctctgaactgagaaataaagcctgtttaaggggttgtggtaagattttaaaagtaatcctccaaaattgtcacctagtgagcagaatacaaaaatggagcttaagttccactacaagaccaaaactgtcacgtagagcctaagggtaagactgtattggatattagggaccacaaagcactttcatgtttacctcatttgattttcacagcaactgtgtggggagaatcatccccatttgagaactgagaacactcaggctcagcgagctggtgtcccgcttggtgtcagaatactctcaagcccaggctttccctgactgtcaacccattcctgcttctcttgtccgctagtgtgaccccccagccaagggctgccagggcctctttcactatggactttgtgttctgccattcaggcacctgcggaactcgagtcatgcaggagcttttgtgatcgtgacggaagaagccattgccaagggtatccggaggattgtggctgtcacaggtgccgaggcccagaaggtgagcaggtcaggctggtttgtggcttatctgaagaaggcaagaggagcccagtctgcgaatccatagagcaaacactgctctgcgtggctgctgcagtcagagtgaaagtacaggctgggccactccccctgccccagtgtcc

SEQ ID NO: 19134 - DNA, 1035 bp, Homo sapiens
gcattgacacagggatgggcctggaacgactggtatctgtgctgcagaataagatgtccaactatgacactgacctttttgtcccttactttgaagccattcagaaggtactggtgctattgcaaacattgtaaacttctgtggagttttccaggctgtactcttaacagtgctgtcaaagaaaaaatgaccatatgctttgccagccaagggtacccatttccatctgcctacttcattgttaataatgtgaggctccacaaattggtgttctaaatgtcttaagaacctaattaaatagctgactacaaaaaaaaaataataatgtgaggctctagacctgagacagtataatttttgagtgtaggggctggctggagtctctctacttccccaatgtcacgttcttggggttataggatctggcaagaccggcatcctttctgctaatgctcctcaatcctccaggaacctccttgggcaaggtagcgccagaaagtctgcttcctaaagggctgcctcctgattcttatctatagggcacaggtgcccgaccatacactgggaaagttggtgctgaggatgccgatgggattgacatggcctaccgggtgctggctgaccacgctcggaccatcactgtggcactggctgatggtggccggcctgacaacacagggcgtgggtaagtatgctgcacactgggtggtgtttggagcggcaccacgtgtgctatgtgtgactctttatgaaacttttctttgtgtgtgagattgagtgttgctctgttgcccaggctggagtacaatggcgtgatcttgcctcactgcaacctctgcctgctgggttcaagtgattctgcctcagcctcccacgtagctgggattataggtgcacaccaccacgcctggctaatttttgtacttttagtagagacggttgttttttttttttttttttttttttttttttttttttttctgagacagaattttgcttttgttgcccgggctagagtgcaatggcccgatcttg

SEQ ID NO: 19135 - DNA, 1041 bp, Homo sapiens
gttccatatctttctctctgttctttttgtaggaattggcatgtaagatggctctggaactcctcacccaagagtttggcattcccattgaaagactttatgttacttactttggcggggatgaagcagctggcttagaagcagatctggaatgcaaacagatctggcaaaatttggggtaagaatgcacatcacttcttgagagtatggaggagtgaaatgacactcagtgccagagtggggttttatgacctggaatatgtggtcattttgcatctcagggttccttttgagatgcacatggggaggagtgaggctagagaatcgcttgaacccaggaggtggaggttgcagtgacctgagatcactccactgcactccagcctgggcgacagagtaattatctttagatgcattaatatctttatttatttatttatttatttttttgagacagagcttgctctgtcagctaggctggagtgcagtggcacgacctcggctcactgcaacctctgtctcctgggcttaagcaattctcctgcctcagcctcccaagtagctgggattacaggcgtgtgccaccatgcccagctaacttttgtattttttttagtagagacggggtttcatcatgttggccaggctggtctcgaactcctgacctcaggtaatccaccgtgcccggccgcattcatatggtttttttttttttttttttttttttgagatggagtcttgctctgtctcccagactggagtgcagtggcgtgatctcagttcactgcaaactctgcttcctgggttcatgccattctccttcctcagcctcctgagtagctgggactgcagatgcctgccaccacacccagctaatatatatatatttttgttgttgttgttgttggagtctcgctctgtcacccaggctggagtgcagtggcgcgatctcagctcactgcaagctccgcctcccaggttcacgccattctcctgcctcagcctcccgagtagctgggactacaggcgcccaccaccacg

SEQ ID NO: 19136 - DNA, 1050 bp, Homo sapiens
ctggagtcaggatctcctgttcactttgtacatctctattgtattttcctcataaggagaaaactttggctgggcatggtggctcatgccatcccaacaccttgggagattgaggccaggagttcgagaccagcgtgggcagcatggcaatactccatttataacaaaaacagaaattagctgggcgcggtggctcatgcctgtaatcctagcactttgggaggctgaggctggcagatcacctgaggtcaggagttcgagaccaggctgaggaacatggtgaaaccctgtctctattaaaaatacaaacattagctgggtgtggtggcacttacctgtaatccaggttacccaggaggctgaggcaggagaattgcaggaacttgggaggtggaagctgcagtgagctgagattgcgccacagcgctccagcctgggcgacagagtgagactctgtctcaaaaaagaaaaaaaaagaaattaactgggcatgctggtgtgcaactgtagtcccagttacttgggaggctgaggcaggaggattacttgagcctcggagtttaaggctgcttaagtgattgtcccactgcactccagtctggacagaaccagaaaaaaagaagaaaactttcagctaaacaacttaaaagtaatattatccattctgttccttcaaggttttcctttttttttttttttagacggagtctccctcagccacccaggctggagtgcagtggcgcaatttcggcttactgcaaccactatttcccaggttcaagcgattctcccatctcagccttctgagtagctgggattacaggcactcgccatcattcccggctaatttttgtattttagtagagatggggtttcaccatattggccaggctggtcttcaactcctgacctcaggtgatccacccaccttggcctcccaaagtgctgggattacaggtgtgagccaccgcacgtggcgtaacgttttccattttatagattgcttccaaatacagtatagcttttgatcctcacaacacctcagttgag

SEQ ID NO: 19137 - DNA, 1030 bp, Homo sapiens
catcagggaaggtaaaatactgaaactatatttttaaaaataaaagtattcccttttgagtgtgaattaggaatcaatgccccttctcactacttttgtgaaaaaaatcacagctcctgcagcaagtctatgcctgggtaacaaccaacccacaaaatccaagaggaggtccccctctcccgcctctgtgaggcttgaggagcagtatgtatctgggccagcctggtcctcagagtgtggaattaacacctttcctctagcaactgtttgtgctgctgagaacagcacagactctctggcagcctggttctctccagagggaagcctgtgaagcagaagaaacatatggcatctgcactcagggcgcccagttccatccggccttgctataaaatgactttgcctttccttttttaaaattacaaaaataattcaaccaatacataaacatatgaagtgaatcacggagggccttcctgcgatatctttttttgcctaccatttgtcatggaatgggtaaaggggaccacagagggaagagacgctgccccttcgcagggccatggcagtcccctgggctgcgtctccacggtgcttcctgtgaaacgctgttaccacgggcaccgcactggagaccatgaaagggaagagtttgacatctcagctgtctttgctataaatagaaataaataaaccttaactaaggcttgagtacacttaggccgggcaaggtggctcacacctgtaaccccagcactttgggaggccaaggtgggtgggtcatgaggtcaggagtttgagaccagcctggtcaacatggtgaaaccctgtctccactaaaaatacaaaaaatcagctgggtgtggtggcaggtgcctgtagtcccagctactcaagaggctgaggcaggagaatcacttgaactcaggaggcagaggttgcagtgagtcgagatcaagccactggagtccagccggggcaacagagcgagactccatctcaaaacaaaaaacaaaaaaaaattttttta

SEQ ID NO: 19138 - DNA, 1076 bp, Homo sapiens
gaggcaggagtctgagagttcaagtccagcctggggaacatagcaagaccctgtctttatgaaaaaaaaaaaaaaaaaaaaaatttagccaggtctggtggcgtatgcctatggtcctagctactcgggggcctgaggtaggatcatttgagcccaggtggtcgagtctacagtcaactgtgattgcgccaccggcattccagtctgggcagcagagtgagatcctgtctcaaaaagggggaaaaagcctgggcgcagtggctgacacctgtaatcccaacactttgggaggcggaggtgggcggaacacctgaggctgggagttcgagaccagcctggccaacacggttaaaccccatctcgactaaaaatacaaaattagccaggcatggtggcgcatgcctgtaatcccagctactcaggagaccgaggcaggaaaattgcttgaacctgggaagtggaggttgcggtgagccaagatcacgccattgtactccagtctgggcaataagagcaaaactccgtctcaaaaaaaaaaagccgccagaggcgggaagctagctagaatgtggagagacctggtcttccccacacaggtggtttgaacttttttcataaaatagagatgaggtctcactctgttgcccaggctccaacccctggactgaagcgatcatccagcctcagtctcccaaagtgctgggattataggtgtgagccaccacaaccagccgagaactgtttttctagacgttacttcatgccttagtgtagataggtacagcaagatactggatttccccctgcccactccgactcaaaacacagtggggctccctcctgaggtagcaggtggtggatctgaagggacccttcaccccaactcccctgccgcaccctctccccgtgcctcagggcccagcttcctcctcttagaggccgtttctttattttttctttctttttttttttttttttttttttttttttttttttttgtttctttgagctgtctcctacaggaagaggctgttagggtgcagcctcgatctttgtccagagaagactgacagttt

SEQ ID NO: 19139 - DNA, 1053 bp, Homo sapiens
gggtgcaggacagcgatgcttcccaaagccacctgcagggttggtgctggaagttaccagatggcaccaggctggccgtgggctcacaatgacctctcttcctagctggaacttccagggtccctgttggaaaggaagtgtccagaggacacagcagctgagcaaggggcccacctctggttccctccatcttttactctgcatttctataccttcactctggagggctgggtgggaggacatggcttccttttagtcttctggtagaagcatggatgcaaacaccttccttgagtttccatgagcatagctgccacaggctgacctttccaaaagacattactaaatataaaaggagaacaaaagaaagctaaagatagggcgtgcaaagaataaaaacagcctggctcacaaagaacaagttactggtttgtttccaaagctttcggaccctgccctgttattccccttccaggagataaccacctccaaggccagcagacgtctgcaggccctttcgccaggctctctggcctcctagtgctggcttgtccactgtctaggttgtcttgtaggacccatgccaccaggaatcctctccagactacttgaccaccctgcagtcagatctctgttctgccctcttctctacccagggctcttggctgtggtggcggagggagggatgcctgtttccctaggtctcccaggtgattggcacctatgtgactggaccttttaggagtgcagccttgttccatgtaggccttgtaatatgacctacctcttgccatgctgctcaggccagtttagcccacgaactgccatacaaaaggctttctccaacatttgatcttggcagaaactatagaagtctccccacctggttccatcctcccactgggccacaagaatagaaactgataagaagttggcctagttgatggaagtttgaacccggggacagaggttgcagtgaaccgagatcatgccatttcactctagcttgggtgaaagagcaaaacttcatctcaaaaaaaaaaaaaaaaaaaa

SEQ ID NO: 19140 - DNA, 1035 bp, Homo sapiens
ctctcattagactgtggatgctcttcaaatgtgtcctcattttctgaaataccaccacctggcttggtccttagcacctagtgggtgttcagtaaatgaattacagcggaaggtctcatggttacaggtttagggaaggattcttcacatttgactgagagtcatagtctcctggagagctggttaaggcacagattgtgtgtgtgtgaggggactccagagttttatggtttaatcttggtggagcctatattttgcatctctctccagctccctagggctaacactttgagaaccactggtttggggtcatcacaatttcttgagagattaatccaagcagatgcgaagtctttttttttttttttttctttttttgagacgaagtctcactctgttgcccaggctggagtgcagtggcatgatctcggctcactgcagcctctgcctccagggttcaagcaattctcttgtctcggccttgttggccaccccttcctggggtgacaggaacctaggattacaggcatacgccacgacaccccgctactttttgtatttttagtagagacggggtttcaccatgtttgccagactggtttcgaactcctgacctcaggtgatccgcccgccttggcctcccaaagtgctgggattacaggcgtgagtcaccgctcctggccagatgtctttttttttttttgagatagagtcttgctctgtcacccaggctggagtgcagtggtgtgatctcagctcactgcaacctccgcctcccaggttcaggctattctcctgcctcagcctcccaagtagctgggattataggtatctgccaccatgcccggctgatttttgtatttgtagtagagatggggtttcttcatgttggccaggctggtctcgaactcctgacctcaggtgctccgcccgcctcagcttcccactgttgggattagaggcgtgagctactccgcccagctagatgtagtcttttttattttattttattttattttattttattttattttg

SEQ ID NO: 19141 - DNA, 1051 bp, Homo sapiens
atgaaacaacatgaaagttaaaaataaggccgggcatggtggctcacgcctgtaatcccagcaatttgggaggctgaggcaggcggatcacctaaggtcaggagttcaagaccaacctcaacatggagaaaccctgtctctactaaaaatacaaaatttgccgggcgtggtggtgcatgcctgtaatcccagctactcgggaggctgaggcaggagaattgtttgaacctgggaggcaggggttgcggtgagccaagatcacgccattgcactccagcctgggcaacaagagtgaaactccgtctcaaaaaaaaaaaatagttaaaaataaaaaaagtagtttttaaaatgtggattatgcacctgatgaaatgccacatagtcatgaaaaataaggtaggtgaaaacatggaaaatatttatgatatacttttttaaaacagaattcaaaattgctatctgtatcatgattgtaacgatgtaaaatatgtacatatttcaaagaaagactataaaggaacctgaaaaaatgaaaaaagttgctctgtttcccttggggaaaaaaaatgagtattcctttcttggctgtcccctagagcaccagaagtgtctggacaaactcctcaataactgccttttgagctgtaccatgcaggagctaattggcttatatgttaccatggaggagtacttcatgagggagactgtcaataaggtaggacataggacgcatctcttggaaatggggcttccggtccaagaagccaggctgagggaaatggctgaggcatgtcatatttattggtcctgctttgagaatactcttgcatgcagattgagtggtaccactttgtatgtttagagagcatctttggagtcgttgtgttctttgtatacccagctaggacttccttcccaagaattaaaaaagaacagctcagctcagctcttcagggagcccacttgttccctacctccctgaaggtttgtgggtaaggagcctcagggaagtagggcccctgcagatatcttacactccccaggtaatgga

SEQ ID NO: 19142 - DNA, 1002 bp, Homo sapiens
tactaaaaatacaaaaattagctgggcatggtggtgcgtgcctgtagtcccagctactcgggaggctgaggcaggagaatcacttcaacccaggaggcggaggttgcagtgagccaagattgcaccactgcactccagcctgggttacagagcgagactctgtctcaaaaaataaataaataataaattataatcagtacaatcacgtgtcatttaatgactggaatacttttttttttttttgagacagagtctcactctgtcacccacgctggagtgcagtagcattatcttggctcactacagcccctgcctcccaggttcaagcgattctcctccctcagcctcccaagtagctggaactacaggcgtgcaccaccattcccagctaattttttataattttagtagagacagggttttgccatgatggccaggttagtctcgaactcctgaccttaagtgatccgcccacctcagcctcccaaaatgctgagattataggcatgagccaccataccctgccaacaactggagtacattctgagaaatacatcattagacgatttccattgtgtcaacatcgtagggtgtacttagcctactacacacctaggctatatgatacaaactattactcctagggtataaacctgcatggcatattactatactgaataccatagacaattataacacgatggtaagtacttgtatatctaaacatatctaaacatagaagaggtacagtattatgtactgtaccatagaaacatagaaaaggtataatattatgggaaccctcttgtgtataccgatacagtttttttttgttgttgttttggggtttttttgcttttttgagatagggtcttattttgttgcccaggccagactgcagtacggtggtatgatcctggctcactgcagccttgaccttctgggctcaagcaatcctcccacctcggcctcccgagtagctgggacacatatcagtagctg

SEQ ID NO: 19143 - DNA, 1126 bp, Homo sapiens
attttagaaagtgaagcagccaaaaggattgagctagaccttcggttagtcctggatgggagcaagtttattttgtaggaagaatacttggaatataaccctattgcttcctcccttctagggattgcccgcattgtggagacccaccagccaatagtggagacctattatgggccagggagactctataccctgatcaaatatctgcaggtggaatgtgacagacaggtggagaaggtggtagacaagttcatcaagcaaagggactaccaccagcaggtgagcaggggaagctacaggtagggtttggtagcagctttagcgaggaacactgagtagaataaattgtagggtttgaaaaagtgaaaaaaaaggtgcagacaggagaaaaataaatgctaagcgcacactggcctgcatcttgcccattgacagcttactttggacttgaggtgttgtcgagatgatgatggcctcagttcaagaccaaaacggaaataaaaagagcttcctgaaaagaacacagcagaagtagtaaaccagttctctatcacaaaatgtgcaacagtgccctctaatgatataatgacaattctatttcttgaggtcctattaagtgtccaagtaattgtctccaatttccccttcattcctaagatgttaaagataacgtttgctttttcagaactttgttttttccttcttttgagcagagaaagtaaaagtacgacatagaaataggagtggcctcatacaattgtatttctagaactccagactaggagactataaacagtagtctattggaacaccattagcatgacttttaagcacagtaatagaggtgagtattattagcatccaacccaaaaacaaatctttggcctgtcatcctgaaagcccactgctggcttgaagggaaggtaaacctggtaaacaaactaaatctaaatgttcttgtatgccaaaagtttggagtgaccagcaagaggccaatagatgtgggggtggggaagaatattctcattcctgtggtatgttgcagttccggcatgttcagaacaacctgatgagaaattctacaacagaaaaaatcgaaccaaggtaataatccttctctcttctt

SEQ ID NO: 19144 - DNA, 1030 bp, Homo sapiens
ctctgttgcccaggctggagtgcagtggcatgatctcagctcactgcaacctccgcctcccgggctcaggcaattctcctgcctcagcctcccgagtagctgggattacaggcgtgtgccaccacacctgggctaatttttgtatttttagtagagacggggtttcaccatgttggccaggctggtcttgaactcatgacctcaggtaatccgcccgccttggcctcccaaagtgctgggattacaggcatgagccaccatgcccagctttcatacttttttataagagatagggtcttgctatgttgcccaggctggcctcatactcttgggctcaagcaatcctcctacctcagcctcctgaatagctgagactacagatgtgtgccattgaacccagctaccttttcatacctttaaagaccgttagaatattccctttcatgaaggacctttttaaatcgtttgcccatttttctactggattatctgtcttcttcttaccaatttatagaactttttagtattgcagataaagttcctcatcggatatcttctctccttctattgggtacctttttattgtcttaatgggggtcttttaatgaccagaagttcttagttttaaaatagtccagtttatccatttttaaattgttagtgctatttgtgtcctgcttgagagatttttgcctactgcaaggtcacaaagatgttttcctctaaaagccttttggttttgcccttttgttttagatctgcagctcatctggaattgagtgtgtggtgtgtgtgtggtgtgaggtaggggtcctttttttcatatggatatccaattgacccagaacagtgtattgaaaaaaaaaatctgtcttagtcaatttggactgccgtaacaaaataccataacctgggtggcttagactacagaaatgtagcgctcacagttctggaggctggaaggccaggatcaagacaccagcagattcggtgtctggtgaggacccactttgtggttcatagatgtcac

SEQ ID NO: 19145 - DNA, 1054 bp, Homo sapiens
agcagcataatgcctagattttctttttttatccaatctgacaacctctatcttttaattgccatttttagcccctttgtatttactgacatatttggacttctggctttcttctttctatttgtcctgaattcttgtctctacccttgactttgttttttcttttctcttattccccgtctgctggattgtaagttatattctgtctcttttcttttataggttaccttgaaatcttaccatatgcatacttaacacaaccccacctcctgagtaattcaaggcccttaatatatatttttttacttgtcacccactccttctcaaacttacaagctatattattttctctttttttttacagtacccacaaatgacatttttcttcttaatttctttattttatacatacagtacttatttagatttacccatatgttaatacacatttcttgtcatttttttcttgcatctcaaatcctccaaagcttattttctttctttctgaagtaaaaaacatcttttagaagttcttttagaatagatctgtagttgtaaactctcagtttttgtttgtttgtctgtaaacatgttttattttgtcctcttcttgaaagttcgttttgccaggaacactattctggggtgacagttgtcttccatccacactgtgaaggtatttttccgctgtgttctggcttccaccattggttggaaggtcagctgtcagtcactgatgcttctttctgaggaatctgagtctctctctgggcacttttaggccttctctttagttttgctacagcgtgtctacaatgtggatttatttttatttaacctctccttgttggtattcatgtctttcatttgtccttggaattttcagtcattatttcattttgttttgttttgttttgttttgagacacgatcttactctgtcacctaggctggagcacagtggcgcgatcttggctcactgcaacctcctcctcctcccaggctcaagcgatcctcccacctcaccctccaaagcagctgggactataggcatg

SEQ ID NO: 19146 - DNA, 1052 bp, Homo sapiens
ggcggccatcagcagccaggttgaggagactgagcttgccccgtgaggccaccccacagtgagtccacaggccccacagaagccctcccctgggcctctgggaggccctgaccttgggctgagcgggggccaaggtcagatgcccactggtgtcaggctgcccattgaaacccagagaggggcagagacttgccaaaggtcatagttctgggcacggcaccttcagcaaggtgaatggggcctccacccagtgctggcccagccagaaaatggggtcatactcttcacccacccctcaagagtggggaatgtcacctggacacataggcctggccaggcctctgctaggggcccctgcagagggcagggcttgcgtactgttagctggtgttaactgagcacttactgcgtgctgggcgctgcgaggagtgctggctgagcagcacctgcttcaatttccacactgacccagtggggcaggtgctcctcctctcctgattttacaggtgaagaaactgaggctcagacagggggcccttgcccaggggcacctggaaagcccactccctgggattggaggctggattgctcacccacactccacatctgaaccacagccactgccgggacagagacagagtcccctcatccctgtccacttgggcgcctctaatgagaagcccctcacctccccactccagagcagccactgtgcttggggcagaactgggtgtctctcacatcccagcagtccctgccgcctccccagccttgacgttcagtgcttgtctccctgctttgtaagggagtccctctacctggcgtgcagtgaccaggcagacatgggatcaggtcctgaccccgccaccctgtggccgtgggcaaatgagctaacctctacgggcttctgtttccttgttggtgaaatggggctgtggggaaggtttacctgggcctgtcccaggtgaaggctgaggatgctgttcctggggcactggctgctggagccctatctcttatttttaatcagtgaaattgacctatccatgaag

SEQ ID NO: 19147 - DNA, 1035 bp, Homo sapiens
agattaggtaatttcatagctatgacaccaaaggcacaagcaaccaaagaaaaaatagacacattgggcttaatcagagttaaaaattttgtgcttcaaaaaaatttttttaataaaaagaggctgggcacagtggctaatacctataatcccaacactttgggaggccaaggcagaagggtcccttgggcccaggagtttgagactagcctgggcaacatagggagaccccatctcaaagaaaaaatttagctgggtgtgatggcacaagcctgtagtcctagctacttgagaggctgaggcgggaggattgctcgagcccaggagtttgaggctgcagtgaactgtaatcacttcagtgcactacagcctgggcaacagagcaagacactgtttattaggctgttcttgcattactataaaaaaatacatggctgggcgcagtggctcacacttgtaatcccagcactttgggaggccaaggcaggcagatcacgagatcaggagattgagaccatcctggctaacatggtgaaaccccacctctactaaaaatagaaaaaattagtcaggtctggtggcacacgcctgtagtcccagctacttgggaggctgatgcaggagaattgcttgaacccgggcggaggttgcagtgagccaagaccgtgccattgtactcaagcctgggagacaaagcaagactctgtctcaaaaacaaaaacaaaaacaaaaagacctgattgagagtaggtaatttataaagagatttaattggcttacagttctgcaggctttatagaaagcatggtgttagcatctgcttggttcctgaggcggcctcaggaagtttacaatcatagtggaaggcaaaggggcagcaggcagaggaggccaaagcaggagcaagagagtaagaggaaggtgccccacgcttttaaacagccagatctcagcagaacttgctgtctcaaagtaacactaaggggatggtgctaacccattcatgagaaatccacccccatcatccagtaacct

SEQ ID NO: 19148 - DNA, 1973 bp, Homo sapiens
aaatgttctacaattgacggtggtgatggttgcacagcttcgtgaatatacaaaaggctgctgacacctacactctaaaagagtgaatttatggtatgtgaattgtgtcccaatatttaaattagtgctgttttgttacagtctgagggaagcacttattcagtagtcacaactactgtcacccgagatcaaaacaagcctcctgctgtcactgactcttgcttctcctttgtagttttttccactggttggatccactgtatgctcagtacatgctcattcctacgtcatatctgctcatttctaatcagttcattcctaggtccaacctaggttggttggtgggtgcccagccaacatttatggaatgagcacaacctcgtgtgctatgtataagatcacagcttgtctctgattctgactttgcactaatactgttatttgagcatgtgcagtacagagcacagaatgcagttacctaatttaattctctaaaagccctgtaaagtcattgtcatgattaacccacctacagctgaggatgttccctctgaacacatgggaacctgagttcagtggctaaaacctctgccacctaggacagaggttgggacatagggccatcaccaaatgacatgggattggagttaaatgaaatcatgtgcctggcacacagtgggcacccagctggtggtagctgtgctatttggggaggggctagtctaatatagtggataagattttagatcttggggttagaaaagcctagatttgatttttagatccatcatctacaacttgcatgactttgtgtatatttcttaacttctctgagcctcagtttccacaaactgtaaaatgggtgtaatggtacttaactcagtggcttgttttaaggtttcaattagaccctgtatgtaaacatgcagcacgttgcctggcaaatagtaagtactcagctgatggttactcactgtgtcctgcgttcacagaagaccagcgctagagcctcatttcaaaacatctcaagtaggcacctcctctgtactccctgtgtatggaaggagtgccttggcgatgaccgagcactgtgtgaaagtgtatagagaaagctacgtttcacttgggggccttagttctgcacaagggaattgccatctgtaattgggtgcaattggtttgcagctgaagtggcttagggagatgggagggagggactgtgacatagttgaagggatatggacttggtagatgtcaagggttcagacctttggtgaccgtaggaaaggggcttgatttactgtttcagatctggaagatgggagtgaaataataatagctacagcaggaggtatcgtcgggaataactgacccctggaatactcagcagagtgtgagtgcttaggaagtggtcaactcaatagtcctcatgtgacctgtgacagtctcttgcgactgtcactgtgctgtggtacagagttaagctaaggggtcctgtggctgtgctggatggccccaggctctcccttggctcatgaaagtccagatgtgtcttgcagtgtccatggctgcttctcctgtcaggtagtcagtgtggcagtctttgagacattgagggtggcgtcaagagcatgatgttggccccccttggggcttgtatcttctggggaatgggtgttcctgccatcctgcaatgccactggccagctgagaacccaggctctgagcagcctctagaggacacctctccagccagggttctttagcactttttggaggaaaccaggcagaagtggatccctgctctggtgtataagacagcgatgtccatgcccttcacattagtgaaggtctccagggatttgtgatcgtgagagtttctgggccagatactaacttcaaaactagttcagcctcagatcccccacctctggctcccaacctgtagatgaaaggagggatagtgtggtctt

SEQ ID NO: 19149 - DNA, 1049 bp, Homo sapiens
tcctgcaatgtacaggacagtcctgcccactgaaaaaatgttcacactttcaaatgtcttgctgaacattcaggtaggtgaaaattctatttctaaattatctgaatctaaacctgttttctggataaacatgtatttttgcacagttttaacatacactgatcttccaggaatgtaattattgtataatcaagagacgattgtcctgtgtttcattcagaacttcacgaaaacatgtttgccattttggatcataattttgtgacttttgcaacaatgtaagtcacagctttgtggctgtggcactcagacaacgtctatgtgtaaaggcgaccaccttattaggtctcctgcagcagccaagaccaaacacattgaagtatgtgtttttaaacgacagatgacggtcctcttttttttctctttcattacacttaaggcataacattagtttttaatatgtaggtgtgtatgttatgtatgattttctaggccattatatatgaatatcaggtcaggagaataagatggacattacaaactatttgttagaaaaagggggcattgggtgtgacagcgcgccatccactggtccatttccaagactcccacacgtggctgcacctgcagcttcacctccccgggctgggtccccgcttggctctgattcttacctgccccattccccaggggtaacagtcaccgtgggccagacccgagctagccgacagggatgcggccacagctggccgggcgtgaccaccaccgaggcgcagcgaccttgctcctagagaggcccggccgcctggtgacgcacttccggcagcgccggggagcagtccgctacggaggtgagtgcagggctccgggcgctgtgtgccgtgccctgtcccccaggctctgggtccggttgagacgcactcccaccctgggtgctgcagggtctcccgtggcctacgctgccaggaggcccaggctgggagagggagcagggcggcggcccggggtgctcttccgcgctcctcgactccagctttggtctttgtggc

SEQ ID NO: 19150 - DNA, 1074 bp, Homo sapiens
caggaagtataaatctcatcatttcagcatgatcagaaatgccatagaagggttcagatcagaaatgggagaaaagcattgtaatcatgatattcacagctaatgctgagtgagtgctcgctaaggacgttccacacactgactcattagcccttccagtaactccaaggagtcgtcctgctgtttccacccactctatacttgagggatttaagacatggggatgttgaggaacttgcctgaggtcacgtagctggtaatagtggagtcacccaggcagcccggttccagtgccccagcgctcgggagtgcataacctctctgtcttaccgtcacggttctacttccttatcctccagggggcgcacgcagcacagtaccaagcacacaataggttctcattagactcattgattctgtccatactgacattggcatctactggggcactctgcccctagatctctgcatggcaacctcctttacttggaggtggtctctgctgcaatcccacgttctctgcgaagaagtctcctattgcctctgtagaatagcaccctccttcactgccaagccccttccccttatttttctttatagtacttagcatctgacatatattttttgttctcttgcccccaacagactaaaatgtctgttgtatgaaaggagaggctttgcctgttgtgtttgctgctgtatccacagcacctagaacattcctaggcatatagtagatgcccattaagtgtgtggaaaaaatgaatacatcccttagccaagtgctatattcaaatttccttactctggttattggttactacttttcctcatcactgcattgaaaaaaacaaaacaaaacaaaaaacacaaaaaaacctttctctgaatgaccaggcacctttatccagaagtggggcataacccttgacacaaggggcaatggattggggatcctcgactaatgcctgtcagaggtttattgttaactggactaggtcacttacagagtttatttttaattttgctttgtcagtctgtgaaagtaattcaacagtgtcatgataatgtaca

SEQ ID NO: 19151 - DNA, 1117 bp, Homo sapiens
tgagttgagagctcgcctcttgaatgttgaacagtgtactcttctgaaaactgcatattcactttatgtggtttcagaatactgggctcaatactaacataagaaagacacttcattgagaaattcttaagcttacagaaaacctatactctttgcacattccacataaccctagcaaaatgcagtttcttcatacttctgtcactttttccattggaagatttgcttaggaaaattaattcctatttattcccacaaaatgttggcattgcttgattttacccaatggggaatgtgctttgaatttttggaacacttttacaattaaaaataaagtagggccatttttaatttgtttcatcagaaactatgttaaagagagggttaaatataaatatattttcgtgtgtatttttgggaagatttttgttcaaagcaatagtcaaaatcagatgacctgtccataataattatgtgtcttcatcttctcagaggccccatgctcatatgcacgtgtcattgggatacactcttgggggatttggtacactctaatggatgtctaatgttcaacccctcgagaatctgaacttgagtccccagattgtcaaactactggtcagctattgagaattttagaactcaggtctttgatttgaagtagggaacatagtggctcacacagagtttaggtgctgttagaaagatgggaacaagagtgttttgccaccttatttttatatgggaaattttttttaatgaagaaaaaatgaaaatgaaataacaggatgatagtgatgagtgatgtaaaacatcttacttagatggcagaaccttcgggttgtagaatagtgatgtctaaaaattaaagttattttgggaatacaccactttaatagtatagtcttataaaaattattcattatggtgaacccttcttgtctgctattcgtttcccaacctacttattggaaccacctcaaaacccagttctgaaatgaccttaccaaaagtaaatgtatttattttttagtcagcagaactctgtaattccaaatgttgttctgtgtggtagaattttttttcaggaaccattaggttgtattgaaaatctttg

SEQ ID NO: 19152 - DNA, 1051 bp, Homo sapiens
gtttcaccatgttggccaggctggtgttgaactcttgacctcaggtgatccaccctcctctgcctcccaaagtgctgtgattacaggcctcagccaccatgcccagccctgcgtctacatttctaaaccatagctgtgtggggttgaactcggagccaaaaagtgtgagagccatcaggggctggctctggataaactggtagccactatcagtgttaagtttcacatttaacctgcattggaattcccaggggtactgggaagaaagcagctgttctgtatcagtcctaccacctgccattaaccctttctctcctaggatcattttgagaatttgcctgcctgggcaggaaagggactatttctgtggaggaaaaaagtgaagattgattctctttactagttgctgctgatggatctctgtgacagagaaatcaccttatctcagactaatggggtgtgatgtgactagtcacatggcttttcattcttctctacgagaatacagcctatcaaaatgatgtctgttggaaatgtagaaccaatcaaacagataatttatgtatgtaatgtaatgagagcacttttcattgactgtgaactttttatttttgaatctgcactcgagccaatcttcttagaggcagcccggcaccttcatccataggcagagagagaactgggtgttggagacttattcgagggtataggaagggccctgtgaagttgatttaacttttggatgtcagactgtgaaagctcctgagaaacttggggtaataggatcttcttttggggatgaaaatggggaaggcgtgaggacctagactacttctccctagatcagaaaaagagaattaccccttgacaaatatgatacctgctaggtatttcccagggaaatttagggattggcgtctttccctagcatgtggaggaattggcagacagcttcctaagggcggggagcgggggcccaaggctgacactgcttgcatccacgtgaccttaagttatggcagatgactctgaaacggactgaggccaatga

SEQ ID NO: 19153 - DNA, 1030 bp, Homo sapiens
tggtttcagcaacagtactggaggaaaatctgatcagttagtgactagcacaaagaaaaagcaaagtgaattagaaatacaaaatcctaatttgtgatcctgtatattgatagctgggttgtaagatggatgttaaatatctgccttagctaatttccagctcatctggtttgttattccaaatagaagaaagagttctctagtttgacatccccattctgaaatgcaaagtttcaaaatgttttgtgtttatactctatgtggtgtagtatgctctggtgttctcttttgataatgaaacatcagtatttctactgttttatagcttttctccttttttagaaattaacatttttgctttcagaagaactttagcaattacttgtgaacattgtttatcacaaagtggaattccgtgatgaattccgttcagatcttttgagaactgtaaattggattgtttgtttctgtattgttgagttttaagagtctttgtatattttggaaacaagttctttatcagatacctgttttgcaaatattttctcccagtctggggcttgtctttccattcttttaacagtgtttttttgcagagcttttagttttaatgaaggcccacctgtcagtttttatctcatggatcgtgcttttggtattgtatctaaaactcatcgccaaacccaaggtcacctagattttcttctgtgttatcttctagaagtttagttttgtgttttacattttggtccatggtctgttttgagttaatatttgtgaaaagtgtaagctctgtatctatattcatgttttgcatgtaggtgtcctcttgttccaggaccatttgttgaaaagactatcctttgtatggtctttgctctttgattttcagagatcagttgactgtatttgtgtgggtccatttctgggctgttttgtcagaattctatattagagttcatctaaggaaacaaaatcaaaaaccatcatttttatgtgattgatactattagaattctggaagtatgag

SEQ ID NO: 19154 - DNA, 1038 bp, Homo sapiens
caagctttgccttctgggttcacgccattctcctgcctcagcttcctgagcagctgggactataggtgtccgccaccatgcccggctaatttttttgtttttgtatttttagtagagacggggtttcaccgtgctagccaggatggtctcgatctcctgaccttgtgatatgcccgccttggcccccccaaagtgctgggattgcaggcgggagccactgcagctggccatcttacttaatttttataagaatccccagaaggtaggttgtgttaagattcaaactgtataaatgagtaaagtaaagcgtaatgagaataaatagttcaagtaaacaaagtgacagaaccagcattcaaattcaagtatctctgacttcagagttcatgatcttaaccactctaccatactgcctttctctgggtacataggagatatggctgttggaagaagggttaatgtaacaatggcatccaaagtacaattttgcttcatagaccaaaattcaaaggtactcctactgtatataattcagtgatggactagatctaattttgtcttaactatattgcttggttacttatatctataaataaggttgttgaatgttgacacacaatgctttctttttccatttctgtattcttacactactttaatggtggattctgaagtattatttccttttcagaaaaaccatgccacatggatcgtttggatcgaatcctattgtctggcatctataatgtacgcaagggaaagacccagctgcataagtgggctgagcgcctagttgtcctctgtggtacctgccttatcgtttcctcagtgaaggattgtcaaactggaaagatgcacattttgcctctggttggtggaaaggtaagactcacaaagatgaattatttttcatttgatcatcttaattaagaaaatatcacataatgcttttcatagcttttagtcatatcttttcaaagaagccagtatgggcattattaaagattatatcagagactgtttcagaggttcagaggc

SEQ ID NO: 19155 - DNA, 1126 bp, Homo sapiens
ctgaaatttatacaaataaaaatactaaaaaattaaatgaaccatttttattacttaccaaatatatatatttttttgaattgtgtaatcaggagactggaacctactgaacgacctcttcagatcgtttatgattacttatccaggctgggatttgatgatcctgtgcgcatacaggaggaggctacaaatcctgacctcggctgtatgattcgattttatggtggtaagaatttatcagtggctttgtatgttaactacttttaggttgatcatttgtgcctcttatctgccgtcagctttttaaaggtattttatcaaaagctagttttaagccaattaactaacgtagttaacaccaaccaaacaacaacaaaagccaagaggtcaggggtaagggaacactttaaaaatatcttctctttttatttttgctcattttgcacttgtattttgctaacttactagcattattttatacctttgccagaatcttgactggatcatgctttagtaaattattttttcaagctcctggtaaagtctgtgaacttctggatagctcaaaaatgttgagagtaagtaatcattatcatatatgacttgacgttgatgagtatacctgtcaaatttgtatattggtgaatttagtggggtttaaatctaggatttttgactcttctgagaaaaatattttaagatgaatttgaggaacacgacccatctatcactataatagttaaaaaaacaaaaacttggaacagtaacatgcttcttatctgattgtggttgaaccctagttcttcattatggtagtccccccttatccactgggattgcgttccaagatccttagtggatgactgaaattgcagatagtactgaactctatatgtactatgtgttttcctgtatacacatacctatggtaaagtttaattgataaattaggcaaagtaagagattaacaatatttaattataaaatagtataattatagcaatatgctgtaataaaagttagtgaatgttctctctctcaaaatatcttgtactttacttcctattttcagaccatgattgactgcagataactaaaaccttggaaagcaagaccacaggtggca

SEQ ID NO: 19156 - DNA, 1050 bp, Homo sapiens
tagcttactgattaagtatagaacagatcatacctagcttgcattgtgtgtttttatggatattctcagatggagagacatatgtattggtcgtcactttttcataattattttgatcacataattgttgaaaacattccgattttaccaacttggccagttttaaatcaggcatctattaagttcttcctttgtattcacttcaatgcttagatgctttgggggattaaaaagcaaaagtagcaactatccttttggaattgaccttcaggaactcaaagtcctgttctataaaattgaataataggcctcatttttagttttcctttgatcttttctttcaggtgtcctccacacatctgtagtcctcctcacagaaatgtgtgagcgaagcccagacatgcttgcgcatttcagaaaggtaggtgccattctgtatgcctaagcctttcttgattgaaaaatgattttcctgaaaagtacatgattttcttcttatttttttttgaaagcaagctatggatctgaataagggatttaactagccctgctatgcaattggcctggaagccagatttaggcatataagtgagaactggcactagtattgtgttttccctttcataatagaagtcttctctcattgttggcagacacaccaatctcatgtgttttatctactgttttcacatttgagtcaagaaacatgatctgaggtcaaattagaaataggagttttgtgtgtgttgtttttttttttgagatgtagttttgctctttttgcccaggctggagtgcaatggcgtgatctcagctcactgcaacctcctcctcctgggttcaagtgattctcctgcctcagccttccttgtagctgggattacaggtgcgcgccaccatgcccatctaatttttgtatttttaggagagtcggggtttcaccatgttggccaagctggtcttgaactcctgacctcaggtgatcagcccgcctcagcctcccaaagtgctgggattacaggtgtgagccactgctcctggcctgttttt

SEQ ID NO: 19157 - DNA, 1051 bp, Homo sapiens
ttttgtttttttcaacctacctgcgagtatactgtttacccttttctcagctcctggccctgcggacgtcagcgtctaataattctcccggtcttcctgattgcctgaaagagtcgggacggttcggttgattgtgtttcccggttaggactcggtgtaggagatccatcgaaccactcgctcagggtaatgtttatgaagcagattatgtttatgaagcagattaaatggcttttgggaggcaagagctgtcaaatgttttctcatatgtggattccctccctgtgctgaatacttagctttttggtgcttactgacacttgtgtggtatttttttttctcccctattatatatccctgagcacggaaatctgtccatggagaaaaatattaatctgaggtaggtagaaaggagagttgggctgctttacagtgattagttaacagaagggaggagttagtgctttcttagtgaccttaactttgaagtgtttgtacagtaatgatctttgctgactgattctaaaaaatacttgtaatgatttcatgtattgggtttttctggggatagctgaattttaaatattcacttccaccgttccctagaatacttgtcaaatacctaacttgtcacacaccctaactttcacgtttgaaaaatatgaaccctctaagtactcgtaatctcgtcacttttattctaaaggcatgtttgcagtctagcatgcttgaataaaaagtatgtctttatttttatttatttattttttgagacgaagtctccctctgtctccaggctggagtgcagtggcacggtctcggctcactgcaacctacgcctcccgggttcaagcagttctcctgcctcagcctcccaagtagctgggactacaggcacacgccgccacgcccggctaattttttgttgttgtattttagtagagatggggtttcatcatgttgcccaggcagatctcgaactcctgagctcaggtaatccgcccgcctcggcctcccaaagtgctaggattacaggcgtgagccaccgtgc

SEQ ID NO: 19158 - DNA, 1049 bp, Homo sapiens
caatagtggcaagtagaaataggtaatttcattttctgaccatgtgagtctcctatcaccttgcagtgaaatagaaccaactaaatatatttaatttaatgctgcttgtctattaaaagtaaatgaaatggggcctagcgtggtggctcatacctgtcatctcagcacttttggaggccgaggcaggcagatcacttgaggtcaggaattcaagaccagcctggccaacatggcaaaaccctgtctccactaaaatccaaaaaaatagctgggcatggtgacacacgcctgtaatcctagctacttggggggctgaggcaggaggattgcttgaacccaggaggcaaaggttgcagtgagccgagatcacgccactggactccagcctggacgacagaatgagacttggtctcaaaaaaataaatacacaaaataaagtaaatgaaatggactcaaggtctggggggcaggaaagtctgcattaagctttgcttaaatataaaagttaattgacacttgagcagagtaacggctgagcttcattagatctgccttctgggaagacgaagattgtgtggcatgaaactaataggccacctaaagggatatattaagaattcccaggtcgggctcagtggctcatgcctgtaatcccagcactttgggaggccgaggcgggtggatcacctgaggtcaggagttcaagaccagcctggccaacatggtgaaaccctgcctctactaaaaaaaatacaaaaattagctgggcatggtggcgggtgcctgtaatcccagctactcgggaggctaaggcaggaaaatcgctctgacctgggagatggaggttgcagtgagccaaggtcgcgccattgcactccagcctgggcaacaagagcaaaactccatctcaaaaaaaaaaaaaaaaaaattccagccgggcgtggtcgctcacacctgtaatctcagcactttgggagtctgagacaggagaattgcttgaggccaggagttcgagaccagcttgggcaacatagtgggacctgatttct

SEQ ID NO: 19159 - DNA, 1038 bp, Homo sapiens
tgacaaactacacagaattctcaagactccctcacatgtgctgggcacagtggctcatgcctataatcccagcacttgggaggacatgctggaggattgcttgaagccaagagttcaaggtgagcctgggcaacatagggagatccatctctacaaaaataaaaaaataagaagttagccaggcatagtggtatgcacctatagttccagctactcaggggactgagtggggaggatcacttgagcctgggagaggctgcagtgagctctgattgcgccactgtactccagcctgggcaacagatcaagaccctgtctcaaaaataaaataaaaaagattccctcacataatcagcatcaagggctcaccattagagtcacttttaagggtcatctggagacagatctttcactgggttaaggcatttcttacctggaagggataacaaacttgctagctaaccacattagccaggctaagggtgtcaattgtacatggctatggaggcccattaagaaccttgtgtatcagatttaaaccatgactgaggcagtgatgcccagcaaagaggataaggaggaccttaaagcactggcacccaaggctggagaagcctgaggctgcaaagaattgaaggttttctccaagcatgacccctgtgttggccttgggggccctggagcagtctgaaaccatgtggaccatggctgggaagcacgttaggaaacagatcaagtaaactacctgacaaagcatttgggcaagagtgccctgggtgccagccagatgcagagaggagttgaaccatgcaccctggtcataggacagatcttcagaaggaatggaatttaaatggagctctgcttttcagcagtcagtgcaagaaatcagggacttgcataaacttgccaagccgcaaagcaaatccccttccactgaagaggtgctgggcttgtcgtaggatgtgacccactggatgctggcaggcggttcttctgagagactgagagatgctggaaaactcagcatctcagtga

SEQ ID NO: 19160 - DNA, 1048 bp, Homo sapiens
tggtcttgcctctggaagagcagtgctgtggggcatctgctggtctttttatgctgccactagctcacttctcccccttctccatttcgtaattcctgtgtctacaaactttggacctggtaaggtctctatcttttccagtaacaaaactccaaacattgcccctgttaagagttgagctcttgcttcacacttgattttcccgtggtgttcttttttgttttttgttttttttgagacagagtttcactcctgttgcccaggctggagtacaatggcatgatctcagctcaccacaacttctacctccgaggttcaagcaattctcctgcctcagcctcccgagtagctgggattacaggcatatatcaccatgcctggctaattttttgtatttttagtagagacgaggtttctccatgttgctctggctgatctcaaactcccaccctcaagtgatccacccgccttagcctcccaaagtgttgagattacaggtgtgagccatcacgcccagccccctcgtgagggcttttgatcgtctttctctcacatcttgatttgtatttttgatcctatcttagtttctttccattccacaagtatttgttaagtgcctgctgtatgccccatcctatgctcacagctacgtaagtacagatggctccttagaggaggcagtgcctgcatgttgaaggcgggtaggaggtgctaatacagcaaggggaagggaatttcagcagagggcccccgaggaaataaagcccaagaactggagacggccgggcttgtcagagagcaacatggagtttggtgttgctgaagcccacaggctgaggccaggagatgttgctagggaggaaggcagagaagatgagtgatcaagagaatgccagagcttttctcttaccattattttaccagaagccacttacttaatacaatcagacaattctttaagaaaactggggagtagcttgttcttccaggaaacttggtgctgaagagaactaccagaggaaaaggtgtaagtgactgtgttctgaga

SEQ ID NO: 19161 - DNA, 1034 bp, Homo sapiens
ttcctggctagcaataacctgtcatactgtcatgcatcagtgtgccacggggggacgtggtcctgaggacaaacgaggcttcgcatttgagaccctcccagaccttgctctatgcatctctccttttggctggttctaatttgtacctttttggtataataaagctataatggtaagtacggcactctccggagttctgaaagtcattctagcaaatactgaacctgcaggggtccatggggacaccagtaaggatggtgtctacacctgcagctggtatctgaagtgagggcgttctcacggaggcctgtgcctgcgacctgtcaagtctggcctaactccagggaccagcacagacgcagaagcccaaggcgcacttctcaccactgcactggggtttccaaccccctcgctcatgagtaaagctgtgaaacccatcctgctactccaggctgcctcaggccctgaatccctgcaggtgtactgtcgctcctttaaagctgtcaggaactcctcccacacatccatgtgaccaccaaatgcacaagcaacttctgtcaccagtttgccttcacacatgcaccttcccataaatcctgaccctgcatcagggcctggtctctggcagcctcctgggatgggtgccaccccagccagagcccgaaggccggagctcacctgacactgcccagggggctgcgcttctcctgctcctgccgccgggctcgcagctgctcctcggccagcgccatctcctcctccatggcagaggcttcctctttggcccgacgacggttctcctattgaagagggacagacctggctgagcctactggggaccactaaggaaggaggcctcgtcggcacccaagtccctgccacaaaccaggtgctgcatccaccaggccagtgctccacatggctgcctgccccagtaccaaagccgccttctcttctgcagctgaggcctgcttttttcactgactcaagacactggacaatcagtcctaactcagtcatccctcagtccagga

SEQ ID NO: 19162 - DNA, 1067 bp, Homo sapiens
aggtggccatgagacgaacttaatgtgtcatttgtcctgagaacccctggctagcatcactcttactgtactagggaagacttcacctcaacactgtgttttgctttgagtcaaccactggtgacccagtagccgtgggagggaaattgcccctgttttcctcatagcctgtcagtctctattacatcagagaaagctgaaaaattgattcttttttgtccctgtccaaatgtggcagctgtttaatttcaattagcaaagcttgaaaaagaatattatgccaggagtaattaaagcaggagggggttccttgctcacctgcactccatcctcctaattggggatctgaggtgtcccccagcaggactgtgaagtttgggttctggggaattctggtgcctggggctttgatgtagctctctcttcaaacaagtgacaggacaggaagcataagcctccaggaaggattcatttaactttttaaagtctaaaaattagctgtacagatcagacttgtctacaccaaaatgccaacttgttcacttcaagcccttgcttttgctctctataagtcatctgtctgctttcaaagctcctcctactctcctgctggggaaggccaactcctttctcctttatcaaacaagtatttgttctggttgacacattaaaatctttaccaacaagtgaagcaaccccctacctgcaacttcgtaagtttcgctgcatccgtcagagtcccaggaggaaacagaattcactcctaatggtacaggtggatggaatttaaggaaggggctactgacagaggaatagacaggggtatgagaacaagcaaggaaaggtgcccaaagactaacaacaccaggaagctgttactacccatagggtgaaaggaacaatggaaggaccagagccagtgagagctgggggaacggcccagcagtggctgtagtcagagaaggatgtgaccttcccagagaggctgaagcagggtaagaacagggaaaacatgccctgctgcctttccatcttctgcatgtgcctcccatggccaaatagccagg

SEQ ID NO: 19163 - DNA, 1031 bp, Homo sapiens
acatgtcagacattgtacttggtattttacagacatgatcccattttaatcctcaaaataattgtgcccagttaatgagattaccgtattacagacaacaaaataggaattcagaaagtcactcaacctgtgactattgtcaaatgatggtacaaggattcaaacctaagtggaaagctaaggtccgtataatgtttaaggtccttgtaatttttaaggtcttgcgtgcacgcccactccatacaccttatgtcttggatctcaattcctattatctcttcttcactatcctccaaccctgcaagcctactcccacctcagggcctttgcactggctgttccttcagcctgaaaccccttccccacatgtctaaatgatgtattccctcaccttctcaggtctttgctccaatgtcaccttcttagtgagacttctgatcatcctatttaaaaccacaacctacaacccactccccactcccaatcattcttaccccaatctgttttcttttcctgtagcatttatcaccctctaatgctatttttattgtctgctcctcttgctagaatgtatgctccaccaagacatcgatttttgtctgttttgttcttgatgttccttagctactagaactgtgcctagcacatagtatggggtcattaagtgttgactgaataagtgaaagactcaattgattccaaagctgtgctctttcctcaatggccccagtaatgagcttctagagattttcattttaaacattattaatctgaatctctccttctgctctctgactttctcctttcaccaaacaatgggaagaaaccctcccctcaactacctggctggtgtttatgttattgagggtcatggttaaggatcagagtatgcaggatattatttgtctcatatccgtgagggtctctgttgtgtttggggctgtgagaagatgaccaggggtcctgtgtatacaaaggctagatgtgacatgcttctagttacctagcaaggggactgtcagctcttctag

SEQ ID NO: 19164 - DNA, 1136 bp, Homo sapiens
tttttctatgcatcgatttcttccttggattattttgaagttaatattgcaggtgccctgaattctgttggaatctaatcatctagcattcagaagatatatcaaagagtggtccagggagtctggcttggaccttcaacttcagccttgcaggtagtatcctgagattaaataagcatagtcaaacacaggttccttcaggcctaatttttatgttttaaatatgtaaataactccttattgtagggtcatcataattaatatggtattcccaatcctacattaatttattttttattcctgcaggtttcaagttcgaaaaaagatagaataactaaatgctatgctagctcacagcattattgctcaagaggaataatgctcttgtactttagagtaggtaactaccctagtttttcatctagagttgctgcatatgtatattcctctttctctgtgtgtgtgtgtgtgtgtgtgtgtgtgtgtgtgtgtgtgtgttcatggaatggctggaatctgtttaatctcctaaatagattgagcacatacacagcaagagcattcagactataggcttttcgtcaaggacacgattctctttctaatgcatatttgggactgacagacagaattactgaggatcagcagtcatggggagaaaaggaaaaacaagtgaaatggtagattgaaatggtgtttaagggccagtttctctgcatgtgctccctctacagaaagggtcctaggggctgtggggaaataggcggcctccgggctgtgagctaatgcggcaccactgctgtttgcatagctgcacagccctaggagagacctgggaaagctagcttgaattccaatgaatatttacaattacactgctccgtagcagaatgcaatcatagtgctccagtctacaggttttatgcatcaaaagaaaatgagaggagagcagcaaaaatggagttgcctttggagagacttacaaacacagatctcactgctgtggcagaactaaaatgctttatttctgataagagcaatttattcttcaggcatcttccttgatagtagaaagcacctgactgggttttgaagtgagaaagtcttcagtagatggtttttaattctgagcaaga

SEQ ID NO: 19165 - DNA, 1061 bp, Homo sapiens
ccattcaatggagaaaggatagtttttcaacaaatggagctggaattattatacatacgtctgcaaagaaaaataatctcagcccttagtgcatttgtatacaaaatttcttggattagaaaaagatttttaggtagaacacagcacaaaccataaaagaagaaactgatacattgacttttataaaaaaccttgaaatgttgctctttaaaagacattgttgaaaaacgaaattatatgacacagaatataagaaatatttggaaaatgtatttctgataaaggacttatatccagactatatttaaaaaccttcaaaaatcaacaattaaaaaaaatcttaaaatggacaagaattggaaggacactttaccaaaaaagatatagttggtaagtaagtacatgaaaatatgctcagcagcattagttgttagagaggtgttaagttaaaaccacaatgaaataccactatacgcctattaaaatatctaaaattaaaaatattgatcataacaagtgctgacaagaatgcagaacaactgaaactcaaagaagggatattagaaatcagtgggaaaatgacagacagttaaattaatttgatgtaccaattggtaatccatatgaaaataaaattagttttctaactcatataaccaaaaaaaaaaaaaaaatccacaggttaaagacccagatatgaggggtggagtaagcaaaagcattaaactccataaagaaaatatacgagagtatggtaagaaggagcatattgaccaaaatgccaaaagcacaaaccagaaaagaaaatattaataaacttgtctacattaaaacttttaaaatttcctattctacaaaagacaccacaaacaaaattcaaaggtaagagataggtgaggcaagatatctataacatatactattgatgtatagttacaatatacacaaagaatttgtagccacaatatatccaagatgcattcaactctttttttttttaattatctacatgtgcacattgtgcaggttagatacatatgtatacatgtgtcatgctggtg

SEQ ID NO: 19166 - DNA, 1072 bp, Homo sapiens
gttctctgggctgcctttaaaagaaaatctacaaagcaaatgtgaaaagatttagatagaaatgaaaattaaagttctatatattaaaattcatgcactgtaaccacatggtactgaagcataaatgtatacctttaaatatatttgtgaagcataaaaaagattgtaaaaaagtaacttaagtgtttgactcatgaagctagaacagaataaataaaaaaaaaagtagaaggaaagaaataatggagaaaaaagcataaactaataaaattaaaaacaaagaaataatacagaggatcaacaagtcaaaaaccagtctttgaaaagagtaaaaaaaaaaaaaaagcatgtagccagacaaattaagaacagatataaaaaacacagattaataaaaattaggattaaaaaatagaacagaggtataaatctgtagagaatttttcaatcacttatgaatattatgaataattgtatgccaatatattcaaaaacatttaaaatggactttttaatttttttgagacagcgtctcactctgttgcccaggctggagcacaatggcgcaatcttggctcactgcaacctctgcctcccagattcaagtgattctcctgcctcagcctgctgagtagctgggattacagtcatgcaccaccatgcccagctaatttttgtatttttttttttttttcagtagagacgggatttcaccatgttggtcaggctggtctcgaactcctgacctcatgatccacctggcttggcctcccaaagtgctggctcccaggcgtgagccaccgcgcccagcctaaaatggacttttcttaaattataaaaattatccagaaagaaataaaaatctgaataaatgaataatcattaagaaaattgaattagtaatcaaagaatccatgtaaaaaggaccagaaatgacgattttaccacacatttaaggaaaattaattactgttttatacaaacttgattagaaaatagtaaaaagataaagcaggcataccaaatttttcttatgaagcaagagtagttttggtactgatggaaataactg

SEQ ID NO: 19167 - DNA, 1114 bp, Homo sapiens
tcggtcctgtagcaggttgcctgatggattggtgagtaatgtacttgaagagtgcattactgagctctagactaatggctacctcttgcctatggcctttatggtagatcattcattgtgctgcctcatcagcttcctgccagtctgtatctggcatgagcactgcctgttccaaagctgattaataccccgggaataagtcccattgcaggtctcagggtggattacacaaaagtaggaatgttctggtgcttggggacaacataacttttctttcatgaataaaacagaaaaaaacatctttctatattgtcaaagtagaggtctgcacaaattataaattttctaaattattgttgattacagttagcatgttaaaggaataataacacacattaaataccagactctttggtgctttaagcagcccaagatttcttcagattcagtttcctgaaattgtgtgcgtgaaataagagccaagaaacaaaagcaaataatagaagaccacttgtgactcaggattaaatgcggactgtaattctaggagaagttggaggagagggaagttgacagtgaccagagatatagacaccatggaggaaatgcaggttaagctgactcttaaaggctagaattgggtaggcaatggggagggtggctatgacaagtcagaaaacagcatgagcaaaagcataaaagtattaaagagtatgacatattgatgggccagaaagaagaaaagcctgactagagtagagaatgtgggtttggaagtagaggtagtaaagaatcaagcacaggctgacaggacttctgatagtgtgatagactgactcacctaaaagacatccagctgtaatgacctagaaatggtacatataacatagaatatatttcctttggaatagttggctgaccttctagaaaaatgaaaaaaattatataccggggtcagaaatgacctagaaacttataatcggagtgataaacacatgtaccaagtctgtggctcacccaagaagttggacctgatgagagacagagattattagtcttggaaatctggaagcttgatttaacacccatgagtggacagagaatgagaccttga

SEQ ID NO: 19168 - DNA, 1048 bp, Homo sapiens
tcagtatgaacttaccgacactaattttattctataggttataatccattattatcattattttgatatataagttgttccaaatttgtcaagtagcccctttaaactgtctcctatactcttttgatatgtccccatcattctttgagcgttttctcatttgctggagcaagatattctaggctcaccttatacttccctgtactggtcaaaaattagccttttctccatggagcctaattgcttttagtagacagtggcatttttaaaccaaaatctgtgtactaagtgtgctcactgatgttggtgtatcattgcatctatgctccctcaactgatagaagtaggaaatttgtttttatagttctaaaacacactttttttatatatacctatatctatatttttaatcattactttaaaagtgttcatcttgataactttaattccacttcaacatcataggttaaattctagtcttccccctttccatatttataactcctgtctctaacactgaagaaatctggtttccattattcttaatgtatttattcatttgctcaagcctagacacggaagttagttttacattactcactcagattattacaaaaacccaagcctactaattagaatttaatattttgtagttcttttttgagataaaattcacatacagtgaaatgtccattttgatgagtttggttttttcaaatatatctatccatgtaatgcatgcccctattaaagtattgaacatcattcaagaaaggtttttttggggtcctttttttactcaatcctcctgatacaattttctgatatatttttcaccatagattagttttacctgttttataactttatttaaattgaatcatatagtgtatgtgctctgttgtgtccaactacctctgctcagcataatgtctgtgagatccatttatgttgttttgagtgtcagtagtttattcttcattgctgagtaatacttcattgcatgaatataatatactatgattagtttattcattctcccatttgt

SEQ ID NO: 19169 - DNA, 1050 bp, Homo sapiens
tgttccatggacaatggtggagagaagtataatcgtagatggcagtatggtagcccaaacttgataacatctgaagccataaaacttatttagatcctccagaaggggtatcaaaggagtaagaaacttggaatttagccttgaaagtgcccagttgtaggaaatgaactaaagatggacacatcagagagagttggaaggaattgttgaatctctaaattgtcataaatccatacaatccatataatagacaatgttataaattcacctcaaaatctaccaaaggggacctccagtaagctattaagaacctgaagacagtgttttactcaagccaaagcaagagagaagagaaataactgtgctggtttacaccgaattacattacaggattatacagggcttttccagacagtatcttgacttctacaacaacttactgaaatgattgtttttatgctccttgtactgatgaggaagggaaagaaggactaattgcctaaatttctagaaaatggaaacaatgtggagaaaccactgaatctggacaaggaagacatttccgaaaagattgagtctctcaaatttcacattgtgattggggaaaaattctttccacataggccttattttgtatttcctttttttttttttttttttttgagacagagtctcactctgtcacccaagctggaatgaatctcggctcactgcaacctcctcccactgggttcaagcaattctcgtgcctcagccttctgggtagctgggactacaggcacccgccaccacacctggctaattttctgtatttttagtagagatggagtttcaccatgttggccaggctggtctcgaactcctgacctcaagtgatccgcccacctcagcctcccaaagtgctaggattacaggcatgagccaccatgcctggccagccttattttaaagatgagaatttctgaactcttaacaatccttgctgatagtagaagactttctgtagtttgtcatggagcagtctcccataattcagagcagtaataagca

SEQ ID NO: 19170 - DNA, 1030 bp, Homo sapiens
gataatagaacttcccaaacctagagaaagatatcaatatccaaatacaagaaggttgtagaacatcaagcagatttaacccaaagattactacctcaaagcatttagtaatgaaattcccaaaggtcagggataaaggatcctaaaaggaacaagagagaagaaacagataacatacaatggagctccagtacatctggcagcacacttttcagtggaaatcttagaggttgggggtgattgacatgacatatttgctgaaaggaaaaaaaatttaccttagaatagtatatctggtgaaaatacccttcaaacatgaaaaagaaataaagactttcccagacaaacaatagctgagggacttcataaacaccagaactgtcctgcaagaaatgctaaagggagtacttcaatcaaaaagaaaaggatgttaatgagcaataagaaatcatctaaaggtacaaaactcactggtaatagtaagtacaaagaaaaacccagaatatcgtaaaactgtaactatgatgtatgaaccactcttaagcagaaagactaaatgatgaaccaatcagaaataataactacaacttttgaagacacagttcaataagatacattaataaatagaagcaacacaaagttaaaaagtggggggactaagttaaagtgcagaatgcttattttctttttgcttgtttctttgttgtgtatgcaaacagtgttcagttgtgttcagcttaaaataatgggttgcaaaatagtatttgcaagcttcatggtgacctcaaaccaaaaaacatacaacagatacacaaaaaaataaaaagtaagaaactaaattatatcatgaaagaaaatcatcttcactaaaaggaaaacaggaaggaaagaaagaaacgagaggaccacaaaacgaccacaaaaataacaaaatggcaggagaaagttcttacttatcaataatagcattgaatgtaaatagactaaaccctccaatcaaaagacatagagtggctaaatggattttttt

SEQ ID NO: 19171 - DNA, 1031 bp, Homo sapiens
gctatttttaattttagccattctgatagatgtgtagggatgtcttattgtggttataatttgtgtttccccagtggtttgtggctaatgatgcctaatattttttcaagtgcttatttgcatctgtatatcttctttggtgaaatatcttcatgtctgttgcctgtgttctaattggagtatatgcttttttactgttgttttaagagttctctaactagactattttcttccactctgtagtttgcctttttatcctcttagcgtggtcttctacagagcaaaagtttttaattttgatgagatcatatttagcactttttcctttcatggatcatgtttctggtgttgagtctcagagccctttccatagccctagatctggaagtttttccccagtgttttttctaaaatttgtttatagttttacatttcacattgaattctgtgaattattatgagttaatttttatatgaaatgtgaggcttaggttcaggttgttctttagtctatagattgtcaatttctccagcagcatttgtcataaggctggttttttcctccattgaattgcttttgcaactttgtcaaaaatcatttgggcatacttatgtggctctatttctgggttcctattttgttccattgatatgtttctattatcccatgaataccatactatcttgattgttatctctaagtcttgaaactagttagactgattcttcacacaatgttcttttgcaaaattgttacagctattctagttgtctttccatatgaattttaaaataatcttttctatatagaaacatctttctgagatttttatagttaaacctgcatattcatttggggagaaatgacaccattgctaggctgagtcttcccatccatggacacaatatgtttttctatttatttgtagttttcaacctacaagtcctttatatgttttcttagatttacatctaagtatttcactttttaaaattgttattaccaaaaaaaatattttagatacagggtc

SEQ ID NO: 19172 - DNA, 1024 bp, Homo sapiens
ctctaaaatttaagagtatttacaccttagttttcagaatggaattgtctgcaaatataagcgatcgactaatggttgttctccatttaaagcaaagataactgtttatcttagctgattacagaccaccaaacctaaggatactttgtagatcattatagctgagaagggatataaaaaatgaacaccaacaaaattgcataaaggaaatggattcttatcatcattataaccaagtgtttgttactgactgccttctctcttctttttctccacccccacatctccctgtacatctttccatttcgggggaaactgtgaacatttttatgattttttttctctaattaagctccattctctgttaagtggacaatgacatgataacttagttggactaatgtagtgttacatggtggagattctttatcatgcctattgaggttctgcttttttaaaatctcttttagctgggaaagaattaattcataatttaccataatgttcaaaggtagggtagaagtttcttttttaaaaataaaccatgatattttcaacagcttaaattaggtgatttactttttgctatcatagtaacctggattcttccatcttttgaagtggaaactgtcctaaccccataacctcgacatcactgtgagtaaaactctttttaattatatgactgtgtagtgtgcacattagcattgctaatcagcttactgcagtggatttgtatcttcactactaatgttcatagaatgtccattgacataattgcaggtctgtatcagtgcttagatgctactgtatttaaaaccacaggtcggaatttattagtgcataccacagtatatggaaaaattttaaacccgatacaattgtatgtcactaacttgagtttacatagttttatctgaaatcttcatggtacataatgctataatacactggatctttagcttaaaaataaaaagacactatctcacttgtttttgctgtatttttttcttctatgattgaa

SEQ ID NO: 19173 - DNA, 1049 bp, Homo sapiens
ttagcttgtcagtttctgccaaaagacatctgatattttgatagaattcctaatgaatctgtagttcacaatttggggagtgtggacatttaatactattaagtctttcagtccatcggaagaccactggatgtctttccatttatttagatccttgaaaatttttaaatttctttcaattatgttttatagattttagtatacatgtctgtcctgttattatatttattcctaagtattttattcttgttgatgctattgtaaatgcaattgttcactaagttttattttcaaattgtagtctatacattggtagcatatagagatacaattgatttttatattttagtcttatgttcttcaactttgctaagctcgtttaatagatctaatagcttttttggtttattccttagggttttgaatgtacaagatgcagtccagagcttattcatgctcttgagtttttaatttcggtgactgtattttcatttctagtttttttccacatataccgttgttatttcatatctgactcattttatagcttattgccttttgcctgaaatattttatatttattttatttatgccttcaaatattccaaacatacttcgctgaaagtcatggaagtcgttgttaggctttttcaatgaaactaatgctatgtggagtgaattcattttctttttctctaattttttttttttttttagacaaggtctcactctgttgccccagctggagtgcagatctcggctctcggctcacagcaacttcagcctcctgggttgaagctatcttcccacctcagcctcatgattagctgggactataggctcatgccacctcacccagcctatttttaaatttctttttgtagagatggaatctagccatgttacccagcctggtcttgaacttctgagttcaagtgatcctcctgcctcagcttcccaaggtactgagattacaggtgtgaactaccacacctggccagagcgaattcattttctgagtgttgatttgttgattttgtttgatacct

SEQ ID NO: 19174 - DNA, 1027 bp, Homo sapiens
aaaaaccacacagctaacatacttcttggtgaaatactaaatgcttttcagaaaggtcaggtacaagatgatgtccactctcagtacttctctttaaccttgtactagaagttctagccagagcatttaagtaagagaaaggaataaaaggcatccagtttggggaaaaaaatgtaaaactctttctgtttgcatgatcttgtataagcatacttcattttactgtgcttcacagatactgcctttttttttttttcttttttaaacaaatggatggtttgtggcaaccctgtgtggatgaagcctataggcacaatttttccaacagcacgtcctcattttgtctctctgtgtcacattttggtaattcttgcaatatttcaaacttttttatcattattatatctgttatgctcatctacgatcagtgatctttgatgttactattgtaattgttttgaggcactacaaactgtctatgaaagatggtgaacttaatgaatgtgatgtgtgtttctgactgctccactgactggccatttccctgtctctccctatcctcaggcctccctattccctaagatacaacagtattcaaattaggtcaattaataaccttgcattggcctcttagtgttcgattgaaaggaagagttgcacatctctcactttaaatcaaagctagaaatgattaaccttaatgaggaaggcatgtcaaaagccaagataggccaaaatctaggcctcttgtgccaaacgattatccaaattgtgagtgcaaaggaaaaattcttgaaggaaattaaaagtgctacgccagtgaacatacaaatgataagaaagcaaaataggcttattgccaatgtggagaaagtgttagtggtagaagatcaaaccagtcacaacattcccttaagccaaagctggatccagatacaaggccttacttctcttcagttctagaaggccatgaaaggcaaggaagctgtaggaaaaaaaaaaaaaaaataggccgggtacggtggct

SEQ ID NO: 19175 - DNA, 1059 bp, Homo sapiens
taaattagaaacaagggaaagaaatttgggaaatccagaaatatatgaataattaacaatacacacatgaccaatgaatgaaaaatttaacaaatgaagtgagaaaatacttagagattaatgaaaataaaaataaaacacagcaaaaggtatgagatacagttaaagcagtacttacatgaaattattggtataatgcctatatttaaaaaaagttgaagtcaataacaatcttaagaagcaataaaaagaacaaactaaacacagtgaggcagaagaaaataattaaaatttgaacaaaaataaatataatacaagatagaaaaacaatagagaaaatcaatgaaaccaaaatttggttcttcgaaaagatcaacaaaatggacaaaactttagcagaccaataaaaaagaagattcaaattattaaaatcagaaatgaaagaggaaacaacacttaaaccgcatgttctcacttataagtgggagctgaatgatgagaacacatggacacaaggaggggaacaaaacacactgggccctgtagggggtggagctggagggagggagagcatcaaggataaatagctaatgcatgcgggacttaatacatagatgatgagttgataggtgtggcaaaccaccacggcacacgtttatctatgtaacaaacctacacgtcctgcacatgtattccacaacataaaattaaagaaatgaaatgaaaaggattgtaaggtaacactataaaccactgtacaccaacaaattatacaacttgagatggaaaattcctaggaagacaaaaactaccaaagctgactcaagaaaaaataaaaatttgaatagacctgtataaaaagtaaagaaatttaattagtaatttttaaaattcccacaagcctaggcccaaataccttcattggtaaattgtaccatttgtttaaagaacattaacaccaatcctttacaaatgcttacaaaaatacctgagtaggaagtacttcccaacttactcttgtcaagtcagtatttccccgattccaaaactagacaaagc

SEQ ID NO: 19176 - DNA, 1073 bp, Homo sapiens
tcttttggcaatacctacacagacacaccctggattaatactttgtatccctcaatccaatcaagttgacactcagtactaaccatcacagacatgtaggcagaactacaaaaaggaaaagaaggaactgtgatagctatcatgtgagaactgtgtaataactatgtaatgggattttataaatattctgataatttttttaaacgacataagtaagctaaggttttcttatattccacactacatggtgaggattgagttactctttttatagtatctttaaggttcacaattaaaatatattatgaaatctgccagacacagtgggccacgcctgtaatcccaacactttgggaggccaaggtgggtggatcatttgtagtcaggagttcgagacccacctggccaacatggtgaaaccaccactgtactaaaaatacaaaaattagctgggtgtggtggtgtgcacttgtagtcccagctacttgggaggctgaggtgggaggatcgtttgaacttgggaggtggaggttgcagtgagccaaggtggtaccactgcactccagcctgggtgagagtgagactctgtctcaaaaaataaagaaaatatattatgaaatagttacagtactgtaaaaagtattacagtatggcacaaacttgtggcagcatgtgcagctgttctcagaaggcaatgcagagtggtgtgggcgtgtcattgctctaaacttttcaatgattgctaatgactatttcacttgggcatgtaaaaaccataaacttaattccattaattctcaatacaaaaagatgtgttcatggaatgttcaggttttcattttccattgcttttcagaccctagggaaaccttgaaattattccttaaaatctgaaacaagagtttagatgtagaccttcatgttttgttactcctgacattatccctggataatatcattcattctaacagttttagccacaatacatatgtggtgacttaaagcacacctcaataccaccattttcttttctttttttttttttgtttttttgtttgtttgcttgtttgttt

SEQ ID NO: 19177 - DNA, 1027 bp, Homo sapiens
atgagatttaaacctagtgactcatattttacatctaaatgtagcgatggctttatgaataactgtttatacttagcaagtattggacattatattcaggaagtatttgttgagttgaattacagctctctcaactatgagatacatttctagattcattagtagtggactgtttctagtattccctaattccatattattaattcatagacatgcggacacaaagcaacctggaatttctcttcagctccaggatgttctgagttgatagaagcttgagccaacaatacctagatcagacttgttagatatacggaaataatttataaaaaccatttatttcagattaaacctatatctgccttattactaaatttctgcaggtatattattacagtgttttaaactttgacactctagaattataggatgaaagtgagtagcagggagaacagcagaatattggatttaacataatagtggaactcatgtagtttagcacaggaaggaatagacaggagcatgttattataaattggattttcagttggttcatacatgtcatacaatatgaaagtgttcatttaggttcttatcaacttcaggaagatggcaagttggctgcttttgcagctgcatctgttatagtttcttattccccaataattatgaactgtatatattcaagatataatatacacatggcactgatggagctattatgctatcattatcagtagtattcactcctaccctgccaaataagcaccatactgaatgttttggatggggaaaaaagggacaagccagtgcagcaatggtggtggttagtcacttatactatagcaaaaaattggactggagaaggaccatttccttcagcataactctctatatttcataacctttgcccaaaactattcaaaccagcaaaaatgacttatcctaatttataaaatgtttgccaacattaattagatgtttcttctacttctctttatatagattaccttgaaggaatgtatgt

SEQ ID NO: 19178 - DNA, 1045 bp, Homo sapiens
tttcaaaacatacttttggaggtctaatgtatttccttataaaaatgaaattaaaagtaggttttaataccccagaagaattttaaataaccaataaattcaaaagaaatcacagttataaaagaggaacaaaatagctcttgttcagttcatatgaaccatattgatcttggttcaacttgccaattccaaaatacttaaaatacaaacattctaaattaatctttactcatttaatataacaaactgttgtcacagtaaattggaatctaaaatttaaaaaactcactgcacaacagaatttggaatatgagatctttgaccattttacctcatggacgtgagaataacacatgagaataacatcataatgttgttcttctgtgatgttattaatagaatgaaaaaacacagaagggtagaaaattgtcagttaaagctttgttatgtacagaagcaatcataaaagtaatttagcactaatattcaaaaaaggatagcagtgaccctgaacatgattctgttgttagtctatcatgaaccactcctaaaataataaaacaaatatttagtggcaaaaaagtggtgccttcttaagattataaacattataagcaagattataaacattaagcagcattagagtttttaaaataaacaaatcattgtagagaaacttcattagtgatttataagagaggatacacatcatgttaattaaatttacagatgatgctaaattggatggtgttggcaaaaccagtgagggcagataaaagggacctaaagtggttagaaatatgggcaggaaatgaaatgtgattcaacctggaaaaatgtagctaatacatctggggaaaaatgatcagaaacacagccattcaactggcaggatatacagtacttggaaagcagtattaccaagagactttgagatgatagtggtagcaaattatataaggtcttgtaatgcaatgtggcagtaaaatcagtcaatgagattttagtctgtatatgcaaaagcttcacatcatgtggctgaaag

SEQ ID NO: 19179 - DNA, 1029 bp, Homo sapiens
caatgttttcaactcatagaaagtaatggtcagaaaaggtagaaaacgtaagatgggatatctcatgaaacataatttagtcacgtacacagacacaaaaatgggccgggtgtggtggctcacacctgtaatcccaacactttgagagactgagacaggtggatcacttgaatccaggagtttgagaccagcctgggcaacacggcaaaagcccatctctataaaaaatacagaaaaataagttagccaggcatagtggcatgtgcctgtaatcccagctacttgagagactgaggtgggaggatcacttgaacccaggaggtggaggttgcagtgaggcaagattgagccactgctctccagcctgggtgacagagtgagaccgtgtctcaaaacaaaacaaaacgaaaaaatgtaaatgaggctacaccaaagtaagtttctaagtggtacttttgttagccaggcaaggaaaatcatttactgatagtgagttaattaaattgtgtttggttgtagtggctgaagatatgtatcctaagaaaattaacatttaaaagattgtttgcctttccataaggaaaactgaggacactgggaacaccaccagtggtcaattataaaacaaggcaaaaaagaaaaaggcagtcgattttcttgactcttgaatagtctctttgagacaactacaggcaaaatgtataaaaaacattaacttagtataacctgaagtggaatctgctaagatgtattaaaactgtcagtggtaaagatttatgtggaacagaaaaagacttagttggacaaagttataaaagccatagttaaagccatagtttttcattgtattatttatcagcaggtattttgtggaaaatatttgaaactctttttttgtgttattgaaccagtagtgttaacagtgaacttcactgcttttgcaagttaaatatcatttgttctgtgaatttttgtccaaaagagatgccggctatcctgaatttatttaccacacaaaagttcaatgac

SEQ ID NO: 19180 - DNA, 1047 bp, Homo sapiens
taaacttgaaatattttttaaaatgtagaatgtttacacattattaaattctacagggcaaaatggtacccactgaactataataccacccatatatagaagacacataggtcttctttccagaagcagccactattacccgtttctgctgtgtatttctagatatgttttatgcatatgtgaatatataaaaataaatgcatgcacatatgctttaaaaaacatacaccagaaaaataaataaataaaaagcacacacctacatgtacggtagtattctttacaaactgttctgcatcttgctgttgtttgcttgatcacagatcatgccacattagtacctgtaaagctgccgtttttttaaaaaatgaagcgttgcattctattatatagatgtctatctaacaagtttcttcatttttgtcatctaagtttttttcattttcttagttataaattcatatctgatggatgttactgtcaaatagtgattttatacctgtataggtgtatctaggaactgcaggttaaaatgtatgtacattttattggttttctctgtaatgtctgtttttctatttcaataattttcactcacatattctttcctctgctttcttagatttaaatttgtactttttaaaacttagatgattttaaacttttccccctaatgtaaacattaagagctatagattttccttcaaacactgttttagctgcacccttaatttttgatacgttgtatgtttattattcagttcaaagcattttataattgtggtttcttatttgtcctatatgttattaagaagcatattactgtaattacaaatacttggggcttttctaaatatctttttgtaattgatttccaatttgattctgttttggtcacaatacaaacaccgtattagatcagcttttaaagtttattgagactttaaaaaaattattgagatgcattagaagaattggtgaatgttttttctgcacttgaatgtatgttctgcagtttctcgatttactcttctagaacttaattag

SEQ ID NO: 19181 - DNA, 2037 bp, Homo sapiens
taataaaatttgtgttgatgagttgactttttaaaaaaatctataaatctgatgaaattagtccttgtattacagtcttccctggatttaactacctatttttattccaaggatatgtaatttttttccaagacacaaggtcttgctgtgttgccctggctggagtacagtggtgcaatcatagctcagtgcaacctcaatctcctagactcaagcaatcctcctgcctcagcctcccatgttgctgggataacgggtatgagccactatgcccagcccaaggatatgtaataatctaagttttatcatcaaaatattcaccagaattgcctaagtcatttggcaatcattttacatggctttttgaagtacagaaataatatatacttctgaataagcaagaggtttttgttttttatttgccattatctgatcaatttcatgaaagttaattccatagacgagtcttaattgataagatcaatatattgtaagtaattattgatcctcaggataaaccaagtagtcttctattttttttcttacccaaactgatttttctatatcagtttagttttgtttttttttttttttttttagtttctataatatcctggtcatgtgatagttactttagaaaaatgacacaaaatctttatcataaaattagttaggaggtgtgctgcaattatcactataatatttgatttcatcctatctgtttcttgtttctttttttttttttttttttttttttgagacagagtctcgttctgttgcctatgctggagtgcagggatgtgatctcgactcactgcaacctccacctcctcgattcaagcaactgtcctgcatcagatagctgggattacaggcgcacgtttttgtatttttagtagaaacggggtttcaccacgttgcccaggctggtctccggctcctgaccttcactgatcttagcctcccgaagtgctgagattacaggcatgagccaccgtatccagtccatcctgtctctatgtctaaaaaatgttttttaaaatatctgtagtgtaataaatagaaggaccaaaatatgtgttacactgaatgacattcagggcagggttgagttgaaaggatatttctaacacaaacattttccattttttatgagtgctttaggaagataacatcctatgaaagaaattaaaagcaataagcctgggcaacatagcaaaaacccatttctttttctatttttttttttttttcaggcaaagtctcactctgtcacctaggctggagtgcagtggcacaatcttggctcactgcaacctctgcctcctgggtttaagtgattctcctgcctcagcctcctgagtagctggggttacaggcacataccaccacgcctggctaatttttgtatttttttttatcatactttaagttctagggtacatgtgaacaacgtgtagattagttacatatgtatacatgtgccatgttggtgtgctgcacccatgaactcatcatttacattagttatatctcctaatgctatccctcccccctctccccaccccacaacaggcctcggtgtgtgatgttccccttcctgtgtccatgtgttctcattggttaattcccacctatgagtgagagcatgcagtgtttggttttttcgccttgcgaaagtttgctgaaaatgatggtttccagcttcatccatgtccctacaaaggacatgaactcatcattttttatggctgcatagtattccatagtgtatatgtgccacattttcttaatccagtctatcgttgttggacatttgggttggttccaagtcttgctattgtgaatagtgccacaataaacatatgtgtgcatgtgtctttatagcaggatgatttataatcctttgggtatatacccagtaatgggatggctgggtcaaatggtacttctagttctagatccctgaggaatcgccacactgacttccacaatggttgaactagtttacagtcccaccaacagtgtaaaagtgtt

SEQ ID NO: 19182 - DNA, 1034 bp, Homo sapiens
gtctcctgttaaagcttcgctttcatccccttctgtcttctcagtgactgacattatctgttgatcacttttccccattagcctctgtattgatttattcttctcaggatatatgcgtgattgagacttctcagttaaaaaataaaaacaaaataatacaaaatttgcctttgactctgagccaccattactatccccagcattcttcttcacctcaaagtcaagcttcctaactctcactattttcacttcctcatctctcactggctcttgctcagctataggtcgaattccccccacccccaacctttctccactgaaactgcttttgcaaaaatcacgtgacttttcccaaatccagtatatacttttttgtccttcctaacttcctccttgatattattcctgtgatttttctttcttcctttgcaatcctcagaattgttttgtgagttccaattactttgcctatctcttatatgtaggaattttccagaattttgtctttctctggctttacttctatcttatgcttcttgtaagcaatctggtccacatacacaaggttttagttactgcctgttcctcctatatcacgatgcttactaactctattctgaaactcccttttgatctccaacttcatagaaccagctttcatctgacaattttgtgtttagatgtgttgtaggcatataggaaaaactgacatcattatctttcctcagcatgtcccttttccaaaactaatctgtttcccttgtattctctgtcctggttggtgacaccttctttgccaggcactaaactctggagggggtacagagctacaaagacattatgaaataaagtccttaccctcaatcgtagagactaatgggggagacagacacatgaacagacaattacactacattagaatgtagtaaatacaatgataaaggtatgcactgtgtgtatttgtaacacaaaaaaggacattaaactcaaattgtggattgaagaaaagtttaggagaaggtgatgcccaagtg

SEQ ID NO: 19183 - DNA, 1081 bp, Homo sapiens
tgaaaaagttggggttttttttctttgtttgtttgttttttcttgtagtctcattgattttatggaggattttcagaggttttttttttgacatgaagtctggctctgtcaacccaggctggagtgcagtgatgccatctctgctcactgcaacctccgcctccctggttcaagcaattctgctgcctgagcctcccaagtagctgggattataggcacccgccaccacacctggctaatttttgtatttttagtagagacgggttttcgccatgttggccaggctggtctcaaactcctcagctcaagtgatctgcctgccttggcctcctaaagtactgggattacagatgtgagccactgttccctgccagaggtctttactttcagttttttagtgatgtccactatcttttttttgttaacaaagccatagaatttataagctaatggtctgagatctgaaagatattcctttcctgtggaacagaacaacaagatctcaattatttgatcaaggaaagtaatatgctgtaagcataacatgtcagttgataaattgtatcaatgccagaactggatgagccaaactttgctctgtaaataatgactgattaaatctcattagcatataacatagaatggtttatatccttttaagtttcaatgaaaaaatattatttaaataatagttaatctaataatacactatttcacctaaaactattttgctatctggaatgtctcttgatagaatggctatgtttatttgtttgttttccctgaatgttttataagcagtgtaatatttaagactagtgttagctttttatttgaatttcctgaatatacagcaaggatttttgaatctttattactagattttatttttctctccagttgttgctgtgtatggagtattgtaggtagaaaagagaggaagattgatttgtaaataataggttaatctggctagaccagccatgtataggtcaagctgcttgagggtgacctgctaacattgtggaaagattttattgtactttcattttattgagtttaattatacatgcagagcaaa

SEQ ID NO: 19184 - DNA, 1062 bp, Homo sapiens
gttgttatgtgcttcttctgcaagcagagaggcaaatgttaatgacaattccatataccaaaagacacattttttacttcaaagttttgtccttgtgttaggcagtctgagcagcgagtgatccagagcgcagccaacaaagcagcagatagcagtgtacagaaagcaaaaaaggaactgtatgtgaggcacttgtttctgttaatatccatattcctgttaacacacaccctttctcatgtaaaaagaaaaataaataaatggtctgaactttgaaaactttgtgctgctaaaacatagattttggagacaaataaatagatgctttgctgtttcactttcatagctaaacatcaacagaaaccatctccccttgcccccaaagtgtgaaatccttcttcccttcgttttcttccttatgtttcaaaagggaactttgaagactgtgaatacaggttccattggtcacctttcgggcttctttccccagtgctgaagccactcatcgactttgcaaaagactggagcattccaagatctgaaaatggattttttttctttttttcttttttagccgggactattttatttttatgaatttgtttttagtttaatgaaatagtagatcctgaaatgttgtacatatttctaactaggctgatgcacagtgcaaattccttttttaattgttttttttaagtagaaatactaaagaaagaataccatctaactattcataccagtatccagttgtagcataaggtgtcaaaagcaagtacgcaaaacatttactgttttaacaagctatttccttttaacaagaaatcttgtatttcttcctgtgtttgagatgaacatttttaaattttaaagttgtacagttttttgttttccattattttatcttgtttgtaactctatgaaatatatatatatatattttttgccatttaactgttgtatgttactctgtgtctgtaccatatagaaaaaaaattgtttttgtttttggttctctatgtgatatcagttaacaatgtaacactagctttacctgtcaaa

SEQ ID NO: 19185 - DNA, 1024 bp, Homo sapiens
attaaagtcgcagcgagacaacagagggctgatgaattggtgtcttttttttttcttttttgccgtcattcacacttgattgacttcaacctttcaagtgcaaaagtctctcttttccattattattcatagccatctgagtttttctaattaaagtgtatgaaaacaattactgatccgtcgtactgagtctgttagaggggatgtctgccttactgtaatgtgtatgaaaagcccacagttttctataatgatgtgcagctgaggtgttagataattttattcttttttactctgtagggctttttttttatttctcatgattcatttttcataattcctaaagatcccaggaaaggactgatcttgcagctacaaccgagaaaggaggtgggggggagtcttttttcctttccctttctccccctcttacccccaacctcgtgctccccctcagctgaggactacaaattaatcggtgacctttcacttctcggattcccgctggactccccaaccacactagtcagaaatgccttctattaaaaagaaaatagatggaatgagtttggcaatctccactccattcttaacgattcatcaacagctagccttaaccagctgccgatgagctttgtgtgaggtgcagatgtctgtgggggcaagaatgctatgtcacacacattcacctgccacacacctgctcttcgtaaacacagcatttctcagaatgcttctccatggtacctgttgcttactttttgcacccgctggcatctgggttgctgaaattattctaatacccctaagtgtgatgaggagttatcctatgttgatgggggtggctgtctgggtttcctctagttgtcaagcttattgctgatgattctagtggacatctcagtagctattttgagcaaggctgggatcgtcacaccattaaaaattaatagtaatgtatttaaaatattatttaattttgaacagaaatctacgtattccaatctttgcaacagacagtgaa

SEQ ID NO: 19186 - DNA, 1049 bp, Homo sapiens
gtcgaggggcacggaaataagaactcgccaccccttcggagatgcctgcatagtgtccttacaagcttctcttctccttgttttcattgttatttatcttccatttctgtaaactagcctgtcttacggcctgggggcttctatcagtgataccttggagcggagtcctgtttctgtaaactcttctgatctcagaaatatgaacacggagtggcccaattgtgttcttaaggccattaccagaagtgaccacaacccagctgttcatttcctctaacccatgtcctgccgcattctcccctcactgggcaactccttgtagactaaaggatggtctcagtaaagctcgtttctgcgctgaattttccttgtactccagtggggccaatgagttttagcctgtggtttcttctgttctaatttatatgaagttaaagctatatttcaaatccctaaacgtctttatttccctctatgggagacagaaaaaagtggggccttataagtggacttccacatgtccaagttgggaatctcttccagacttccagagactttaaacatggctgtaaaagaggagttgggagaagaaggctgaggtgggattttgtctcttgcccccttgcggcctctctgggacgatagcggttgtcatagaaatccagacccacaggcaaccctttgccccatttccacccacaaagaatggaatccagagaactttctcgccttttggacatgaagagaatggctgagttggtgacaggggaaaagaaagaggattggcccaacagtttgtttatgtgggctgcctgtttctggagagcgtcatcttttcggtagaaatgcccttctgtggattgctttaaaaaaagaaaaaacaaagatgaaagttctcattgctttttggaaacatcaagctgtgacctggttggaggagtccaatcaacgtggggagggctttcagaggcacagaagccagagggcagagggtgtggagggagcctgggaataccccgtgctggccagtccggcctggctgtcagctt

SEQ ID NO: 19187 - DNA, 1012 bp, Homo sapiens
cagcccacagacaagacaccatacccacatacgttgtacacacacacaccccctgtatacactcacacacccacacaagccatatactacacccacacgccccatctgcgtgcacctcccccacatacactgcaccccccacatgcaagcatcataaacacatagacactgtacccccacacaccccacacacactgacatgcatcccacacgcaccctcactctacccacaaatacacaggcactgccccgcacactcctgcaccccccacacaacagttggactccctcccactccccagctccctccacactcagtccttcctccctccaccttccattatgattaaataataattgggggttatattaatattcagtgttttcattattataactataaatattaatcgcagctgagccatgtagagttttataatttcatttaccttcttgtacaacttattgttttctctggttttctaggtacctatgattaattcatggcgaaccttactctgccagaagtagacatttcctaatctctgaacgctctgctctatcagtttttctgtcagcttcatttcctcctggaggcgtccctcctaagcccctccaaagccctctgcccacctgctcctctctggatcatctgactgctccttcgctgcctcctcatataaatgaaacagcaattcccaaatgatgggatagaccacaattcaagaatttttctccttgctagagtggttgaggtttcgacagtcagtagaaattgtttgttcaggaaagggctgttgggtaccgggataatttttgtcacttgaaggtcactgcaagactgtcccttccatgtgtttttcaaatgcctcttctggttaaagttgaaacaccttaattggtggagcttctgctttgcctctgatcccatccgtctacatgggagcactctcaggagtaagggacgaggatgggcctgaggctgaggcccctgggccatctggctgtaggg

SEQ ID NO: 19188 - DNA, 2087 bp, Homo sapiens
tataaaatgattatatgtgcttttaaaatcacaatgaaattcagccttttttttttttttatgacagagtcttgctctgtcacagaggctggagtgcagtggcacaaacacggctcactggagccttgacctcttgggctcaagtgatcctcctccctcagcctccggagtagctggaaccacaggcatgcatgtaccacacacctggctaattttttttattttttgtagagactggatcttgccttgttgcccaggctggtctcgacttcctgggctcctcttgagccttggcatccaggagtgccggggttacaagtgtgagccactgcacgtagcctcagtcttgagaggtggcaattctgttttcctcttgagatctagttgggtggacaggttggagcagaggcccgccacgctgatcccggacactgggtgtcgagagccttctgtttgatgtgttctgcgagtctaggtgttgatggaagatctgctgtctgcccagtcactgatgggatcaatatagtattagaatttgtatggtgtgattctttattagtgtcatttttttaaaggcaaatttttgcagttgacacaatgggaaaacaaaagacagggttaaatggaggagaaataaatgccagatatttggagaatccagtgtggggcgggtgtgcaggtaggggacatttgttgcttcctacacacttcatcatcttttctctgtggacaggatgatggtaaagatcagtactggaattttgaattttgaataacgtaggctacttgttagcctatgtgtttttgttgttgttgtttgtttgtttgcttttagatggagtctcactctgtcgcccaggctagagtgcagtagtgtgatctcagctcactgcaacctctgcctcccagattcaagcaattctcctgcctcagccacccgagtagctgggactataggcgcacaccatcacacccaactaatttttgtatttttagtagagacagggtttcaccgtattggccaagcttgtctcaaagtcctgacctcaagtgacctgcctgcctcagcccccaaagtgctgggattataggcatgagccaccgcacccagcctagcctatgttattcttttgggtaagaatgcagcagttcttacccaaacattccttgttcctttcttgtttctctagaagcaagagcttccttgtttcttttttaatgtcagaacatcaaatgttaggattaaacaagcccatgagtaaatatttgcaggttgtagatcgggggtgttgtgggccaagtttctcccccaagtctgcctgctgatcgcttttttcctgacctctgagctttattgctttgtcacagtgaactctaaatgtttttggagacagttccaagtttgtgtctgtagtagataggggctgagatgggagtaagtatcgtggtctgtgggttctgagcttcttccatacctgtttgtagagagggaggtccttagccaagctaatgtgttctggattctctgccacactatagagatgaaggcggactgtcttctgttgaaaaccctccagaccatcttggttttgttgggcctccttagcgctgtcactcacagtgccactgtgggagtgacatggtgctgccgcattttaactgccctgaaatttcagagttgtatatcaagaagcaggatagcagagaggtctctagacagcatgatctctagagccagggggcctgggttcagatcccgcctctgtcccttcatagctgtgttaacacgagcaagtgatttaacctcttggttccacatttcacctactgtcatttgggaggattgttgtaatcttgtgccatctcattcatctggctgtggtggggattaaatgggctaatatctatagctacacagcacctggcctggcactgtgagggccctgaatctcttggcattgcttcatttccattgtcgagagcccaggtatgcaaaacaaagacaacaaactctgactttctagatagacatttccattagccacctttgtttgcataaagagaagtttatctcttttacgagatgt

SEQ ID NO: 19189 - DNA, 1035 bp, Homo sapiens
gctttggaatttggaagtctttcaaacaaactcagagtgccagcagaatccatgcccccttcagtctgtctcaaagcccttgcgtcctggtggtagttcttgctgccggttcactttaccctaagaaagagaatcgagataggagcaactctctgggcctctaggatttgaggactactcatgatgaaataaacctctcaagccttcagtctagtgcagtgagttatctaggagggaattcagtgatggggtctctgtgcatagcatgcctccaccagataggaagttgggtggaagcttagtacgcacatcccaaaggggtctctcgagggtgcccagtcaaggcatggggaagaccccgtgtacgattttgcttttgcagtaggcatccccttttcatgcctttaccaatgtctctaccttacagtggccattactgctttgttgagtgtccctttggcttcccactgcttgaaaagctctttatgccagcaggccagggatatctgaagaactcgctgtgcccgtgttggtgagaggctgtgtgtgtgtgtgtgtgtgtgtgtgtgtgtgtgttgccctatcagtgagcctccaaagggcaatccttgtttgttttgtcatggtgccagttccggagcctcgtgccagagcaagctgccgatggtgagcccaccgagtggttttcttcctgccgagaggaaaacacactccttgtttcagagtcattttggagataactgctgtgggaaactttccttcgcccaaggccagctctcacctcacccttacaggttttccccattgtcctgtgtgtgccatttggcggaatcattgcgaggacgtacctctgtccagcaacgttgaatggtgtttcccaggtgctctaattagctgccacaggcccagagaaaagcagctgtaccatgttcttcatttgttctcaggtagattcgatgtgaataaaagaaaacttaaggctcctggctgcttctgcctgcattccccaaactgccaagtgcaaagaatctgacc

SEQ ID NO: 19190 - DNA, 1056 bp, Homo sapiens
tgcctagcaaaaaatgtattatccttgattgtttcccctgctagaatctaagcttcacaagggcggagtctttgtctgatggtttttttttttttttccctttaattatcttacgtctaatacccggatcaggactggtgacaactccatttgtaataaggaaaccctgagagtcgtgcaaaggaaatttatacataaagatttttgctacagacacttataacagacatttataatagtgaaaaatggaaactatctgaaaaatcttacaggggattgatttaaactgtggtgcagccatatggtagatgcttatgcagctatttaaaactcctgcctcctggttataaatgtgggaaaacagtgatgtaaatggaatgaaaggaactctgtggactataggacttcagtttaatttttaaaatatgcatagaagagaagctaaagaattacatatgactgatggctatttccagctggtagaagtacaggctacttttaatactttgttttctgagctccgcatagtgaatatctattactttttgtcatgagaagaaaatatgtgcttaaaagtttgcaaaaatgtagaatcacttaaatagcactggcctgtggctgtgtttggaggctttttggagattattcaatcttgtgaattagcgagaacctaatttaaaaaaaagcagcaaagatgcttcacaaaatgtccttaggctacttagctttaattatttatgatatttactgtaagcatctatggtatgtgtttgtaaaaatagtggaagtcttagtgatctgcaagcttgtggaatcaatcgccttgggtacttgagaacacctttgcccaagttagctgtcttgatggaaatgtgtgtgctgtctttctgatatgtcactgaatttcaaagcaaacttagatcacacctcagcataagctgggtgggcagtatgcagttgtgatatgtgatatgtcgattctggtattaaccaaggagaagacgctctgatctaccttctctatctcgtcactttgtggaaggacttagggggcag

SEQ ID NO: 19191 - DNA, 1050 bp, Homo sapiens
cccagttgatttgacaaagctagcataattctgggaaccaacaccatcacaaaggttacacaaaaagaaagctgaagattgagttccgacatgagtggagatgcaaaaatgccagataaaacagtcacagattgaatttagcattttaaaagaatcataaccacataggatttatcctggaaatgtaagaaggggcttaatatcagaatgtcttctcttgaaataatcatgtatgtagagccaagaagaaaaacataatatagttggccttcatagtcacccgttctgcatttgtagattccagcaactgcaaatcaaaaatatttggggaaaaaattgggtctttactcaacatgtaaaggacctgtggactcgacagcctttttgcttgtcattattccttaaatgatacagtttaacaaatatttatatagcatttacattgcattaggtgttataagtaatcaaaagatgatttaaagtatacaggaggttgtgcatattatgctgttttatatcagggacttgactatcctcagattttcgggatctatgggagatatagcaagggacagctgtctgtctgtgtgtatgtgtgtgagagatacatttgatcaccttccttcctttccttcctttcctctttccttcctccctttcctttccttttctttcgtttctttcttttttttcttttctttcttttctttctttgtcttgttttgttgcttaggctggagtgcagtggtgcaatcatggctcattatagccttgacctccagctcaagcagtcttcctgcatcaccttgagtagctgggactacaggcacacaccaccatgctgggctttaattttttttttcatagagattggggtctcactatgttgtccaggctggtcttaaactcctggcctcaagttatcctcctgcgttggcctcccaaaattctgggattataggcttgagccgtcacacttgactgcatttggtaattttctacccttattcctagtctgcttagaattttgaaaactcaagcttgaaagag

SEQ ID NO: 19192 - DNA, 1999 bp, Homo sapiens
cagcaattagcccatgatattgtatttgagacattctgaatgcctaagtttggtactaacaccttatctttgcataaaacgttatagattttaagtaatatatgattacattttctatttttttcccatattcaggctagtatactcatttttcatccatatggaatgagttttttttttaaatagatgaagcattaaataaccacatctcactaataatgctcccaagagtacataacttggtggtgtttgcaattacatacaatgtaatctgttgtgtgtgcaggcgtgtggatttctgtttaccggcatccttcattatatggtaacataatatacagaatttcccagttgcagaaattagaaagtaggaaacagatttcttcaacgtaaattggaaaactgatttatggagtccatttttttttcttttctttttaacttggcactacaaagtttgtgggaaggaagggagttgatacggtatgatgcttataagcacaagttaattcaattaatttgggattgaaatgcgttttaaggtctgtagcaggcaagatctacaagatgtagtaattgtaaaatgggaaaggctgcgtaaggagatacagggaactggctactgtactgcctcagcttcatgttcctgacatttaggtttcaaaatagcccagttggaacctcattaagctttttaacatatatatacacacatacacacacacacacacacacacacacacgtatatactttatttttcttgtagctctcaattcttctgaacttggagattgcagaattagagattattgtttttccctcctgccttctttagtcacagatgtaatcatcttggggccaagtcttactcaattgaagccatctctaaatttcatcaaaaaaatatggaagtttacttggttatatacttagatggtgtatctgggatggttttattccatttattgaggggtgactttgcttctgaaataagcaagcagcatatgcccaagataaaattttcagaaggcacagagacttaacatcctcttccctctctccttgtgttgcttacactcagatctctcagtgccccaggaccaatggtggttatatcccttctacaaggagtgtctgtagatatggccatcacagcattatatgagtcatttttcacttttaacattgtcgtgttttctatttaaaaggtttttttttatttgccagagtttcatctcctttcagagatgtttttatcctccatagaatacttaaacatgttaatgaaatccagttacttgaaaatttaaaaatattctcctaaatcacacttgggtcaaagaggaaatgaagttactgttacaggatcattaggaaatattgagaactctgtatatctaaatgtatgggttattaccaaagttatattcaggggcacatttgtagctttaaaacattattaaagaaaatgaaaataaatgaattaagtattcaactcaaacttggaaagcataaaacaagcctaaagacagctggagaaaagaattgtaagataaaagtgatattaatgaattagaaaaacagataaaaacactgaattgataaatctaaaagctatttgggaaaaaaggccaaggaagtagaccaaatcactatcatgtttaattaagaaaagagaaaagagaaaaccccaaatacagaaaactaaaaaggaattgatatgatagaaaaagtgtaacaaatgtaagttgcatttgaagtaattgttttgtaatgtaaaacacagtaacttaaaatgcaacacctttgaaaatcccagtgacatggctgttgggaaatgacttggatgtctgaaactttaaatcagaaactggggaagaagctgagcattaaaaaaaaagttctggccttgcgcggtggctcacgcctgtatgtaatcctagcactttgggaggccgcggcgggtggatcacgaggtcaggagttgagacctgtctg

SEQ ID NO: 19193 - DNA, 1029 bp, Homo sapiens
ctgctgtagtgtgtagccaccgttgggcaccggccgtgggcttgggcccctccctacacttgttccaaaactgtgtatttaagatccttgcccagaacctaacacattcctccatgatgttattatttaacagctctaatttaataaaaaaaatggtgattccatatggttcaaatgcatactatcagaggccagccaaggaataaactgtcatgtgcagtatcacttgtagtagaaaatttgtctctgatggttctagaaacatggctccatcctatgcatgcacttcccagcacagaggttgagctgcagtggtcatggagaggcgctgtggagctgaatggagtttgaggctgtctgcccgttagttgtacctattccaccaggtgttttggtgttggaagacttgagatcaagttctcagttggcagtggtttcaaagccctgctgagaagactgactgcctttttgggtacctctattttgaagtggctgtgacatttgactgtaatgtttagctcgaatgtgttttgtgcttgatgagctaatagcatgccttcctctaaagatagtatttcagtggtggcagaagaggcttcctctttggtcttgggggacggggacagaagtcagcttctacccctcgatagaaacttacctggtgccccagaattagtgcagaatacccaaataacaccaagataaaaaaaggtatcccaccgaattgagttgaggaggggcatcttaattttggttgcatttattatcccagtattttggggggaggggagttagcttaaagcttaagaatccacaggggggcttgtgattttttttttttccttgagattgagtcttgctctgtcactagcctggaatgcagtggcatgatatccatgcactgcgacctctgcctctaggttcaagtgattctcctgcctcagcctcctgagtagcgccaccaagcccagctaatttttgtatttttagtagagacagggtttcaccatgttggccaggatggtcttg

SEQ ID NO: 19194 - DNA, 1084 bp, Homo sapiens
gctttgtcacccaggctggagtgcagtggcatgatcttggctcactgcaacctccacctcccaggttcaagtgattctcctgcctcagcctcctgagtagccgggattataggtgcccgccaccacacctggctaatttttgtatttttagtagagacagggtttcactatgttggccaggctggtctcaaactcctgacctcaggtgatctacccacctcagcctcccaaagtgatggtattataggtgtgagccaccacacctggctcagtcattgatttaaggcctaccccgatctagtctgagctcaatttagttataaattacttcaaagactctatttccaaataaggccatgttctgaggttcttggtagacatgagttctaggagggatgctattcgatctgctccaggtgcttatcctctggatagattttgaagggagatatgggacaagacaggacatagagtcaagggtgactgcaagatttttaacttgagtgactggaaggactgtatccctgtggccttggctgggctggccagctcagcaggccctcgtcccagaacctcgagccccgtttcctcgattgtctttcctcgctgctctaaaccccttcagtctttccttttattgagccactatatgtctacttagcatcacaattaggcctctgagttagctgctcaaatctttaattatgagtaaaagggtaaggtgccaagtctgtctgaggacatcgggaaaataatttaaggagcttcatttttcaaagtccttgggcctataccctttcaactaatccttgcaggtgctctatacggtatgcagagtggggacacatctcattttgtagatgagaaaagctcagagactaaatggctttgggggatcatcgagcagttggttcagatctgcatttgaacccctatggaagagtattgggggggcgggatgaagtggattatataggaagacatcctgctgcataacgttttactcagttcagccagatttgaataggataagacagaaaaggtccaacaaccatgcccgtgcctccctgactttacccttaaa

SEQ ID NO: 19195 - DNA, 1060 bp, Homo sapiens
ccaggctggagtgcagcagtgcgatctcagctcactgcagcctctgcctccgaggttcaagcgattctcctgcctgaggctcctgagtagctggaatcataggcatgggccaccacgccaggctaattttttatttttagtagagatggggttttgccatgttggccaggttggcctcgaactcctgacctcaagtgatctgcccgcctcggccttccagagtgctgggattacaggcgtgagacactgcacctggccacatactatgttttaaacatgggcacatttcacagaaaaatcagtattaaaaccttctcttgaaaaaaaaaatcgggggatttggccattttgggtcttcagggcaaaacctggctagaacagggtggtgactgccccttgtggaaggaacatctactttttaggttgccagagctcactgttgcttaccagctcttaccctaccacgtcctgtttcccagccaacttcgctcatttgtgttacctgcttggccctgtgctgtctgggatcgtggcatgtgggccgtcattggactgaaactcagtttcagcggttctccgtagggggtgattttgcttcctccccccaagatttggcagtctggagacattcttggttgtcacactttggggagaggatgctactggcatccagtgtagaggccagggatgctcctaaacatcctgcgatgcccaggacagccaccctcatccccaacgaagaatgacacagcctgaatatcagtggtgctgccctcaaactcccggctccgtattcttcttgttctgctgaccaggggcctgcagtggctcctctccctcctgcctttcaccatctgcctgcctggcttgcaggcctgactcagggagacgggcttctcccagcctggctttctcagcgagagcttccagccttggggcttccctgggctgcccttgaccttttgtttgagagtcccatgtgtgccagacactgttgttggtgccggtgatactccaatgggggcaaaaaaagagagaaatgcttgtctgcttggagctt

SEQ ID NO: 19196 - DNA, 1053 bp, Homo sapiens
ttttatttgcgcagcagtaaggatgaaatgggcagttcttctgatttttggatgttgtctacaaaaataacttctctcacaataaattggcataggaagtttgcgggtgtgtttttttggagggtgagagatgtggtctgacttccctcagactcttcgcttcacctcttgagtaggccacggccatctgctttaacaattttattttttttcattttaaatcctcaaagacaaagggacctggaagttcagacctgtcctgccacattcctgagtaatttggttttgattaacccaaggagaaaagttggtttctcctagcgaccgaccgaggggatcaaagcgccgggaggggcagttcccctgatacacccagtccccctcctccctctctcctgccggcccctctcccctcctcttcctctaccctctacctccacctccctcctcctccctgcgccttttcaacctccccctctttagaagctgagcaggagttatttccactttctgactctcacagaagtggaagcgtatcatagagctttgggtggacagaccagggagaaatacatccccccacccatccctttcttcctaaactccttttccccccacaaagcggcagagcgcattcctgtgctaatccggctgctggaggaatgcaaatggctgtaattgtgtgcctctggaccggccttccgcatctgtgcagcttttcttctttgaggaggtggctaaaaagttcatttacatagagaaatgagactggccttgtgatccctagtggcagaatagggactttctaataggaaaggggccacatctgtgctgcctgcaccttcctcccgcagccctccccagttgtagagagagagagagacagagagagagagagtctgtctatgcgcgcgcacgcgtgtgctgtgtggtatgtgtgtatggggtgggggagaaggtggacaccaggcccctgctgggcatattttacagaagggcagttaaaagggagaagtcttctcttgatagtaagaaatcaggctggagtaggag

SEQ ID NO: 19197 - DNA, 1029 bp, Homo sapiens
ccctactcctggctgctggtggtttgggatgaagccactgaaactcccttgcaaggccacaccttgagaagatgggccggtgctgggatgcctctcactttctattctgcttggtttctgggaggaagctaatgacataaggggcctaaaggctttcttaactggtgacctggagtttaattgtaagtgggtctttcggggcagcagttaggaatgtatggatcaccttcagtcatctgcagggagacttggactggaagtgggagaactggctccactggactctgaaaaaggctgtggagttttcatctgctgctgatttcatccactgtcccaaaagttatcttggccacaaacctttgatctgggagtgagacccctcgcccgatgcttctagggcaggagtcagtgactgcctatacccgctgttctgtgtagatgggagagggtgttagttattgagtagggctgagtacttggggtgatttggggtggttaggcatgattggggcttacacactggaggggtcatgtgtaggcttcttgatggggttctttcaggaaggaggaggcaaaagaacagttttgcttgtttcttggttgttcctgactccatccaggagtgtgactggagaaaaattcttctgagtgtatcggttaggctggcttttggatagatggtccccggtgcccatttctatcataggctctgcatttcagtaggaagattctagttcagaggcgactgcctctgtcttctcatttgaatctccttagtggagaggcaggaggcagattagccgagtgcagaaagaccaaggggcttaatctgatagttgatctcagccctgcatcccctgaaaaagtcatataagtgcctgttcaaatatggaagtctgtctcccttcagtatgcaaacatcgcttttcagaagcatttaaactcctgaaagtctataaaaaccacatatgtgtagacatgaactgagctgctccccatgcttccagtctcctgagtggcctatttctg

SEQ ID NO: 19198 - DNA, 1030 bp, Homo sapiens
aataaaagagaatatactagagattgacgcagtgtcaaaagtatgagttgctgtgtgtgtatgagaagagagatagaatacagacacagtcagtcttgaaagcttggtggtaggtgaatccatatttggagatgattttgaaatagtctagcaaatggtgtacgaagaggatttcgtaaaaagtgtacacggagtcagttttgaaaagactgcggtttgggaagatgaggtgtgggcaggaaaacctactctaggccagcagccttcctctgtctgtgtgtctcccttccccctcctcgggttttagtttttaattacttaatgctgaaacgcacagggcttatataaatatttgcaaatgctctttcctattgatttctctgaataaactgccctgctccggtccagagaggaggcgattcagatctgtggactttttaaacatacaaagtctctggaggagtggtgttctctgcgtgtgtgtgtgtgtgtgtgtgtgtgtagagttgtaggtatgaggatttggggggcccgcaaagagagttcaggctctcagtggtgtgggccaagaaaactggggtggagctggtcccatggcctggcagtcctgacgtgtgtgtgtgtgtatgtgtgtgtgtgtgtgtgtgtgtgcgcgcgcgcgcgcgcgcgcgtacgtctgcaccgtgtgggtgtcttcactgggggagtctggatgcatatgcacttacttcccccacccctattaaatatggagcagcttttcaggactctgtgactgccttctcctcagggtcacattgagtttgaatctgacccaaggtgcaggaatcctgcaatggggaaataaaagaatatacagaacggggtcaggtcagctgctcagaggccaaaacccctacagctgctttgattttattttttggtgtatattttaggctcctcctgccattgtacaaattgtgcctccccctttcaggtgtttggtctgtggtttaaaggcaccagagcctatgcctgcatagacataggc

SEQ ID NO: 19199 - DNA, 1033 bp, Homo sapiens
cggggtcccggagggggcgaggcggccgcgcgatcctctacctgtgcgctctccgccctgccccactggcagcgccgcgagcgcccagaggggactctgccctggacactaggggctcccgggggctcggggctgcgccgctggccagggccagacctcgcccggccggccttcttccgccagctgagctcagagacatccgaggatgccttttttctttttcttttctttcttcttcttcttctttttttttttttttgctctcgcgaatctgggattgtttacgttgggttccccactctcacccctcgcccggctccactcgatgcaaaaaccgtgttcctgaattttacattatgcattttaatgtccgtctttttgcatatctattggagagtagatctaagtgtatttcatgcagtgtatataattaagttgtgtatggactcagtactcggagggttcttgtataactattgaattaaaatatgtatatatcactttgcgagtgaagctgttgctcagaatctgacttttgttcaatgttgtgctattctttggactgtggcaaattctttgattacaagcgctttcaaaaggcacccagtcttaacttttcccccttgttgctttcaagtagggtaaatatgacaatttttattggtctcaattattgaaacttgatctaagcactgtatggacggagcatgctgattgcctttttctggcctccagttctagtgacttttaaaaggcagtttgttaagtacctttgaagaatatgacagacggtgatcgcttggctgtaatgcaaattacagaacataaattcactttggaatttaaaaaagactcgagccctttcagtggggacaattgaggatttattatgttttttaaaaaattactttttttcctccctactttgggagaatagctagttgcagaccaacttatttggaggtcctccgaaagaggcttgggcagtgggcgaggggagaagattgatcacaatctgcataatcaatagggc

SEQ ID NO: 19200 - DNA, 1048 bp, Homo sapiens
gaccccagttcctaattggttggtgtgcctgcttgcagcagtcttaggcaaaagaattgcattaattttattaagatactaaatttcaaactttagaaagtgatatattttatttcacactgagttcactttgcagttgtactaagcctaagcaagctgtttcgaagcttattgggtgtctccaatcctgactcactgaagcagtgtgaaactgactatgagcttaaaaaattattctagttacacatgatcattgtggaaaaatgacactattcagataaataaaaatgaatatagagctgggcatggtggcctgtgcctgtaatcccagatacttggaaggctgaggttggaggatcacttgagcccaggagttcatgacccttccgaacagtaggaccttgtcacaaataattaattaattgaaataaattaaaatcacctgaaatcgtaccacatacagaaaactaagattaaccctggcccaaagtgctttttttttgagacggagtcctactctgtcaccgggctggagtgcagtggcacaatctcggctccctgtaacctccgtctcccaggttcaagtgattctcctgcctcagcctcccaagcagctgggactataggcgcatgccaccatgcccagctaatttgtttgtatttttagtagagacagggtttcaccatgttggccaggaaggatggtctcgattttgtgatctgcctgcctcagcctcccaaagtgctaggattataggcgtgaaccaccgcgcctggcctaaagtgctgtatttcttaagggatttcagcattagcttcctaatttctctttttgccttccagttttgaccttctcccatctccatcctccactctgcagccagacttattttattgattgattgattgattgagactgagtttcactcttgttgcccagatctcagcttgctgcaaccaacacctcctgggttcaagcgattctcccacctcagcctccctagtagctgggattagaggtgcccgccaccacgcctggctaattttt

SEQ ID NO: 19201 - DNA, 1028 bp, Homo sapiens
gttgatgggcagcttgcctgtggcgactttttccaggtagctcctgatatccagaagcttggagttcagtcccttcaaaccatggacctggtttgtgatccgctgggacagagtgcccaccgtcgtgtctttgatatctctgtaataacccacagttaaaaagggcaggaaaaggcatcagggtaccatgttatcaggcaagttcttacattctaagaaaattcctagctttgttgggtgaggcaagtttttaaaagaaaaatgtcacttccccatttgataaagatttcgttatcaattaccttaatttcgttatcatttggaacacattttatctttctcatcacaggacatttttcaaaaaacaattataaaagggagctaaaataaaaccatttccacttaaggaaaaaaaaattgcttaggtcaacagttcagatctaccaataactttctgggtaaccttgtactgaagctgtctctctcagctttcctgttcctaaaaggatggcattttctctacatgcatctccagaatattgagaagcttaactaagatggtaatttttagaactagaaggaacctcattgactgataaaactataacctttttcaaataaggattataatagatataggattttaaaacaaaagctactccaagatgaagattctctccagaaaatgggctacatttgttgagaaggacacctagtggagagtgcaggcctgcatttatttcatacctctcttcccgtcagtcaacattatagtttccagacaaggtatgctatccacaaagtcataaattgtaactcaagacattttacagttgatgtagttcaaacacttcaatttacagacaataaaacaaaggtctggaaagggactgtgatttgctcagaatggcagacttgttagtggacggccaggacgagaccccaggtctccatattcccgacacagacctcttccttacactgtgtgacctctcgggcagtgaatgattttgatgctgtactagggt

SEQ ID NO: 19202 - DNA, 1034 bp, Homo sapiens
attagctgggcatggtggcaggcacctataatcccagctactcgagaggctgaggcaggagaatcgcttgaacctaggaggcaaaggttttagtgagccgagatcacgccactgcactccagcctgggtgacagagcaagactcggtctaaaaaaaaaaaaaaaatgaaaacaaagaaaatgaagaagataggggctctacatgaaccaaggatcctagctggttattttgattaaaagatgactcaaatgatgttaacactgatcagactttagcacgagagctgcagagaaggaagacactatgatgagaatatatttggggttttgagctgggaaaagacttcttaaatatgatccagaaagtactggccataaggaaaaaatgttaacagatttgtctgcaccaaaatctaccaagagagtcctttcaactagaactgccgtcaccacaatgatgaacatggggaaagaggagaggtacctgctgtatattctcaggccttttagaacacatggagttgttcctctggccacatccacacgaacctacaagaaaggagatgttatagacgtcaagagatgccccacggatgttaccaaggcaaaaggaatgccccacagatgttaccaaggcaaaagaggaagagactacatgtatctagtatgctgttggcatggttggaaacaaacaacagcatgattcttgccaagagaattcatgtgtgtgtatggagcataccaagcactccaagagctgggaaggccttcagaaacacgtgagggaaaatgatcaaaagagaaggaaacggccaggcacggtggctcacgcctgtaatcccagcactttgggaggctgaggcgggcagatcacctgaggtcaggagtttgagaccagcctggcccacatggtgaaaccccgtctctactaaaaatataaaacttagccgggcatggtggcgcgtgcctgtagtcccagctacttgggaggctaaggcaggagaatctctagaacctgggaggcgaaggttgcag

SEQ ID NO: 19203 - DNA, 1428 bp, Homo sapiens
tgagaccagcctggccaacacggtgaaaccccatctctactaaaaataattagccgggcatggtggtgtgcacctgtagtccaagctactcaggaggctgaggcaggagaatcacttgaacctgggagggggaggttgcagtgagcggaggttgtgccactgtactccagcctgggcaacagagtgagacgccgtctcaaaacaaacaaaaacaagtggagtagttaagcaaccgcatacagaggagttggacacccacctcccctcccagaccccagctcctgcccattctccaactgccgcagaccagaagtgtattcaggcccaaggcttggggacttgagggacaacagaaggctagggaggtgcagagctgaaaatcggcagatagatagaagtcttgaaacttgaagtggaggctgagtgcggtggctcacacctgtaatcctagcacttgggagtctaaggtggggagactagcctgggtaacatagcaagacacttgtctctacaaaaaattagccaggcgtggtggcgcacgtctgtagttccatctacttgagaggctgaggtgggaggatcgcttgagcctgggaggtcaagctgcagggagctatgatcataccactgcaccctcagtgacagagtgagaccctgtctctcaaataaaaataaaaaacttgaagtggatgaaaagatctaatatgaaaggtgaaaatataaagctaatgatgtgtaagtatgagaatagatttgggactttaagctggggaaggacttcttaaatatgattcacaaagcactaaccataggggagaatggatagatttgtctacatcaaaatagaggatttctgttccacgaagctccccacagataaagtaacagacagatgggactgactgaagagagttgccacacaaaaccgaaacaggagttgtttcctgaatattcaagggatgtctgcaaatcaacaagaaaaagaaaagaaactcaatagaaaaaaagatgagcaaaagatagaagtagcaattcacagaaggggcaataaacatggccgtggggagaaagctctatcaaagtaacttcagaatactattgcagtcctaagatctataaaaattgggaagttgggtaatacgcagtgttaggttagcaagcatattaataagggaccatcacaatcatacttacacaggatataatgtgtgcaggctctgctccaagccccttatatgtaatattttgtgtaattttcctgacaaatctatgaagcaggtggttttattattcccattttgcagatgagaaaatggagatagagatttgtctttttcactctgtcgcccaggctggtgtgctatagtgcgatctcagctcactgcaacctctgcctcctgggttcaagcaattctcctgcctcagcct

SEQ ID NO: 19204 - DNA, 2133 bp, Homo sapiens
caatgtgggcagatcacttgaggtcaggagctcgagaccatcctgggcaacgtagtgagacctcacctctacaaatattcataattttaaaattagctgagtgtgatggtacacatctgtggtcccagctactctggaggctgaggtgggaggatcgcttgagtctgggtggttgagactgcagtgagccatgatcatgccgctgtactccagcctgcatgacagacctcgtctcaaaaaataataaaaaataactaccacttactgagtgcttcttaggtgcttgtaccatgttcttcctgccttgtctgatttagtctttgcagcaaccatgtgaggtaggtgtttctagcccgtgttacagatgaggagttcaaagcctagagatttagtaacttgctgatagtcatacagctagtgagaggtggggatattttcaaacccagaactgtccgcccccaaagcctggattccctgccatgctggcatgttgcttctctgattggcaaacagaccattgtgcagtgtggtaagttctgtgctgggagaagtgtagtgtgttataggagaacatagaaaagccacctaaccaagtgttggagaaggagggggagattgtcagataagatgtcaaagacagggctgggcacggtggctcatacctgtaatcccagcactttgggaggccaaggcaggcggatcacgaggtcgggagattgagaccatcctggctaacatggtgaaaccccgtctctcctaaaaattaaaaaaaaaaattagccaggcatggtggcgggtgcctgtagtcccagctactcaggaggctgaggcaggagaatggcatcaatccaggaggcagagcttgcagtgagctgagatcgcaccactgcactccagcgtgggcgacagagcgagactccatctcaaaaaaaataaataaataagatgtcaaagaggctgtgacctgaggagattacctgtatttgcgggaggggtggcaggaacctgccaggagggaacagcatgcacagaacctggagccgaatagaacattcacacctcacctgatatgtttgacgaattacaggttgttcagtctggcttggtcagagtgtgaggaaaggagaaatgagaccacagataagaaccagactgtgaaggatcttgcacttgatatgaaaagagttttgcctttttcctgagggcatcagaaagtcattaaggtgggtgtggtggcttacacctgtaatcccagcactttgggaggccaaggccagtggatcacccgaggtgaggagttcaaaaccagcctaattaacatggcgaaaccctatctctactaaaaatacaaaaagtagctgggcgtggtggcgcgtacttatagtgccagctgttcaggaggccgaggcaggagaattgcttgaacctggaatgtagaggttgcagtgagccgagatcacaccgctgcactcccaactgggcgacagagcgagactccgtctcaaaaaaaaaaaaattgctgaggaaaaggagcaaaaacggagggaaacattgcaggtacaggaaagagagacagcagttgatggagctagggtcaagagaagagaggaggaagtgggatccagggcccttgggggagattaactttccagtggataaaagaaggaagagatggttgcagatgtaagtgggtctataggaagggtttcagggaatgagatgagccaggttatctgcttagaatgagggaagaaaggaggtgaagttgaaggttgagagaggaatagctgggctctgaacctgaatacagacagaggtctacctgtggcttaacatgtgctagcctaagccaccaaggagcaggacagttttcaagtataaccgagtggtcacgggtcagaagccaggaggttgacagtgaggtcaatgggatggggctggccatttggcagcagcagttccccaggagagctgtgttgccattgggacagagggtagagaggatgtcagcaaaggggtgggtgtttacctttgggaaaggtattctagagggtgcagtagaggagcttgaaggagaggaaagcaaagagagcttgggccacgggaaataaattggtcacgtagagatgagat

SEQ ID NO: 19205 - DNA, 1080 bp, Homo sapiens
caggcgtgagccactgcgcccggccaacttgtgctaatttcttaaacttgcgtgatcacctggtgtacttgttgaaaaatacagctccctggcgtggcaggatcagaatctgccgaggtggaccgtgggaatctgtcatttttaaacaagtgtcccaggtggttcttttgctgaggcaagtgtgggaaatgtgtgaacccacgctcatccagtcttccttgtgaccggcagtccactgtgcgcaacgctgcagccatacagagggactactcgaagttagaactagcaccttggtcttgttggaataagcagatctgagtagagccagctgcagtcttatggttgtttagcagaagttattcttcttagcagagaatattatacggtcattttccagaactgtaaaaactctatcatttgttttaaaccagatgatgtgcttcatttctgtctttgacgtcttcagtttcttctcccctggctttacctcctttgctatcagtttgtgctttggttttgctgccaaccttataggcttaggtttggcggcaaaggcactagactctggtgccttcttttccttcgttgtcttaagcccttcttttcctctgccctcatgccctcaccacttcactcttttgaaggtcataatgaacacaaggtcagagatcccttttttggcgccaagcaccctgggcttttttgagatggagtctcactgtgtcacccaggcagtggcgcgactctgcgcactgcagcctccatctccctggttgaagcaattttcctgtctcagcctcctgagtagctgggactacaggtgcaagccacgacacctggctaatttttctgtttttagtagagacggggtttcaccatgctgatcaggctggtctcaaactcctgacctcaaatgatccacccaccttggcctcccaaagtgctaggattacaggtgtgagcccctgcgcctggcctttttttgttttgttttgtttaagacagagtctcactgtgtcacccaggcaggagtgcagtagcataatctcggctcactgcaacctctgtctcccaggctca

SEQ ID NO: 19206 - DNA, 1025 bp, Homo sapiens
gagcttctcccacagatggggagctctgtgaggccttcacctgggtgcatgttggacttccattgctgttgctgttgtccctagacaagcccgttagcaagaagcaccggcaggggagccatgcactccataggcttgggatcacccccgggaaagcgatcttccccgggctaccacccccagctgcagttctgtgttagtgcatccttcaaagctaggagaattctagggtgaccagtgagctaatgttgagtgagcaggtattgacttgaacacactgcaggcctttggctgtctcatgctgtccttactcttcttgggaacagtgagtcactcagctggccagggtggggatgcatcctggtgaagagacagctttccctgaagatgctacagaaagttactgtcagatttcatttgtttctgtttcctgagatcaactaacagaagaatctaatggtgagagtgtcttcattcatgttttacgttttatcaaggcacactggaaagggaattatgtggctgacttcccttggccttcccaagagaagattctgttcttatgtcagtgtggcttctggaagtgtctcctatcctcccatcctccaggcctgtggtgtgacttctgccccgaagttcctactatagtgagtcatctggggagaggccactgaaaagaggccttcccttcccatttcctcccctgcctccttagaacacactctaagtcagaacttaatctaagaagaaggaagctggaccaggaaccttggaagtcagccagccctagaacagtcagcctaaattttggccgtaatggcttttttggttttttgttttgtttctgagatggagtctcactccgttgccaggctggagtgctgtggcgctatctcagcttaccgaatcctccgactccctggttcaagcgattgtcctgcctcagcctccggagtagctgggattacaggcatgcaccaccacacccagctaatttttgtatttttagtagagacggggtttca

SEQ ID NO: 19207 - DNA, 1104 bp, Homo sapiens
tctgtgttgatttttcttatctcctgccctccctctccaaaagaaaagacataaattaaactaggaactgagagggataagttagacctagcactgccaccagcccagtgctctctcagagaatcacattgccttgtgtcattctaggtggccccagcagatggcttctctgatcttgccatgcaagtaatgacgtctccatctaagaactacattctctctgtgatcagtgggagcatctgtatattgttcctgattggcctgatgtgtggacggatcaccaagcgagtgacacgagagctcaaggacaggtagagccaccttgaccaccaaaggaactacctatccagtgcccagtttgtacagccctcttgtatagcatccccactcacctcgctcttctcagaagtgacaccaaccccgtgttagagcattagcagatgtccactgcgttgtcccatccagcctccactcgtgtccatggtgtcctcctcctcctcaccgtgcagcagcagcagctggtcgctggggttactgcctttgtttggcaaacttgggtttacctgcctgtagacaagtctctctcataccaacagaacttccggtacttccagaaccaactcacctgacctgcaactcaaaggcttttttaagaaaaccaccaaaaaaaaaaatttttttaaagaaaaaaatgtatatagtaacgcatctcctccaggcttgatttgggcaatggggttatgtctttcatatgactgtgtaaaacaaagacaggacttggaggggaagcacaccacccagtgtgccatgactgaggtgtctcgttcatctctcagaagcaccttggggcctcgccagggccgtggtcttcaccgaggcgtgggtgggcagccgttccccaggctgtgtggggtcctgctttcttctgctgagacagtgacgctttccagtttccaccctaatcagccactgctggtcacagccccacagccatgggtatttctgtggtctcctcgcttcattgaagcaaagcatgagccttcctagacaagggcagctggggaggggaagggaccggaagtttgtgaagttgaacagtccatc

SEQ ID NO: 19208 - DNA, 1018 bp, Homo sapiens
atctagcatccagtagtctttctcaggtggtaaatagtgggttgaattgaacctcctggtttgtgcccactgtctagtcggagctgttgctctgggaaaatgcagagagcctatctccaaaatgaatgtggacaaggagcagctctggaaggcagaagaaaccagaaatcgtgggtgtgtttcttttccattaggctggagcacagcctgccagtcatcctgagtttttgtctagttgggtttgctgtcagctgtaaggttgtaaatccttatctttggtaaggaaatcctgattccgattgcctgggaatgagaaatggataaagaaatgggaggcacagtggagctgaatgtttcaatcagaacacatggatgagcagtctctgacatctctcaacttgactataactcttttgccatagattatcgaatgtctgaaagaaaacaagaagcagctaagcacccgctgccaccaaaaagtatttaagctgcaggagacagagatgatggacccagagctagactacaccctcatgagggtctgcaagcagatgataaaggtgagaagccgacaccaaaggccgagcacggatgaacaacaaaacaacaaagcacaaacaatggcagcaacttcctcaggctcagctttctcaaagtgtggtccctagacgagcagcagcagcagcaccccctgggagcctgcgggttcctgggcccccctccagatctgctgaatcagaaactctgggagtagagcacgaagtctgccttagctgcctccctagggggttctgatgcaggctcaagtttggaaaccacagagctgggataactgacctcactttgacctgaggcacaagtaaatggatgtgcaataaataaatgattggttttgaggacgattaatagtagctgtactaagaaagtcaccatctaatgtcctgatcatccatctggcacattcagaagatttttctgttttacaggttgttttgcttcattccctcctccagcaggt

SEQ ID NO: 19209 - DNA, 1031 bp, Homo sapiens
tttcttacaagtttaaaatggcctgcaaggaggacgtgttgaagctttgcccaaacataaaaaagaagtatgtagcttgtagttgtttcattccactttcccgaagttcctcttagctccggaatgagtatgcgagatgttaggcagccctcctgctgcctcgtggggttagccctggaggcctcccgcatctctcctttgattagcgtggcaaacactcggactgtctggacagagcatctggcgatggtagttctcacatggaggtcccataggctaaaggagcatttttaatttttccaggtcaggccatctaactgaccaagtagggctggattgtgtacttagagaagcagggtgcagtgtgagtgaaagaggcgaactgacctcttccctgcgtcgtcccgttatgtcatctcatctaagatgcagcagtttttgtattggattagatatttagtgaagaaacagaatctttattcatttaagaattaagtctttttgaggaaactgatgagctttttcagcgtgactgtccaaattcttccatgttgctctttgaaaggaccatttctagaacacttgccctcatacaaaccaaattcccaatttgctcaggtttctctacctttcaggagtgagtttcacagtaggtcaaaagtacagtcctagagttaagagcagcattcctctgtggtcacatgtttttaacacagatgttgaactgtcgttgcacacatgtgccctgtgtggcttccccttctgtcaggaatgtagtcagcattcatgctgctgcctgcctttcatgacacccacagtcaaattgcagcttttagcaccctgaaaaaaaatacagtgagccttacaggaaagacattcccccaaagggcatcttgaattcttaatggtgtgaccccccccaagcccagctctcaggccatctgcccttgtgtggccccagccagcctcaagcttctttcgtctgcagggtggacgtggtgatctgcctgagcacgaccgtgcgcaatgac

SEQ ID NO: 19210 - DNA, 1030 bp, Homo sapiens
ccctgttgtgtttcttatgaatttttgacattttaaatttttaaaaattcaggttcttatttctagtgctaactaaactataatacttaaactttccaggatctctgtttccatttgtagcatgcaagtattatattctaactgaagattattgagagcattttctttaacttccacaatgtggttggttcttacttgatttcttggtagaacgttaataagtcaactctatgatggggttttattactttgtgtgtgtgtgtgtgtgtgtgtgtgtgtgtgtgtagccaaatgttgtttatttgaaacccatgtgataaaagttttaaaatattaatatcctcgctattttaggatgcacattcacaaggtgaggtggtatcatgcttggagaaaggcctggtgaaagaagcagaagaaagagaacccaagattcaagtttctgaactctgcaagaaagccattctccgggtggctgagctgtcatcggatgactttcacttagaccggcatttatattttgcttgccgagatgatcgggagcgtttttgtgaaaatgtgagtcagctcagaaactgttcttttcttccttttatttttacacatatataattttgttttaattaatttaattgtgttgttttttgagagattgagtcttgctatgttgcccaggctggtcacgaacttctgacctgaagcagtgctccagctcagcctccccaatttttgagacaggatcttgctgtggtgcccaggctggagtgcagtggtgtgatcatggctcactgcagcctccaacttctgggttcaagcgattcttctgcctcagcctcccaagtagctaaaaccataggcaagcaccatcttgcctggccaatttttttaaaaattttttgtagagatggggcattgctgtattgcccggactggtcttgaacccctggcctgaggtgatctcctccctctgtctctgaaagtactaggattataggcacgagccactgtgacttaaatattttttaatact

SEQ ID NO: 19211 - DNA, 1038 bp, Homo sapiens
gagaaaagcaaaggaaattctgaggatgctggagaaggatgatgcatgtacagagaaaatagccagtccctgatggaaacaggaaaatgaaaagactgcaagatgaatgtctcactggacacagcagaacattttgagaggagatttacatttctagtaaagagattgaggattaattaataatgggtgtataggaaaataggcctatgaaataagtgacttaactatagagcaaactaaaagtcgtataggaaaataaatacaatattctgtgtctcagtatatataactttttacatagtcaataatgtgaatactgagtatctaacaacatgatgatttaactgtatggggaggagtgggaccaggaagatgggtatgagaattcattcctcatcttttatagtgtaagttactacagaatatctaaaagtgacaagtcaagaaatgacagtttaagcatgtagtttaaaaatatggaggtaattaacgtaagcaaaaagaattgaaagtgcccgcttctggggagtgggtggggctttggacagggaatttcttgttttgattttttaaactaactttatagaaccgtttgactcaacatagctttgacttaaaattttaagggtgaataaaagaggaagtagattaaacgagctatagactaaattttctttttttttttcaaaaaccagtaacatagtcatttattatcaatatcaagtatgtattgcacataatcgtatgtactatacttttttttaattattatactttaagttatgggttacatatgcagaacgtacagttttgttacataggtatacatgtgccatggtgctttgctgcacccatcaacctgtcacctacattaggtatttctcctaatgttatccctcccctagccccccacccccaaaaggccccagtgtgtgatgttcccctccctgtgaccatgtgttgtcattgttcaactaccacgtatgagtgagaacatgtggtgcttggttttctgatcttgtgatagtttgctgagaa

SEQ ID NO: 19212 - DNA, 1049 bp, Homo sapiens
tccttcatttttgttagattgaatgaactataagaaattaccaatatttcatcatatttgacttataaaaacattttcatatggtttaacataattgttctttttttttttttgagacagagagtttcactctttcacccaggctggagtgcagtggcgcaatcttggctcactgcaacctctgcctcctgggttcaagtgattctcctgcctcagcctctcgagtagctgggattacaggtgcacgccaccacgcccgtctaattttttgttgttgttgttgttctttttgtagagacggggtttcaccatgttggccaggctggtctcgaactcctgacttgaagttatccacccccctcagcctcccaaagtgctggcattacaagcatgagccaccatgcccggccactcaccaaatacatttgatttaaaaaaaaaaaaggatattggtctaacaaccttttccctatttgattattcttagtcaagttgctatttagctttcagtttatggaacccttttaatcttatttgtagctcttgataaccatgtgtggtagatatgacagatatgagacttattttacaggtgaaaaaccacgaatcagatagatttttatttgcccaagtcacataatgttaagaacaggccaagtgtggtggctcatgtctgtaatccgagcactttgggaggctaaggcgggtggatttcctgagcctaggagtttgagatcagcctgggcaacatggcgaaacctcatctctacaaaacatacaaaaattagtcagtgtggtggtgagagcctgtagtcctggctacttgtgaggctgaggtgggagcatcacctgagcctgggaagtcgaggctgcagtggcaacagaatgggtaacctggacatcagagtgagaccctgtctcaaaaaaaaagaaagaaagaaacagagcttaaattcaaatccaaaaagcttaaattcaaatcttttaaaattcaaagcctctgtctttccatgttaccacattgcttctctgttatttttcacatttac

SEQ ID NO: 19213 - DNA, 1022 bp, Homo sapiens
ccttgcttcctctgtgctgcactcgctccttccctctttgctcctcactcccaggcgctttcagggaaaaggataccactcccactccttctttcccccgcccttatttccctccctgttgccggggtctgggacgaaaacctgggctcctggccgcaatccgccgaggcccagagcgtgtctgttcgctcctgtcttttgtgtgatgctctatgcagagtgtctcctcgccgaagatcagtttaggattttgccatcagtttcgactaggacaatttgtggcaagccatttaaacataaaaaaatgcctggcgtacttaggctgtaaagaatgatctgtttattagcagtagatgtaattcgcaaatccatatttttggtgctgaaattaatgtatgctttgttttcttcacttcctttggtcagttgtattgaaccccatgtttaagctgttaactcccagtgacttggcgccccaaagcttgaaaagttggggaagcgtttgaagctgtgtttgtgactgggttatgggatcttgcctttctgaggtctgaatgtgattttaacagtatctcttaatgaaatctacatttgtcgttgcttggtgtgattcagttgagtgacattgataatttataatcaagtgacattgataatttataatctaggtttaatgctgcagaccataatgacaattctcaaagtttgggagcaaatctgacagtagtaactttttccagaggtgtaggtatataaaattagccctaaaggtggacaaatagaatgaagctaccacttgatactgtttttggttttttttttaaatatcagatttgtttaaggcgttcaagctatagcaagaccacttgcttgtagaaatttgcttctcttggcatttccccccttcatctcgtgttctagtattctatacaaaagcaattcagatagaggaaaagacatacataagcaggagacagaaagaaaggaagtttccagagcccctagaaatgtgaggccttacc

SEQ ID NO: 19214 - DNA, 1084 bp, Homo sapiens
gatgaagaatggaagtcccttcgtgtactgactgactcctgacccttccctctgcttgtgttctttagctgtgggatgctgccagtggctcgttgctccaggacctacagaccgatcagcctgtgttggacatctgcccatttgaggtgaaccgtaacagctacttggctaccttaacagagaagatggtccacatctataagtgggagtgactgtggtctcgaaaccttgaaggcatgctgctggttagatgttgtttgctagcgcctagcagccccaagcaagatccctgtttattgtctgcagtctagaacattgggaatcatggtttgtttgcattagtatgattctaggaccctaggtcactgagacactacagattgtgtatctgttatgtccactaaaagagtaattgatgggtactttatctacattatccatttcttgggtttaaagccttcattaaccattattgtatgttggaaattcttattttctttattttctgtgtgactttctggaccttagagagtgtcctctcatcatctaggatgtgagtgggcatcaagcattttctggggaatatgacatcccatctgagttgtcctgtcacttaagtatccttgaagggactaaccatcgtcttggtactgatttgatgcaacgtagatgtaaaagagtattattcagttgaacacaagagggcactgtagaaccttgtgtccggtttatttctgaccttgaaggctgacaatcttttagtaacttgtctcatctccacacaagtgtgtgatagcacacctgggtgtgctttgtggcaataacacttgtgttccaggtgtgaagtgctgggacattggcaggcccagtgatggaagcagctagtgaacgattccctttgctaatgcctagtgcattaagttcattgctttgcgaaaggtaaggaaagaggccagttgtttgagcggtggggaagattttgttttttctagccagcttaggatctcaggattggttttatccaagctagtgctttgaagaacactatctcttgccaggaaaagatgagtgataggtcaaagct

SEQ ID NO: 19215 - DNA, 1030 bp, Homo sapiens
taagttgtttttttttttttttttttttttaaaggactttaaacgaaaccaccattaaggactttcaaccctcatattatgattctgtgctctccttatttcacttgcttgttgaaatactgtaaaaactcagcagttctggccgggcgcggtggctcacgcctgtaatcccagcactttgggcggccgaggcgggtggatcacctgaggtcaggagttcaagaccagcccggccaacgtggtaaaaccccatctctactaaaaatatttaaaaattagccgggcatggtagtgggtgcatgtaatcccagctactcaggaggctgaggcagaagtgcttgaacccaggagatggaggttgcagtgagccaacatggtcccactgcactccagcctgggtgacagagtgagactccgtcttaaaaaaaaaaacaaaaactctgcagttctctaggattcatgttaacactttcatataatggataaaaaatcttcctgtaaaagatcaaggaattgtatttgaggggaatatcaaattaaaaagctttgtatttataaaatctttttcattttaggacttgcaaaaacttacgtcacatcaaagtcagaatttacagcaacccaggggctcccaagcatgggtcctgagctgctcaccctccagccagggccagcacaagcacaagtaccacttccaaaagaccttcacagtatctcaggcaggaaactgccggatcatggcatactgtgatgctctgagctgcctggtgatatcacagccttctcctcaggcctcttttcttccaggtaaagagtctagaacctcagctttcatgttctttattagactccatatatttatttccttgccttttggaaaattcaagactcaaaggttaccaaatcacctttccctattagttccttgttaatgcaagtaccccagggtgctgcaaagatgtctttactgtctgttgacttcattctgtaaatttattaaccaagagggtagaaatactgataaccatga

SEQ ID NO: 19216 - DNA, 1635 bp, Homo sapiens
ctctaaatgggcataaaggatctttgtgggctgatagaaatattttaaattgggttatggtggtggttgcacaatgctcaatttattatatataaaagttaatttcatgaagaagcagtcagccaaatccaggatgtgtaggacatttcattagacaaatgacctgacaaatcaatgacaaacagaggggaaaaaaatgggtgagggggaattgtaataaaatgaaaaagacttaagagacatcacaagctcattatggagactttttttggattctgattgcaataaatctgcaaagagcagctttaaaactattgggaaattttgaatatgaactggatgcctggatatttagtggtattggaggattattgttaatattgttaggtataataattacacagtgtttatataaaaaaagaattcttatcagtgttgcagaagtttttgcaagtataatgacattttaaggtttgttaagtattccaaccaaaagaaaataatggaatgggggcttaggtggaacaagattggcaaaatattgattattttttaaattgagtgatgggtacttgtggcttaactatactgttctgtgtacttttatgtatgtttgagaatattcaaactaaatttttaaaaataaattcactgatggtacctggggaagttgtcatcctttttgcaggaacactgtcagttagaaatgggaagctgtagtgagtcaggctctctcctgctagcttctcatacctgacatatcttattttgtattttacctctcctgtcatttctggaaatgacttggcagagcaactagcaggtgtctcagcagagcaagaagttacatgtatcgatggaggcaagaccctccccaaacaggtaatatgaacatcattttaaaaaaatctatttatttatttatttatttttagagactaggtctcactctcacccaggctagagtgcagtggtgcagtcataactcactgcagtttcaaactcctgggctcaaaggatcctcccacttcagcctcctgaatagctggaactacaggtaatgccaccacactcggctacattttttattttttgtagacagagtctcactatattacccagttggtttcgaactcctgggctcaaggtatcgtcctgcctcggcctcccaaaccattgagattgtagtcatgagccaccatgcccaacctgaatatccccttttttttctttttttttgagacggagtctcactctgttgcccagggtggagtgcggtggtgcgatctcagctcaccacaataacctctgcctcccgtgtttaagcaattctcctacctcagcctcccgagcagctgggactacaggcacacgccaccccgcccagctaatttttgtcttttaagttagagacggggtttcaccatactggccaggctggtctcaaactcctgaccttgtgatccacccacctcggcctcccaaagtgctgggattataggtgtgagccaccgttcctggcctctgaatatccttttaaataaaaggtttgggtttttggctgggcacggtggcttacacctgtaatcccagcactttgggaggccaaggcgggtggatcacctgaagtaggga

SEQ ID NO: 19217 - DNA, 1061 bp, Homo sapiens
gggcatagtggctcacgcctgtaatctcagaactttgagcggccaaggcaggcggatccctttaggccaggagttcgaggccaacatggtgaaaccccatctctactaaaaatacaaaaaattagccgggcgtggtggcacacacctgtggtcccagctacttgggaggttaaggcatgagaattccttgaacctaggaggcggagcttgcagtgagccaagatcttgtcactgtaatccagcctgggtgacaagagtgactctctgtctcaaaaaaaaaaaaaaaaaattatagaatctgctcagggaatgagttatacagaatttaaatgttgaaagatgtcagtcaagctatttggcagccataatctgtctccacaaagggaataacctaaacggtcaggaagtgtgcagttcagtggaaattacatcagttctggagccaggtaaatgtgattaaaacttttttccctgaagtatgacctttcccaggactaatcgcttataacttctgaatttcttgagatgaatttctcagtgtggtgtttgacatttactcatctgacagactgtccctgggccaggtgttgaaagcctgggccaaggtgaacagcttttgactcacagtcagccaagaagccaaagctatggaaagctaagtagtgagcttattcttcccaacaggcttagctgaggtcacaaactcctttctgatttgtttggggcggtttcattctggcagtgggggtcatcactcattcatcaaatattgataacactcctctgtgtgagagactaaactttgccctagatatattggtgaataacacagatcacaatattgttttcctggagcatacggagtctaggactacagagagtagggaaggagcaaaattcaaagttggtaagtgcagggaaggaggagaatttcttgggttctaaatctgtgctcccaaagagaaaccctagcactgcttcctgttggttttcacagttcccctttcctgtgttcttgcctgactttggaaattctttgctacataaaagcaatattaaag

SEQ ID NO: 19218 - DNA, 1045 bp, Homo sapiens
tgagccaccgcacctggccttgtgttttcttttaaaagctttatagaaaaataaataaaaatgaaagctttatagatttaaattccttatttgaggtctgtgatccatttcaaattaatttttgcatgtaatgtgagttaaggggtcaaagttcgttttattttgtagagaaaaatagttgttctagcaccatttatgaaaagatttcctttctttgttgaatttgtattgatgccttggtgaacatcaatagaccatatatttgtggtctttctggactctcttttttcctttgatctatttatcctttatgccaacactacattcataatgtacttttctatagttaagtgtttaaatctgataggtcaagtcctccaattatattattcttgtttagttcaggttggctgttctaggtctttcaataaaattataaaatcaacttattagttcctactaaaaagcctgcttgtattttgattggaattgtgttgactctgtagatcaatttagagaaaattgatgtcttaagaatatggactcttccaatccttgcgtggtatatttctccatcgttgtatgtctcctttaatttctctcatcagcattttgtattttcacgcacattttcaaaaattaaatttattcctaggtatttgacgtgttttaatgctactataaatgagcttttaaaatatttattttccaaatatttgtttctaattgatagaactatagtagatatttgtaggttgaccttgtattcaaattcacttattctagtagtttgtagattcctttgaattttttatgtctgtaatcatagaagcattctatgcttgtgcagataaagcatttttcagtgttaaaagttttattgacttctttttctggagtttccatcttctcattttgtcttctccttttggtatcaagtgctaagaatagcaccacttggaaatatgacaggactgcagccagtgtggataattatcattttcaactacagatctctctcagccttgtctgcttatcacactgg

SEQ ID NO: 19219 - DNA, 1031 bp, Homo sapiens
atatcaagatatagaacactgtcctcacccacaaaggttcccagtcccttttccccgcccttcagcacccagaggacaccactctcttgacttctgtcatggtagttttgcctgttcttgaacttcattgaagtggaatagtgcggcatgacctgttttatgtctggcttactttgctcaacttaatgttattgacattgatccacattgctgcatgtgtcagcaggtccattgtatgaatgcaacacagtttgtttattcgttgtcctgtggatagatagttgcatcctttccagttttcggccattatgagcaaacctggacacatatgttcataaaaagacttgtatattaatttctgcacctgaggagcagaattcctcagtcatcagatagatgtatttttaacttgagaaactgtccaaaagtttgtgcacagtggttgtgccatttaccctgtcactagcaatgtttcagagcactggttgctctgtatccactccaaaacttggtattgctagtcctttcaactttagccattctgttgtgagtgtcctagtatctcactgtgggtttttttttttttgagacggagtcttgctctgtcgctcaggctggagtgtattgactggatctcagctcactgcaagctccgcctcccgggttcacgccattctcctgcctcagcctcccgagtagctgggcctataggcgcccgccaccacgcccggctaattttttgtatttttagtagagaccatgtttcaccgtgttagccaggatggtctcgatctgctgacctcgtgatctgcctgcctcggcctcccaaagtgctgggattacaggcgtgagccaccgcgcccggccgtctcactgtggttttaatttgcatttccatgttgatgatgaatgatgtcgagcagcttctgtgtgcatattgaccatttgggtatctttttttgtgatgtgcttgttaagtattttgcccattttgggggaactgtatcttatttgtttctggttgttatcta

SEQ ID NO: 19220 - DNA, 1034 bp, Homo sapiens
tgattctccctgaaataatctaatcacctgcttttcccttccctgccttagcctttcagcaatggattggtgactgtgatggttccccagctgcggagggaaaacagccttctcctgtggaatgtctttgacttgaacaccccagtccacaccttcgtggggcatgatgatgtggtcctggagttccagtggaggaagcagaaggaaggtgagtgggagaggcctgctgcccactttccttctgagctctggtgacagcggtgccagtcagtgttgccatggagtccagtaaagaagacatagagagagctgggctttaggaaccagagagccagggctgttgccacctttcgtcataggtgagtaaagggactatataaggctgctgttactcttccaaattctgtcctcttccacaattgtcagcgtagtctctcttgcttggaagagatatgctccagtaagagacggaagatagagatttgctgttggattgtttctgggactgaaagactctgggctcagaagtccagggcatttgccccttgccactctgttgatgagggagacccaaggtggtctttagtactgcctactacataccctcagttgtcttcacaagcatgtagtgctctgtctcaaaaaagaaaaaaaaaaagaaaacagatgatgtgatttcctcagtccagtggggaggggttgaccggtagttttggatggaaataaagtttttaggaacccattgttagttacccatgttgtctttaagctggtgggtgagttgtgtaaattggaactgcctggccagtagcaaaattttgagtacgagttactatttaactttttttttgttttaactgtggaagaggggaataataaagactggggcctacttgaggacggagggtgggagggggagaggatcagaaaaaaataaccattgggtactaggcttagtacctgggtgatgaaataatctgtacaacaaacccccatgacaggagtttgcctttgtaacaaacctgcacatgaac

SEQ ID NO: 19221 - DNA, 1030 bp, Homo sapiens
aatgacatataatcgttttataagactgcatcagtgattgccttgagagcaagagcatgttatgaacagtgaggatattatcaaatctccagggtcctctaattaatcccataaattgtataattgtcaccagttggtgaacatatttaaatctagaaacaaaatctttctttttttcttaaaaaaaaaggattaatcttgctaacagttatatgccagtctttatgcatgaacgtgaatatgtttctatccaaattgaaaagtaaacagttgctgaaatgtattcatattaacaacattttacttgtatataattaatctggggaggctgaacttttctttgctagctttccacatactgtggatttgataatagggaggcatgcacagtgtagagctcattaaaaatctgcagaatgacaagcatatctaattattttgagtatcattccttttataagttgaggggcgaattatagtttaccctgtggccatgtgggaaacccaaaagtagtttaagctgaaaagacatcttgaccattttattattttgaacataggacctgaatttggcaaaaaagagttgttatataagggtctaaagataagaaatggctggtgcggtggctcacgcctgtaatcccaacactttgggaggccgaggcgggtggatcgcctgaggtcagaagttcgtgactagccccactaacatggtgtaactccatctctactaaaattacaaaattagcttggtgtggtggtgcagcctgtaatcccagctagttgggtggctgaggcaggagaatcgcttgaacctgggaggtggaggttgcagtgagctgagatcatgccacatgcactccagcctgggcgacaagagctaaactccatctcaataaataaataaataaagataagaaatgattgcagtcttgatatatagtgaaactaaagttaaatacagcagtaagtgataaaaattattaagaatggtagcatttttaaaaaacaagggatttaggcatatgat

SEQ ID NO: 19222 - DNA, 1042 bp, Homo sapiens
tgctttaggtacttatgatctgagacatagactggctgcagagggcgtataactgaatagaaatacaggtggtctacagatgcctcaatcacattctcctgactttgttacttacatttataggtttcttttttttttttatttttgagacagagtctcgctctgttgcccaggctggagtgcagtggcatgatctcagctcaccgcaagctctgcctcccaggttctcgccattctcctgcctcagcctcccgagtagctgggactgcaggcgcccgccaccatgcccggctaatttttttgtatttttagtagagacagggtttcactgtgttagccaggatggtctcgatctcctgacctcatgatccacccgcctcggcctcccaaagtgctggcattacaggcgtgagcctcttcgcccggccacatttataggtttctaagttagattagttttagggaaaccctaaaaaggacggtggttctttttttatttgagatggagtcttgctctgtcggccaggctatagtgcggtgacacgatcttggctcaccgcaacctccgcctcctgggttcaagcgattctcctgcctcagcctcccgagcagctgggactgcaggcatgggccaccacacccagctaatttttgtaattttagtagagatggggtttcaccatattggccaggctggtctctaactcctgactttgtggcctacctgcctcggcctcccaaagtgctgggagtgagcctctgcgcccagctgaaagtggttctttttttagcctgcctgttctcattgcttttttttctgttatagatctttcttaaaaaatggaagtagaagacttctttcctttgtactcagtgaggtttctcagtggtgcagatctaccctgggggaaaagaggcaagtgagaggcttgtggaccttgataagctgctggatctagcataccccgagtggtacagcctcgggtactgcctgcttcccagagcctgtggtccccatctctcagggggcacattattcatg

SEQ ID NO: 19223 - DNA, 1049 bp, Homo sapiens
ctgcgccgtggctgagtggaattgtaagtctcatgttgttgcaaggggctcactttaggctgctcccagaagccacagttaggactgttgggtgtggagcaggacctcatatcagagtccaaggacaagagccaagatgatttgtttgtaacctttttatagtggaaaatttcaaacattctgtaaaaatagggagaagaaaatgaactgcctgtgttcatcgtcaccttcaacacttgtcatcatacatccaattttatttcatcttttcctccacccaccatttcacctccaccttcatcccccttgtgatttttttcttttctgagacagagtcttgctcttgttgcccaggctgaagtgcagtagtgcagccttggctcactgcagcctctgcttcccaggttcaagcaattctcctccctcagtctcccaagtagctgggattacaggcgcctgccaccacacctgggtgatttttgtatttttagtagacacaggtttcactgtattggccaggctggtcttgaactcctaacctcaagtgatcttcctgccttggcctcccgaagtgctgggattacaggtgtgagccaccatgcccggccctcttgtgattattttgaagctacatatcttatcatttcttcaacaagtatttcagtgtatgttttgcaaaagaagaatcccaatatcatacttaaaaatacctaaaaatattaacagtaactctttaatatcatcaagtatctaagcagcattcagatttccccaatagtctctctctctttttttagttacaaattgtttgaaaaatggtttcagtgagaatctaaataaagtccatacctgtaagtggttgatatatttctcatctttttaagtctgtctccttctcctttttgggtttgtgtttttcttttcctgtagtttattaaagcaatagttcatcctgtggtttctccacaattagattacactgattgtatctgcatattttttttgttttgttttgtttttgagacagagttttgctcttgttgcccagg

SEQ ID NO: 19224 - DNA, 1105 bp, Homo sapiens
tccattttccttgtcactttctgcttaaccctttaagaaattaaatacaggcattatttcaaggagtgttaaataattttgccttctaggacacccttttgaggatctttcttcttttcttttctttttttttttttttttttttgtttgagatggggtcttgctgtgtcacccaggctggagtacagtggcacaatcacagcttactattgcctcgacctcccaggctcaagcgatcctcccacctcagcctgtcaagtagctgagaccacaggcatgcaccaccatgactggctaatatttaattttttttgtagagatgcgatctggctatgttgcccagactggtcttgaactcctgggctcaagcagcctcttaaagtgctgggattacaggcatgagccaccaagcccagcctcttttttctctcttatgcacctatgtttttaaagtgacacgggacccagttgtgatggcgcagtcctcacacctcacaccttatcccagctatcctagactctgaggcaaggggattgtttgagcctaggagttctagaaaagcgtgggcaatgtagatcccatctcaagaaaaaaaaaaaaacaaaaacctgtggtaggtggactctgggcatttggtcatggaagggtgagctggagacatccagtgtaccagcagctggggagacgagtgtgtgaccttcagagggaggaggttcctctagtggccgggacattttcctggcccatgaagctcgtctgcagaagtgcttctgcaccttcagttcagctgtgactgttcaagatgcatctcttaagatagtcctgcctttccattttgagattcacagacctacatactgagctgaagttagctcaagctaatgttaattgtacttattcctgatggctttttaaagaaaagttcagcctgaaggatctttgccatgcatgagatccctggcttcctcttcactgccttaagctgattggggcaagaccatatatcccaacatacttgcctgtggccttctttcctttcttttcagagtaaccaacgagtagacctttacaagtggaaagacggcagtggggaagttggcacaa

SEQ ID NO: 19225 - DNA, 1034 bp, Homo sapiens
tcagtggataatattccattgtgtaattgtttatctatccgtccatccatcagaggacatttgactggctattgaatagagctggtatgaacatatgtgtggaggtacttgtttttgcttcttttgggtaaacatctaagagtggaattgcagggtcatatggtaattctgtgtttaacttttggagggaaccaccaaactatttccacagtggctaaaccttttatactcccatcagcaatgcacagagttccagtttttccacatcctctccaaaatttattttttgtatttttaaaaaaattatagccatcctagtgggtgtgaaggtgtgaggtggtactttgttatgtctttttgtttgtttgttttgagacagagtttcactcttgttgcccaggctggagtgcagtggcatgatctcggctcaccacaacctccacctcctgggttcaagcgattctcctgcctcagcctcccaagtagctgggattacaagcacacatgatcacgcctggctaattttgtatttttagtagagacagggtttctccgtgttggtccagctggtctcaaactctcgacctcaggtgatccacccacctcagcctcccaaagtgcttggattacaggcatgagccaccgcacccagccttattgtggttttagtttatattcccccagtgactaaggatgttgagtatcttattggccacgtatatgtcatttttttggagaaatgtctattcaaggcctctgccctttttctttttttttttgagacggagtctcgctctgtcacccaggctggagtgcagtagtgctatctcagctctctgcaagctccacctcccgggttcacgccattctcctgcctcagcctcccaagtagctgggactacaggcgtccaccaccatgcccggctaatttttttgtatttttagtagagacagggtttcgccctgttagccaggatggtctcgatctcctcacctcatgatccgcctgcctcggcctcccaaagtgctgggat

SEQ ID NO: 19226 - DNA, 1087 bp, Homo sapiens
ggcatattttgtctagtatctgccctgtgtttcacagatttatacatgcagttttgcatttcaaagttgtaaatccaacattagatatcaaaagcattttgttgaattcttaaagcttgtccctgagccgccttggactttgctgggttgccccctctgctggggcgggccctgggcagtttccgattgctcatgccttcattacggtggcacggcggtaacacctggctgcgggacatctgtgtctgaacctccaggtgctcccctccaagcctcaggcctgcccctcaaatgcctgggaaactgagtctcccagttccagggtagtggttggctgggctgagaaggagcccttgccaggacttcacgtgggcgggagggacactggctctcaggaagccaagagggtgagtgacaaggatggtggccaggagggtcagaaccctgggccctggagcagggtccagtggttgctaaggtgggagcctggtggcccgtatggctgagggagaggtgagggccacactggcaccgagactctttgggccgggtgtgggctgtaggaatctgagggcagaggctctttcatggtcagatgggacccccgggggaaggcgtctgtgggaggtcgctcaggtagtgcccctggtcagtgtctaaggagacagccatggcgtgaggtcaggcgtgcacgtggtcctgtcgggcctgtgtttcaccctcctcgccctagaagcttcatcttgccccaggctcccctgtgctgggacctcaggctggggtgcctggagctggggagggaggggagcgggctatggtggtggcccctcaggccaccatgacccaggtcgggtgagcccctcatgctggggtgtgtcctggtggccgtggtcgcagcgctcctgtggtgctccatttcccaaggaggaaacgaggctcctggattgggacctgggggtgccagagccgggagccaacccaggtcaggggcgacacccattttgcagaagggggagaccagccactgagctccagggcgggggcccactttgtccccttcctccgacctgacacctgcctctggggc

SEQ ID NO: 19227 - DNA, 1050 bp, Homo sapiens
gggtcacagcctgcctccctgctccagccccctggctgaggcccttcctctgccccatgctcttctcagacaggaatcctgtggaatgtcatctctttggggaggccgtctctgaccctgtatgcaaaggccttctcccacattatttttggcaccccactttcttccccgtgaaagcaaattgtttggtgtctttctgtcccactacagtataggcccggttcagacagaggccttgtccactaggcctgcgctatctctgcggagcccagccaaagcaggggccaggcgaatcttttgttaaaagaacaatgcgcgctgggcacagtggctcacgcctgtaatcccagcactttgggagtccgaagctggaggatcacttgagcccaagagtttgagaccaccctgggcaacataaggagaacccatctctacacaaaattagctgggcgtggtggtgtatgcctgtagtcctagctacttgggaggctaaggtgggaggtggctgaggtgggaggatcacttgagcctgggaggttgttgcagtgagagccatgatcgcgctactgggcaatagagcagaacccagtctcaaaaaaaaaaaaaaaaaaaaaaaaaaaaagaacaatcctatgaaatgagggctgtcatccagcagagaggatctagatgctcagagaggctaagggatttgcccaaagtcccacagccgggcccaggtctgagtctgcctagtgaggaagaaggagtgcatgtccttagggaacagaacaggaggcagagaggcccggagaggcgggggccctggccagctggagtggtcggttgtgtaccagcagcgtccagagctcaggctgggcgggggcacaccagctgacgcaggcggggaagctcctggtgccaggcgcctggtgccacgtgcccagcctgtgagatgcttcccagcctggcttcagcggccccagactgggctgtggccgatcagtgagctcatgcctggcagggctgggctgtgaggccagaggccccagccgctcacctgggccgggc

SEQ ID NO: 19228 - DNA, 1040 bp, Homo sapiens
gcaaggggcaactcaggagagccaaggttgtctccactcggtttcccccgagtgattcttccttctatctccctcattcccccagtgccgctctcctaccccatgtcgctgaagcagatgagttggagcaggactcaggagggtactaggcccaggttttaggctgaacctaggaatgagtaatgagaggaggcagatcagctggaggaccagcccgagtccccagatgtcggcacaatgcaggggaaggtaggtgctgcccgtgaaaagcgctgggtcgagagctcgccagcctccctgcttgaggcttcatttcctggggtccttacacggtgggaccgtctacagtcggagctgtggtggtgatgattcgtctcctacaggctggggcacgccccctcccctttccctctagattcagatttgagtcccacggcccatggacacgcgatgaatgccctggggttggttagcgggaaagacaagtcgacttgaggccatgtctcggctctggaggaagaaggcaaaccgggcagccttcccagaagtggaggagtttgcgtaggccttcggtgcgttctcgcctgggtggaaggcggggacgtgcatttgttggagagcggtgtcctgcgccctaggctggaagcctggcctcgggcaggggcctggagcctcggggttggaggtggggggcggggcggggggcggcccctactgggcgggcttctgtctgcgcgcccgcgcccccgacaggcggcttatttgcatggagagcggcggcggccaatgggcgcgcgcggccgggcatgctgggatcgggctgggccggctgggccgtggcggcaggcggagagcggctggaccggctctgggtggccgaggcggcagctgcgcggcggcaccggggcggctgcggcgcgctcggagccccgagggcacgcggcccgggcagctcggtgtgcgcccccgcgagagccggggccccaggcccgccggacaccatgaaccacctggtgagggcgccaggtggggccgggccg

SEQ ID NO: 19229 - DNA, 1034 bp, Homo sapiens
cttccagcctgtgagctcatcttcaacctggctggaggtgccaggccactcctgggatgacacaactgtctgggagggccctgtgctggtgccccggccacatatctgcagctgtctcccttggtctggcaacaacctctcccagctcctccttattcagggcgtctctccttgctgccagtcccactgtgtgtatacgcatgcgtgtgtgctgtgtgtatgcaagtgtgtgcctctgcacttaggcgtgacttaaccacccccatcctccagactggggcagcctcagatttcttcacccaggccagcctatcccatgagggccacctctgaggtcccacccagtcaacaaatgtttactgcaccccttctcaccaatggggctaaacttagtggggtgggggtggtgctggccccagtgctgagctcagttttactggggaggaaggtgcttaggtctcagttgcctgtccttttgcagtctgagtgtgacaggggtgtttggctttctgagcctggagtgctgctgtccctgtccctagattcccttcctgctgcagggtgggctgaggtctagcagccccatttcttccctggccctgtcccttctgtgccccgaaatgtgtgggatggggcagtggttggtaaactgggtctcggtctcttcatgtgaaaaatggggctaggctgggtgcagtggctcacgcctataatcccagcactttgggaggctgaggtgggtgaatcacttgaggtcaggagttcgagaccagcctgaccaatatggtgaaaccccatctcaaaaaaaaaaaaaattggggctaacggtgagcctgttttgcaggattgctgtgtgcacaaaataaatgcatgggcatagggcccctggcactggctgggcgcagaggctgtgctgggtatgtggggctgcatccctgtccttgacagcggaggtccgggaggctggactgggggtggggtgaggttctgcccccatataccccggccagagcctggccagtgggtgctcctcc

SEQ ID NO: 19230 - DNA, 1050 bp, Homo sapiens
ctggcccagggcctcaggggactggccagccctgctcctgtgggcactgggcagagggacaaggcggaccacctgagcctgctggagggccggtatcccagggcagtagtgattagggaatgtcactctggccacatcccagcctgggcgggcctctatggggaggtccccgtttgatttggtttggttgtccacagtcagagccaagctctgggcatggagtctgggatggcaccctgaccccttgccttacaggactttgggcagccttctttggcactgtgcctcatctgtaacaagagaggaacagcgggctgggtaggacttggacagataggcactgtcgtggggacctgcagcctggccacaccatcacgggctctgagtcatctcctaccctctcccttgtagtcacagcccaggagaattctgctgggggtgggcagaggtctttgccatctgccccctacgtggctggctggcagatcaccgtggctctctctcctgggaccttgggcagtgtgtgaggtggtggggccaagaggagaattcatttttggaacagtcttgaagtgttcggaaaattgctttcatgtgctgaggaggccctgcggaggcttccagactgagctgcctgctcaagccctgcccttggaacccagagtggcgactgctcagggacacgtctgggttttaagcacacccatccatttgggcagtcttttcctagatgggctgacgcagcaggcactttggcccacagaaattataagatgcttcagaaggggatgggaggggaagcagggtgagagattggtgggctggttgtgcgggtagcgaccccctgagtgttgggggaggggagatgccggggatcagctggtgtcaccttgtcatttgactcacatgcagtcccggacccagagaggggaaggagccagggcgtccctgctacctgctcagtgccccttcctctgctccaggcatagagcagtgcagtgctcgtgtgctgcctggacaccctgtgggtattcccatgccttcctctcg

SEQ ID NO: 19231 - DNA, 1049 bp, Homo sapiens
ttgctgtggtctggaactgaacccaaaatatctcctaggtgtccctgcatgtgtcacccagctttctctgatgttaacatcttatatttggcagtggtacatttgtcaaaattaagagattaacaacgggacggtactattatccaaactccactctttattataatttcccattttcccacaagtgtcttttagcatcttattccaggatccagttgcggataccctgttgcatttaagcagtaacttttaaaacagcacttttccctttccccaccacatttaagaaaagaagcacattttagacttacagaagagttggaaagatggaacagagagtgccatgtacttttacccaacatcttgcatagccatggtgcatttgtcagaactgagagactaacagtgccatcatgtttttatgcatcatgaggacacttctcttggagatatgtcttggattttttttttaacaccaaggctgtgaacctcatgctcatatgactttaaggctggagttaggcagaccaggacttcacattcctccctggccatatcccgctctgtgatctctttcaactttcttctccacaacagtgaatgcagagccatgagagaatgtgcgggtatgtggcaggcactcagcaagttactacacatgttccttgacatatgatggggttatgtcccaataaatgcattgtaagttgaaaatatacgttgaaaatgcatttaattcacccaacctaccaaacatcaaagcttggcctagcctaccttaaatgtgctcacaacacttaccttagcctgtacttggacaaaatcatgtaacacaaagtctattttataataaagtgttgaatatcttatgtaatttatcaaatactatactggaagtgaaaaccagaatgggcgtatgggtactcagagtagtttgtgctgaatgcatatcactttcacaccatgataaaggcaaaaaattctaagtcaaactatagtaagggacatagtcttttctgttcccagaaaggggcttagaacagagattc

SEQ ID NO: 19232 - DNA, 1031 bp, Homo sapiens
aatatttaaaagatacctagttaagaatcaagctttaataaatacctcattttatgtaaaatatttattttacttaataacttgctgtttcatttttttattaaaaaagctttagaataatgttgtattgaatatctgaagagattattatttcagaaaagctgctaaaatgacatggagagttcctatatgtaggcatgcctcatctgatggcactgtgctttactgtgcttcacagatactgtgtttcttacacattgaaggtttgagttgagcatatctacccgtgccattttaacagcagcttgtatttacttcatgtctctgtcctattttggtaattctcataatatctcaaattttttcattattattatattattatggcggtgtgcaatcagtaatccttggtgatactattgtaattgttttggagcaccatgagccacacccacataggataacaaacttatttggtaaatattgtattccctgagacaaaacaatattgaaattaggctagttagtaaccctacagtgacctctaagtgttcaagtaaaaggaagagtcacatctctcactttaaatcaaaagctagaaatgatttaaggttagtaagaaaagatgttgaaagccaagacaggctaaaagctaggcctcttgtaccaaacagttagccaagttgtaaatgcaaaagaaaagttcttgaaggaagctaagagtgctactccagtgaacgcacaaatgataagaaagtgaaatagctttattgctgatctgaagacagcttgaatggtctgaataagatcaaaccaaccacacaacattcccttaagccaaagcctaatccagagtaaggccttaacccttcaattctatgaaggctgagggagaggaagctccaggagaaaagtttgaagttagcagaggttgttcatgagattctttccttagaaagaagctgtttcatcagctgcaggagcttacacctgtaatctcagcactttggaagtcaaggcaggtagatcag

SEQ ID NO: 19233 - DNA, 1029 bp, Homo sapiens
agacagtgaagcatatccctgttgggccagaggctgttatcgttttgctctgaattcaaaacctgatatgtctccaaatttgcttagggttgttatcctggaaaatagaatctgatagaaggtgggcactggtaccaagtgcaaggtggaggtgatcatggttagggcaattgcatacaggtcatgactgcattggagtctcaggaaagattggtttagtgatttggcaaatccaaggcatgagttttgggtggttttgttgttttgtcttatttttccaccccttaagagtcttaggggaaaacagcatcattgaatagactagctaaaaattcagcacttaatacccttcacagcgtattagcctctgcagagctttgctattttggaaccagtggtgtgaattattctctgttaataagaatctggctttcttttcctgttggaaaagaggctcgtgtgcatgttactctgactcagtagttctcaaactttttgttctcaggacctctttacgctcttcaaaattattgactgggttataactgttgttatttatagtataagaaattaaaataaactagtatatttttaaaatttagaatagcatgattttgtaaatttctttaatatctcgcttaatcgaagatagctggagtgtcagatctgcttttccattcagtctattttaatcagttgttttggctgaattatataaagaaaatttagtctcactcaaatatgtagttggaaaaggaaggagtattttactagctgttttgataattttggttatccttttgtgatactacgccaaatgtgaacagtgatgtaacagcatgcattaatcatttcagaactgctgattactgggttatacagctcttctaacgttgactgatttcattagacattctcaacaagtcacattcattaatatcagtgccaatcaaaagtcttcacaaggaagctgtctagttcacggtggtaggcaacaagttttccaaaattctaaagctcagaatttat

SEQ ID NO: 19234 - DNA, 1075 bp, Homo sapiens
ataacaccgtcacccaccatgtagcctctggaaaaatccacttgtgacagaatacaagagaagaaggcaaataatgtcttcgtgttgtcatgaaaatagctttaaccttttcagctccctgaaaaaaatctcccatctctctggggtccctgaaccacactgagaactgcaggtttaatatatctctggaaggatactcaggcagctaagaacagtgttggtcttggggaaaggggaatttggtagctaaaagacagcaaagggtagaatggaggcttattttaaaataccttttgagtattttacttggtacattaataccatttttttaaaaagtgaattgttaaataaagcccttattttctttctggcagaaaggtgcttaaagtaatagttttttttgtttgtttgtttgttttgttttgttttgtttttttaatttcactttaaacacatagatctagaggggagaagtacctcagaggacacatctccaatctaaattaggttcccactagtatgaaccttcacagcccctaattcttttctgtagcacttacctcaatttgtaattgcatggctgtgtgtgtgtgtgtgtgtgtgtgtgtgtgtttcacctcttttctcccccactagactattaacttcctgagggcgtgaatcaaatctgttttgctcgcttgtctcagttcagtacttggttcataatagtttgttagtaaatatttattgaatgaatgaatgaggatctttgggaaactcctatcaatttcctatgtcagtgctgaccagttctggacagttgccagaagacagttcttgaccaaacacctttttttgcatagataaaatgcttcttggctggacatggtggctcacacctgtaatcgcagcactttgggaagccaaggtgggtggctcatttgaggtcaggtgtttgagatcagcctgaccaacatggtgaaaccctgactctactaaaaatacaaaaattagctgggtgtgatggcgggcacctataatcccagctactcgggaggctgaggcaggagaatcccttgaacccaggaggcag

SEQ ID NO: 19235 - DNA, 1024 bp, Homo sapiens
gggccaaaactgcctgtcgttggtagagggagaatataccactattttcctcaatagtagttgagccccaacctcagtgtcacctttagtttttccctttcttgtctttccccctagcccctaactgcccaatccaatgagtccttttaactctactcccaaaatgtctgtaagtattcattcatatccccctccctcattttatctccactctcattgccttttttctgggtcttacattctttcttttttaaaaaactattttaattttaattttttattgagacagggtctcactttgttacccaggctggtctccaactcctgccttcaggcattcctcccatgttggcctctgaaagtgctgggattacaggtatgggccattgctcctggccctgggtcttacattctgaagcatctgtcactatgtaattagaatattttctaaaatcttttgaaaggcttggactattgtaatcatttcctaagtttacataaagtctgtagtcactcttcctctctccactctacgtgccactgctggggtaatttggcagagatttagcttagatagtgtcacatgctcaaaaattttatctttgttgtctattagtaagttctagtttattgaactgctactgtcgattgctaactctcaaaaaaatccttcagttcactgtcagtatttccttttatgtttaatatgtttttactctttagcgaggttttatctgtggtgtgatcttatatgacctggttttaaaaagtggggatgaatttgctttttctagatgctcttgcctgggccaatttttatgttaattctttggtttggagtgcctggaacattcagatattataattgaaagtataattttgaagcccaaatctatgtgggttgcaggcccagggttcgttccggttcttaaaagagacctttcttcctacccgctacagcccaaaagcttagatacactttcttctctgttccttgggctgttatgtgattttttttttttcc

SEQ ID NO: 19236 - DNA, 1052 bp, Homo sapiens
aaggtggagtggggattccctgtggcctgaaacatttcttgcttagtctaactcaaaagatcctttttcatttgttaccaaaaatgtattaggtccctgttgaaggctaggcatggggtaactggtaggggaatacagatatttttgagttcataatctggtcatgtgggaattgctatctttgtgattttgattatttcttccagattattttattcaataaatctaggagactctgggttttaaggagtcagcatctaaaagtgatcttgcaagccatgcaatgaatactcaaagtgtagagtagtccacagaaagaatagggaaaacctaacatttctgtaagatttaaatttcagtataaaatctggaacattctactcgcagtagtattttaaatgttgtattttcgtgagtttgttaaccttcgttttttgtttttgtttaacattcttgcattttaaatcaggtgcagctattgctggagtttaccgagcagcagggaaggaaatgataccatttgaagccctcacactgggcactggacagacattttgcgtcttggtggtctcctttttacggattttagctactctatagcatacatccttatgctgagatgttgaacttaaactttatggaatcctccaaaagaatacattatggagtgtagtgttttcttagttcttcaaagggaagcaacttggatgaacaggaacatgaaggacaacacatctcagccttttcttcattttgaagctcctagaattgaagacttatgtggactcctattgttctcaaccaaaacaagtcttttggctttcttttttgtagatatttgatttaagcagttttcatgtgtacctttacccaagccaagtcaacagtgtctctggggtggcatcctttgcactgaaatttacagtattctgtgagatgtcgcatattttgaagaaaccgtggaagatactggtttatttcaaatgagcagagtatgttgtattaaaatcttatctaatcttgattaaaatttggcaaactcttttctttgc

SEQ ID NO: 19237 - DNA, 1019 bp, Homo sapiens
tgcattcattgtcctgaatctgttgtattgatattttggccccacagaaaaggttacttgcagtgtatgccaactcattatggcagaatcattgttctgaagtattctgacatatttatgtataccaggaagtactgaattgattttttctttattacctgtatttgcagtttagccatttacctacggagggttaggtagacatctaaatgactaaattggccggttgccgtggctcacgcctgtaatcccagcactttgggaggccgaagcgggcggatcatctaaggtcaggagttcaagactagcctggccaacgtggtgacaccccatctctactaaaaatacaaaaatttgcggggcgtggtggtgcatgcctgtaattccagctactcgggaggctgaggcaggagaatcgcttgaacctgggagggggaggttgcagtgagctgacatcatgccactgcactccagcctgggccacagagcgagactgtctcaaaaataaataaatgagtataagtaaatggctaaactgcaaatgcagtttaaaattttttcctttattgttgtcatttttaacaaacctcaaaaccaagaaactgagatctttatcttgtatcaagaatgacattcatcttcagaagatacagatttcactaaatcagtgtcaaattagatctagtgataattaaaaacccagtaatgtttttgtgtcatccttgcaggaatcaagactggtcacacttggaccagtcatttattcattcactcaaaaaatatttgctcagtgttgattgtgtgcctgttgttttctaggcaccaagtcaagatgccatagtaacaaagcaaagccccttcccacgtggaactttcattccaatggggagagagaaaaacaaaacagctggtggtgaggggcctgggaaggggcagggcctgtgtggtgggggtggattgctgtttgctgtaaagtgatggggaggccctggatggtgatgatattggagtcaaaatct

SEQ ID NO: 19238 - DNA, 1067 bp, Homo sapiens
ggaggccaggtggggactttgctggaatccaggagataaggatgcagccaggaccagcatgaccctcccgcggctggatgtccaggccatccactgggacaccatcaggtcccttgaccgtcacatagccagatgtgtcttcagtgtccccaacttgattgtcagctctgccaggatcgggatcctgagcactggctttcctggatgaatcttttgctgatcttatctcttctctattttccaacctttatctgtcatttatgttttttgttctacttttcacatcttttaaatttttctttcaacgtttctaatatctaatgcaattagccccaaggaaaactaagggaaacaagaaaaaacaagaaaggaaatgtactctcagtacttcagctgtgagctgtgagcttcagctgtgagctggagtgttttgctctggttttaggtttttgattttttttaagaaagagggtcacactctgttgcccaagctggtgagcagtagaatgatataactcactgcaaccttgaactcctgggctcaagagatcctcccaccttggcctcccaaagtgctaggattacaggcacgagccaccgtgcctggcctccaggcatattttatcctttctcaagctatgtgtagtgttttgacaaaaataaattttaaaaagagttaatgtcaaaaaaagtttctgtgacttaagaaggaccactgcttagggtgctcctcctgggtaccaaaacaagaaacagaactttctattccctttatggcctcttgtactttttagttccaccctcctcctgaaaaaatatgatcattttcatcatcatcatcaccatcatcaccattaattacttgttggaaatttaaagcagaattgcctctgaggttggaaggctggagagggcatgagagataggaaacgtcactttcttctgcctgactggccttgtgctctggtgtggggctgtgtctgcccagggggtgtggcctcttttcctgtcttcacatatgaaacatgagctggcaatgccctcatctttaccttgagtttttttgt

SEQ ID NO: 19239 - DNA, 1028 bp, Homo sapiens
agcaaatgttgactttcctttctcctccctttttcacagaggcaaggcagtcaagtttcccatttttgaggatgggaaaactgaggcctgaagagcagaaaggagttggctgacttaaacccacaagcgagtaggccaagtaccagggcctctgagggtgctatgctgctccgggagctggggctgggctcctctccagcctgagaggccggaacttttctggctttgttctacaaacagagtcaactggagtatagagagccagagagtgacttgctctaagtcacacccctcactggtagtagagacaggatttgaacccaatccggcttcagaagccaagcttctaaggccagtcgcagtggttcacgcctgtaatcccagcactttgggaggccgaggcaggtggatcacctgaggtcaggagttcaagaccagcctggccaacatggtgaaaccccatctctactaaaaatacaaaaataagctgggcatggtggtgagtgcctgtaatcccagctacttgggaggctgaggcagaagaatcacttgaacccaggaggcggaggttgcagtgagctgagattgcggtacttcactccagtctggacaacagcgagactccatctcagaaaaaacacaagccaggcctctagccatgactttccagcgtcttctgttttgtttgcccttgtggggaccctgtctgtgcctgccacattctgttgctggggcactggggcacctgaatctggtagagccattgtccttgggttttcctcattcaaagactttcccttggattcatagaatataagtgtggcccaggaaggaagattgctaagcaaatactcataagtgcactatgcgccagactttgttctgctttacaaatatccactcactcactctttcaatcaagcccatgagttgggttatattgtttcccccactttacagatttttttttttttttttgatacggagtctcgctctgtcaccgaggctggagtgcagtgaaagtgaca

SEQ ID NO: 19240 - DNA, 1069 bp, Homo sapiens
ctttgtgagctgaggcgggtgggtcacctaaggtcaggagttcgagaccactctggccaacacggtgaaaccgtctctactaaaaatacaaaaattagctgggcgtggtggcacacgcctgtaatctcagctattcgggaggctgaggcagaattgctggaacccgggaggcggaggttgcagtgagctgagattgtgccattgcactccagcccaggctgacaacagcgagactccgtctcaaaaaaacaaacaaaaaacgcaattggcttcaacgatacttgccttttggttttcttctctttagctgttttttctcgtttgcatttgtgggtttgtggttgtgaaacagaaataaatcaaaatgcctttgggaagccacccctcctccacttctgtaaaatcctatttctgttcatatgtttaagcagaggttcaccattctctggcccaagcagggctgtttggtagtccaagcaaggccagagacctcccagggacttttgttagtgctctcagaaaagatgttcttccttccactagagttgctaagcaactccaaagatggggccatctttgccatcacatggagagaacacagagaaaaacaaaaccaagagatggagttttgatgttattatttgatccctggttctagctacacctcaagccagtgaaccatccctctgagaggtgagataataaactgcctttttaatgctaaggcctgtttgaattgggagcatgtcattgcaaataaaattccttagtaacacagagcttgctttccctttaccttgatcgctctgaggtcagtttctaactgcttttagtgtgaaactatcagcaaagagaaacagattttattacctcaagtttggtaaagacccaacaagatgtttgtgacaaattaagaatgtttcctctgatcccaactgagaagatgacatcagtagagagcttggatgagctgcttatataatttggtgaagataaagttaaaggtctttgtttcttccgcaatggaaagtgtgagtcattttaattacatgttcttagactggtggga

SEQ ID NO: 19241 - DNA, 1050 bp, Homo sapiens
aagccctgtctgatttggtagtgtctgtggctgggggaaagctgcctccacctggaccttggcaagactttttggatttaagacagtgttctgagcaagccttagccaaaattttccagctcctaaaacccacttcccttgctggctagttaaatggcttaggacagtgttatcttttcaactgccactgcctcctgagatggtgtctgggaaagccagaggagctgttaaaatgagtcccaccgcagcagaaaagctattgaaaccaggagacagcttccaactggaaaaatacttagtatctaagtgcttactttcaagagctcaagcagctcttcccataggcggctatcccgaaggaatggttgaatacagaaacagccaaggaggcagatattttagacaaagtacatttattttccagaaagagtagtttttttaataccccatattgaagaattgttgaccttcacatcctataaatgtgaatccttttaaacttaaacgtgtctgtactggggctgagactgacttgctgtaacaccatccagatgaatccaaaacaaatctttatacctatggtccaaaagtggtaggaaaattctgtaaagatttaagggcttcaggcaaagttgtttgaattcaatttttatttcttaaaactggggacccaaaatgaatcaaaagggatagatgtcagatgagtggttattgcctgatgtggtgggggatggggagcaggcggttgagttagaaagaggcacaggagcaccctctgggagatggaaacatcctgtgttttgattggagcgttgattatattggtgtaaacatttgtcgaaattaagtctacacgttaatgttcgtgtactttacgtaattatacctcaaatttaaaatgcaaaaaaacaaaaacatagcccttattactttgtgtagtagaataaaactgggcctagatactcaagcaattgtgtcctagtaccagttctgccactaacttctatgtgtatgtggggaaagtatgtaacctctacttataacttctca

SEQ ID NO: 19242 - DNA, 1022 bp, Homo sapiens
aacttagcaaacgtcagctttattgctgctcttgtttgatctattgcctcgtccccgccaatatttttttctttgaccatttaaagcaaatcctaaccatcgtatttcacccaacagaattaatatccttaatatctaatatgtagtctgctcagttttcccatgttgtctcaaaaatgtattttgactgtttatttgttcaaattaagatctaaataagagccacactgtgcatttgattgatggggtcttttgtctctttaaatctgtaacagttacccttttttctgtgttgaaaggtgggttttttgtcctgtagaatttcccacattttgtatttcactgctcatttcctcccagtgttgtttaaaggttcctgtctccccagtatttcctaaaaatgtgcagttacacaaagagccttgattagattcaggtgcggttgatctgacataagtacttcctgagtgactctgcatctttgttttgcatcatatggagaggaacgtgacatctggtggttccacacgctgtgactgagcaatggggtctgtggtgtcagtctggtcttttccattataaagtaccccactaaccttccacctgatggttctagcagccgtgtcaggggtccctgagaccaccctcatgcttgatgattcacaagatagattcacagaactctgaaaagctgctatacacatcattcctgtttattttagtgaaaggatacagattaaaatcagcaaacggagaaggtgcgtgagcgaagtccagcagaaaacaagcacaagcttccagttgtaccctcaatatgaaccgtgcgtgtttgattctttgacatgggaggggccttgctcactcggtggagagattgttcctcccaaggctagccaattcctggagagagtaaatgactcacctatgactgctcctttcatatgtaaaccaaccaatctggagcccataccccaatctctcctttacaggacgtctcatactctgagccaatatcccatact

SEQ ID NO: 19243 - DNA, 1037 bp, Homo sapiens
atttcaccactgcactccatcctagacaacagagtgaaaccctgtctccaaaaaaaaaaaaaagtgtatatgtatataacaaaaacctgtacataaatgttcacaacagcattattcataataaacaaaaagacaaatgtccattagtggatgaatggataaatcaaatgtgatatatccatacaatggactatgattcagctataaaaacgactgaagtactattacatgctgcagcatggatgaacttgaaaatataatgctaagtgaaagaaatcacatattgtataattttatttgtgtaatatctagaacaggcaaatccataaagacagataatagcttagtagttaccacaggctaggtgctgtggctcatgcctgtaatgccagcactttgggaggctggagtgggaggatcgcttgagccaaggagttcaagaccagcctaggcaatatggcaaaatcccatctctacaaaaaatttaaaaattagtcggacatgatggtgcatgcctgtagtctcagctacttgggaggtggaggtgggaggatcgcttgagaccagggggcagaagttgcagtgagccgagatcatgtgactgcactccagtctgagcaacagagaccctatctcaaaaaaacaaaaaatttaagtggttaccagggaatagagagtgaatgctaataggtacgaggtttctttctggggtgatgaaaattccttaaattacattaccatgatagttgtacagttctatgaatatactaaaaacaattgaattatccactttaaatgagtacattttatggtatgtgaactatatccctataaagatgttggttttttgtttttttttaaaaaagccaaccctaggcactgtgcctgggatgttttctgtttttcctattctggtacttgcagttgctatctgcttcattctagaccagcatcatgttggcatctagtttgttcaaagatacaagagaaaaaaatgaagcttttatattataggataattttgggttttggtgtgt

SEQ ID NO: 19244 - DNA, 1035 bp, Homo sapiens
acacttgccaagcaagaacattattttcttagattgtacatgtattaaggtggcttagggctgggaggtaggtagagatgaatggagaagacagaacccccacaggctgcctgcagcaggtgttgacagggctgttttcaggaaatgggagaaagactcttgtaattgtcacagtctctgagaattaacctgtttggagtcccagagccccaagcagcagaagggttttctttcagagaaatttgtatgtgttctgaggtcgatttcatcagtcctgacctccaggtctttgaaagaaacggctgcatcttggagttactaggaaatgaattcccagcaagtcctgagtgtcaggagcatctctggaatgatggtactcccacctcggagcctggtaacatgttcactcacacactgagatatcttagaagaaggtcaccttttggttctctttcctcttctaggccaaggctgcaggtgatgatgaggccatgttcatagatgaaaacttctgtactgccctggaatatgggctgccccccacagctggctggggcatgggcattgatcgagtcgccatgtttctcacggactccaacaacatcaaggtacgtagcaaccctccacagagcacacttcctgaggaagctgcattgtgttggagccagggcatggtgggcctggaggataaaattaaggaagggctttgggctgggaagaggagcaggcagaggagttccatgccactcacaggagggccagagcctctgaccttaaaggatttgggttttttcctaccaggggcagaaggaatactaattgtttgcatttcttgaggatccagggaagtctccgtgcattatttcagctaattaagtcagccttatgaggtgtagaaactgttgtttcccatttttatagatgaggaaatcaaattttcatagaaatgcgtctattcatccttttgacatagtgccctaggcagtgctatgcatttgttctttgtcatctgtaacttgagagggtctgagttga

SEQ ID NO: 19245 - DNA, 1040 bp, Homo sapiens
tctgcatggaccacctttctggaataatccttgatctagatccctgggatggagagaaggaaccttgctgcacccaggggctggagctggttaattcccctaaaaaagagtgaggaggcccagcactgaggtctaatcaggcagaagttgtatcatggaatgaaaggacagaggacaaagctccgtggtcttctgcattatcctctttaaagagagactcagaaagaaggtcctaattcaatcaaatgaggcagagagcgctggatagcccaacctctgcaaactttgcctaggaatcctgtcactcaggaatgctggccagccctggctattcgccaaccatggaaattagcaccagccactggacccaccctgcaagggaatagccaacccccaaagaaatccctttggaatccagtctgtaggtacagcccaggaattgtggaagcctttgtttgttcccatctgcaaactcaggctgccaaaacatattgggagtataatgagaaataacggaatcaaaataatgtaaaggaaataagtgctgaagagtataatcaacatcctctctgcatagatttcctgccagggagacgggagcaaagggaatgttttacccctggggcccagacagtggtcctggaaaggagaaaaaaaacttcctggaagagagtcttttaattgttcttttaagagagggcggcaggagctgccaaggcctggaatggaatgagtccaccattactggggtgtctccatttgctcagctgtagggggaagcagagaaacccccaaacttgggccgtacagcagtggattcccacaggcatctcttgagtttggcacctgagaggtgtttaagcaacttagggttctcacatgccaaaggtagggaagctgtggggatagcgagatggacttgggtttggtcctactgggctacctactcagcatggcggtgtgggctgagtttcacatgtgctctaagtctcaccctcttcctaacaaatctgaatcctcgttcatttgtaaaacctcat

SEQ ID NO: 19246 - DNA, 1035 bp, Homo sapiens
gtggagaagatcttggaaaatgagcccagggcttgaatcacttttctcatttaccaaatggtaataataaaattgccatcttcagagacacattccatgagcacatcacagatgagttaatccacaggaagggattagcagtgtctagcacagagtaaacatttgacaaatgtcaactaaaatcatcatgtattatattaattattactacatctattactagctttgggaccttagacaatttacttaacatctctgagcctcattcatcctctctgagcctgggataataatactcacctttgccttgttctaaggaaattttaaacaaagaaggtttgtaaatcatttatcatagcacacagcagttttccccttcgccatgggaagttgagctaaagccgatattccttctaggcatccttagaacagaataggtgacaactcttaaattttaaaatgtaagtcttgggggaatttattcattcagtaacattgtaaaaaatagccctaaatcccgatgctggaccctcagtggacatctgttttctgtgatgggcccagcttggacctgttcgagggtcttacttctatgcgcttctcaggcagggaaggtcccagtggctctgccttgctggctttcggccccagaatcgaatagaggtgggagtgggggagaattgctggagagctggaatcatgggataggagccacttgagccaggagcttcatctctctggtcctcatttaccttagcttgaggcactgcaaaaaaaaaaaaaaaaaaaaaggcttaatttttgtccaagtaacatgtgcagtgtgggttagcaagaggggctatgcccattgtcactgtcactcagactccatatgatggaggctccatctcaacctatgtttctgtgatcagtgaggctgatagaatgtagtgattccatcactggatctcagacctccttcctggaggcaacttatgtgactgccactcacatctcttcctggtcaaggcaggtctcacgttcatgcccaag

SEQ ID NO: 19247 - DNA, 1032 bp, Homo sapiens
tagtgctctcagtatagggttttcaacatccctgagcctgctaagtttatcagtccattcttatactaataaacacatacctgggactgggtaatttataaaggaaagaagtttagttgactcagagttcagcatggctggagaggcgtcaggaaacttacaattatggcagaaggggaagcaacatgaaggcgggaaggagaagtgctgagcgaagggaaaagagccccttataacagcatcagatctcatgagaactcactatcacaagaacagcatggaggtaaccacccccatgattcagtcacctcccaactggtccccccccccacaacacgtgaagattgtgggacctacagttcaaggtgagatttgggtggggacacagcgaaaccatatcactgagtgaaagggaggtaagggagagttgtgatatcatagtcccaggtcagcagaccttttctgtaaatggccaggtagtcaatcatttaggtttcaagggccacatgatctctgctgcagctgctcaaccctgccatcgacaatatgtaaatgaatgcccctggttgtgtttcaataaagcttcttttttccacaaaaacaggtaattgggccgggttcaactcccatagacccagcttgcagaggcaacgtagaggattgtaactgggtattttgggtctttggtagcagaaaatttggctctgaatggtgtgaacaccctgggactagttatctcccgtaagaagtccaagggtaggtgcccttgcaaagctgtttatttccacagctgaatgatgtcagggcccggactcttgccctctcccagctccaccattctcaagcttcagatgtaagacatgtgtaaggttcgaggtaccacattttttacaccagcccacccaaaaccagaggcagagagtgtgcagccctttattccttcgtaagagcaaggaatgttttgcagaagtcgcttccccacatagttaataggctgcaattgtcaggcgtccatccctctgtcaatggttg

SEQ ID NO: 19248 - DNA, 1034 bp, Homo sapiens
ttctcaactgcctcctcatttttccacaatgtatttctggctgttcggaggtaatttcctaggttttattaacctgtaacagaagcagtttacagctgaatccatgccagagaaaaactcatttgcaacccgatgtcgcagcatccagggccaaagggattgaaagaaaaaaaaaaagcatgaactcagaaaacctagttgcctggaagctgcaacgggactagaaaaagagggccaccccaagaaatgtaggtaacctgatccattagcaacatgtcagcttttctttgctaaaaatttccagataaatacagtatacatttaaaaaaattattaagtgactaatttatgcctagcatggtttcagctactgagaatacagtcatgctgtgaacaaggaagaccaggtttctccctttgtggggtttatattcttgtagaaggtgttagacaacagaaatgtaaatgctgaaaataataaaacaatttaattgtgagttttaacagctaggtctctgtctctgtctctctcacacacacacacacgctactaaacccatgacacaaatggaatcattaaggagaatttcatacaggactattcataaaggtatgagtaggtccacagtggacaaaggaaggatggtgcagtaccccagagctagcaattgcagggagctgttagcagaaccaggcttgaaggaaaggaccacccgattcaaacccaaacttcagaagcagcgcgtccttaatccatggcagcccaggaggaaggggactggggacatcattattctgattcatactcctattgcctgactgccctcccccagctaaatccaactggaagcctgagattcagggaacccactactgcagtccataaggatcagcctcccttggcacagaagaggatggggaaaggtggagcctgtatagctagatgagcaaaccaaaaacttccagcacgtactggtatgtggagatgcactggagtaacaaaatggggtctggttgggtatgggatggtgcac

SEQ ID NO: 19249 - DNA, 1034 bp, Homo sapiens
ttctagaagaatcagttcggtaaaaccctccttggaatgtttccataaatatagactctccccaaaatctgtcacatagcagttacattcactctcacctttatgcccaaatgacagtgacttgggactttaccccagcaggaactggcactgaggttaggagaggtcataacttgttgaatatcactgtaatttcagaaccagaattcaaacccaggtcagcccaactctagcatttcgagcccaaggaacttacatacatacatatacgtatatatacatatgtatatgtatatgtatatgaaagtacctgagtgtggtgctcatttatcactcatgacttgctgcccacactcacactatgtatatacatatatatgtatacacacacatatacatatacatacatatatatacacacacatatacatatacacacatgtatgtatatgtgtgtgtatatatgtataataagcagtgtaggattgttttgaatcagcggctgttttaaagttgagtcacctgttaatttcttttggattccttgtccttattttcccagccataaaacataagtgtgacacattgcaaacaaatgtgcaggcagcatgacacagtggaaaggcgtgaggtttggagttggaaaagcaagactagagcctgactttctgcttattaagtgccttgactttgtgcttgaccactctgattctcagtctcctcttctggggagaaataattaacacatctgggtagagagctatggtgaagaagaagggagaaaattctcctagaaatgtaaatttagaaatgtagattttaaattgccatccaccttagttactacttttaaaatctaaaataatacgagtaagtctggcaagagaattcggcaaggtcttctctgtgagttaattggagatgctgtgtaggtcggcaagtcacaatgacacttatccttgagtattcatcaactggtccctttcttcttacatgaatgatgtagtaattgcaaagaaggtggagcctcaggg

SEQ ID NO: 19250 - DNA, 1046 bp, Homo sapiens
tttgtttgtttttcctctgagagtcagttatcctgggaataaaatatgtttgtgagaggcagtctagtggcatgctttaggctgtgggctttatactgaactcagtttgagtgtcaactctactaattccagctgtatgagcctgggcatgttccttaagtacttggagtctaagcacttggctaatagtggtatctccttcatgatgttcttaaaaaattaaatgagataatgcatgtaaagtgcttagggccgtgccttaccaacattaagtggtcaataaatgttagttattagttgggaaataggaataatgtaatcctcttaaggatattttgaggattcattgagatgcttataaagcatttaggtcactacctgacccacagtgagcactactcaataagtgttcatcattgacatggttgtttttgtttttacatgttatttgtaaaatgtggataatgtaattaacttagtatcgttctgaagactaatagagataatgtgtgtgaagtattcagctctgtgcctgtcacagagtaagaaccaaattatgttaatctccttaaggacaagaactgtgcttttatgtcatttttttccccagcaccctggttcaatgcttgacacatagaaagtgtccaataaatattttataaataattgaatgaatagctgtgttattaattatattctcttctatccaaaatgaaataggaggtcttggaaaaaattcctgttcttctttagaatctgttgacccctggaaaatggagaataaaataaacctgagaacacaggatgttcccaaactctgagatcatcgtcataatcccctacattagaaaggtctttatggttcacaaagaactttcacatccattatgtcattcaacataaaaaaataaaacaggcgagaaatatccttagggtcagcctggacatggagctcagtctctcacgaatgatttaaaatccactctgtcttgttgcagatattgcttatagaaaacttcaggcacagaaatgctacccagcttgat

SEQ ID NO: 19251 - DNA, 1043 bp, Homo sapiens
tatgatatgttctatgacattctgagagtaccaggtatgctggaaaaaaaaaggtaaggatagaagggtgaaagttgagtattctctccataaacagctgtctggaagttccatacaatcctgctttcttctactggcctgaagatagttatgtggtcacatgtagctgaaagtgtaattttcagctgcagtttcccctcccctcctgaaataaaacttgattgatggtctgtagggattgagggaaagacaagagttaaggtataatttccaggcttccattctagtccattaggtggatggtggagccaaggatgagcattggttggagggagtggagggagtggaaaggacagtgagtttggagtgtttgttgaacatccaggtacagacgtccacagcagcaagttgtgtgtgcctgaagctcaggagcactatttgacatggcgatagggattgggaataattagtatgtagattataattaaagccaaaaaacagtgtgtaaacatgaggaggggtcttgtgatggagaaagtggacattttagagatggaagaagagaaataaggtcagatgtacaaggggtagcaagagaggtagaaaaaaaagaggtgttgctggtatggaaggcaatggaatattgcattttaagaaggaggggatggttaataatgtcctttggagttaataaccagtgagtcattggtaaccttggggtgcatctattccatagagtgtgttggtgggtcagggatggcttgattgcagtgtgatgaggaatcgaggagtttgggtcttctggatttagagacatcttgtatgggcaactcttctaagagtcttgggcatgatagtaaaaagaaagtgaatgtgatatccagggtgaagtgggagaatggattagtcatctccacttttctagttctatacactctctgcccctttggatgacttggataacaaaagattgtggtgtagactttggatctacatgtttagaagaggtgattttccataagccctgctgacatataacagat

SEQ ID NO: 19252 - DNA, 1031 bp, Homo sapiens
gatttttaaatgcttgttatcattatctctttgagaaaatgctcttctattcctagacttatcacaggttttttcatgcatgggtgttaagttttgtcaaatgctttttctgcacctattgagacgatcatgtggtttattttttcatgtgtaaaaatggctaattctatttcttgatttttgaatgataagacaacattgtatttctgggatagcacacacacagccataatgtattaccctatttaaatattgtcggacttgatttgctaatatttgttgaggagttattttttatgttcgtgaggaatattggtttgtactttttttttttgtaatgtctttttggctgtcagagtaatatcatagtaatgctggcctcaaaatgttgtgggaagtattcccttgttcattatttttctgagacagttttgcctggttggtttttttttattttattttttttacctaaatatttgcaaaaattcatcagtgaaactatctagacttggtatttcctttgtggaactattttaaattgtgagtttaatttctttcatataaaggggttttcagattttatatttcttcttgcatgagttttggtaatttgtgtccttcagggaatttgtctattttatctaagtcaccacatattggtataagctgttaatatagtctcttactatcttttaatgcctgtaagatctatagtgatacctcatttttttttaacaaaaatttcaactgttgttatagctttaaagggcacacatgcaggtttgttacatgtgtaaattgtgtgatgctgaggcttggagtcccagtgatctcgtcacctaggtagtaagcatagtacccaacaggtggttcttcagcttacgccccactcccttcttccctctcacatctagtgatcccaagcgtctgttgttcccatctttatgttcatgtgtattcaatgtctatctcccacttataagtgagaatatgtgctatttggttttctgttcttgtggtaggtcacttag

SEQ ID NO: 19253 - DNA, 1030 bp, Homo sapiens
tgaaataaaagtcattttataggttagatattaaaagatggaggctgtgttctgtgcagcagttgtggaaactagcaatgttcagcgcaaaaggtagtaagtgggttatctgtaattaaatgtttgaaaattatagcagacaagaagaaataaaaggtggtagttgacaaggcagcacttttggtttaaaatgaaaaactttggaacgagtagaattgtccaacagttagacaggctacctctcaaggagtttacagggaagcacttttggtttaaaatgaaaaacttgggaatgagtagaattgtcccaacagttagacaggctacctctcaaggaagtgagcctctccactagaggtactcagcagaagttagaggactagttagactgcaagcccctggagaacatggacagaatttgcccatcttcagtacttatttaattcaaattttgggaggaaattgattgagcaaacatttgtgcatctattagcatgtagatgctgtactgtattgaatgaaattgtgctagatatgagatactctctaaggtaactatttccaatctcagatttggttaaataaaagataagaattttgtcagtaagaacatgtttaaaaaatttaaaccctgttaacctcaaaggacatttatattttgcaaatatttctaaatagtaaactgctataaatagtgacataatctgctgtttcttttctcccccccttcttttatttttcagtacgtagaaaacaggaccaagagcagggagcatggcattgcaatgcgaaagaaactttttaatcctccagaggaatccgaaaaataaattgtattttcactcgatgccttggctgagagaagacctaaagactctgggttgatacctgaaagaatcctgtcttatttggtctccataatcctttgaatggaaagtgacctgtgagagattgaaccatggagaaatatgaaaaccctggattctgagtatttgttgggcagggcgtttagtactgtctcccctttacc

SEQ ID NO: 19254 - DNA, 1048 bp, Homo sapiens
atagctgggattgtaggcggccatcaccatgcccagctaattttttttgtatttttagtagagatggggttttaccgtcttggccaggttggtattgaactcctgacgtcgtgatccacctgccttggcctcccaaagtgctgggattacaggcgtgagccaccatgcctggtgaaaaaggttttaagaacagcattataatgttttaagtccagtcttatcttcctaaaatctaggacttcccattcccaggaaatggtccaaggagtctggattctattttcagtgatgataaatgtccacattttaggtagtgacattcacagtagatatgggttattttctttgtatttcacctctaatgataccagattaatgtggtaccaaaacagtatgatcagtcaccaaaatctggcttcttactcctcctggagatatagaaggaagtattagccccgcttctccttaaagtgaggcaatgtctgtgatttgctccaggctaatgacatgtgaactgaagtcaaatgagtgacttccagaaagaaccatctaagagccatgtttgccatcacactctgcatcacagttggctgtggtttccaacgacgcaggcagcctctgtcagttcatgttcaggagtgaggacaatgtggaacagagtcccagacatcatacaatgaacctgcagcatgagttagaaagaagcctgtgtttttttaaccactggaaaagagatagggctgcttgttactgcagcctatccttgcctgtcttgactaatgctaggtagtcgagactgacggacagtactcctcctaattcaagtgtacccactgcagccttcttcaaaaagagcctggcagcttgagtcctatctggggcaaaaaagacataaaccaaaaataagcagacacaaaatcagaattctatttttttataagtccatttctaacctcattttcattaaaataaagtagccacgttattaccttctttatcaaaacaatatgaagggccaggcacggtggcttacgtttataatcccagc

SEQ ID NO: 19255 - DNA, 1114 bp, Homo sapiens
cagtagttagtgttccatttgttaaagacatacctggtcttgtgtatttggatcatatatttaaggacttatttttattatttttttgagacagagtctccctctgtcgcccaggctggagtgcagtggcgtgatctcggtgcactgcaacctccccttctcgggttcaagcacttcttctgcctcagcttcccagtagctgggatcaagggcaactgccaccacgcccagctaatttttgtggttttggtagagatggggttccactatgttggccaggctggtctagagctcctagcctcaagtgatttgcttgccttcgcttcccaaagtactgggattacaggcatgagccaccgtgcccggcccttaaagatttaaatgtcattttctgatgcttattacaacctaagagttcttaatttattatggtggaatctattctagccataattattttcatttgttatatacaagtattttaattcttaaggctaaaatttaaagttctatgaacaaataatgtatggtttttgtaaagaatacaagattgaggcgctcagaaatttattttacgttttggatgaatttgactttttaaaaagttaatgtggaatataaggttgtcttttggttgcaggttggctgatcaagatgacactgagtaacccttcagaactagatgaacttatgagtgaagaagcatatgagaaatacataaaatctattgaggagtgaaaatggaactcctaaataaactagtatgaaataacgcaagccagcagagttgtcttaaattagtggtggatagaagacttagaatagaaacttttagtattaccgatggggaaaaaaaaactactgttaacactgctaatgaaagaaaatgccctttaactttctaatgattatagataaatataatatgcgtctttttcacaatatcctatgatttttagactaggctctagtgttcagaattcatgaaattatccatggtaaaaactagttataaaaattacataattcaaagataacattgttattcttaagccttatataatattgtaacttgcatgtatccatacctggatttgggatgaaatacttaatg

SEQ ID NO: 19256 - DNA, 1099 bp, Homo sapiens
gataagattccaagaagatttcaagcgtcagaggccaggtgggggtggaagaggttgagaccaagagaggagggcggccagtggtagagcaatgacttgcgccaggctggagccaaccaaggcttggtttgggtggctgtcagctgcctggtgcgagcaggtctgggtgccctccagcctcaggaagtgctcgagagcccacaggccaggccaaaggcatccaagcctctctgaccccacatgaagacccctgacttcagaggccagcttcttcctagcaggttctgagcatatttctgatttcctaacaggtggcactcggagacacatgtgttgaggatgtagcattccaggctgccgtgtcagagaaaatccccacagctctgcaaggcgagggtggccccgagcagctcctccagctggccaaggctgtgtcctccatgctgaaccaagagcatgaaagccagggctcaggacagtcactgagcatagacgtcagacagaaggtacccgtgggaagctggggggctcctttcattcccttcctctggggccccagggtctgcgtgcggccatttgggctgtggatcaaggttcatggatcaggggagaaacctgtggtgtctcccaagcggctgacaccacctccctctctggtcttttgggtgagtgacataaagtgaagaaaatgccttcttccttggtaacctgctttctcggctggccctcatggaggcacaggcctctgggatggggggagtttagaacacatcatcccctgcttttcatgtttcagatgacaaggcagagccccagagcagaaaggggactgtcctcggtcacatgggtagcggtttggagttggaccacagatggcgtcccggctttgtcacttaccattcgcattgtcacaggccagggaccaaacctctctaagtctcagtttccccatatagaagaatactagtctcctcatacaattgtagtaagagttaaataagaattacgatcactgcaactaaaaaactagataagaccgtcaacattcaatcagttttaatctacaaaaatggccgttccattgttacaacctagtatg

SEQ ID NO: 19257 - DNA, 1051 bp, Homo sapiens
ccattaaacagggccagccttccacttctcccacctcctccactcaccaccaccaccaccaagagatgcatttaaaattattactgacgactagtgtttcttccatatggcttaaagatgggtgggggaagttcagggaaaatctgaaagtttattatttcttcccccactcaccggaatgtgtcagcagtatgcctgctttaaatatgagtaactaatactaagatttatgatcttaaatacactttaaattcaccctaagtataattcagtggggctttgccttactatttttttgactcagagcttacttctcttacaccattgtggtatcaagtattacagagagtcccttatcaattttgactagttctctagattatttgacttcagtttctctgccttcaggtaagtttgacatcagttcctttcacaagcgttttctagcctgaaggtcagcactggtgtatttttcagaaattgatgcttcagatgaatgctaagcacaaagcagaagaagttgaagatgaaacagtagagcttgatgtgtcagatgaagagatggctagaaggtaaccgtgctgcgcagcagccttctaatctggacctagcattcattggctctcccaggaatgctcctcttaccccacagtgcacggcagctttcaagggagtcccccagtaggacgatgactgtgatcggccttctcttaatggcctacgggggccacagacctgtctcaggctgccagttgagggcccatttccagagctgctggaaatgtgtattttaaaatgtacatctctatttatttagggtaatgcaaacaccaaaatggcaaggaatttaatcactcttagagaagttcataaattgttaaatcagatggtttcttttaatgatagttttctttttcgtaatcttttttattgcatatttggtctgatattcttgacaaggcttgatccctacctttttatttgaaattaaacgtgtgctgcctgtcctcttgacagatatgagaccttggtggggacaattgggaaaaag

SEQ ID NO: 19258 - DNA, 1075 bp, Homo sapiens
aaacaaattgccctttctctgctgtcacacttccagtggtcagggccctgccgactcgaagcccagctcaagtgaacagatgctgcatgggtgttgagccttgcctccaccccctggggtgtcagtacagttccttctccccaggagagcctctgggatgcagcaggagccatggccctccgttctcctctccctgttgcccctgagaccccgctctcaggcccttcttttctcagtgggtgtcacatggtctcactgtctctgaatgagctccattctgcccccatccatgaggagctgagtgtggcactcaggcagttggtgcaacctggtggacagtggtgctgaccacctggaaccctggggcactgggagtggagccctggtcaggtcatggctgtgtgtgcttatctggctgggctgggccactgagaatgcatgtcttatgagaataggggaatctggaacatgttggatttactttgacctaaactcgtgacttctgaactcccatttcccccacttttggggactaacttaaaaaaaattcctttagagatttcttcttaaaagctaaattccgggccacgtgtggtggctcacacctataatcccagcactttgggaggctgaggcaagaagatcacttgagcccaggagtttgagaccagccagacccatttctgcaaaaaataaaaaattagccgggcatgctgtcatgtgccttcagtctcagctacttgggaggctgaggcaggaggatcacttgagcccaggagctcaaggctgcagtgagctatgattgcgccactgcactgggtgacaagagcgtgactctgtctggaaaaaaaaaaaggaattcctaaacaggcttgttgacttcgcagactgcttttggcttctggatgccctcctccagtacacatcgtatggggtgacaccgcctagcctcagtcactctgggaaccgccagcgccctcccagtggagcaggctcagtcactccagagaggatggaaggtgagtggatgggcaggatgccttggggagggaattggatccagctgaacatgatg

SEQ ID NO: 19259 - DNA, 1367 bp, Homo sapiens
cagaacaattgcagatagaataagtgtgcttgcctccctgattgggttcctaccaccttgagctgttttatttacctctgtgtcccgacacctggcattgtgttgggtaatgggagtttacaagccttgttccttcactcttcatttggaaactatagaaaagggagagggtcctagtatttgtttcttttttcgttatttattttttaaggttaatttttgaataggtaatgcatagctcagaaatgtcagaaggtaacacagtgagacccccacccctgtccccgtccagcaggttctttcctcactggcccgtgtgtcctgtgtgatgatgttcctttcttatacctcctcgtagaatttctttggtgtatatgagaaaatataagtacctggtcttttaaaaacctttaaaaacataatcttaatcattacattgcttctcttcctaccataaacttaattttatattttttaaaaaagcaacagctaaaggtgatccacaaagtaatgaagcttttgtaaggaacataggagcacttgaacatcagaagactaatactgtgaaataactgttactgctgccatttgtccttcagtctgtttaggaatgaagaaggttagatagataagttgaactattccaaaatgcttaacttaatagaagtgccttgggataagtccttttgtaggagaggggcggttgggagcttgggtgttatctaggaaggcattctttgtgtagagagctgtgcatttcacctagagagataggccacctgcagaacacagctgcctcttccttaggttcagctccaaggacttagaacttctacgtgttgtattttactctccagagcattatgcatgctcaggattcatttctggttttaagtaaaaaaaaattaagagaactacttgtaattttaaaagagccttagaaataaaaactgtcctagcactttaaaacttgattgaaacactaagcagactgttataatatttaactaggtatcttacacatcttggtttttggacgccttcaactatgccattttaaagaagatcgacgtgttaaacctcagcatcggcggcccggacttcatggatcatccgtttgttgacaaggtttgtggagtcactgcacacggggtttgggtgacagctcctgctctttcgcagcccaactttgcatcatatctagtgtgttggtggcttttcatccaggtggtgacagctttgtgagaacagatggctaatgacgtgagcttcagtgatttgcatgtcataaattgagtgggttagaggcctcagagtaggtgttgataaggagcacatggtgccttgctgatttttttttttttttt

SEQ ID NO: 19260 - DNA, 1070 bp, Homo sapiens
ctttgggaagctgaggtgggtggatcacctaaggtcaggagttcgagaccaacctggccaatatggtgaaaccctgtctgtactaaaaatacaaaaattagctaggcttagtggtgtgtgcctgtagtcccagctacttgggaggctgaggcaggagaatcgcttgaaccctggaggcggaggttgcagtgagccaagatcacgctactgcactccagcctaggcgacagagcaaggctctgtttccaaaaaaaaaaaaagaaatatgctgctgtaagtggatgttaggactataaaaatactaagtatttacatgggaatttcaaagtaaaagattctagtactgcttgagggttacctctcagtgaaaaatataatccaaaaaaaccacaaaaccacaagatagggctatatttcatgcaaccattttatcaaataatatctctgtatagtcttagactaattttttcaagaagcatagaatttttattttaagcttattgtttaggcatgacaaaggattggtaccttttagtactgtagaaagtaactttcttagatatttgaaattgtgatcgtaagtattaatttgagaatgcataattatctattacaatatatttcagttcctttatctggtgtagtaaagagatgtgccctagtttagaatttttttttttttgagatggaattccgctcttgttgcccaggctggagtgtaatggtgcgatcttggctcactgcaacctccacctctcgggttcaagtgatgctcctgcctcagcctccggagtagctgggactacaggtgcctgccaccacgcccagcaaatttttgtgtttttagtagagatggagtttcaccatgttggtcaggctggtctcgaactcctgatctcaggtgatccacccgccttggcctcccaaagtgctgggatttacaagcgtgagctggcagggcgtggtggctcaagcctgtaatcccagcactttgggaggccaaggcgggcggatcacgaggtcaggagatcgagaccatcctggctaacaccgtgaaaccccgtctctat

SEQ ID NO: 19261 - DNA, 1019 bp, Homo sapiens
tccgtcatacccacttcccccctgctccatgcagtctgagctgtactttcttataccagacttccaactccaaatcatctcaggggaaagcagatttacatttgtggagttcaggcacagctgcatccaggtgttcaaataatgttcatagagctgtgtctctctttcctgtctcgtccacttgcctctccctgcacagttccctagacaggctgtctctaggtagcagcaagatggcttatgatctaaggaaagagccagtgtccttcctgcggcaccagaagtcccagaaaggactttggttggcttggcttgggtctcacacccatctgtgaaccagtcactgtggcaagggcaatggaatattgttggtggccaggtctgggtcacatgattgcttccggggcatgggaacaggatggggtggtctcccaaaggaagaaattctaggtaaataagaaatgtgtccactgcacttggcctccttgggatgggacctgtcctcccctgagtgccaccgagtgatcctcctgctgttctctggtccccaggtgtccctgggcttacctcagcaaccgacagcgccgcttctctatcctcgggggccccatcctgggcacgtcggtggcgagccacttggcagagctgctgcacgaggagctggtgctgcggtgggagcagctgcttctggatgaggcctgcactgggggcgcgctggcctgggttcctggaaggacaccccagttcgggcagctggtctaccctgctggaggcgcccaggacaggctgcgtatcctttcttgcgagacaggagattccagcgggctcgcctctggtagaggaggtgctcttggcatggtccagagaagggcaggaatttggggggcttgcagtgatcatagctcgtgcactgatccttagtgagaggcccagatttccaagaggtcgttctgaccccaggtgacaatccccaattccttgggaaacctggacgcatccagctccagggacctgtccgg

SEQ ID NO: 19262 - DNA, 1031 bp, Homo sapiens
accagggttggctggattcgaggagagcgtgtgacccaagctgagctggtgagatgctctcttggaaatgagactggggctgcagcacatgataccccttctctgggtgtgtcaacaggtgagagcatgtgtagagggggctctttctatcccttttggctgagactccacaacatcggggctgactggccccacattccacactcctgaagtggtggaaaggtatgatgcctggtgcctggtgtccagtttgacatagccaggggtgggctgtagaaagggcaagagtgtttgcaagtgggccactgctgaagctgggtagtggctacacaggtgttcactttatcatcctctctgcttttgtacaggcttgaaattttcctttaaaaaatgtaaaaacaaacatgaagaaactatgacaacccaaatgtccatcagtgaacaaatggatgagccaaatgtggtctatctatacagcagaatacactttagccaaagaaaggaacaaggcactggcacatgccaccatgtggatgagcctggaaaacatgctgctgagtggaagaagccagacatagaaggccactcagagcacgagtccattcataagggatgttcagaatggggaaatctacacaagaaagaaagatgagcgattgcttagggctgggatgtgggcataggtgggaatgtagagtgatagctaaagggcacagggtttctttttgaggcgataagaaaatgttctaggcagggggtggtggctcacgcctgtaatcccagcactttgggaggcccaggtgggcagatcacctgaggtcaggagtttgagaccaacctggacaacgtggtgaaaccccatctctactaaaaatacaaaaattagccaggtgtggtggcatgcacctgtaatcccaggtactcaggaggctgaggcaggagaattgcttgaacctgagaggcggaggttgcagtgaaccgagactgcgccactgcgctccagcctggtgacagagtgagactccatctca

SEQ ID NO: 19263 - DNA, 1072 bp, Homo sapiens
tgcttctatttttctattctcagtctgtcagagagaccagtaagtaccagaattttgacttcccagagcctaggagagtgtatggcatatgacaggtgtttattaatgtgtgttcgtgggaagaacaaattgtgtcgctttcattgtctttcaatacaatgaagatcagttcctctcctgggccccacttcatagaaatatgcattcctgacttcacaaatggaactgcccaagaatccccactcatgttttctccccggagcttcccctgcacccacattctctgcattggttaggaatatcctcataggcgcaacactcctgaatagcagaccttacacttgtaccccgacaggcctccttgttccctgaagctaaccctgggcctggctttggggtttgcagccggatttgtcatcttctgtctgccagtttcactgacttggttattccaaggaattcctgggacttccctttgttaaaaaataaacgttaggaatgagaagaggaactagctactgcctgtgtcttcactctgagtgactgagggaacttcattaaatctcagattcccctaacgatcctgagaatgaaggtgaacccacagtcctgtagaacattctctctgactgttgagcactccgctttgtaccaggtgttctcatcaagtgtgcaagccccttttatgctcatacgaccctcccaacagccctaggatgtgaagctgctattgtccgcatttgcagatgaggagactcaggctcagggaggttgagtccccagggaggctcaggccactggagatgcctgtggacaagggtgcctgtttgtatttggcctggacctgctcccagcatgctggggtttaaacctgggcagttgggagccattaaaaaatgaaaaggggtcaggtgtggtggctcatgcctgtgatcccagcactttgggaggccaagggggggagatcacttgaggccaggagttcgagaccagtctggccaacatgatgaaaccctgtctctaataaaaatacaaaaatgagccggccgtggtggtacgtgcctgtaatccc

SEQ ID NO: 19264 - DNA, 1087 bp, Homo sapiens
ggtctcaagctcttgggctgaagtgatcctcccacctttgcctcccaaagtgctgggattacaggggtgagccaccatacctggccaatacacacatcactttaaaaattcaaaaaatcaggctgggcgcggtggctcacgcctgtaatcccagcactttgggaggctgaggcgggtggaatacaaggtcaggagatcaagattcatcctggctaacacagtgaaaccccatctctactaaaaatacaaaaaattagccaggtgtggtggtgggcgcctgtagtcccagctactcgggaggctgaggcaggagaatggtgtgaaccctagaggccaagcttgcagtgagtcgagatcgcgccactgcacttcagcctgggcgacagagcgagactctgtctcaaaaaaaaaaaaaaaaattccagaatatcaaatgatattttgataatacagagcagtggagggtgggggaacttagcatagtggattgtgaaacaaattttaaagtcatgataataaaaacagtgtggcattgaaataaaacttaatgtggatcaatggaacaaaatagccctcaaagccattttaataaaaatgactatataagatagaacaagcataacacagccaatggaaatgtgttcagaattcattgttgacctaattgccctagtcataagtgaaatatcctcggagccatatcccgggccaaattaagagccattttctttgtttcctcttcatacccagcaccccccttgcccctcctgtctctctacagtgtagagtctcattccaaactgcaaagattgaggcaaaaagagttgatgaatttctggtctacaaagaggatgaatttctggtccctaaataagatccataatttgagcctttttaaatttttatttttaaattttttttggctgggccctggcactgctggcggcacccacatctgtgcaatgggcccacccagactttgagccttgattgtaggaaggctgtaggcgttgcagccagaaaggcctgggtttaaatcccagcatgaccttgaattccctcacaaccttgaaagtgccatgtgact

SEQ ID NO: 19265 - DNA, 1032 bp, Homo sapiens
gagtctcactctgtcgcccaggctggagtgcagtggcgcgatcttggcttactgcaacctccgcccccaggggttcatgccattctcctgcctcagccttccgagtagctgggactacaggtgcctgccaccatgcccggctaatttttttgtatttttagtagagacggggtttcaccgtgttagccaggatggtctcgatctcctgaccttatgatctgcccgcctcggcctcccgaagtgctgggatgattacaggcgtgagccactgcgcctggccgcctgttgagggactttcatagtcatctcgtctgtggccttttgtgcctggctctcaccaggcattgcgtcttcggggtccatcgtgctgtggcatgatcagtgcttcatttggtttaaggctgaataatattccatgctctggccggacccttctcacctatagccatcgttagttgatgggcatctgggcgagttctgcttttcggctgttacaaatcatgctgctctgaacggccgcgtgtaagtttttgtgtggatgggtgtttcattcctcttgggtatatacctaggagtggagttgctgggacatatggtgactctgtgtttaaccttttgtggaactgccaagtattctctaaagtgtccccactgggggaaaaaaaagaaaatggaaaaaaaatcttgtggggaagggaatgatgaaaaaaaaaaaacaaaccccaaaacatcgaagcatccacaccattttacattcccacctgcagtgtgtccacatcttcaacacattattgccattcttttgtgacgccgtatctcactgtctttgctgtgtatctccctaatgaccaacgatgttgagcatcatttcatgggcttgttggccatttgtgtgtcttctttggaagcatgtctgcttgagtcctctggtgacaagtgacagaaaccaccaggagtcactgtaaatgaaactgaggaagggggagtacgcagagccccagggcaaggatgcttctggctgctggcaggctg

SEQ ID NO: 19266 - DNA, 1033 bp, Homo sapiens
ttctactcttttgtccaattctgtttaagaatatttagaggccgggtgcgctgtctcacacctttaatcccagcactttgggaggccgaggcgggcggatcacgaggtcaggagatcgagaccattctggataacatggtgaaaccacgtctctactaaaaatacaaaagataattagctgggtgtggtggtgggcgcctgtagtcccagctactcaggaggctgaggcaggagaatggcgtgaacccgggaggtggagtttgcagtgagccgagactgcgccactgcactccagcctgggcgacagagcaagactccatctcaaaaaaaaaaaaaaaaaaaggaaaatttagaatctatagactgttgtattttcgttgtagaataaccaggaagttcttaaactgttcctctttttgtttcacagaaccaatctcttctcttattttgaagaatatgaattttacctatgccttgttgacattttcttctctgtgcattgtgcgtgttctggactcttacccttcatttctgttttgtgctctttcatgaatcgtgtttggatttaatttttttttttttttgagacagagtcttgctctgtcgcccaggctggagtgcagtggtgccatcttggcttactgcaacctccgcctcgtgggttcaagcagttctctgccacagcctcccgagtagctgggattacaagcgcccaccaccacgtccagctaatttttgtatttttagtagcgacggggtttcaccatcttggccaggctggtcttgaacttctgacctcatgatccacccgcctcagcctcccaaagtgctgggattacaggcgtgagccaccgcgcctggcctggactttctttttttataatggagctacgacaagcacttggaacctctgtgtccgtggcgggggtttccctgtggcccctgacttagggaggtctgacagtgaatctgaccttcttgttgggttttccctacatcgcagagtctttagacctttttcttgggtcatgtt

SEQ ID NO: 19267 - DNA, 1025 bp, Homo sapiens
cgcacatgttttctggacctgaagttgtgacttgcctacaggtggggtttttctcttcacccccgtctccctctttctctataacccttgtgcatttctcttctactccttttctgccaggctcctttgggcctctggcccactcccctggcagatcttatcacacgcccctgtcgtttgcctgtggacttcctttctactttttcttgtctccctcaagcaccctccttcccttacttattcactcaagaaatgtttgtggagtgcgtggtgaacccgggagtgctggggatactatgagtaacattccattgaggtgatggcagaacaagcagccagggagaggctgctaggaagggaggccagcaggctccagatggagtggggctttctaggccatggtggtggggtggagtggggggtggggtgggattttattcgcactgaaaaggcagtgattgcatgagcttagggaggggagtgacatgatctgatttacgtctgtggaagaccactctgggtgctgcatgggggactggactgttgggtgagcagaggcatgagagtagagagaggactggtcagcaggtgatctaagcactccccaggtgagagctcatgggaccttggtctgggcgggtgaggaggtgggagaagtggtcggatttggggtaggtttagaggtgcaccccataggacttgctgatcagctagatgtggagaggtggggaatgagatacatgaagggcggggcctttttttttgggtgtggtgtgccgttgattgagatgggaaagagtggggtcgtgactgagtgggggaggttctgctttgaccctcctgccctggagttgttaagtggccagttggatagacgcccttagggatgcatcgtcagcctgagagttttccagatatctttttttgtttaaacttcgtgaaactgaggttccccattagctcctttgtggagagcatgtagatgaagggaaggccgaggactaagcccgggtgctcccggcgtt

SEQ ID NO: 19268 - DNA, 1050 bp, Homo sapiens
taattttttgtatttttagtagagacagggtttcaccgttttagccgggatggtctcgatctcctgacctcgtgatccgccaaattttgatctcttaagagcacatttcctctctgaaacttatctgcatgggtgtttctgaacccaaactcaaaaggttgcgtgtttgaaggtttccatcccttcccaactcaccgccacgctgtgggagagctgctctgccgtcaggctgaggctgtagtgccgggcctccagtcgtctacattgtgtctgtaacacctgccgctccagattttgctctgaaaagacaggagatggtgatgtattttccgtatgcaggagcccgaaggcccgctttgtgctctcctcttcacaccctgcccagcagagcccaaaacctctctccagtgcagccagcgaaggcctctcctgtggaccacaatgctcccagccctttgaattgtaccgataaatacataaacgtcactaaattaagcccaatacacaggaataaagacaaaggatccaggacctaaaggcaatttgatacagattaggaagaaatttgatggccttaaaatgcagctttcaaaaaaaaaaaaataggctttcagtttaggctgctggaaaaaggccagagtacacctaaagcacagatttaattaataaaataaagcctctgctctaccaaaagataccaggcctagtttcaacaggagagtgacttcacatctttcaggacaaatccctaccttatacacagtgtttcagcaaatgaaaaacagggaaagtgctcacaatctggataccaaagtacaataaaactagagtctaatactaacgaacatacattaaaaatcctaaaagtactaacaaattcaacaaggatggagcaacatcaagaaaaaaaaaatcaaaggatgaaaaactccggaaatgggaaccttcactctttaatgggatgctttaaagtttcacagacaagggccccaccagtgcctctctttggcagcactggagtgacaagacaatcagacaaattcaaaagga

SEQ ID NO: 19269 - DNA, 1048 bp, Homo sapiens
aggcctccaccccccagaccagtgactggcagccctggcctctggtgagggcccttgggagcaagagaggccttcttgatctaaacactgcctccataggcagtaactaggacaaggaggaagactcgcccgttgctttgccttggtgtgatgagcccagtttctgaccgttcctgtgcttgtcacagtaagttcaaaaaggaggggttcagctcagaccttgtggcttttacaaagctttgcgtttaaacaaagcctctgaagttcctattctgtacctgctctcagacaccttagaattatatcaatcacagaaatcattgacttcctgaaaggtttttaaaagcccccgcccatgtgtgcacatgactgtcacacatgggttctacagactaccccctcctcccttgatagcaatgggtaatatttgctattagcttgtccagatgctgggggcaggcagggggagtggaggaggtaagcagtagcgcatggctttctacggcagcttctggtgcaactcaaactaaaaatgaagtgatcgcataggcgccagtggtaagctcttttacttttcttcttctttaatttttaaaaacacttcaatattttaatgtcctgaccagcagcagtacaaacactaaaagcaaggttttttttttttttttgcccaaaaaaaaccaaaacaacaaacaaaacccccaaacaggaaaaacaaacaaaaatcccccaaaccacatattaaaaatggcaggctttttataacaatagttaaagtaataaaaacatacaaaactttgttttttttttaatatatatacacagtacaaggctgaagcacctttgacttttctctcaaaatttacgtctgtatgaaaacccaacccactgtagtaacaatctggtgggtgtgaagctgtgtatacacagagctctgtacatgctccccacggagtaataaaaagctaccttcagtttgtgaattggttttatctttaggtaagaaagagcttttccagggaaaagcctttgggttgctttgtgtgct

SEQ ID NO: 19270 - DNA, 1031 bp, Homo sapiens
tagtcccaattcagtgctttattcctttaagattagaatgtagactaaaatgtggaaagtcccgtcttggtcacttatctgagacaacagattaggaacatgatattttatcatgtcagtctgactctgactatatgaagcaaaaataacttgtttcagtgaggaaccagataatttactattggaaggtatccctctgcagagggacagatggcagctcccttccaggtaatgtaggaagatggtctaaggaccgagccgagggctttcaggtgcatcctgacacacaggtggcataatcgactccagagcagatttgaggtactcagtgtgaagtagctgaacaaaaaacttaagagattgcatgtcaatttttaagcccaattgaaaacagatttaggtgctactgtgttctttgagaataatctgaaagtaagttttcaaagtatgaaactaatagttggatggggaaaccatgactgggtactgtgtcttgggtggtgtgctttcgtttttgagacagttcttacctttttcttagtttattcgtgttgccttactggtttgtattctgattgtcgtattacttcttgagcaagagtagagtactcagatcgccacaagtaggtggaaggatggggagacagtgggcaagaagctcaagggccgggcagaagtggggtttccactgacaggggagaagccaactattgctagcacagtgacactgctcccaccctgggcagacctctcatggtgtgccacctgtcccctgtgctgtcatagaaaatccaaccaagggagtgccccttggatggtaagggatgagctacgtttttaagttatcggatctacttttcccttttactttagccaaggccatttccaaaagcatccagacatctgtgatggaggaggaggcctgagagcggaagtgctaagatgtgactcttaagccttcagaccagaaacctcaagtaggttttcagtggagaaatccagtgagattttgccctgatagtttgtagcag

SEQ ID NO: 19271 - DNA, 1049 bp, Homo sapiens
ccagggcctcagaatgtgaccttcttgggagtagtgtctttgcaggtgtaatgagttaagatgaggtcattttagtagtgtgagctcctagtccaatatgacgggtgtccttatcaaaaggggaaatctgggctgggcgctgtggctcatgcctctgatcccagcactttgggaggccaaggtgggcagatcacctgaggtcaggagtttgagaccagcctggccaacatggtgagaccctgtctctactaaaaatacaaaaattagctgggcatggtggcgcatgcctgtaatcccaactacttgggaggctgagacaggagattttgtttgaacccgagaggcagaggttgcagtgagctgagattgtgccactgcactgcagcctgggtgacagagtgagatccgtctcaaaaaaaaagcaggggggagtctggacagagacaagacgcagggagaatacaatgtgaaggcaagaggtagagatggggtgaggcttctacgagcctaggaacgccagattgtcagcaaccaccagaagccaggggaggggcttggaacagtctcccttgcagcctccagaggaaccagccttgccaacacctggatctggaacttctggcctccagatctataagacaatgaatgtccattgttccagccgcctggttgacggtgctttgttgtggcaaccccaggagacgaaggcactggggctcctctggaggctgattgattgctcactttggagctcaggctgcaggctgctgtctctccgggcatgacccggagcccccctccatcaatcacgcctttggacacccagtgtaaccacagcccccggcaaacaaagactctcctatcaggcaagatattccaagggcttagagagcacctctcagaaaccgcggacagagaccagacctctttttaggcaagattaaattatttactgcacaaagggcccagagaggaggtgcagtgcacgcagggtcacacagctggtggcctgattccaaagccagtgtgcctactgctttcagtttttc

SEQ ID NO: 19272 - DNA, 1032 bp, Homo sapiens
tcagccctggatacgattactctcactccctggggcctcaacactacacgctgcccagggcaccaggaggagggacccgccaggacccaggccctctgcccctctgctctagccccgcagcctggcccagggactcagacccacccacctgtttccaggtgaccctcctgtaccatgcccccagctccaggcctccctgggttcaaatcccagctctgccccttaacgatttggccttggagcagggccagcttcacaggcatgtgacctctgcagctgcacagggccccatgctcagtttaatgctcttaatacatattgaacaatgggcctcacatgttcgttttccactgagccccacaaattacacagtggttcctgccttagggcaagtgaccttgtctctctaggcctcagcttcctctggggtaaactgaggcatcctgcatccagcccacaggttttattgagtgctgggttctggagaggacttgaagaatcataaagacaggactctgctcaaggacatactatctagagccacaccatccagtagaaatagattttgacgtttctagcagtcccatgaataaggtacaaagaaacgggtacgattacttttaatatgttttatttaattcagtatattccaaacatcattttaatgagtggggtccagttcactggtctgggaggttcagtcagctgatctgggggggttcagttgtctaggggatttaggtttgtggtttgggggattttgttgtctggtcttggggggttgtctcgtatgggggagttggttagttggctgatctatggggtttaagttgtctggtctgggagttacttggctgggctggaggctttacttggctggtcttgggggcttggttggctggtctaagagggtttacctgtcttgtatgggggttaattggctaatctgggggttcagttggctggactggggttacttggctggtcttgggggtttagttggctggtctgggggtttagttgtgtggtctg

SEQ ID NO: 19273 - DNA, 1033 bp, Homo sapiens
agaccctgcgttttctgttttaatcccctgaccaactctccaaccaaatactgtcagccccattttaaagatgaggaaacagggccaggcacagtggctcacgcctgtggctgcaatactttgggatgccaaagcaggaggagtgcttgaggccaggagttcgagaccagcctgggcaacacagtgagtccccccagctactaaaaattttttaatgagctgggtgtggtgcatacctgtagtcccagctacttaggaggctgagacgggaggtttccttgagcccaagaagttgaggctacagtgagctatgatcacgccactgcattccagcctgggcaacagagggagaccctgtctcttaaaaaaataataataaattaaaaaataaaaatgaggaaacagaagcttgtaaaggcaaagtcactgacacaaggttacatggctggaaaatggcaaggccaggcctggaaccctgagccgtggtactgaattgctcttacctgcagtggaagccaggctaggcctctgggcctgctaagtataatcccccatcattaaaaagattagtaagtgatgatggggcccaggcacagtggctcacacctgtgatcccagtgctttgggagggtgaggcacgagcatcacctgaggccaggagtttgagaccaacctgagcaacatagtgagactcctttctctaaaaaaaaataaaataaaaaaaaaaaaaaaaaaaaaatcaaagcctcccaatcatctgaatggaccactccccttggctaagggcattccagagttaacctgcaaagctagttcaggccatgatgagaagtggggtcagacatgcctcattatactctcttgccttttgaaattgagaccccgcagaccagcattaacatcagtgcagaccttcagactaataggacagtccctttaagtctgataagaaacatgtacaatctgttctctctcaagccaaactccttatcgtaacccagacattcctttctatggattccaggtctttaga

SEQ ID NO: 19274 - DNA, 1029 bp, Homo sapiens
tccacctccccctcccccgctgtgcccagttgtttgaggaggacacctcaggtaggtaatgccgtgctatccctgggctctatcggggtcattttatttcatcctcacagcaatgcacaagtgaagaaaccagccggagaaggtggcttctcagaggccacacagcttgggagctcaggagctaggatcatgccaacttctgacttaagtatggttttgcttctgcctggaaaaccttcccctctcttcagccagacctagctgaaaatttgctcttcttattctagaaatattgcctcattcacagtgtcttgcagcatgatttggagccaagtagacctggattcaaattctaggtgacttactgattaacctccttgggcctctgtggccctgtctgtaaaatggagctgagctcatgcctcagagagtagtcatgaggacagaatgaaattgcgcagtgtgtttgtccttgtgcttggtttacagtagtggctggtgctgttactagtgctgtgatgactttttctattactgttctaacgtagtgtttataacttttatgaatttcctaaactttaggtcattccatcaagttttattatatgattcattgttggccagtgttttgcttcatagttagcatttgatatgagtaggtttcggtgcccggcagagagccctggcctgaggcagacactcaggaggaagcttttagatacacattgtaagatggcacctacacgctggcccgacatggtgctgttgagggtgagcagagtggtctgccttcagggtgcctgcagtttcagttggcagctggctcttcctaggaacaaggagttcctgactagcaggaaccacagcgtggcagtcttcattcaggatcaagtggatcagtattggagattcagtgcctaagacagagaaatgcaaagttggcagctgtttcaaatactttgacagttcattaactacacattttttttttggcggggcggtggcagagcagacagagtctcactctgt

SEQ ID NO: 19275 - DNA, 1047 bp, Homo sapiens
ttaagcatttctaaagccccagttctttatagtataagagaaggtaggtgaaggtcatcttccctctgactctctgcagcactgtaccaatccagtacctgtagacaaagggtcttctcgctgggactgaggaagatagtcattccttatgttcaaagtcctgcccttcctgaccattttttcctgagtcctaccctttcttctggggtgtagggtatgaggattaagattctgtcatgtcttgtcccagcatgtggcagtgagatctgtggtttttacgacttgatatttaagggagagtcattcatcttttcccaatttttgttcctctttcagattgattcatggtgcaaagatcatagctacgtgattgctggttattatcaagctaatgagcgagtaaaggatgccaggtacgtggatgcagaaccctctgtgggcgaggaagtgagcacgtgttgggcagaccccgtctctcgtgtgcttttcggccagatacgaaacctgtgagacctacaccccttccctctgtgcttatttgtagtatttgaggcgaactgtggtgtggataattccaaacaacagaaattccaaacatttctattaactttggaattctgttttgtgtcttctttattttgcatgaagggaattcatacaatgaaagcgacagttggcttccgacttctgtccctgctcagctctgccttgcttccccttcccagactaggggtggtgttgggcagagcactgggaaggaatgttgctctatttgccggtaaatagaccagcctgtaggtttggggtcagtactctgatgaaaatgtggtatttgctgccccctttatactggctccttctttcttttcctttatccagatccttccccaactggggctctcgctaataacaaagctgagaatttttctatatgtctgcgtcatcttggtcccaacagaaaaacagatgacacactcaggtggtgataatctgaggagggcttaataagcaggctgttgacaaggcctgggccgtagataacgcaca

SEQ ID NO: 19276 - DNA, 1046 bp, Homo sapiens
tctctgggggcgatcgcctcacccacagacccgtgaaactcagggtgacttggccacatccaaaccacaagatgcatagccgctgctgccccatctcccagtcaccgtaccctgaaaacccaggactccctgaacccctagctacaccaaggatctctgccaggctggagatggtaccagagacctgggcctgaagctggaacgtggtcctgaacctctgggcagttcgtccagctccattgatcttctgatccttggagacagtcgtgcgatgtctctccctgtgacagccgtgtgtcaggtagtctgtagtgggctgagagccatttggctgcctcagctctgtgccgtagcaaaccgaaaatggctgaagccctggacccgctagtgtcgagcagccctggccactgaccagtgcctgcccttgtcgggagtgaaatgcagagtcccagccagctcccagggctgagtggtgtcctatgagtcactgacaacagaagaacggaacttcctgttgagacccgtggtcacctgctggacccgagtgagcacctggacagcagcagcaggtgaagcctctgtggggagacccgggtctgccactgccgccgccaccctggaagctctgttctgcccaagctgcacctggaccgtggagacccaccacaccattgtagtgtttccctagagctggcctgagctgggggcaggaatgatatatgttaagaataccttggagacagagaggaatggtaggacatggctacagactccagaacctcaactgtgccgaaggcaaggccagcctgagtgggagactgagggctcaggagaagccactcgggcacccacaagcctgtggtccccgtcaccagacccacaaaccagagggccttttggcctttgcccagtggaaggactgtcagtcacacacatcttctcacccgtcctgtgctcctcaccatcagcacatggctcctgattaccacggggttggcgaggacaccatagaccaaggcccgtgcatctgactttcctgggtcaac

SEQ ID NO: 19277 - DNA, 1048 bp, Homo sapiens
gggttcttatgtccacacagcagtggcctgcgggacatggccactcacggctccgggagctatgcggccgcagctcccactagccagtgtcctaaaatagacgctcacaggccctggttggttccaaagtgtagggtccagaaggtatttgtgtataaaagaaaccctctcatgcctgtgtgcgcttgatttatttgctctaattcatgatccttcactttctgaaaggcaggcgctggatgagattcctgggggctgacacattcccctccccgacctcggacggctggggcaggatcccttttgtgctccaagttgccgggaagacaggccttggccactttcctctcgcattccctggctttggtgttaaataagatgaaaaagcactaatttgtaacacatccctgtgggctgttgtcgcatttgctcgctgatctgcccaaatcagacattagcggcgcacgcagggtcttcttgggagctgctcctggcctcccatataattctgaatatactcaaagacggttcactgactgcgctctcctgcatttattcttccagctgaaattttcctgacttttttccctctcattttattaggttaataaaacttggttttcgagcatttggctgccccaggagggccatcggccccatgtccaattcatcaggcgctaatgagtggcctcgcaggccccggccctccagccccgaagctctccgtggctcgtaaaggggaggcccacgggctgtgctgtatattttgtctgttggtttcccaaattctctcgccagctcgaccgtcactttttgggatttatttgaggccgacagcaccgtcagggagctcctccgcagccggaccctcctccctggcccgggctccacacaccccacacactcagagccgtaaaataaagtctgcaataaaacgaaatagaaatgtgtcgatgctgcattttagaacattccagcaaaaggctctgggaaatgccttcgtttacattaaagagggaagctccgtgggagcaggggtaacacagtc

SEQ ID NO: 19278 - DNA, 1100 bp, Homo sapiens
cgagactctgtctcaaaaaacaaacaaacaaaaaaaccccaaaaaacaaaaaaaccgacaaatacaatttacatatatttatggtggaaaacatgttttgaaatttgtgtacatggcgaaatggctaaatcaagctaagtaacatatattacctcacatactcatttttttttttttttggtgagaacacaatctactcttgtagcaattttcatgtatatgatacattgttgttaactatagttaccatgttacttacaatagctctcttgaacttattctttctctcttttttttttttctttttgagacagagtctcactctgtcgcccaggctggagtgcagtggcgcgatctcggctcactgcaagctccacctcccaggttcacgccattcttctgcctcagcctcccgagtagctgggactacaggcgcctgccaccatgccgggctaattttttgtatttttagtagagatggggtttcaccgtggtctcgatctcctgactttgtgatctgcctgcctcggcctcccaaagtgctgggattacaggcgtgagccaccgcgcccgaccttgaacttattctttctatgtaactgaaattttgtatctttgaccaagattttcccaatctctttcccccaaccccagcccctggtaaccaccattccactctgtacttctatgagttcaactttttcagattccacagataagcgagatcatgcagaacttgtctttctatgcaatattatgtttatattttacttaacgtaatgacctccaggtttattgatgttgttgcaaatgatagcctgaatagtattctattgtgtatatacaaccctactttttctttgtctatccatccatgatgagcacttaggttgatcctgtatcttggctattatgaatagtgttgcaatagacatgagattgcggatgtctcttcaacatgccaatttcatttcttttggatgtattccctgtggtaggattcctggatcatatgatggttctatttttaattgtttgaggaatgtccacactgttttccgtagtggctatactaatttacattcccaccaacagtgtat

SEQ ID NO: 19279 - DNA, 1048 bp, Homo sapiens
ctcctcctgctgtaacctcctcctcatcctgttgcccgaaccatgtgcctcgttgaacccgcagctgagaggtgggaccaccctgtctttccgctggagaagctgcagggtcacagtgccaagggtgggctttagggagggtgaggaactgaggcaagagtgtaatttgcaataattcacatacatgtgattgcatgtacattcttttttgaaaaatgcaaatggtagtgtagtgaactcacggtgctgcatcttcctcactttacagcctgtctcagagtttattccgtgtcagtccggacagctctgttccattattcccaaggctgcctataccctgttgcccgatgtctgtcatttattgtctcttactgaaaggtattcgggctgtccattcactcctgacaatggtgcaacaaatatttctgtgcataggacactttgcagatgtgaaagtatcctcatgggacacattcctgcaagtggaattgccgcatcaaaggctgtctattttagaacctgataaactttgttaagatgccagcagagccctcttcatagctgagagcactgcggcacagggatgctaagtgtcatgcccaagggccccagctggagaccaccagaccaggacagagccaggtctcccaataccaacctgtgtgctccgccagggcacaggtgcagatggtgggtagggaggccaggtgagccacggaggtcccgtgtctcccaacagtgggcatgttgtagagggtagaccacagtcccatatctggagtggttgggtgtgcttgtgggtgggaacagctctccagggcctgccctgatactaagacccagccaggggatcttctgggggatggctccatcagggagtcattggggacaggcatggctccatccccttctgaatcttctcctcccatcctctctgttagagtcaaaagacggttcaatttcctatcccccaaaccgccaagatgtgcccctgcctatgccaccgctttgggggccgcctcccgatgcctagggaccaggcagtgat

SEQ ID NO: 19280 - DNA, 1031 bp, Homo sapiens
aagtaaatccgtttttgaaggcttgttgtgtgttttgtgatttctttgggaatatgagttggacggaggcgagagccttaagccatgcgagctgtcggcctgggaacccagacttcccagcttcttgaggaagtgtcagatttcccgcgttgacagaagggagcattgaagggatgccttggagcccagacagtggttgtccctgtgtccttccctttgacctggcatcagaggtgtctcgagtccctacccagggacccagaggagttcgggccccagtagattttcttagatttaagccaaagtgagttgcattatctgcaacgaggacagatatgggagggaatgtgctgagagccaggcagatgaactgaggatctcattgatctttcttttgtgtttactaaactcatatgttcttgtaaacagttctttagcatagacagtgaaagtaccccctgttctcatcccagcctccccgtgagtcactgctgctaattaatgctgttagcttggaattgtagaaacaggatgttttccatggtaatgcactcaaagtacaccctcgattggcagaaattggcaagtgtgattttccaagtgttggcagtgatgcaggggaacaggaacgcaggtggggcagctgttttggggacagctggtactagctcatggcactaaggacacgggcccagggactggcatctgcatcctgaggtgtccaccctcgggcaacgcgagagcccaggcatgggccacgcagggatgttcattgctacactgtgacaactgtcacaggccggaaggaggcaggtggactacggtggagccacccatgctgtcacctggcagacgggcacacagccttgttccgttgcaaaacaagtgagagatggtattggtgtaacatgtaaaaatgcaaatacttaatttttatcaattcatgtgtggggaaaagctgaagatacgcgtgggaatggtgtggtcacttctaggggtgtcggagggtagaacttcaactgttttgcttt

SEQ ID NO: 19281 - DNA, 1032 bp, Homo sapiens
acagcggtaacattgaaatctttgttcattacattcagttacttttgtttctatctgttatttaaagagcctttcctcaagttcagccactcaggttttaattttgatgaggtccaatttgtgaaactttttgttttcttttatggttattttctgaatcctaaaaaagtcctaaaaattgagtcctaaaatactcagtttgcaaagataggctccattttttttttttttaatagaagtttggtagcatcacatcaggttctgcatttgtgtggaggcctgtgccccatcttgaatgatcttgtgtgtggcataaggcggggtcgtggttccttcttctccatatgaaaacccaactgacggagcaccttgctgaaaaccttcctttcctgaggggcaggtgtgggcacctccgctgcaatcaggcagctgggtccacatgagggtttctgggctcctggctctgttggtgcccgtgtgaggcctgaggcttgcacgccgtgtcatgacgggagcttatactgggcaagtcctgagagcagcctggtcctcccgtttgctcttcgttttcctgatggcctgtctgtcccagttctttgcttttccgtaggaatttcagacttggcgagtccagtctgtgtagtgcctggtgggcttgtggttggcgtgaggtcggatctgtagatcaatctggagagaagtgctcttggaatgaggccaagatgggtcccagaccccacacgtggcatctctgtgtacccaggcatttttacttcctttcagcggtggttagtggttttcagaatagatcttaaacgtattttgtaacatttattcccaagtcttatgtttttttgaggattttgtacatagaatttttttaaattttatttttatattttgtgctgctaggacataaaaatccaggtggcttctgtgttgaccatgtggtcctgccaggtgctcagtgcagctcctgcagtgatttctgtttcttgtcggagtttggagcagtgatgtatgaaagcgatt

SEQ ID NO: 19282 - DNA, 1059 bp, Homo sapiens
tagtaaagacaggggtccctgactcccctggtcataaggacaaagtaattgataaataaatgtttaaactctggccatgcacagtggctcacgcctgtaatcccagcactttgggaggccagatcacttgtggtcaggagttggagaccagcctggccaacatggtgaattaaaaccccatctctactaaaaatacaaaaattggcccagcatggtgttgtgtgcctgtaggcccagctactcaggagggtgaggcaggagaatcgcttgaacctgggaggcggaggttgcagtgacccgagattgcaccagtgcacttcagcctgggcaacagagcgagactccatccatccatccatcaatcaatcaataaatgtatgtatgtatgttttacctgtagccactatactacagcctgggcaacagagcgagactccatctctaaataaatgaatgaatggtatgttttaactatagccactacactacagcctgggcaacatagtgggacatgagactccatttctaaataaataaatgtatgtatgtatgtatgttttacctgtagccactacattacagcctgggcaacatagtgagaccctatctctaaaaaaaaaaagataactcagtaatgactgcacattgaaaagataataattagttatgctgagttaaataaaatattaccatgaattttacctgtttaattgtaccctttttgatgtggctactagaaaatgtgaatgctatttgtggctcacgttgtgtttccatcagggcagccccggcctagatctggaatcagcagcttcctgggctctgtgggagatcttcaagtgactcactcttctcattcctgttttcttctccaaagaactaaaatgcgtctcctcgctgggtgtatttattaggggacccactctgggcactcctcactggagcctactggatttaggatgtagtttcccaggtcctcccgctaagggggacccgtagaccacaactgagaggagacacaggccttctaggagccttgaggttcagaagtggaggcag

SEQ ID NO: 19283 - DNA, 1021 bp, Homo sapiens
ttctttgtaaagcaaataatttttcgaatgctctttgaaagcgcgtggaaatcttcatgataggccgtgaggtccccagaaggactgctgttgggtctaaaacggccatgatgatttcagacagcctctggttctagaaggtgcttagccagtgtggacagggcctccctggactgccgtgtcctgattcgagcccagagaggcacgtgtgagggattcagtgctgccccctggcttaacactggggccctcaggctgtggcgcatcggcattccggaccctctggggtggggctcgctgtcccctctgcccctccctgccggcgcggctgtgggtgtggggggctgtcacccctcagccatgctgcatcttccgttccctcctgttttatctccgctatttttttgtctcctttagtcaaatcccagtggatgtctgatgtagttgtaatagggttcttcttgctgtctgttttggaaacgggggactgggaaggtgggtcccaactctgacaactcatggtgccaccttgccaaagtcacttgatctctgcagacttccagttgcttctaagggttgcactagatctgtgattctcagacctgcctgtaacatcacgttcacctggagagtttttagaaacacgcctgctgactcagcaggcctgcaggcaaggtgggttgacaggcgctctgccatgcgggcccgggtgggcctgtgcctcccttcataaagctggctgcatctccagaggcacggggcactcaccagcgctcacctgccctcacccagtgaaaggacgcatgttagagcagcccgcctgacgtgtgcagagcctgactcccagaggaagctcccaaagaaaaagatggtgaacttttcctgagtcatttcaccccggtcagatttgataaacttgtaaaattaggtcccattttgcaggggcaggaagggagtagaaacggtcaggatgggtggcctagatttccagcaccagaatcttgcccagtggctctggaca

SEQ ID NO: 19284 - DNA, 1132 bp, Homo sapiens
gccatgatggacgtgctgcccgcgtccgcaccccaccagcctgtgcaggtcctctctgggctttcggagagcagctccatgtcacccacagtctcctttggtccccggaccaaagtcgtgcatgcatccacgctggacagggtgctgaagacagcacagcaaccggccctggtcgtggagaccagcacggccgccacggggacgcccagcacagtcctccacgccgcccgtccgcccatcaaactgctgctgtcgtcatctgttcctgctgattctgccatttctgggcaaacttcctgtcctaataatgtgcaaataagtgtgccccctgcaataataaacccccggactgctctgtacacagccaacaccaaagttgccttttctgcaatgagcagtatgccagtgggccccctgcagggtggcttctgtgcaaacagcaacactgcctctcccagcagccacccctccacgtcctttgccaacatggccacgttgcccagctgcccagcccccagctccagcccggcgctgtcctccgtccctgaaagcagtttctatagcagcagtggcggtggcggctccacaggaaacattcctgcctcgaatccgaaccaccaccaccaccaccaccatcagcagcccccggcacccccgcagcccgccccacccccgccaggctgcattgtgtgcacgtcctgtggctgcagcggcagctgcggctcgagtggcctgactgtcagctacgccaactacttccagcacccgttctccggtccgtccgtgttcaccttccccttcttgcccttcagtcccatgtgcagcagcggctacgtcagcgcccagcagtacggcggcggctccaccttccccgtcgtgcacgccccttacagcagcagcgggaccccagaccctgtcctgagtgggcagtccacgtttgccgtgccacccatgcagaacttcatggcagggacagcaggggtgtaccagacccaaggactggtgggcagtagcaatggttccagtcacaaaaagagcgggaacctatcttgttacaactgcggggccactggtcaccgcgcccaggactgcaaacagccgtccatggacttcaaccggccaggtaagcgcg

SEQ ID NO: 19285 - DNA, 1050 bp, Homo sapiens
tttgttttttctgtgaaagtttttgagccttactgaagaagatctgaataaatttgagtctcttaccatgggggcaaagaagaagctcaagacccagctggagctggaaaagtgagtgtgaagtgggttttgaaacctgtgtttatttccatttctcgtgtgccgaatggagtgctgaggcttccagtgctaaatactagtgattggattagttcctgttgcttatccagtccttagccatgcttttatttatttttatttatttattttttgagacggattatttttatttatttattttttgagacggagtctcgctctgtcgtgcccaggctggagtgcagtggtgcaatctcggctcactgcaacctctgcctctcaggttcaagcgattctcctgcctcagtctcccaagtacctgggattacaggcacccgccaccacgcctggctaattttttgtatttttagaagagaccgggttttaccatattggccaagctgatctcaaactctggacctcaggcgatctgcccgcctgggcctcccaaagtgctgggattacaggcctgagccaccgcgcctggcctagtcatgcttttaaagttctacaaatgtgtcttaggtttgacaggaaaggacctttatagtaaatttgaccaatcagaatgagttccttgccttaatgctctggggggaatttccctgtggtgtggagtagacccatctcgaagtcgccctgtatcaaagccgccctgtggtgtggagtagacccgtcttgaagccgcatgtgaggcagcaccagtaggcagtgctcacttgttcctgtgcttgattatttcacagggagaagtcagagagacggtgcctgaacccctcggccccgccgctggtcaccagcagtggtgtggctcgagtgccccccaccagccacgtcgggcccgtgcagtcggggcggggcagccatgcagcaggtgaacaagggtgtgtcgggcagatgggttactcatacacagagagggcccgtgtgtcgggcagatgggttactcat

SEQ ID NO: 19286 - DNA, 1029 bp, Homo sapiens
gtacgtctgggtggttcctgtgcccgtttccacaccagccgatcccctcagttctgcccaggctgctgtggagcctgtccatgtactcaagtcctcatttctgctgccaggggtttcttttgtgtttttgcccctaggttttccatttgacgtgttcatgaagtttccatctctctgctgaaacgtgttcatgaaagttcccgcttgtttgtgcatattgtcgttttcactaggtcctttagtacatccatcatagctgtttaaagtccctgtcactaggtcccacatctgagttatttctgaatctggttctaatgattgctttatctcttgacaatagttttttccccctttattccttttttttttggtatgtcttgcaaatgttgactgaatgtcagacatgtttagatgaccgtggagccggaggagagcgagatttatgcctggaaagggtcaacacctcttctgccagggcccttagtggggtcctggaggccatctgggcaggatgaagctggcactgggctctcttgctgcctctgttaccctcagggcctctccagtgaaggcagctgctgcctgagtctggagggtcttctccgccgttttgcttcactcccagctttcagccgtccctgcaggcctgtggcacacagcagggcactctctaccctctcggccccttttcgggggtagaccgctgctgcttgtttgcgacctggtgctgggcttgtgggggcaagggccttcactcttgcagcccagcctgatcctgggcaggcctgtgtgcctgggcttcggggtggcacttcctcagtgccttgccctccccggcaggagctgacctcctccagcaccagagcgcttttgcttttccccttcttccaggagcagcgggtcttcttgtgactggtggcagaggaagggaagtattgtccctgccccactcctaaaaaccgggcctttggtttgggctctggggccaggagcaatttttgtccctcctgcaacgtcttaagggctttt

SEQ ID NO: 19287 - DNA, 1055 bp, Homo sapiens
cgaggtaatggaagtcagaaggacagaatagcaaatgttaggatcagaagcagctggagctttcatccgcagctgatgggaggattaaatggtacaaccattaagaaaacaatttggcatttcttatgaagtgataaatgtatcttatattcctgcagttctcgtcctagggaatttatcccaaagaaatgaaagcgtacatccacaacagcacttggagatgaaggcttatagcagcttatgcataatagccccaaactggaaacaacccagatgtccatgagtaggagaatggataaacaagctgtggtatatttatacaatggaagagaactcagtcattttcaaagctaatacatgtaaccacatcggaatctcaaaaatacaatgttgaatgaaagcagggcccgtgtatggtcctgtttatatgacgttcaagactttttagagaattgaaaagcactgcgtcttgattcaaggattagtgatcacatgggcatataaatgtacccaaactcattgaattgtacacttcagatctctgcattttgctctatgtaaatttcgcctcaaattaaaaaaaaaacacctgacccccttgccgtttcacacaggccctttgcagtctggcaggtgtccaggctgcctgcttagttccccctggcccaaaatatgtgtgggtggaggggtgaggtctgtttcttccgccatctttaagaatatgtatgtgtcttataaggctctgccccaaaagagctttgccggagtgtcttttcctagtctattggcagaattctgtcttcctgttgagtcttagatgacgttatatgtattttgaatgtgaaaattctcatgtggtatttgtgttactaaattgtcttctcatatagaatgttggtttgctggccgggcacggtggctcatacctgtaatcccagcacttcttgaggccaaggcaggtggatcacctgaggtcaggagttcaagaccagcgtggccaacatggtgaaacccccgtctctactaaaaatacaaaaaaactagccaggcatggt

SEQ ID NO: 19288 - DNA, 1033 bp, Homo sapiens
tgcctcaatttttcagttcagtgcagcctcgacctctggggcttaagcaatcctcctgcctcagcctccccagtaactgagaccacaggcacacaccaccacacccaggtaattttcatattttttgtagagacagggttttgccatgttggccaggctggtcttgaactcctgggctcaagccatccacccacctcggcctcccaaagtgctgggatcacaagcgtgagcccccatgcccagcttatcctgggtcattttttaaactctcccctctaccataaataatattccctttactgtgattttttaagcataattttgtaaattgttgaagtggtttctcattgttgggaatgtagattaaaccacttaataaagataccttgaaagcaaattaaagaaagacatttggcggaaaactactggttttcttctgtaggtctctgttgacctaaagagaaagggattggggtttgctctcttggtggcgttgctgaattggtcggggtctgtcgctgcgcctctgcacctgtgtgatttgctgagtgctcctctctcctccctcgtgatcatggatggagggcctaggagcccaggaaccatggtgcccttccccctgtgctgtgcccctcaccctctcttccctgcatctatccctttctacttctcttcagagttttagagataggaacattaaagtgtgcccaattgtttttatgaggttttgttctagagaaaggatgtaaggaagcttgtaaagacagaccacaacaggtttaagagatgcctggggtgtgttggtcagctacagctgtgtaacagccaaccagcagagctcaggagcacccaagatgagcgccttcctcacggatgtgtgggttggctggtgtcagctgggccatgctccgtgactgttcaggccgtagtggctggggtggctctgactcaggcgtccctcatcctccttgaactggggaccaagggcacatgggagccatgaggattcgtaaggccgagcttgggccggcac

SEQ ID NO: 19289 - DNA, 1029 bp, Homo sapiens
gcgtttcagccagatccggaggcattttgcacattaaagtttggaagcagaggcctcctctctttaaactgtaacagtaagaagggtgattgcataagagccagaggcgggctgcccaagtccaggtgcccctagatgtgtggccactgtggaacctcagtcagctttcctggaagagccccaggggcgggtgtgccccgtgactaccagtagcttgcttcagagtcatatttcattcctgggttagcgctttgtagatgtggtggaacaatctgattgtctgttacataatgtagattgcagaagtttttgtttgaaatagaagtgctttccgtttgattctgaatttcattaaaatttggtgatatcatgatgtattttacagatccttattaacggcctgcttcatgccaggcccagttcgaagtgcaaaggaacagcagtgaacaaagcaaaccagaaacacagctgccttgctgagcatcgagaagtcttgctaagaaggacgtttgagtatagatgggaaggcacaggggcgcttccaggcagaggggacagccagggcgaaggccccaggcagatgtgactgctgtgcccagggcagcagtgcatggagtgaagagctgggggaggactggatgccaggttgcaggggccaggcagagggtttttgtgggttgtgggaagaggctggctgtggagaggaagagagcagcttatcgttgccttcctagcagtagcagaaggcagcctttggagccggtcagtcttccctctcgtgcacatcaggccagatgacgagtcctgcgggtgagcctgagtcagagagcacttgagtggaacataggtcacgtggagcaaactaacttcaccaaaaataaccccaaaacagcatttctgggaaacacaagtgaagacagctttcaatgtaaacaaaggaacaaagttacgataaaggcttggttggaaaaagtgaacatgtggaaaactaagaagaaattccttgggaaaatatacggaggaaaacag

SEQ ID NO: 19290 - DNA, 1056 bp, Homo sapiens
tgctgtattcatgtcatagtggtacatctgtcctccagaggtactcacaccgtgaacagaaatggcagacattttattaccaatcatatttgctccaggagagcttgcctgacagtaaactgtgcccagtttctcttgcttaattaccccaggggtgcagagttggatgaaatctttttctgttttcgcttggggcagtgttacattattgaggcttgataaaaaccagatctccattatccttaattttgggtttagtgtccggtaaaacgagaggcttgcagtcctcattcgagtttccttttaaaaggaagaatagtcttctcccgccagaggagaaagcagacagttttcatctatcaacaggtctgatctggtggaggaccacttttgaggccaggagttagaggtcagatggggcaacatagcgggaccctgtctctttagtaaaaaaaaaaaaaaaaacaatttttttttttcatgaaaaacacgtgacctccaaagtgactgtgaggcttttccagggcttgtttttatgtggcatgctgatgtgaatactgttcaggtccgtatttgtaaagaaacaaggtgaggagggcagtggcaggctgcccctctggtgggcacggttagatgtgactgtcccagtaggggctcctagccatggagagtggaagccatcacaacttcactttctccagcctctaactgggaattgagcattccctgcctttatggaagcaggcaggaatccacagtcatacgaacagtacctgtgacttggtcacagatgcagtcacagatactttgattgcacagtcgtagaaagcgtcttcaagtctccttcatgctcagcgctcctgtgaagtgagctgagacccacagactctgttcgaggagcccatttgtcttctaatacttagatgacggttttcaatataattggctttgtttgcagtcctgtgtattttatgcatttaaaatatgtttcttagaagggctcagtaggtgtcatcgaactgccagagaggtcgctggcacaaagaaaaggttaaa

SEQ ID NO: 19291 - DNA, 1065 bp, Homo sapiens
tcaggaaaccagcatggccccagcctagcctaactccactttgcttctgattagaaatctgtgttagaatgcaagtcagttgatgtcattgtttaaagtctgcaagaaacaacttcatagctgctccattttattttctaattaaatagttcagaagcattggtaccttaactctttttagaaataacactgatgtgcccaactctgaccttgacctaggtctagcctcattaacattccagtctcctggcctgggtctgcccgctgtaaccctttttggtctccctggcctgggtctgcctccataaccccctctggtgtcactggccccctcttagcctctgacatcagttcccttgtgtcattggaatggtcctcgtcaaatgcatgctgcaggagcttcatttctggcttacgggtcttggcatgatgtgccatggcctttgtgatctgtcccctgcctgtccgtacacacctctctctgtaggcgcagttcctcctactcactgtgctttctctctcctgtgcccttggagaggctgttctcttagactggacaccggttacctgtgatacccctatacgcattattggttcatagataccagtcattttgttgttgcatccttatcctagaccttatgtgctgtgttctgtttctgcccaagactttgactttggcagagactgactttttaaatcactagagcctagcagttcctaccacctactaggggctcacctgcggagcatccgttaaacccaggggcaggaggtgttgggtggatgaaaagccgccgtagtacaagtgctttttccctttggctttttcttttcagtggccacagtagtcactcctgtaaccaactcatactttttatctttttaatttttgcctttatccaatgactacctctcatatattatgtagctggagattctagtgaagtttaacttgaattttaacatctgtattctactttctcatttttatttatttattttttttgagacagtgtctcgctctgtcgcccaggctggagtgcagtggcgcaatctcggctc

SEQ ID NO: 19292 - DNA, 1032 bp, Homo sapiens
gagacttgccctggtgtggtgtggttttatcttaggagttgataaaggttgaatattgtttcaagtaaacgatttcattgatatttggtgagttgtttgtctcctttgctcatctctgttgagttgttggtcttttctttttttaatttttactttatttgagacagagtctcactctgtcacccaggctggagtgcactggtgtgatctcggttcactgcaacctttgcctcccgggttcaagcaattcttctgcctcagccacccaagtagctgggattacaggcacgtgccaccaagcctggctaatttttttttttttttttttttttttttttttttttttggtatttttagtagagatggggtttcaccatgttgaccaggctggtctcaagctcctgacttcaagagatccacccacctcggcctcccaaagtgctgggattccaggtgtgagccactgcgcctggctgggttcttagtttttagaaactccgtaagtttcaaggcattgtctttagtaggaattgcatgtatttgttttctgggtttttaatcttgtcttctgactttgccatgcagttgttttcttttctttttttttaaatgctatatttatcagtcctttttggtatggcttctgggttttgtgtcataatgcataatgtataatgcgtttctcatcatacatattatacatatgcatgtattgtgcatacataatacacatgacgccccgtacattctgaagacagtcccctgcagtgtcgcctggtatggaacttgtgtcattctctttttatatcaaacggatccatctggaattgatttggtataaggtacaaagttagttttatattttccagatgacagcccatttgtcccagtgccatctgttaaatagtctctgctctccctcccagatctgagctgtctctcgtttactcccacatctatttgggttcacttctggaccctgcgttctgcttcatggatgtctccatccatatgacctcatgttggccaggt

SEQ ID NO: 19293 - DNA, 1050 bp, Homo sapiens
agcttcgcttcctcggctcgtgcctggaggacctggcccgcaaggactaccactcgctgcgcgactcggagatcaaggccaacaacccggccgacctgggcagcctcaccaacctgacggacgaggtggtgcgcagcaagctgctggtgtcgctggcgctgctgggctcggagcagcgcgaggcggcgggcgtgctctaccgcacgctcacgcacatcgactccatcatccacaactacgggctgcagcttaacgagggccgcacgggcgatgagttcctgctgctgttcaccatggcctccaaccacccggccttcagcttccaccagaagcaggtgctgcgccaggagctcacgcagatccagagcagcctgaacggcggcgggggccacggcggcaagggcgcgcccgggccgggcggcgcgctgcccacttgcccagcctgccacaaggtgcgtgcccgccccgagctctgccctgtaccccaagtctgcatccccaactctgcactccaagcctccagcctgcaccgcgaccccccgacccacgcctccagcctgcactgagagctcccacccaggtctccaacctgcaccacgagcccccagcccgtatcccaagccccatcctaagcctctatgtcgcaccccaaatgtgtgccccacctctccaagcctccaccgtacatcccaagcctccgccgtacatcccaagcctccgccgtacatcccaagcccccatcctaagcccgcactcctcaccctaagtctgcactttaagccccaagaccgcaccgcggccctgagcccacaccctcagtcccctctgcgtgccccaaagcctccacacctccgcctcgcgccccttgggcaggagcggctgcaggggccctgggtccgaggatccgcgggagcggtgcgggagacgtccgcggtcagagctcacagtcccaggtgccctcctttcacttagccggctgcaaacgcgataaggcctttgtccccttaatggggcccttgggtgacagataacacacattgcggcgccttg

SEQ ID NO: 19294 - DNA, 2092 bp, Homo sapiens
tcgggaggctgatacaagagaatcgcttgaactggggaggcggatgttgaagtgagccgcatgcccagctaatttttgtatttttagtagagacggggtttcactatgttcgccaggctggtctcgaactcctgacctcatgatccacatgcctcggcctcccaaagtgctgtgattataggcttgagcccccgcgcctagccttatgttcattcttaaaatttattttaaaacaaataattgtcagaatgcacacataagtttgtcagagcattaattcattacctactatgtgtaggacagtgagattgtacagccccttcctcctttgaacttacaggttataaatcaaatcatgcttcatgtttgttttaacttgcaaccattttaaaatcagaacttttttcaaagctgttgttatcttgtttaaaattattcaaataccaacttgggagttttccttaaactctattctgcatttatagagaaaatattctgtatttatcttacgtgcaaagtagaatctttgtactaaaaatctgcgacgtgaaatctgaaaaaaacagtggtctgtagcagtcttttaaagattacacgcttccacatttccacattcctcagattctatctatattaagagccatcgtcctgcgaaggatgtggtcagtctgagttgcagtcagcaaggtcaggttatcttttctttcttctttttttgagacagattctcactcgatcgcccaggctggagtgcagtggcgtgatcagctcactgtagcctccacctcgtaggttcaaactattctcgtgcctcagcctcctgagtagctgggattataggcacccgcccccatgcttggctaattttttgtgtttttagtagagacaaggtttcaccatattgtccaggctgtttttgaactcctcgcctcaagtgatctacctgcctgagactcccaaagtgctgggattgcaggtgtgagccactgtgcccaggctgtttatcttaagaccagatgtggcagctggtgctgggtaaacgccctgtgacttttcctgcttcacacaaaacaggaacaaacaggagaaaaccgggcacttgagacttgggctagagctgcttgctcttccatgctttccttaaaaaatgagtttggctctcctttttgagtagctggagagcagccccttacgctttcacgataattgtgtcaaagttccacattaggacaggactttctgggtgcgcctccgagtctccccatgcctccagcaaagctgccacttccctgttcagcccagtctgcgtgctgggtccggcaggcactgagcagggcaaggctgcggggcctccttgccgcgctgtgatttcgggcacagagggtcggcttctgtggtcttcagtttccctggagcgcccagtcccctcgctcacccctccagtccactgtggggccttaccacccttgctgccaggctgctcacacctccgttctgatcatccctttggaggcgccattcactgctgcccttacggttgcacacctaataacctaatggaattgtctctgattgtgttaactgtgtaagaaaacgcagtatggctttcagattaaattcctctgcctctgtgggccagcattatttccggttttcaaatgcaaactcatacgtgcttgtggtcctttcatatcaattcaaacttgaattaaacaggtgaaaatgttgccctgtctccaggtagattgcgtcaagattgagtttgaggagacctgactggcgtctctggctcgttgcagggaaagcggccacgtttctgtgttgattgttgtgttggtgtaagagcagaggagaaaaatggtttgagtttttccccaaacagtaggaaatttacctttaatttaaatcagttcagtttttaatgtcagggcttttcccaatgttacggaccctgacagctgctgttcttctaaccagggattacatctactacaacgacgtgtatgcctttaatctggacaccttcacatggagcaagctgtccccgtcagggacggggcccacacccagatcaggctgccagatgtccgtc

SEQ ID NO: 19295 - DNA, 1045 bp, Homo sapiens
ttcacctgtagaagctgggataggatttgctttgcacctgccttttcaccgatagaagctgggataggatttgctttgcacctgccttttcaccgataaaagctgggataggatttgctttgcacctgccttttcaccgatagaagctgggataggatttgctttgcacctgccttttcacctatagaagctgggataggatttgctttgcacctgccttttcacctatagaagctgggataggatttgctttgcacctgccttttcacctatagaagctgggataggatttgctttgcacctgccttttcacctgtagaagctgggataggatttgctttgcacctgccttttcacctgtagaagctgggataggatttgctttgcacctgcctttttacctgtagaagctgggataggatttgctttggacctgccttttcacgtgctgtttttcgagcattgtcccgtgacatgcagtattttaaagaatctaattcttaaacatctttgtcaagttgatagaataaaatggtatctctgctttatttgaaattctttgattactagggaggttgattgtagttatttatgtgttatttgtgtgtgattgtattatttgtgtgtatttttaaggttttaaatttgctttttgtatttttttattgccatgtatttttatatcagttttattgagacataattacaataaaattcaataaaatgcatgccttttagatgtacacttagatgagtgttaagaaatatacacacctgaccagaggcggtggctcatgcctgtaatcccagcactttgggaggccgaggcaggcaaatcacctgaggtcaggagttcgagaccagcctgaccaatatgatgaaaccccatctctactaaaaatacaaaaattagctggtcgtggtggcaggcacctgtaatcccaggtacttgggaggctgagacaggagattcacttgaaccctggaggcggaggttgcagggagccgagattgcaccactgcactccggcctgggcaagaatga

SEQ ID NO: 19296 - DNA, 1539 bp, Homo sapiens
ggactacaggcgcccgccaccatgcctggctaatttttttgtatttttagtagagacggggtttcagcactggtttagttttgaatgaaggtctgatcctcagattgttcttataaagtaatccatcaggaaattcgtctgggggggagggggcgtcgggcaattcgtcaggagggggaggggcgtcaggcaattcgtcaggagggggaggggcgtcaggcaattcgtcaggagtgggagggggcatcgggaaatttgccaggagggggaggggcgttcttttcttgctccgcatgtgtggggttttcttctcaattgactctcatgtgtagtgtgtccgctggatggtgctgtcccctgcggtgccaagcccggaggggatggagctgctgtggagtctgtggaactgtgaagtgaggccagcttgcaggactccaaagaaacttagtgagctgagatcctgctgggtatccctatgtgaagaggccaccccaaaggctcatgccaactccgggttggattaatagaattggtgtctagaaaaaggaactgattgcttctggttgacattccatggaggggtgtggttgtcattttcagtgatacattgaaaggggtgctgatatgatggagggtgctagaggagagaagctggtgggatcccgcgtttgagcagtgagaaccgaattcgctccagcttggagcaagcgaagactcctggcagtcaccctgatgatgtggtgaattatctctgaacttcagtaaacttggattagatcactcaagcttccttttacgtttgagattccatgtcttgatgtcttgtgttttttttttcttgagacggagtcttgctctatcgcccagactggagtgcagtggcgcagtgtcggctcactgcagctcccacctcctgggttcaagcaattctcctgcctcagcctcctgagtagctggcattacaggtgcctccacgacgccaagctaattactgtatttttagtatagacagggtttcaccatgttggtgaggctggtcttgagctcctgacctcgtgatccgcccaccttggcctctcaaagtgctggggatgacaggcgtgagccaccgcgcccggccctcttgtgttttttagggtacctgcccatttctgggcttttacataaaaccctgtaagtgggttttggggacagctgtgtaacatgcacaaaaaataaatggaggaagaatgcattatctaaataggcactgacttgcgtgattgaagctgtaaccatcctttgcagcccagagttgctgtgacctgtgtggagaggtgggagggccaggcagagagtgggtgtgaaagccacggaggatcccagggagtggattcctaagtaggaggcgaggcaggtcatcagtgaggatcccagggagtggattcctaagtaggaggagaggcaggtcatcagtgaggatcccagggagtggattcctaagtaggaggcgaggcaggtcatcagtgaggatcccagggagtggattcctaagtagga

SEQ ID NO: 19297 - DNA, 1037 bp, Homo sapiens
gactgctttcctgggtatcctgacttgttagtcttggttttcttatctttttttttttttttttttttttgtcgcccaggctggagtacaaaggcgccatctcgggtcactgcagcctctgcctcctgagttcaagcaattctcctgcctcagcctcccaagtagctgggattacaggtgcctaccaccatgcctggctaatgttatatttttaataagaggcagggttttaccatgttggccaggctggtctcgaactcctgacctcaggtgatccacccacctcggcctcccaaagtactgggattacaggcgtgagccaccgcgcccggccgatttccttgtctgtaaaatgagaataaaggtaatatctgcaccacgagtttgctgtgaggataaatgcacataaaaggactgtgcctggcatagaataaacacaaatggtggtttttctctgagtagtaatcattaagatgagacaagggtgtggtttataagttgcctgaattctggagacggctactaatcatgccacataacgtgattaagtgccctgtctttacactatcatttgttatttgatggacttgatactcggaaaagcagggcgaagtttccaaggcatgtgtttgaaatggtaggggaggtgcatgcacacggctctccctggctgtgctgtaactgcttttgaaagacaggggctctctagtctgaggatgagccactagactctcagggatccggcaggaattgctcctttgctcagcagatgtctctaggccgccggtgcagcagtggtcctgctgtcgggctgcctcacgatgtttctgttcacgacggaccatacatactggtggtccgctaagatgatcagactgtgtttttacttcccttctgtgtgttgagacatctacttgccattgtgttacagtggcttagagtgtctgggacagtactgtgctgtccaggtttgtagcctataagcattgggctctcccgtcagtgcaggcgtgtggcaggctgtgccttccagaagt

SEQ ID NO: 19298 - DNA, 1003 bp, Homo sapiens
gaggtgctggtgtgtgggtggatgaggtgctggtgtgtgggtggatgaggtgctggtgtgtggatggatgaggtgctggtgtgtggatgaggtgctggtgtgtggatggatgaggtgctggtgtgtgggtggatgaggtgctggtgtgtggatggatgaggtgctggtgtgtggatggatgaggtgctggtgtgtggatgaggtgctggtgtgtggatggatgaggtgctggtgtgtgggtggatgaggtgctggtgtgtggatggatgaggtgctggtgtgtggatggatgagatgctggtgtgtggatggatgagatgctggtgtgtggatggatgaggtgctgtgtggatggatgaggtgctggtgtgtggatggatgaggtgctggtgtgtggatgaggtgctggtgtgtggatggaccacgttttggttttctgttgggcacttgggttgtttccacttttctgctcttgcagtgttgctgtgaaagttcacggacagtgcatacatctttgtatgcaccggagcacttgggagatgatcggtactgtttggttggatgaagatatagatgtgtgtgtgtgtgtgtgtgtgcacgtccgtgtgtgcgcaggcatacgcactgttttctcctgatgtgaggaagggtcctcatttggtcctcagctaaagctgcatctgagtgaaagtcagtttcctggagaaggctcctcggcaggatgattccgttactttacgattctgtagtgaaggaccgcaacgagttagctaacagtgactggcctctgagagtctcaggtgtgaagtacaggtcaccataggaatggacacaccctgctctgccctctgggtggtgggttgggttgcatggtctgaagctctctgactccacagtaacctggggtctatcgacagcaaacagcagtagctcatgaaggcagaacctgccctgctggaaggccggggtgtgtatggattccccgttgtgctgtttgctgacg

SEQ ID NO: 19299 - DNA, 1062 bp, Homo sapiens
acagccagcgtttctccaggcacttgccaccttctcttcctgtcccctggagaaggtgcagggggttgggggagattcgtctccctccattggtttctgggccagtgccctctgagggatgatctgtgactccactttaggaccccgcccgataggtgtttcataacagctttctctgagatgtgattcatataccctcaaatcaccctttaaaatgtgtcattcattggtctttagcatgttcacagaattgcgcagccaacaccatgatctaaagttggtgcattttcatcccccagaaagaaaaaccgtctttttagcagacaccccaccgtccccggtccctgctgtctgtgtctgtggatctgcctcttctgggtatttcataaaagcggaatcaaaacacgtggcctctgtgacgggctcttctttccgcgtggtgctgtcaggacgtgtcctgctgttgcgagtatcagcacttcactcccgtggccagatgaggtgctggtgtgtggatgtatgacgtgctggtgtgtggatggatgacgtgctggtgtgtggatggatgacgtgctggtgtgtggatggatgacgtgctggtgtgtggatggatgaggtgctggtgtgtggatggatgagatgctggtgtgtggatgaggtgctggtgtgtggatggatgacgtgctggtgtgtggatggatgagatgctgttgtgtggatgaggtgctggtgtgtggatggatgagatgctggtgtgtggatgaggtgctggtgtgtggatggatgacgtgctggtgtgtggatggatgagatgctggtgtgtggatggatgagatgctgttgtgtggatggatgaggtgctggtgtgtggatggatgaggtgctggtgtgtggatggatgagatgctggtgtgtggatggatgaggtgctggtgtgtggatgagatgctggtgtgtggatggatgaggtgctggtgtgtggatgagatgctggtgtgtggatggatgaggtgctggtgtgtggatggatgaggtgctggtgtgtggatggatgaggtgctg

SEQ ID NO: 19300 - DNA, 1047 bp, Homo sapiens
cagagaagaggatcttgagtagtggttctcaagtcttcgtactccacgtagaccctagggagcccaggagactgctccttcctgccctcccactccggacatcagtcccattcagagcaggttgatgtgtggttgaggaatctgtgttttaccctaacctctccttgtaccctctccacgatccctatcctgacagctgtggaccatagacggggtccagttgtgatctgatccatcagcctctgtgactggtggaaggcatgcttattttgaatattgttcaactgatgtgaagttttttagttgctgcttaaaagaagtaagaatattcatgtaaaatacctcttagatccttaataatgaaagtagtgtaggttttgcttttgtaagttactaatgattgcagaatgaaagcattctcttaacggtggtttggcaggtcaggctctgagtgctatgtggccggatcgtcaggggctagtgtagctggggatggtacaggggactgaagggtgcaggcggcctgttgatttcatgggctgggctgcggtgtgtggcatcctggtgcagtgctgctgctgcctgtaattgggcttgggggttcacacactatgtggccgctgctgagagaggactactctggctgtttttcctctgtcatttttttttttaaattgatctaaaaggaaaggtcaggagattcagccacaacaaagacggtttttgccctttctggggaagattgctgtgtcaggcctcgtgcagagcacgtgggaatccctgtggggtgggcttatgtcttttgagaagtccaggaagagctcatcaggaaacggaataggcgttgctaccatgacgcagccctgcactgcgcattcattttttagtgaatattttttacttctgtgggggagttggtttttcagccgaggatgtgaagttggcgggaattaaatattggtagaggcgcagggagtctggattcagtatctggagtagtcagtctcttccttggcttttaagggttttcttgtaggaaggcagaat

SEQ ID NO: 19301 - DNA, 1033 bp, Homo sapiens
gaatgttgctgatggggtttctgatgcatgtttaccacgcacgggtgtctcccattagtcaagagctacatgtttgtctctccgtgtagagagccagatggcatgtttgcatataaattatttaagagaagaagtctagtcgaatgacagactgaagtagagttgttagtgtccttctatgtgtggcctggctcgattgctgcggccatgacccaccattacgcacaccatctctctgccattaaagcagcagagcggaagtgcccttgcttctgggatagaggccgccgcacacaggccttctccacatcctggggcttcagccggagggcagcggcgctccctggagcccgggcttggttatgtcacaatgagccagttccgggtgttttctggagtttggtccccagctgtattgcagtgagccttgtcagggtgttgagtcctgttcgctggctgcactgctctgcctggctctaggccgggaatgttaaccagtcaaatgaagagtctgctgtgggtggggagggtgcagacagattccctgccctgggcccacctgctggaggaggacatgaccatagccttacagtgggacccggaaggtgctgtggtgtggggtgggttactgtgttcccaggcttttccgtcccttttctcatgcttgctttgagaaaggttcgtaattttagtaggcgcagcaattgggaaattactttcatgctaaaaatggatttctttgtgtatatcttgaagctcacgtatttccactcagcacacagttgtccttttgctttattccttttggagcccgcttgttactgatttgcttgtttatctttggcaaatcgattgattttttaatagcattttgtcagctttggtatctcttgttcacaattgacaggtgaggagagtgaagtctctgtgatagaatgcggctaacccagcacccaacccagcaagtcccgccaggctggtgttggctccggtgcctctgtggtgactctgtggtgactctgagctgtctgtg

SEQ ID NO: 19302 - DNA, 1050 bp, Homo sapiens
gtgcgacctcagctcactgcaacttctgcctcccaggctcaagcgattctcctgcctcagcctcccaagtagctgggtttacaggcgcatgccaccacgtctggctaatttttatatttttagtacagacagggtttcaccatgttggtcaggctggtctcaaactcctgacctcatgatctacctccctcggcctcccaaagcactggaattagaggcgtgagccaccacgcccagccagttcatatttctatgcatctatttcacgctaactggagcgtgcatgtatgtgttctttctatagtgttttttaccgttgatgtattattgtaggattattctgtggcattgaatagtcttcccgagatgatagtttaaaactctatttactgtgtggcatggttgtgccacctaacttcctctagactcaaaacatttgttaggtttcggccttgagccagtcatcatgtctgctgtaaaggtgtaaattggtcagtttctccctatggaactactgggcttttagaatgataggaaacctggcctgtccctttacaggtaagtcctctgtgctgagatgacagatgcaaagaacaactggaagtgggtggggtggagagggacacgccaccccctgtgtgctgctaccacctgcgcccgctgtctggcccaggaaggaaccgcatcggtgcagaggggcggcactgtggccgtttctatgtgcgggcgggcggaacaccgactcagaggtgccgggagggagcctgctgaggaccactgtctgccccacccgaggcgcacttgaccttagacgggttggcactctcatttaccagccctctctgcgccctgtgtggaaccattcttcgtcctgctagatcctcactcttaccttgaaacgagaggaaataaaacaagaggcttttatgaaagaaccaactctgcaatgaccacggctgagctgggaaatggggcttcacctgctgccaggttgctcaggtcgctttttctctcttaattatgccactaggtgcgttacagtcaggcgaa

SEQ ID NO: 19303 - DNA, 1028 bp, Homo sapiens
tgattggaggaaagctgagcgggctgtggctccgcggcgggtcctgggaataagtctcacgtgtgcctgcttgcttgccctaggaagacctggaagcgctcatagcccatttccagacactcgatgccaagaggactcagactgtggaacttccgtgccccccaccctcaccaaggtgagcaagtagcatttttcatattgtatgtttccttttcttctatacattgaaaaactgctttaaatagcaccaggtttcgtaaatgaccaggcacttgggacattttcattattaaaacctgttcttggtcactttctgctgaagaactggaatgaggctgtaagctttactgtcatggaacctgggagcagggcctacagcacagctgctgcctctgggctccggtgccaactttgaaagctcctccactggtcgtgacgtggggatgaaagttttgccccagtgagcttttctttggttcttaaggtattttaaaagtgcgtactgtaggcagaaagctgaaaatcactgtggccttttgatgtgtttgtaatgctttcaaattctcatgtgaaaagtttgttaaacataaattgagtataagccattttaaatggatttgaaaattacgtaaaaacgttccgagtctgtaggatttcatacacgtgtgggatgagctggaatgagaaatggtttatttccctcagtaggagattaaccttgcaggatttacccttttaataaagctgctgcaggccctagtggaagccggggttcagcccatcgggagtggagggtcacgattgtgctgcgtttgcattaatgaggcgcatgtgatggctctggtgcccgagtcccacccaccggcctcagaggcagggttatcatcacctgcccagaggtgggaggagcacggtgatcagcccctgagcagagtgagtggtgttggagccactcccaaaggccagtgtccttcctggttttcacttcatgtccattaggattttagttttctttttccctttagttt

SEQ ID NO: 19304 - DNA, 1409 bp, Homo sapiens
gctgtgaaaactctggtacgaatctcatccctcaactgagggccagggacccaggtgtgcctgtgctcctgcccaggagcagcttttggtctccttgggccctttttcccttccctcctttgtttacttatatatatattttttttaaacttaaattttgggtcaacttgacaccactaagatgattttttaaggagctgggggaaggcaggagccttcctttctcctgccccaagggcccagaccctgggcaaacagagctactgagacttggaacctcattgctaccacagacttgcactgaagccggacagctgcccagacacatgggcttgtgacattcgtgaaaaccaaccctgtgggcttatgtctctgccttagggtttgcagagtggaaactcagccgtagggtggcactgggagggggtgggggatctgggcaaggtgggtgattcctcccaggaggtgcttgaggccccgatggactcctgaccataatcctagccccgagacaccatcctgagccagggaacagccccagggttggggggtgccggcatctcccctagctcaccaggcctggcctctgggcagtgtggcctcttggctatttctgtgtccagttttggaggctgagttctggttcatgcagacaaagccctgtccttcagtcttctagaaacagagacaagaaaggcagacacaccgcggccaggcacccatgtgggcgcccaccctgggctccacacagcagtgtcccctgccccagaggtcgcagctaccctcagcctccaatgcattggcctctgtaccgcccggcagccccttctggccggtgctgggttcccactcccggcctaggcacctccccgctctccctgtcacgctcatgtcctgtcctggtcctgatgcccgttgtctaggagacagagccaagcactgctcacgtctctgccgcctgcgtttggaggcccctgggctctcacccagtccccacccgcctgcagagagggaactagggcaccccttgtttctgttgttcccgtgaatttttttcgctatgggaggcagccgaggcctggccaatgcggcccactttcctgagctgtcgctgcctccatggcagcagccagggacccccagaacaagaagaccccgcaggatccctcctgagctcggggggctctgccttctcaggccccgggcttcccttctccccagccagaggtggagccaagtggtccagcgtcactccagtgctcagctgtggctggaggagctggcctgtggcacagccctgagtgtcccaagccgggagccaacgaagccggacacggcttcactgaccagcggctgctcaagccgcaagctctcagcaagtgcccagtggagcctgccgcccccgcctg

SEQ ID NO: 19305 - DNA, 1058 bp, Homo sapiens
gaaggattgcttgagaccagaagattgagactgcagtgagccgagatggtgccactgcactccagcctgggtgacaaagtgagaccatctcaaaaaaaaaaaaaaaaaaaaggcagcagcaagcccaaataatacagaaataaaggaagcatgaactttggccctcgcctccccactcctgcctggaggtgacacagctgtggtgtcctagatgccctgtggccgccgcttgaccccccgggctggagtgagcagtggctcccaagttgctgtccttgccgagttggttgggggaactgagaggcccacagccagcggctggaggggcctggttcccactgtggccagagaggcccagacaagccaggcacaggccctgccactccccagcctgcgtgtcccctgtccacgtgctgagttgtggggcggtggctgactctgccactcttgtctgtccacaggctcttcttcgtggggtcccgggaaggccacctgccctccatcctctccatgatccacccacagctcctcacccccgtgccgtccctcgtgttcacggtaagcctgctgcacggccctgtgccctacatccctgggggttgtccgggggctcccagagggaggctgccacagcttgcagctctgtctggggtgtggactgggtgacagctcaaatgtggcctcctgccgagctccgctgaatgccagagagcgctggaggggctttagattttattccaaaaataatatatggtggctgccacaaacgattcagaccatcggaaatgcgggaggcagaagctgacccggggtgctgctctgccagccgcctggctcactgcacctccgtgggcgcccactctgttcgtttctcagcggggtgcatcacacacagtttccttccgcttctcctgcatctttccgtgccagcccgcgtgactgcctttgttccctctggctgtgtcacacatcactccaaaatgtagtgttctaaaaggaaaagcacttattatctcacagtttccgtaagtcaggaattcagggagctggtgcctgaa

SEQ ID NO: 19306 - DNA, 1016 bp, Homo sapiens
gcattcccccacttgtaggacagatgctccccccagcagaagtaagtgggcgagacacagtagggctatgcagatgtgaagggtctgcacattccagaacattccatcagagagcagatgggagagaggccagaggggctgtgccgaggtgctgtgcaaagtgccctgtcctgagctgctctgagctgcccccgctccaggcctgcagagtcaagctccgcctgctgaccacctggtgaccagaatacatcacacgcaggcagtgggccctggagctccttctcaggagatcaaggcctcagcagggcagggtggcgggcagccctcagggaacccaccagcacccccagtgtaggctgaagatcaaaggccccagcacacctggcatctgggacagacagagctggaggcagagccgcaggcatccagcacgccacggggaagcaggtgcaaaacaggaactgggtccacccatcaggaagggaccccaccgtgggctctgccgtaggaaatctggtgccacctttgaagtgcgcactttgtttggggtaattgccaaggtcttatgggaacctcccttcacgggtcccctttgaaatttgctcacctcgtcactctgcggtgttccctggaccaccaaggtggttccccttcttgggcccccatggtgacctgtggtccaaggccacatgttgggacacagcagccccagggcccgtccctgcctggccctgtgagacgggctggtgactttccagcaggaaggatactgtcacacacggttctctaatgaactaacagtccacagcctgaccaagatttccacttgtgcctccagctgtatatgcacctggcaggtaggcaggaggggacccggctcctttgttccggtggtgtctttggtcttctttccaagttctccttcctgaagcgcagtggtctgtgagactgatgtctgggcaatatattccgggctcgaacacaccaggcccatttcacagaggaggcaacagcca

SEQ ID NO: 19307 - DNA, 1060 bp, Homo sapiens
gttagctgttgaaagcgtcctcccaccgtgctccccccagcaattcccttctgagctttgggatacagtgcagtgtctgcagaattcctgtctcctgtttggcttcaacagatttattttgttaccagatgaatgccttgcttttagaagatacattgtgttgacccctttctcccaaagcagttgtccaactttataccccccagtggacgcaaagcccttgggcagctgccccctcccctcgctggcacctggcagcagcgcccccagatacttcaaggcagagactccggcctcaattttgcaacgactggcaagtggccctttccgggtctggagaatgcagcgaaaatctggcagagcaggcctggcccacgcacctgttcctgcctgtcccgcaccctgggtgccctgctccattggggctgaaaaggctcctccttgctgcccttggcccccaggtgggccctgtgctatggaaaggcactggccctagggtcctgtaggccttggctgacctgtttcctcctcgtcagggaagtttgtaatcaccccttcccagttggccatccgcagaaccatcttctgtcccgtgtgccgcatctatgccgggtcccaatgagaacatggccccgcatccagagctcatggggggacctgagagccataggcacgtgaatgggagagtcgcagtggggaataagcggggccctggtgcagaccagaaaagcccttctgaggggttgggcctttcctgagatgcgggctgggaggggcagctggctgagtgacaggggcgactctgcaggggcctgagtggtcgggagcccttgcctcctccgcgtcttgggggagtcatggctgcccctaggctggggcatggggacacgcaggcttaggtgtcacatgaggttctacagttagtcccagccttttcgaaagggagacagtactcatgagggttcagatctgacccaccgtcccatgagtccactcgcaggctgttgcctaaggagagggtggctgggccttcgcctgcagggcggagggtgggagcgag

SEQ ID NO: 19308 - DNA, 1077 bp, Homo sapiens
aagcgactctcctgcctcagcctcccgagtagctgggactacaggtgcccaccatgcccagctaattttttgtatttttagcagagacggggcttcaccatgttggccaggcttgtcttgaactcctgacctcaggtgatccacccgcctctgcctcccaaagtgctgggattacaggcttgagccaccacacctggcctaaaatagctttccaagcagtccttttggtcccagtaggtaaagcttcaaggcaggccctagagtgccaaccctctctgacccagaggtgagggttaatgttaatagggtccctttcagcgaaagttagggccacacttctcatgtccctaagccatttgtacttgttttttttctctgacccacctgtgtgtgtggtgagtatgtgtgtatgtgttgcttttttttttggaaagtgattttcagtaacagaaagggatgtactctctgcaagagtgaatctattcttgcccctgtgtgtaaggcaagaaagagaagctgtgttctctgaacaggcagaccctgctgagagagggaggtgtgttggggttcaatcattctggtgggaaagatattagagatagttatagaaatagacacaaatcttggaaggccgagaagttggcataacttcggtaattagctctggctgaaggcggcctgatccctttacctttaattaaacaaataaaaatagtgataaaagaaaggcagcgtagtttacctagctagcttgtttactcgcataatcttaagaccgtgggtgtttaagtgctttttacttgggaagtccacaatgtctgttacattctaatggtgttgactcaagcttttgttagttaatcatactgaataaatgcacgtctgactagctgatcagggccaagtagcaactgtttacaggactcagcagggagcctataagcggctgggaccctcagctggactggcagagcagaatatctgtgtgtctgtactttattcatctgtcaccgggtcaggggtctgcaaggagtgctgtcgcagaggtgggctttgctgaggctggtagaactccaa

SEQ ID NO: 19309 - DNA, 1007 bp, Homo sapiens
gcaccccgcagctcggggggctccgggcggccccaggactcaccagcttcccccgcagcatcatggggctgtacgtgtccatcgtgctggtcatcggcaagttcgtgcgcggattcttcagcgagatctcgcactccattatgttcgaggagctgccgtgcgtggaccgcatcctcaagctctgccaggacatcttcctggtgcgggagactcgggagctggagctggaggaggagttgtacgccaagctcatcttcctctaccgctcaccggagaccatgatcaagtggactcgtgagaaggagtaggagctgctgctggcgcccgagagggaaggagccggcctgctgggcagcgtggccacaaggggcggcactcctcaggccgggggagccactgccccgtccaaggccgccagctgtgatgcatcctcccggcctgcctgagccctgatgctgctgtcagagaaggacactgcgtccccacggcctgcgtggcgctgccgtcccccacgtgtactgtagagttttttttttaattaaaaaatgttttatttatacaaatggacaatcagaggccagtcccccgtccttgccttccggctccagtgtggtgtaccaggtggccactgcctgctgtcccggcaagcacgtcctcacgctcagctctggcccgcctcgtcgtcactgtcctcaatcagacagtcccggatctcctgcaagccccaggccctagagagaaagctgcagtgggcaccagccccgaggccccttacccacgcgccacggcagtgtgggccccagtacctctgtgtgcggagctgggcctcagccaggatgtacggcggcagggggtccagtgagggctgcaacagaggccggtgtcgaggggccaagaaacctgccagcaccccctcaagccacccacgaggtgacggccttcccgcgtccccaagcccggcccaggacaggtgggcacgtactcaccaagtccttcatgttcacgcg

SEQ ID NO: 19310 - DNA, 1034 bp, Homo sapiens
tggactcttagttctactccactggcctgtgtctgcccaccattactaccgctgtgccatactgaggtcaggctggggcttttctgggctgctgggtgagctggagaatgcggttgtgtgacccgcaggaagggcagagctgagcgtatgacctgtgtcgttcccctccagaaatacccgcagcccaaagggcagaagaagaagaagatcgtcaagtacggcatgggtggcctcatcatcctcttcctcatcgccatcatctggttcccactgctcttcatgtcgctggtgcgctccgtggttggggttgtcaaccagcccatcgatgtcaccgtcaccctgaagctgggcggctatgaggtgagcatgtgtgggtccgcctgtccattcccatcccctgggggttctggccaaggtggtgcaccacccccagccgctcctccacgctcatcttcgtggccccgtgtccccgtgcctgccccagccgctgttcaccatgagcgcccagcagccgtccatcatccccttcacggcccaggcctatgaggagctgtcccggcagtttgacccccagccggtaagtggcctctgccctgtgaaagctggtgtggggaggcggctgcagtcactgagggtgtcacttgtacccagctggccatgcagttcatcagccagtacagccctgaggacatcgtcacggcgcagattgagggcagctccggggcgctgtggcgcatcagtccccccagccgtgcccagatgaagcgggagctctacaacggcacggccgacatcaccctgcgcttcacctggaacttccagaggttcgtcctggacttggggcagtgcctgggtgggtggacccactacagtgggtcacgctgtgttcccacccccagggacctggcgaagggaggcactgtggagtatgccaacgagaagcacatgctggccctggcccccaacagcactgcacggcggcagctggccagcctgctcgagggcacctcggaccagtctgtgtgagtgaaggg

SEQ ID NO: 19311 - DNA, 1044 bp, Homo sapiens
ggattctcctgcctcagcctcccaagtagctgggattacaggtgcccgccaccacgcccagctaattttcgtatttttagtagagatggggtttcaccatattggccaggctggtctcgaacctctgacttcaggtgatccgcccgcctcagcctcccacagtgctgggattacaggcgtcagccaccgtgcccggcctgttctgtttttctaactctcacacagcctcctgggttttccccggtcctctgcagtcggcccactctgcaccccagcccgcgctggctctgctcctcagctgccctgcccacctctgtcttgtcccaccgcgctggcctgtgtcttgtgcctgcactgctcccggctactccgcatgggaagggtggctctcgggccttggcccatgcaggcggagggggtctggctgggagtctccctgcatggaaggctggctctcagtgctgcctgcccacagtcatccactccggggactacttcctgtttgagtccgacagtgaggaagaggaggaggctgttcctgaagacccgaggccgtcggcacagagtgccttccaggtgaggtgggagagccccgtcggccccactccaaccacagagcttgtggtcctggaccagggcagcatagagggtgtcagatgcccccagggcctgggagccgagctcctccacctccagttagcccaccccgccccatccaggcctcccaagtcccatgggaaaccaggctacagggacatgggtcatgtgtagcctgctgccccacggtcttggctctgaccacccaggttctggtggctgcccgtggcctgacctgtgagaccggcccaacacctttgtgctggccgcctggctgtcctgggtccatctttgggcccctggctcttggtgttagaccagcccacccaactcctgaatgggtgggagtcttcccccacagcccctcagggtccccatccgggaggggctcagggacacggaggtccctgggagacacagagcagggatctggatctggcgcccggc

SEQ ID NO: 19312 - DNA, 1025 bp, Homo sapiens
ttcttcctcctggcctgcatcctgcagctgcactacttccacaggcccttcatgcagctcaccgacatggagcacgtgtccctgcctggcacgcgcctcccgcgctgggctcacaggtgcggccccgccctccctgtccggccctggagaggtgtagcctcctgggccagggagggagccaggtgggagttggacaggagccacatcttccaccttcagatcccaaggggcatttgctcataccaaggggatggcagtagcgtggaggtcacagggacagtgggcatgagttgcgacacagctgtgcacctgaactggcagctgcagcagaagcggtgccgacagggcttcttccagccccaggaaatgaggggcaggaacccagttgggagatgacattttcggaccctctcccaggcaggatgcagtgagtgggaccccactgctgcgggaggagcagcaggagcatcagcagcagcagcaggaggaggaggaggaggaggaggactccagggacgaggggctgggcgtggccactccccaccaggccacgcaggtgcctgaaggtgggttgggcgggcagagcacagctgccacccagtctgctgtgccatgtcccagctcggggggcgttggcagagtcccctctgggctccagagcctcttcctcacaggggacccgggaatccccgtttgtgccccgcactgaccctcacaccatcacaggggcagccaagtggggcctggtggctgagcggctgctggagctggcagccggcttctcggacgtcctctcacgcgtgcaggtgttcctgcggcggctgctggagcttcacgttttcaagctggtggccctgtacaccgtctgggtggccctgaaggaggtgagtgtggcaggcaactcagcttcccatctggggtggggtcgctctggcctgcccagctggcctccccaagcccagccccacgtgcccactgccctccccaagcccagccccacgtgcccactgccctcaggtgtcggt

SEQ ID NO: 19313 - DNA, 1031 bp, Homo sapiens
tggaagatgaggggtcccgaaataaaatttttttttttttttgagacggagtctcgctcagtcgcccaggctggagtgcagtggcgcgatctctgctcactgcaggcttcgcctcccaggttcacgccattctcctgcctcagcctcccgggtagctgggactacaggcgcccgccaccacgcctggcttatttttttttgtatttttagtagagacggggtttcaccgtgatagccaggatggtctcgatctcctgaccttgtgatccgcccgcctcggcctcccaaagtgctgggattacagacgtgagccaccgcgcccggcttttttttttttttttttttttttgagaccgagtctcgctctatctcccaggctggagtgcagtggcacaatcttggctcactgcaacctccgcatcccaggttcaagtaatcctcgcatcccagcctcccaagtagctgcaattacaggtgtgagccaccacgcccagccatcaaagtttcttattttcattgtagaccccaagctaagctcagaatcttttctgatccgtgttgcaggggctgtgaggggcgaggagggtcatgggggtggagtctctgtgtcccttgggaggccacagggagtggatgggccccaactgcccactctctgcaggctccaggcacgtttcctgcctgctgaggctctggcagcctgggagttccagccgcctggaccgccctcccgctgcccgctgtggggttggacctcagttgactttgatccacttgtgcgggggggggggggagctgagaccccccttgggaaccaccttggggtctgagctgggccaggactgtgttgctctcccgtatcctccaaacagagggcggtgaggccacgtgccaagcctgcagcctgggtgacgagggtagcagcaaaccctccatcctgtgacatgtcacctacctgccctgtgggggccatgtccattttgtgcccacgttttaggagagcgcgttttggagcaaacactcagagacct

SEQ ID NO: 19314 - DNA, 1030 bp, Homo sapiens
ggcaggtcagaccgtgagctcctctgctctgacggatgcatggacggctgccacctggctggacaggtgcagaggggaggtgccaccttctctggggacaggactggggcagaactcacccggctgaaaagtgcagctgtggagaacttcagaacttcagaagcctttgctgtgaatgcattttcctcctgcctcttgggccagatcttagggattttttttttttttaatgaaaatgtataatcgtcaaaaaactttagatttaaaagcatggagccgatggctatgcttggtgcgttaatgggaggaagaggggatcttaacttcagggagggctcctgggggagctgggggaggctgctgtgtccagcagggcgggcggtgccccccggagcccggcactccgcgatgtgtgcgctaagccgaggccgccttgagcccgtagcagcgccgagcgcgattctttcgtgtctgcttccgggagggtggaagggtgaagctgttgagagtgggaagggaggggctgtgcttcttgagtttgccgtgtgcccctgaccctttcaggtgcaagcgtcagctccacggtgccaatggggagatgggtctggaggccccaccaggctgtgaaaggcccggcctcctgtgctgtccgtggaggtcggggtctccctctgccctgcgcctcctctaacttgccctgcgttttccgtgcccctggtctagggtgaggctcgggtcttggggactgaggggcaggtgggtgtcaaggtgagagctgggctgggctgggcctccctccagaagacttcccggggctcctttggcaccaaggatggggcagatggtggcacgcatggcctcccctgggcacagagccagactatggagggatctcgttggctacatcctggctggggctttggggtcatggtgggagcagcagccaggggtctcgcttggacacgggtctgagctcactgtggcctccttcctcagcctcctgaccggggtcctgaggctggagggtggg

SEQ ID NO: 19315 - DNA, 1036 bp, Homo sapiens
tcctgtggccgagaccccgtgtctcaaggcacatcccctttcgtaccccgccccaccctccgcagcttcatgacctctgggtttcccccaggaccttcgcatctgatgttcccagatccttcctgccactgggtcctgctctggtgccccccggggaagccttccctgaggacccagctcagcatctggtgctaactgtggctcatcgtgcactttggcccccaggaggctgtgggctcctgaaacccctctgaaccacgggcttccaaccacacctgaccccctgcgtgccgaccctgtgtgcaggtgtacaggtgtgcctggggcaggatggctgtgacggcctcacagagcccggagagctgcctcctagcttccaaagccttcatttcaggaatcttaccctctcaattagtctggaatgctgggggcggggccagctccaggtcacagagcgaccttgtttacccagaccttaacatcggcccttccatgctaatcaatgtaatcattgtggtccatgcggcctctggaatgtgctgtccactccctgggtcagccagagagtgtcagggagcacctaccggctgttacccagtgctgccctgacctggttcttcactctgcacatttgtatcacgccagaccctggctggcagctccaggtgacgaggcatgtcagtgccttcctgttctgttctgttttgttttgttttttaaatcgggatgaggccttcctgtgttgcccaggttggtcttgaactctcagggtcaagcgaaccttctgccttggcctcataaactgctggattacaggcaggagtcaccatacctggcccactgctactttctagatgaagagacagaatcccagagaagaagcaggggtttggctgctggtctggagccggttctgctcacctccagcttctgccttgggccgccctgttcacacaggagctgctcacaggctgagacctcgagcagggccctcctagaggaactgggcccccgtaagtgccctgagccgccagga

SEQ ID NO: 19316 - DNA, 1045 bp, Homo sapiens
cctctctggcgagctttggctggaagcagttctaccgtgttttggaaatgaatgaggccttcagaaggcattagtcagtgtgtgcctgcgctggctcagacagtgcctggtgagggtttgagtcatcctggggtgcccctggcccccacgccctccctctccagtgcaggatcattacccaaaaatctggcagggagctgccccacccacagggagcaggggcctccttcagcagtctcacctaatgttgctggagccttgggggatcagggcccatctcttctagagagatgtcagggcagggctgggcgcgatggctcacacctgtaatcccagagcttcgggaggccaaggtgggaggattgcttgagcgtagccattcgagagcagcctgggcaacgtagagatccccatctctatgaaaaatatttaaaaattagctgggcatggtggtagtgcacctgtagtcccagctactcaggaggccaaggtgggatgattgtttgagtccaggagttggaggctacagtgagccatgattgtatgactgcactccagcctgggtgacagaccctgtctcaaaaaagaaaaaggaaaaaaaagggcaggacatttgtgattctgataatatgggaccgcacctccagttctatcagtgggaaatctagacagggctgcggaaagccagctggtgcgagaggagccaccgtgtcactgactgtgggacacccacgtgggctgacaatatggcttctgcttttcagggtgcctcgtggcacagcctaggggcacacccacggccggcaagctgggcgtcacctccttcaggctgattgtcactgagaagtgtcaccatttagcatgagggatgctgcctcctttttcagaacattgtcaccatcagggtctcaccactcctgggaggcggccgagaagctggggaacagcaggcactcggctcacagttgctcagcagtgcagaccctctgagctgagcatggcagagtcacccttcggaggcctgtgcccgggtctcaggacctgc

SEQ ID NO: 19317 - DNA, 1050 bp, Homo sapiens
ccttgccaccggccaaccctggcccctggggattcccatgctgccgagtcactcctgtcacttaccctgacaggcctagactcccgaggcttcctctttggcccctccctggcccaggagcttggactgggctgcgtgctcatccgaaagcgggggaagctgccaggccccactctgtgggcctcctattccctggagtacgggaaggtaagagggctggggtggccagaggaagggcagggccaggccaccgtggccactctcccccagttctaaaaggccttcccaggcgtgtcaagtggagctgctgtggttacagtggccttgggagctcagagaggttgagacataggctgggctcacacagccaggtaacagcaaggtggggttggagtcagggtctagggtggcagctgccaagctgtgcaacaaagctgttttctgcgggaggctgaggaccacacaccacttcccactccaggctgagctggagattcagaaagacgccctggagccaggacagagggtggtcgtcgtggatgatctgctggccactggtggtaagggtctccccgcagccaactgctgtggctccaagggcctggtgggagtgggacaggacctcgctgtgtgacatgggatgcagcttactgttgtccagagggtgcctggtggccaggccgacaccttcctctccccatgccttcccctccccaacccaggggctggcctggagcacctgctctctgcagcccaggccaactggggacctcaccctcccatccccaggaaccatgaacgctgcctgtgagctgctgggccgcctgcaggctgaggtcctggagtgcgtgagcctggtggagctgacctcgcttaagggcagggagaagctggcacctgtacccttcttctctctcctgcagtatgagtgaccacagggcctcccagcccaacatctccagctggatcccagggaaatatcagccttgggcaactgcagtgaccaggggcaccggctgcccacagggaacacattcctttgctggggtt

SEQ ID NO: 19318 - DNA, 1033 bp, Homo sapiens
ggatgacgttgcttttgtaatgaaagaagggtgtgtcatatttgtaaatgtttacgtagtagtgagtgctggggagacccacaggccccagcccacatatcccgggtcctggtcacaggcagggacaggatgggacggctctactcacagcctctctgccagggcttggcctgctgagccttcatttcctctcttgcccgtgagtctgagggcagaggatggctcgggtgcctgctgcctgtcctagcgaggcccggggccgctgcaggcttgagcacatggtcccagtgactgctcactgtggttctcagcccgttagagctctgcagcctcagcctgtccaggccagcccctctccgtccttcgctgtcagccccagccgtgtgaccagagctctctgtccccagctttgccagcgccgagtaccaggaggccctcagcaggatcacctcggtcgtccagcagcaccaggaggccttggtccccgcgcagccccagctcaacgtgtgcaactgggcggtcatggtaagtggctggtgtgtgggcggccgtctctttgccggggctgcagccacccacccggggcccaggatgaaccgtggccagcacagggcagaggcaggcgtgcttccccgcctccgtcagtggtgaggccctcgtgcctcagagcacacgcggcggcgtccgggattcgggaggcaggagccaagcgactcggggaccagaacaacgctgcaccagggcagccgcaggtccacagccggccacccgggcctctgcctggctgagctgagactggggagctccaaggcccctctcctgccccccacaagtcactgagggacagcagggcgcgtgagagggtccggggtcccctggtcctcgactcccacacgggcagcttctccttgcaggggccctgtgatgacctccaaactcccgggctctgaaggcaccgaggcaggaacggcactgcccggtgggtcccgggtgggctggtgggcactgttgagtggcggcggccccagggccc

SEQ ID NO: 19319 - DNA, 1105 bp, Homo sapiens
ctgcagtatcaggctcagcaccacccaggtccctgaaccaagcacccgtgtgtcatactgcagctctcagaaaggtgctgatgtgggcacagatgagaaccaccagccctacccggtgggagctgtgggtatttggggagcgtggcccctgggggcttgtgctgaggaactcaggtctgaggcgtagctgagtgtgcatttctggccagccctaagatgatggtgcaggaagtcactcacaccacaccctccccaggccactaggcccttcctaaccagagccgtgagaaaaaactgaaagcttcataaagacacatggaagactttcctgtaagaagataaatgtttgactacattaaaatgggactttgggcggggtgcggttgctcacacctgtaatcccagcacttcgggaggctgaggtgggtggttcacctgaggtcaggagttcgagaccagcctggccaacatggtgaaacctcgtctctagtaaaaatacaaaaattagctgggcatggtggtgcgtgcctgtaattccgggagactgaggcatgagaatcatttgaacccgggagacagaggttgcagtaagccaagattgcaccactgcactccagcctggggacaaaatttaaaaaaaaaccttagggatatgtataaaaatattcactggaacaaaactggaaactcactcagaggcccatcagtaattcagtgactcaccggagtttggaacatccaaagggtattatatgattccatgtaacaatttacactggtgatgtctgagctgccgagtaaaagctatgaggcccattgaggaggattgtgaatccatcctgagcttcgaaaacgatttcatacatatatatatgttgagaaaaatttagagacagacatgatcacactgcagctcgccaacatcgcaaaaccccatctctacaaaaatcagctaggcgtggtagcacttgtagtcccagctactcgggaggttgaggagggaggatcccttgagccccagaggtcaaggctgcagtgagtcatgattgcaccactgcactccagccttgagacggtatctaaaaaagattctctacacggttgc

SEQ ID NO: 19320 - DNA, 1010 bp, Homo sapiens
ggtcctcggcccccagcctcaccttgttccacctgaccctgtcagcccagttccccaggcatcatccctacctctgcaggctcaggtgaaacatctcggaatcacccccactcccccagctccttgcgctacgtctgggcccaaaatagatccctccaaatggggccctgctctgagcacattcccatgagggctgcctgccctgtgcactctctgccctgggccgcggggcctgactgggttcccacctcctcctacccactggggtctttcccagcaggcacagggattcctcatgggggaggcagagcccacccgtctgtcctcggtgacggcctgagctgtgcacggcctcccctgccctcctgttctcaggccccccagggtccatccagccccagcgtgtggcgttctggctcttccctggagtctcctcccagaccacgcgactccactcacactgtgcctagcggactgtgtggttgatgcagccgtctcgcttgagtgtgttgtgttatgcccagaacaggcttgccgtcaccaatggccatttccttctggggattcctgggcactgaaactcgcaggtggcgtgaggtacagccaggggccctccacacgcgttggctctgtgggcccaggccgcctgaggcccctcgccgtgctggccctgacctggctcagctacccagcacccccctggtgaggatgacggggtctgctgagcttgccctgagggtgaggctgggtctgtgctgctggccgacatgtcagggacgttgtgcaggatccaggagcgggcgccctcgggccccaccctgccaagctctgagctctgctcccagggagcacgaggggcactgcacccacggtgacctctgcggtctttcccttccccgcgagcctgaccccagccgtccccggggaggctcatccacagaagacagagacggcagttgggtcatgacattcagaaaaacctgccccaggatctctcctcagtaagacct

SEQ ID NO: 19321 - DNA, 1055 bp, Homo sapiens
tacaccaagtggaaggaggcctgcaggagttgctgccggtccccgtcaccactgtgggactgttagacctgcaaggcagacccaccctcgtctggaatgaggtaacaccaagaggtgtggccagtgcacagaaccatagactcaagctttagaaagtggccattgtggccggcccaggagcagtgggcactgagaggtctcagcctctgtgggggtcgagagaggtcgtggtgtgcctgacagccccgtcctgccggaaagcaggggtgctgcctggagatgcggcgggtctcactgatgtcttcatcagagctccgtggagagcccctggttgcaggcaggacagcaaggctgaggggtcacacggggccacatctgctggtgcccgtcgtgctcctctgcagcaagcccagcctggccattgctggaggtcctggagcccacagtgccttggccttaaagagctcacttgagaaacggcttgttccggtggggtggggggtggattgaagactctgagacgagcagggaactcagaacactgagtccctatttgatgttaaaatatgaccgttaaacttctgggtaagataatgaatggcactatggtttatactgtttctgttttatgggctcttccagagacgtgaactggaaaaggctctgcagtgtctgggattcgctcagtgctgcaggggagggcaggtgtgaggggaatggccctggagggtgatggggctggggcatccgatgcagctttatagttctgtaattaccacttttaaactttttattacgaaaaatgtcaaggaccctggaattacggtgaggtaggcaggataatggcccccaagatgcccgtgttgtgacccccagaccttgtgagtgcctcacatggggagattgtcctaggtcatcttgcaggcccagggcagccccatgggcccttaaagcttgagagcctttcctgctgagtctgagagatgccagaagcaggagaggttagaacccgaggagggccgcacctgcgctgctggccttagaggagggccgag

SEQ ID NO: 19322 - DNA, 1053 bp, Homo sapiens
tcccccgctggagccctgagcctcaccccattggagccctgagcctccccccattggagccctgagcctcccccaattggagccctgagcctcccccgctggagccctgagcctccccccattggagccctgagcctcccccgctggagccctgagcctccccccattggagccctgagcctcccccggctggagccctgagcctacccccattggagccctgagcctaccccccgctggagccctgagcctcccccattggagccgtgagcctcccatcgggttggatgggctgtggcctcgtggggtgcgcgtctgctctgcagggctcggggtgttcacagccacactcactccagtggggttccctgttgctgagaagaaatcagtgtttcttggaaagtatttcaaagtaaacttgtttgctgggttttattgttatttttatttttagatagggtctcgctctgttgctcaggctggagtgcagtggcgtgatcacgactcactgaagctttgaactcctgggctcaagcgatgttcccaactcagccttccgggtgcaggcgcacgccaccatgcctggctaatttttttattttttgtagagacggggtcttactaagttgcccaggctggtttgaactcatggcctcaagcagtcctcacgccttggcttcccaaagtgctgggattatagctgtgagcccccatgcctggcctatctgtaagagaactgaggaattttaaattttactctgctgtgttccataaacctcactccaggcccctggagggacctgtccctggtgtgtctagcacatggctgcattctccagcagagggcacctctgagccgggaggccggctgggtcgacaccctggactggactccctcacttcacagggctgggtcctggggcttgcctgggacccggagagaactgagcgagcctccccagacctgatacggcccaggggcttaagagctccatgattagagtttaatattccctttctttacataaaatacccccatcaaaccatgagtgg

SEQ ID NO: 19323 - DNA, 1026 bp, Homo sapiens
atgacggtaactgacagaaagaaggcagaaagagagagaaacctggagattggaaggagaagccagtctcaccacaagatggctcacagtgctcagcgggcgcccgccagcttctcttgttggcccaggacaggctgttcggagcttgtcttgctgccccaaggaggatgtcagtgggaatatggttgcgccctcgtttggagttgtgcgagcgttgagctcagtgcccgggtaggaacttggcgttgtggaccatccgcctcgtgtagatcggctgtgatttagacttcttggccagaagtgctgtatttcatggctttgaacatccggatgaggccagatgtttggtgtggacagcatggtttttagtcaaatggaagagaatctgtgagcagcagccgtgctacaaagctgcacccggccctgcccatcagttccatgagctgtaaccgccatcggccgtgaactttctgttgtttgaaaatatcgccatggaaacatccctttgtggagcagaatcaagaatgtattttgacgtcttcgagttttacggtgggacgcaggagttgcacattttcctatgttgacagtatcgtggcctgtgtctcctaaaagactcttgctagaaaagcctagaaattagaggtgctaaatgattgatacaaaaggcatttgttcagatgagcagctgaggccacacacctccacgtccctggggcccaacctcagggtctctgccttggagcccagcttcagacctcccagggaggtagaggaaggggctttgggcccagaccccacggaaagcttgtcccctcgagagggccacacttcctggacactgggctatcagggtagacactgtccccccagctaagagggacaggtgctgaggagggatgaggggctttgagaggtcaccaatgagacttctgacccattcctgccctctggtggggctggcatttggatttgtgctgttttatgctgctggaagtgccccacactccctggggcccccaccac

SEQ ID NO: 19324 - DNA, 1049 bp, Homo sapiens
cctggcatatgaaacaaaatcttgagagcttgagaatgtaatttggacatcacgactgaaagcatccctttcttttctaggataaagataaagtttctctaaccaagaccccaaaactggagcgtggcgatggcgggaaggaggtgagggagcgagccagcaagcggaagctgcccttcaccgcgggcgccaatggggagcagaaggactcggacacaggtaccagcccgcggcccctcctgcagtcagccctccacaggcagcccggagcagcccaggcagggcgtccctggcccccgcacctccggctttgcactgggacgcactctagcaccctgcacgccgtccaggcaagaggcagcaggggcggagcacaggcccccacatgccacctcctttgcacccgaggctcaggcccatggggccgattggagagcttcactcttgggtcccacacacgtggagatgcacccggtgcatgtccagccctgggcgaggtatggggctgctcacctgtgggtcttctgacagctggacacgggagggagacagtggttcccctcagggccacaaaggcacaggaagaaactccattgcttgtagtaaaaaccaaagggagccctaaaagtgagcaggaggcagggaggtcttcccaagcacaggcggggtctgaggctgcagagcaggaatgtgtgtgctgtgtgcctgtgccagagtgtgtgcccaagtgtgtatgcctgtgtgtatgtgtgcccatgtgcacatgcccgtgtatctgtgtgcatgccctcatgtgtgtgcctgtatgtatgcccgtgtgtgtgcccgtgtgtgtatgtacttgtatgtacccatgtatgtgtgtgcccgtgtatgtgcttgtgtgtacccatgtgtgtgcctgtatgtgtgcctgtgtatgcgtgcccgtctatgcccgtgtatgtgtgcccatgtgtgcctgagtatgtgtatgcttttgtgtgcctgtgtgtgcctgtatatatgtgcgctcatgtgtgtatgcccatgtgtgcgtttgcatgtgt

SEQ ID NO: 19325 - DNA, 1024 bp, Homo sapiens
caacattgtgaaaccccatctctactaaaaatacaaaaactagccaggcatggtggcgcatgcctgtaatctcagctactcagggggctgcaggagaaccgcttgaacccgggaggtggaggttgcagtgagccgagatggtgccactgcacttcagcctgggcgacagagcgagactccgtctcaaaaacaacaacaacaaaaattacaacagaagacatctgccctaatcaaaagtgaaagatgacatgtttgtgaatgactatacagtgtgacatttcatcagatattttacaaagcattttacagtttcttgctagaaattccatttctagttataaactttagatatgtaaagaaacagacaaatactcattttagtgttgtttgtattcgcaaaaagttggaaaaaacaaatgttagtcaacaggagaatggatttttcagacaacgaggagcgcacactgcagttgtcataagaatagtagaactgcctgtatccacacagatagaccccagagcacaacttgaagggaaaaggtacggcaggaaccgtccaatgcgttacctgcaaagacagcggccggctttggtgtaggcttgtgtgtagcgtgagtatcaaagcgccgagaggaatgcttagccccaaaatcagatcgacgctgaggagcagccacagcagggtggggcttatataaggggcttcaaccattatgtaatttgtaatttttaaatgttagaattctaaagcaaatatggcaaaatgaacagatggtggatgtgtgtttgtattctccttcatccttttctgtgtgcttgaaaaattttaaaggaaacattagctattgctaatttgttataaaatgatatggttagaaaatattttctgtgtagaaattataaaatataataacccattctaaataaattgagggttcgtctaaatttccgaaatggtttgtgaaagagccacctttatatctgactcttcacatgcgctgcgtgcactcagggcaggatgggc

SEQ ID NO: 19326 - DNA, 1028 bp, Homo sapiens
tgtcctgagccagggttgcccgtgtgtgctcctcccagagcacagactccagggtttgttcccagcctatagatgaggagattgaggcccgggaagtcctgcaccaaaagcttccgctgggagcaggaggggcggggccgggcttgaggagtggctggccgcctgcaccgatatttatgtctgtgatgtgcccctgggttcagtcggtcagagctggccgtgagtgtgggtgggtggatttcccacacccaaaacagcccgtgatccgtagtttccaacgtgccttcgttttccctactctgttggtccatgggagtgaggagcggagccttaccgcctgcgaagcataaactgtgtcagacatgggcgacgcggggaccgctggagggaggcgcgccctgacgcaggctgcactggtgactgctcagttggagacccttccttgaaaacatgagctgtgactcatctgtaataaacctgttagtcgtggtctgtgaaggtaattggtggtttatggatgtgactgaccaagttccggccagttgctgccttgtgttttctgactggggtgaggttctgaacgaggtgaattctggcaactccaagaggaggcactgtgtttcgcgtgcaccctcacatgcctccagcccacctcgagctctgtctcatttgctcgctcactcactcacacatacattatgtgttaggaatacctgtgtaccctggcttttaagagattacacataaaaacacaaatctgagctgatttttactttgaaataatttgccacaaattcagtttaagcaattaaagtgttggagcttataactaaatgtcaatttttctgtttttgggaacacaggtattgctttttaaaaaatgcgctcaggcccagtgcggtggctcacacctgtaatcccagcacttcgggaggccgagctgggtggatcactcttgaggtcaggagttcgagaccagcctggccaacatggtgaaaccccgtctccactaaaaatacaaaaacatg

SEQ ID NO: 19327 - DNA, 1035 bp, Homo sapiens
cctcatgagcaagcggggtttatctcagaagttcaaatttggtttagcatttaaaaatcaatgtagtgtaccatattgacataaggaaaatgaaatgccgtaagatcatctaagaagatttttttaaaaaatggtatttgaggccagatatggtggctcatgcctgtaatcccaacattttgggaggctgagatgggaggactgtttgagtccaggagttgcagagcagcttgggcaacatggtgaaaccctatctgtacaaaaaatacaaaaatgagctgggcagggtggcgcgcctgtagtcccagttaccctggaggctgaggtgggaagatccattgagcccaggaggtagaggctgcagtgagccgagatcatgccatttcactccagcctgggtgatggaatgagatgctgtcaaaaaaaaaaagacaaaatcccatacctattcatgaggaaagtgctctgcaaagtaagaacagaagggagtttcctcagtctgatggaggacgttctgagaaacacccactgactgacaccattcttactggtgaaaaactgaatatgtttttcctaatgttggagatgcctaatgttggagatgtttgtggtcatctctttgtattcttttttaaaaagtaacctttattactgaagcaatactcaacattttagaaaattaggaaaaaccgataaggagaaatagaatgtaaaatagtcacattttcacaacctggagaacagaacctttttttttttttttttacggagtctcgctctgtcgcccaggctggaatgcagtggcgtgatcttggctcgctgcaacctccatctcccaggttcacgccattctcctgcctcagcctccctagtagctgggactaccggcgcctgccaccacgcccggctaatttttttgtattttttagtagagacggggtttcaccgtgctagccaggatggtcttgatctcctgacctcgtgatccgcctatcttggcctctcaaagtgctgggattacaggcatgagccagt

SEQ ID NO: 19328 - DNA, 1013 bp, Homo sapiens
tgacagtgagaaggaaaaggaggcttttcaaattctagggtgagatacagtgtttcaacatgaagttttctttttttttttttttttggctgaatgcaaaatttagttatatatatgtaaaatttgtgaaaatgcgtgccttggaagatttgaatgggtaaaggtatactttcctccatctgtgcagtgcattatttagaagcagtggagtgaccttgcaggcggcacctgagggagtgccaggcatgggactgttgggcgggcagctcccgagagccctgcagggctgggtgctctggctcccatcaattatttacagacttggggcattcagctgggctggttcacaaggctggaagccagctccgcctttatgtctccatctctgcccgccgcccctcaccctgtggcagacatgccccacgctccctgcatgagaggctgcagaggctgctctgtcttgtttcgggtgtctcagggctgatgtgtgttgtgttcccatagtggctgttgatcatgaaaaacattatgttccataagatatgtgaccagttcgggcgtagtggctcacgcctgtaatcccagcactttgggaggcccaggcaggcggatcagctgaggtcaggagttcgaaaccagcctggccaacatgatgaaaccctgtctctactaaaaatacaaagaaattaggcaagcgtggttgtgcatgcctgtaatcccagctactagggaggctgaggcaggagaattgcttgaacccggaaggcggaggttgcagtgagccgagattgcaccactgtactccagcctgggtgacacagtaagactctgtctcaaaaaaatgaaaaagtgaccagttccttgtagttgccttggactggtgttcctcttactgctggtatttccagctctacttttgagatcctctggagaaataaatagaaactttgtttactttctctctctctctctctctctctttttttttggagttggagtctcactctgtcacc

SEQ ID NO: 19329 - DNA, 1082 bp, Homo sapiens
caggagagccacagacccttgccgtgaaccgccgtggcagggcctcggtgcagatgcgattgtcaggctgcgctcagtaacacaagacctgccctcgacgggtggatgctcataacaagatgaagttcaagtgagcatctttgggttttttcttgttttacttattaatggaagaaaccctttatttttaagagaccttcttttgatcctggcgatactgtgacatttcagtctatttttgagttggttgtgatactcgatgtctggggccgtccctgctggaagagagagcgttcagagcagagcatgtgccggacatggggccacgttcacccctgaggagcactttgaaatggctttgaattcttgtcagccttgattaggtctttcaggcaaacagtctggctgatgaaaagtttatggtacaagcagcagaaacttaatcagctcttctgttctgccatcgtcctccgtttgtgttggagtcctgcacgttcctctttggtccttgtgggtctgtgtgagccgtccgcccgccttccgagcctcagggtgtgagccctctgcccgccttccgagcctcagggtgtgagccctccgccctccctccgtgagccctctgcccgcctcccgagcatcaccagcataggttcgcctgggatgggagtatgttgggagcaactgggttgaggctccttggccagacgggagaccacagggcagctgcccaggaaatgtcagcaacatttagactttttctgatgtttttagatgaaagcaaacatgttgttctggcgtttccttcctgcatctggtgggtcttcagcatgtgaatctgtgcatttcctgggacttggaaagtctgttgccctcactcctttgggggcattttctttgccaaaggagctagaagaacgagcttccaggccactcacagcctttgtttgtttgagagtgtctcactctgtctcccaggctggagtgcagaggtgtgatctcggctcactgcaacctccgcctcctgggttcaagcgatttctcctgcctcagcctcccttatgagtagctgggattacaggtgc

SEQ ID NO: 19330 - DNA, 1003 bp, Homo sapiens
gcctcactcacttcctccattgttcaaagcagtaagagggttcagtctttggaaaggaagcatttactggctatttgaagagattgatttcagaaattgagcatcataactaaatctgattgttttgaaaggatttactacttttcattactttcatcccagtgttcaataaaaataggaaaagaaaggaaaggtgtccccagaaaggggcagccagcaccctggcttccagtaccttcagcagcgttgtcctgtggccatggattggcttgccgatgagcagtggttcctcccagactcctccctcagggcccttcctcttgtgcagctgctgtttgtccctggaccctgtgagtggagtccgcagcattggctgtgacaggcattcctcgttagggctgagtcgcgttatgctgtgtgcagacgcattctgcttctctgtcatccgccaggggacactcgggtttgctgttgggaaccatgctgtgtgaactgtgaacgtcgaagtacaactgtcttttgggggccctgctttcagttcttttgtatatctacccagaaggggaactgctggatcatatgcttagtccttttgtaatttgttgaggaatcgtcacactgtttttttttggcagttgcaccattatatgttcccaccagcaatgcacgaggattcctgtttctccacaagctcacctgccccctggttccctgtgaggtgctggagactggcagcaagtgtcctgtccccgggacacgtggtgagcacagtccctgactgcccttccttcatggtgtgacttttatcagcagatttgacagatgagaggtgaatcctgggtgtgttgaagctgactcaccccgcccccaaccccactcatcttcgaaggtgtgttgtagctctggccgagcctacctctgagcagtgcccctagatggctccaccttccttacactgtccctcctacagactcatcctcatccccaccactgccctttggct

SEQ ID NO: 19331 - DNA, 1160 bp, Homo sapiens
gagaacaaaggaaggaggaagtaatttgtggaatgctgagaaaggtaaaaacaccttcaactaaggaagaggaacaggccgtgacctaatgcttgcttcgaccagtataagcatgccagggcagatacttaggctaaattgtgggagctaagaacataaagtacattgatttctttattaaggctagcagatatttaggaatgtcagcacaggtctttgaataaatgttgcttttaagagaagttactatttatttttaattagatggggaggaaagtctttgaagaggaacttctactttttacacagctgagatgtgtgctccgcccagtatctctggtgctggacacatgggttcagtcacgtgggattgagtcttgtcccttccggcttcagtgctgttcacttcattctgtagctgtgcaatttaggtttgggtctagatggaactttcgtgcactctctccagctcaggttttggttctgcttccagtcagcaaggactgcgggctgtgcaaggtgtcgtgaggtttcactcaggcagacagaggagcactcttcatccctagcagtgggagctgcttacgctgagatcccgaaaagcatatgtgccgttcagtttgtccagtggttgtttcagaaggggaagaagaaggcagttggtatttcagaagaataaaacaaaaatcccctaatccactcacatttgttaagccacatgtcagattgggtaaataattgtatctcatgttgaaacttgcatcttttacaaaactttcagtgcatttaatgaaacgtatctgaggagcacttgagggttagtcttgccccctcccataaattcagggtcctcctgcctggagccactctcacaagcccctggccgcccatccagggtgttgcaaggctgtgccagctcataccccattgctgccccgtctgacctttactgtccctctgacaggcatgctgttttgaaggtcttatctagagtgcggattttttttgtttgttttgtttttaaatgtttagggttaattttcccaagcttaaatctttttactttgtacttctcccttagtccttagagacatttatctttgtaacttgtgatccttaagcttgaaagtgatatttctgggtggtgatcttctactgat

SEQ ID NO: 19332 - DNA, 1090 bp, Homo sapiens
aagtgggacttggtgtacccatagcacacattcaagagagctgctttgttagggccaagtcatggatggtgtccagttgactgtgccgcacctctgtctagacatgtctcagcaccctcatgacagatacaggaaacagctcgggttagccaaggcaagatggcagccttttcaacaagagtctgctgatttcagcgagtggaaaccagctgatcgtgaaaactgggtttctcacagcgagacaccatctcacaccagtcagcatggctgttacgaaaaggttaaaaaataacagatgctggcgagtctgtggattaaagggagcacttatacactgttggcaggagtgtaaattagttcaaccctgtggaaagcagtatggcgattcctctaagagctaaaaccagaactaccatttgacccagcagtctcattactgggtatatacccagaggaatagaaaccattctaccataaagacacatgcgggcgaatgtccattgcagcaccattcacagaagaagacatggaatccacatgagcatctatcagtgacggattggataaagaaaatgtggtgcatatacaccgtggaatactgtgcagccatgaaaaagaatgagatcatgtcttttttttttttttttttttttgagatggagtctcactttgtcacccaggctagagtgcagtggcgccattttagctcactgcaacctccaccttccaggttcaagtgatcagatcatgtcttttgtggaacatggatagagcctggaggcccttatccttaacaaaccaatgcagggacagaaaaccaaatactgcgtgttgtcacttatgaatgggaacgaaatgatgagaacacgtggacacagagagggaccagcagacactggggtctgcttgagggttgggggtggaggagggagaggaacagaaaaaataactgttgggtactgggcttaacacctgggtgatgaaatagtctgttcaacaaaccctgatgacacaagtttacctacgtaacaaacctgcaacccgaacctaaaacaaagttaaaaaaaacgttgggtttctgcggagagac

SEQ ID NO: 19333 - DNA, 1156 bp, Homo sapiens
ggcaggtaccgggcacgcctgtctccccttctggactgcactgtggctcacagctccttccagaaacatcttctcatcctcagagctgccacatagttgggcacaggcccacactaaagtgcaggctggccacccctggacatgggctcccctcgcctgagtcctgagaagaagcagctccaccccagctccagggcagggaggggcgtggggaagaatgcaaagagcattttactgagtctgatccttttccagttgaacagcagtgtgtcttcttcctgccatgcctgagattcttcctcagtgagagctctgaagccagaaggtttgcgttctcgttactggatggtcttggcctggctcttcctgaaggggccaggcccccagcctctctgagcttccatcctgcagctggggtttgaggtgggctgggccccccgtgtttggtttttgtttgttttcttctgagataaccatagatgacatgagatgtaagaaagaacagggagcagtcccttgtacacattgccaagcttccccagtggtggcattttgcacactgaacagtatcacccctagggtgtatatcggcattgatgaaaccctctggtcttagacagctgtttcacccttacttggaaagggtattgagttctgtacagttgatcacagatgcagatgcctgtgtcccacagtcgggaccttaaaacccttgcgtcaccacaaggacccccctggttgtccttctgtgaccgcaccccctccctttccaggatcctctttccaccctggcaaccactagtcttgttttctgtctgtggatttatctgcctattccagacgttcatgtgaaggacaatctgtgggcctttgtgtctgatacggcagagctttgtgctgttgcggcgcacccatgctgcggcagagcttggtgccgtggaggcgcacccttgctgcagcaggcatcagagcacagccctccctgtggcagggtcatgcgggtcatgcacccatcagctgatggacacctgaatggtctctgtttggccctttgcagcgctgctgtgaacacagacctgcgagtgtcgtggagacgtgtgggcatttctcgggcgtacctaggtgtaggtcgctgcactgccttttgtttggagac

SEQ ID NO: 19334 - DNA, 1052 bp, Homo sapiens
tagctcacacacacagcggccggcagaggccatcggctctgaattctctcacagagcagggcttgacaggctttttctgtactgggccgattagtggtattttaggcttttctggatgtacagttcctgttgtatcgttcagctctgcccatgtagaacagaagtagtcatagattttatgtaaacaggtgagtgtgattattattattattattttttttacaaaaacacatggtgagccataactcgctgacctcggctctctagtaatattttttaagtgaagagaattactaggttcaataagcataaaatctcattgatttctatgaaaatactgtaaatctttgaagtctgatattaatgtttttaaaaagaattgccgtgaataaaggatctctttaagggatgtcatggggagaggggagggtgaagaaaatcaccagtaaaactattgatcatttttgtctcgggttaacacccctctctgcgggcctcacacttgcgtgttgtctccactctggctttgcagaagtgcggagctcctgtcctgcaggtattgtggtcgtcagacccttctggagatgtcgagtgggccagggccccagcccgcttggtggtcactcctgatgaccctgtcccgtgtggaccgcctgccaagactcaggccccacctctgtgtcaagtgcaattaatagcagctctaactaaaagtaagaataaggttctaccaatcttgtaaccctacacaggcgtctgtcaggtgtccctgggtgctgggttcttgggggatcccaggtaggtgtgggaggggtgtcgtgtgcatgcctcccgcgtggggttgtgtctgcagcgtttctgcaggtcttccttatgcatcagcgagagttacatgatgttttcatttcgtgaagtaaagcagctcgtgggaatgtgaacttccgacgtcagcctcagtcacatgccgatgttttctctcgaatcgctggtgtctggtactgctatgagccatatttagcctccccttgcagccgtccactcagcagaactgg

SEQ ID NO: 19335 - DNA, 1068 bp, Homo sapiens
atcaatggaagcagtccggaaaaaggggttctttccagccttgttgcaaaaccaaatacctggcagctggtgtttatcttttcccttcaaggttctgaggtaggcagctttatagataaaggcagtccttatcataaaccctactgcatttgcacaaaacagtagcattagcttatcccttcttgccttctatcccagtgctcgcttctctttcttactaacaaatgttcttacaggatttttttcgccagaataggggagtttcacctgcattcaaaacctgttcaggcagggccaggcgtggtggcgcacgcctgtaatcccagcacttagggaggccaaggtgggtggatcgcttgaggtcagaagtttgagaccagcctggccaacatggtgaaaccctcgtctctgctaaaaatacaaaaattagccgggcatggtggtgggcgcctgtggtcccagctacttgggaggctgaggcaggagaatagcttgaacccagcaggtggaagttgcagtgagctgagatcatgccactgcactccagcctgggtgacggaacaagagtctgactcaaaaaaacaaaaacaaaaccctgttcaggcacatgtcctttttcctcgatgatattcctcatggtgtctgggacctcatctgctacctcttggttggcagaagctgcttctcctgttatcttgacattgttaaagccaaacgttctaaaactgtcaaaccatcctttgctggcatccacttctccagctgcttccccttccttttactttcagttgttgtataatggcttcacttttctggaatcagactagagtctattggtatttgcctttcttatagcaatcctgcacccacacattttcatatatccgtgctgtttgggaattaattttaaagctgcgttttcagtgagataaaaaggtatttcacaaaaaaattttcaagcctgttgctgtagctgcggtgatggcttcacggatgtcctgttctttttttgtgatggcccttctgctggatttatcgattttgaaaagcatccacagcagagcacag

SEQ ID NO: 19336 - DNA, 1050 bp, Homo sapiens
cagctttcatcgttctcctcttgttggaaagcgtatcatcgcatgtaagttacttgtttggataattagaaaatcatagtgcatgttttataaactagaatgcttaccctcattttgctttttattgatgatttaatgttggggctgttacaatgtgaaaagctcttgctccttatacaataaccctaaactggtaggtgttggtgtctgggagtttcttggtgtcttgcttctaatagtctgaactcttgcttgcccttctcacccctttttttttttttttttttttttgcagcagagtctcgctctgtagcccaggctggagtgcagtggcgcattgtcgcctcactgcaacctccgcctcccgggttcaagcaattctcctgcctcagcctccccagtggctgggattaccggtgcacaccaccatgcccagcttattatttttattttttaattttcagtagaaatagggtttcgccatgttggccgggctggtctcaaactcctgatctcaaatgatccacctgcctcggcctcccaaagtgctgggatgacaggcctgagccacctcgcccagccgcccttctcatccctttttggatcgattgtttaccgtgtgctcaggggcttcactcggagccccttagaaccttgcccagcagagtgggcccacactgggaagcagggatgcgtgctccgtctgcctgcctcagctgtcctctgcccacgacctctgagctgcattgccccgtgtaggcctggtcacctttggggccggaactgcacacactccttcctcccataagccccagtgctcgtggtggttacgcagccctgctgcccgtgcaggagatgccccacgaggcctccagcttcttctctgcctttgctcacttctcttccctggaaagcaggcaggtactcgtcaggctttccttcatttatttctagagtttctgcagatctagaagcctgtctcctattggttattgtcttttaacaaagacctgtttggcattacacaaaaaatgctttcacaagtcccaa

SEQ ID NO: 19337 - DNA, 1798 bp, Homo sapiens
gcacacagctctggctgtgataggactgagtcttcaggcttctgctttatggagatgctgtttacaagtcattgtgccatctggaaggattctacagtgctattttggattgatgaaatccaacagtcaatggttttaataaaaaacttgagtagcttataagcgtgtctgcttttccacctagcagaaggtaagggagtcaagtttcctggacgagaagagatttgtgattctgtcttgactcgtgtcctgtagggtgcttttggatacactcctccccgcgggcatcttgcaggatgcaaggtcgttgcgggccactgccatccttccagagaagagccccctttcccccacaccctcatgctgtgtgccgggttctatcctccactgtccctggtgagaaaagagggcctcttgctagggaccagtggctgggtttctggcgtctccttgggtaaagggtggggcagcagggcagtgtggacggtccctggacacacgagtaacgttgggaattggtcgtgctgccctcagaagggagaattagtgcattgtctgtcttaataatcaagctttaaaaaaaaaaagtgactgatttttaacatggagtcattttttatttggtcattatgttaatggaaaacttgtagtgtggatttccattttgttttaaacttacattaaaagatgaattgttcattggaagccggtattgtattttcttaatctgtaatgactttacttaaaaacgaaaatctgaggaataggagaagccctggcatcccctttgcttctcttgcagacaaattggacccagtttgcgggcatggcggcgcacacccgtggtcccagctacctgggaggctgagcgggaggccggcttgagccagggagttctggactgctgtccgctgtgtgctaagtttggcatccgtgtggtgacctcctgggagtggggaccaccgggttgcctacggagggaacggtcacaaatggagctcttggcgagccgctggtgtctggcctaatccccggcctctggctgcgcagcggcgggggtgaggcaggcaggctctggcacggtctcactgccactcacgttagccttctgtcgtcagacgtgaaagtggtgctgagtggggttttctttgcagactgtacgtgatggactgtacctaaagtgaattcgtagttttgaaatctttaaagcatttgagtgaaatgtggaaatgcatcatcgtgagtgtgttgtgttgggaatatggtgactgtcttcttgctcactcagtagagttggagaattggtagggagcagcttgaggctctgacacagggatacccacagggtctcggtgtctctggcgcccttccctctgcccggtgctggcttgtggacgggctcagtctgctctgccatagaaaaccatttctgtctgctgggtccggtggctcacgcctgtaatcccagcactttgggaggctgaagcgggtggatcacctgaggtcaggagttcgagaccagcccggccaacatggcaaaacagcgtctctactaaaaatacacaaattagttgggcatggtggcagacacctgtgcagtgagctgagacgggccattgcactccagcctgggtgacagagggagactccatctcaaacaaacaaacaaaaaaacaccatttctcaaggccgggtacagtggctcacgcctgtaatcccagcactttgggaggtggaggacctgaggtcaagagttcaagaccagcctggccaacatggtgaaatatcgtctctacta

SEQ ID NO: 19338 - DNA, 2023 bp, Homo sapiens
tccaggagggctagggaggcggggaggagcaccctgtgagctgcaggcaccgctgtgttgcagtcagcaaacactggggtctgggaacccactttcatgtttggcacctagtggtttgagcttcacttattcgtagccctcacaagtaaactagtctctattacaagcactttcttcgtgactttttggcttttgttttttgacacattttcctcatgcagatcagcatgattattcccactgtctgacatgtctcctcctattcattaaatacttagagcctgtttcatgcgagatgccatgcagagctctgccagattccagaatgaagggcaataggcccagctgggatagttcctgcatgtttccatcggcccggctgcttccccttctaacccttacaaatcctctgaggtggacgtgattactccacctaagaggaaactaggccgggcgcagtggcttcctcctgtaatcccaccactttgggaggctgaggcgggcaaatcactctgaggtcgggagttcgagaccagcctgggcaacatggtgaaaccccgtctctatttattaaaaatacaaaaaaaaaaaaaaaaaagcagctggatatggtggcacacgcctgtaatcccagctacatgggggactgaggtgggagaattgcttgaactcaggaggcagaggttgcagtgagccaatattgcgccactgtactccacctgcctgagtggtctcgcactacagagcaagcctccgtctcaaaaaaaaaaaaaataaaaataaaaaaagtaaaaaaaagaggaaactaaagtttaatgtgtacagtggactctcttggtcccagggtgggagccatgtcacctgtgggaacaggtgaatgaggctggcgtcgtgctctcaaggtatttatgatgtagcaagaaggtgccaggtcctgagggagacttccagaggctcctgtgagagaaggtatgcaggtgaagaagagggagggagaccgtgtttcctggggactgggcttgccggaggctccactgagggttagcatttgcataggccttgaataagaagtagaatgtgaagaaataggctggagtttagaaaaggaatttttggggaaacagaaagggccttggtgactgtagatcactcactcatttcagatgcaggcaggtcccaaggtggtgattagacacaagttcactctcaaaggtgctttcttatgtagttgatggagtcggttaaatgtattcccagttttcttttttcctaacctagtgtttagagaaaagcagccttgggggacttcctatccacgagtttgcttaagtgcaggttctgggtgtgccggacatcctagataccgttgtctgtgaactcaaccatgttgattgggtctgctcttgtaggctgacatccgaagtgcattacagatgctgagttgatcgttaacttctgtagctgggatctgagggacaaccaagacaggtctgcttcaacacatcacgaccatgttcttgaactgcatggaccctggagcatctcagcgtggcatcacagtgctgctcatggaaaacatgaactggcagacccattgagacattttcaaaacataaacattgtttttcttatttccatcgtttacccattgtagaaaatgtaagaaaacatgaaaagggtgaaaatctaacttaaactcccttatacaggtaatgaattttagcttcttgtgatccttcaggaatgggccatcagtgtgtttgaaatgcttgctccctggtgccgtaaagaaatagcacttgaacgtaaatttaatttcctcagcaaggccattttttataccttctgcagaaagggtacactcgcctgcagttttgccacgagagtacaccgaatgaaggagaccagggtcatttataacctgacgctgtgtccggtttttttataccaactgctgtgtccggtttccattggctggaacgggacctcacattctgtatttgtcccgattggctagcaactt

SEQ ID NO: 19339 - DNA, 1032 bp, Homo sapiens
gcttgccgtcagggttccttccacaccgacgctgctcccaggattacggagctggaaagagtccagcccattcctctggcagtacgcagcccttccctggggctcagccagtttacttggcttgcataattctttctgttaagacgctgccttaaaattgaccaagcctctaactttttagaccaggagtctcttggatcgtttgagtggtggtgttgcctgttcttggccctctttcatcttgtcctgtgcttcagcctggtcacttggtttaataatttgtctttgtttttccaaatcctgcagaacttttaagatgatctggattgcagtgacttaaaatcataccgtgatgtatttgctggtttggagatctttttaacagggggttctctcatcagctctaagtagccttggaaaaactgtcgcctctgaattggctgcaaacaaagctttaggctttccaacagtgctacagccaacctgccttaattggaaatgaggagtctggacgtttgaaaaataactcaataacctcatgtgtgtaactctcggggccatatattatggagatggctgtgtgtaattttacagcatccttgatggagcctttgtcataaaacacgactcctgtatatgaaagcagtcttcgcaggttttattgagacgaggagtggaaaatacactcgtttttccacaaaaggttgtttgtttttttttttttggagacagagttttgcttttgtcgcccaggctggagtgcagtggtgcgatactggctcactgcaacctccgcctcctgggttcaagcgattctcctgcctcagcctcccgagtagctgggattacaggtgcctgccaccacgcacagctaatttttgtattttaatagagacagggtttcaccatgttggccagtctggtcttgaactcccgacctcaggtgatctgcccgccttggcctcccaaagtgctgggattacgggcgggagccactgtgcctggcccacgagctgtttttctgatgagaag

SEQ ID NO: 19340 - DNA, 1045 bp, Homo sapiens
caattagaggagcatttccttaaaattgtacaaaccccattaatgtgtggcttcatagaagacagcagggttctcctcgctgttcctgcatcagtctgtggtaaatatgttgttctagttgaagtatacaaaaaaaaaatctagtgggaaaatggaagcatatttttaataaatagctttttgatataattatggagattttcattgatacgacaccaaaacccagcaggtgtttgtgctgtgagcgtttccagcagcaggggagtctcagggcttccctttggtctctcttgcggcgagtgcggctccgtcgcgtgtgtgtgggagtgtgcctgtgtgtccacatctggaggtgacccaggtcagcacacagtgtgcacccaagggccgattgggtgcccgggactcgtgtgcatctcccgacgtggatccacttgattttactacatcagaaagcagcacctgtctcttccagggagacttttagttcttcagaagctgtctgctcttggagttttccaaaattcttatctttgaaagcttgaattttcacattgacaacaagttgttgaggtgttctggctgaacttgcagctgtctttccttcattttttagaaatgatctgccagtactcatgtccgaacaaccagagtttgcatgtcggtcggtcattctttgactgaagattggtgcttcctgtccagaggccgctgtgtctggtgtgcggcagcagtgctttgtgcatacttgttttgtcatgaaggatatgcacaagatgaatgctgcgtgctcgggacgtagtgcgttgaaacagtcttgccgcaccaccccagcagtcctccagtgaactggctcatcagtgcggtgtcacccagctgagaaggcattgttattaagcaggtagttttacacctgggaagcaagtgtaccaagctattcagtctgtgtgctgggtgagaaaatgttgttgaatgaatcaggtcagtctgtgtgcttattgacaacttttcaaacatttcacacccttagaagagtctgtatcac

SEQ ID NO: 19341 - DNA, 2027 bp, Homo sapiens
aagggcctggggaggcagcccagtgttgctggggcttcctgcttttatctcgttgtctctttctttaaacctctggccatatcatctattcatcttttccttttaatttttttttctttttccccccgtgttccttatataaaaatatgagtctttttctgtcagtcctttgctgatgttcctcgtgtgccttcttaggtcattcttttctgtctgcgtgttcttttttttttatctttttgagacggggtttcgctcttgttgcccaggctggagtgcagtggcacgtctcaactcaccgcctcctccgcctcccgagtacctgggcttcaccagcctcagcctcccgagtacctggggttacagatgcctgccaccatgtccggctaattttttgtgtttttagtagagacagggtttcaccatattgtccaggctggtctcaaactcctgacctcaagtgatctgctcccccttcccctggcctcccaaagtgctgggattatgggcgtgagccaccacgtccggcctgatgttcttaatgttgctgatttgtctcctgttcccttttccttttccccttccatattccacagctgtcctttctgctgcctcccggagggcaccctgtcctggacacaaggctttgtcctgtgctgtgggtcatgcttggtgggatcgcttatcagcgtgaaggaggcactgaggtccatcttcttcagaagtctgtccttccttcctccaggcagatgccggcatcacagtcctggttaactaaaaccctgtgtctgatgtcctgccctgggccttccttgtctcttttctgtccccacccagaccataagcactggggaagcacatctgtcttcctcgctgcagcctctggtgcctgtgtgtctgcgtgctgacaccgggcatggccaacgaacatgttgtcttgtcacggtgcacggtggctcctttgcccgtgcggccttctcagcagctgctgcttctcctctaggactgaccgcaagtctcagagcgcgccggctggtgttttgtcgccctcaggagtgtggccgaggcccaggtgtgggtttcccgtgcccgccgtgacctggcagtgagggtctgtgcttctgtcagtgccgttggcctgagacatgtctgtcctggagaccagcacgtgtgggtgccgactctcagagagccccttgctcacagcaccaaaccccttgctgtgtttttattattaagaaatagaaaacaaagggcataaccagacttaggactttggtgattttctggctgaaggttttttttttttttttttttgagatggaatctccctttgtcacccaggctggagtgcagttatgcgatcttggttcactgcagcctctgccttcggggttcaggtgattctcccacctcagcctcctgagtagccgagattgcaggtgtgtgccaccacgcccggtaagtttttgtctttttagtagagacggggctttaccatgttggccagactgctctcgaactcctgtcctcaggtgatctgccggcgttggctcccaaagtgctgggattattcttgctggagctaagttgggattgactgcagtgcatcctttgtgaggagcgctgggggaaggtgtgaggaatttgacccctaagccccagggtctggctggaaggaggagcttcgtggacaggccttgaggacgctttggtgcatttcctgaattgtccctgtgagaacatgccttatctgcagcagtcaggaaggctgataggaaagttacctagaaagccgggcatggcggctcaggcctgtaatcccagcactttgggaggctgaggcgggaggattgctgcaacccaggagttcgagaccagcccggacaacatagtgagaaccctgtctctaccaaaaaaaaaaaaaaaaaaaaatgagccaggtgtggtggcacgtgcctgtagtcacagctagttggggaagccgaggtgggaggatcgcctgagcccaggaggtcgaggctacg

SEQ ID NO: 19342 - DNA, 1024 bp, Homo sapiens
tgggcatgggaaaataagggaaatgagaagcgagggttctttgtaaatccaaggatgctttcatagcttttggtatcgttgacgttttgctaaatggatgatttatttattaggaaaaataaaactgggattcttgttcatatctgatggtgtcagcacgtcagcaggatagcaactgctttagggacctgcttgtgtctggagggcagaaccagagcagtaagcagagggcagagggtggcctttgtagcccgggggcaggtgtttcccttccgtggctctgcgtggttcctgacagcctcagctctgcagggtgtcttagtctggtctgagggctaagaccatcactcccaacaccagtgtccatgagtctttttctgtttattatctccatttccttggtacagtcagcctttgtttaaaatttattcttgcttgttttttgttagtgggaaaagtttctaaatatcaaatcctggtggcttactaactacagcttttggggatgggcttggtgatgatgttatgaggctttaggtgacactcaaagggccgtacccaccgggttggcatctgtgaggtgcctgctccgtgtgaaattctgccctgtagctgaacagcaaactgtgttttaaatttagattgaggctggacgcggtggctcacgcctgtaatcccagcactttgggaggccgaggcgggcggatcacgaggtcaggagatcgagaccatcctggctcacaccgtgaaaacccgtctctactaaaaatacaaaaaattagccgggcgtggtggcgggcgcctgtagtcccagctactcaggaggctgaggcaggagaatggcgtgaacccgggaggcggagcttgcagtgagttgagattgtgccactacactccagcctgggcgacagagcgagactcccatctcaaaaaataaataaataaataaataaatttagattgaaattgagaagtgagcagaaagatgccagtttagatgtgatcagattttgttaaagaaatc

SEQ ID NO: 19343 - DNA, 1044 bp, Homo sapiens
gtacctggctgaggggagggatggggcacggccaggagactctgggaggcatctcagcccagtacctggctgaggggagggatggggcacggccaggagactctgggaggcatctcagcccagtagctggctgaggggagggatggggcacggccaggagactctgggagacatctcagcccagtacctggctgaggggagggatggggcacggccaggagactctgggaggcatctcagcccagtacctggctgaggggagggatggggcacggccaggagactctgggaggcatctcaccccagtacctggctgaggggagggatggaacatggccaggagactctgggaggcatcttcgttactggccattggattcctcaagttctgctgagaattctagtctctttttttccccactctagaataaggatcttaattatttatttgtgttgtccattgggaaaaatgatttgggatgtgcttactgtcaacaaggggatagtggtgggttccgaatgtaaactggccgtaatcccagcactctgggaggctgaggtgggaggattgcctgaggtcaggagttcgagaccagcctgggcaacgtggcaagaccccatctctccaaaaaatacaaaaattagccaggcgtggttgtgtgtgcctgtcgtcatggttactcaggaggttgaggtaggaggatctcttgagctcgggaggcagaggttgtagtgagctatgatcacaccactgcactccagctctaggtgacagaaggattacaagaaaaagaaaaaaggaagaaatgtagaccatctcgacagcaagatgtgtagcgtctggcccagccagggcagcctgctcctcttccggtgcagtcaaggtttcccaccgctgtgtgcagggattctgaaggcagtgctggctgctggcacagggctgcaagtttgaaagagaagtagagcaaaaaggtccctgggcccccgtggtggcaccagcacacacgagaggggatgtggtggagggcaccgtcatggaggcgt

SEQ ID NO: 19344 - DNA, 1078 bp, Homo sapiens
gtttcttacgtataaaaagccccagagcctctaaaatctggttttatggtgatttcacaagattgtatcagtgtcatctactcttttttgtgctggactttggatttacctttaagttgttgcaattgctgcattgtgacgtaaaggtatttgatgaatgaagttaagttttggccttggcacagtgaccaggagctgagcagtgggtcatgggagaggaagggcgatggaataaaccgtgtggaccaaatggagggagacgagagcgatgaaagaactgaggctgaaattattattgacatgagctaatctcactctcttgtttcagaatatatacagccctgctctgggacacacctccattggatttaaaagacagtcctcgtcagcactgactttcagctatggaatcggtaaatactcactgcattctctatcaatttatgtttttgtcattgatttgtaaaaataagtatcaaaataatgcgtgagtgtccaggttggttttcttggacttgatagagttttgtcgaaatgttgtgaattttgttctggatttcacttagagtgtattcagagtggtaacaggtaagcatttttggattaatgaatgggatccttggtgtcacagtgagaagaaatctgctgaaaaattaaataggttgttaatagcctataaaagaagtttatttcctcttgtcctcctttaattttcttcatcctcagatggtctggtgatgactgagacccccaccctgtgctgtgtgttgtgtgctctgagcatgttgtgttaacagtttgcgtgaggattctgtatcctgggagctgttctgctcgttaggatcctggtggtcttgcctggttgtccttggatgaggattctgtatcctgggagctgttctgctcgttaggatcctggtggtcttgctgggttgtccttggatgaggattctgtatcctgggagctgttgtgctcttgttaggttcctggtggtctcgccgggctgtcctgtgcttctgggcatagtgctgttgctgaaccctctagatggctattctggcttttcctaggagctgg

SEQ ID NO: 19345 - DNA, 1035 bp, Homo sapiens
aaagtgctgggattataggtgtgagccactgcgcccagccaggaagcaagatttttaatggcagtcttgcaagatcaggtgcctggtaggcaggtacacccggggcagtcacagcaggtagtttatctcctctaatgcaagtccctcccccagttcctcactggtcgagtactatggggttacaatcttcccggaggtcgcctgagtttcattatcccgttgtacgccgtccccttacccgcttacaaggttgtaccctgtcctcttacccgcttaagttttgatttcccaatactgaaactttcttcccatttatgggctgacccctcttctacattttgttcgcttattgtgaccttctaggtgcacgagccgtgcggtttgttacatccgcaggctggctgccattgcgtagatttatcatgcctggaaaacggaccatttaaaacgttttcttacaccatcgaagcacatctgggctgattccagtttctggtgcttatgaataaaacagctgtgaacaactgagtggagtttattggaccatttttgacctctagtaatggtgggctcacatgtttgagttgagttgggtcaggtgctgagtgcctgctgctgcaggcaccaccttgtgctttcaggttaactctaaccacacatctcatgccttctctgtgcatgtatttgaagttactgaaaaagtatttgtcaagaaagccacagctccgcactagtctcttaaaacccatccgtatgctcctgtactcatgaaaggaatgcactgcgggccgttctgtgggaagcagggaaaagacagacctggccctgagacaggctggtgtgactgccgttcggagcccagggttaatggtgctggttagtcagccagtgtcgggggcagatgcccatcgtcagtggctcccctgtggaccctcccacccagcctaacgcgaatgaaaatcattgtttgcataaggtcatagctctggctagcagcgttttgagaccaaggccagtgtagggacctgtctttgc

SEQ ID NO: 19346 - DNA, 1030 bp, Homo sapiens
tgtggctggtggcactgtcattgtgtgtccagggtcctgccacaaggatctcagggcttcacttcacagcccttgatggcctggcagccagaattgagtctgtgggttttttttggtttttgtttttgtttgagacgggggctcgctctgtcacccaggctggagtgcagtggcatgatcacagctcactgccacctctgcctgttgagcttaagtgacctttccttcttagcctccctgtcagctgggagtacagatgcttgccaccacacccggataagttttgtgttttttgtagagatggggttttgctatgttgaccaggctggtctcgaactccagggctcaagcgatctgcctgtctgggcctcccaaagtgctgggattaggggcgtgagccactgcgcccgtccacctcagtgttaaactgtttagatgcagctgtcacagaagctttaggagaacctcatctgttttcatattagaagctgttttcttgttctcgacactctgtatcccaatagctcattcatggaaaacacacccaattagggactgatcaaggattttctacccactgccttcatgaaatgcaattggaagtcctttttaaacagttttttttttttaaagatggtggttctaagtgtggatccatctgaagaacaaaacaaagcttcatattctcttaggcaggaacatatactaggctggtttttttttttttttttttaacaaaaaatttttttttttgtttttgtttttgagacggagtttcgctcttgttgcccaggccagagtgcaatggcacgatctccgctcaccacaatgtctgcctcttgggttcaagtgattctcctgcctcagcctcctgagtagctgggattacaggcatgcaccacctggctaattttgtatttttagtagagacggggtttctccatgtgggtcaggctggtctcgaactcctgacctcaggtgatctgcctgcctcagcctcccaaagtgctgggactataggcgtgagcca

SEQ ID NO: 19347 - DNA, 1073 bp, Homo sapiens
tctgtgtgctccatgtaggtccactcagacagtcttgggaactcccgaggtgcgggtgctcctctgccccttgtggcagagataagtcagttgaggcacaaggaagttgggccacttgcccagggaagttagaagttgggagtggacgccagcactggaccctgggcaggctggctccagagtcctgcctcgaattcacaagttctgtctccagtcatgttttacttcctgttctccttcatgtaatacttcctgttcttcttcttggacaggtcagtggcatccggtctcttttgtttgccgctgtgtcttcagcacatcacattgtcctgagtgtcctgtgcttgtattttcccatatgttttttcgtgcttgaacagatgctttgtgcttttatttaaataacatctgtcttgcctcctttctgttagccacactttttaaagtatgcaatacaagtgatggtcagctggcaagcagctttgtcctaggggacaccttagcaggcaggacgtgttcctgtgaaacgtggtttggcttgtaatagtgtctgggaaggaagagaattctgtcttgtcctacttaaattagtactttaacttagttgaaattcctattagaaattttgaggaaacttccataaggaaatgtgtgttctccaagggattcctcttccattttaagttggaagttgttataaacatggttattgacctcgaacaataattttcttatttctgggttttgaaacgttgatgtaagcaactgaaacaaaatttaatgtcagagaagtagtgagtatctaagaaatgcacttaatccctgaagggcagggcaataaaaacaaaaaggagccaagatatttatcttgttaaatactattatgaaaacggcaacaacaacaacaaaaaagaaatgtgcttcagatgttctgtgcagccgggcgtggtggcttacatctgtcatcccagcactttgggaggccgagtcaggaggattgtttgagcccaggagtttgacaccagcctgggcaacataaggaggccctgtctctatttagaaaataaaataaa

SEQ ID NO: 19348 - DNA, 1070 bp, Homo sapiens
cagttctctggtattagattcacacggtgcaaagccatcaccaccatccctctccagaacttggtcttcccagacgacaccggctacccattaacactaactcttcatccctctccccataacctcgactctccccataacccctgaccaccaatctgctttctcttatgaatgtcaccactcaaggcacctctcctataaggggggggggggggtcatacgatatttgtcctttcttctcttatgaatgtcaccactcaaggtgcgtctcctatgggagggggtcatacgatatttgtcctttcttctcttatgaatgtcaccactcaaggtgcgtctcctgcgggggggtggtcatacgatatttgtcctttcttctgttatgaatgtcaccactcaaggtgcgtctcctgttgggggggggggtcatacgatatttgtcctttcttctcttatgaatgtcactgtccaaggcacctctcctgtaaggggtggggggtcatacaatatttgtcctttcgtgactggcatatttcccttttggatcagtttgttcctgtgggtcagaatcttcatttgaacagtttgccccacagctcagattcctcaattgtgactaccccctgcaggtcaaattcaatttttgtttacttatttttgagacagagtcttgctgtcttgctcgggctggagtgcagtggtgtgatcgtggatcactatagcctcgacctcctgggctcaaacaacccgcctgcttcaaccttccatagtgctgagattacatgcgtgagctgctgtgcccagtgtcaaatttaatttttgttttgttttgtttttgagacagaatctcgctctgtcaccaaggctggagtgcaatggcactatcttggctcactgcatcccccacctcccaagttcaagcaattttcctgcttcagcctcctgagtagctgggattacaggcacctggcaccacgcccggctaattttttgtatttttagtggagacggggttttgccatattggccaggctggtcttgaactcctgacctcaggacatttataggat

SEQ ID NO: 19349 - DNA, 1927 bp, Homo sapiens
agcaggtgggggctcgttgcttgtagggggtgggctgcatgcgctctggtgtttacctggtgtgcctgagcccacggccagtgcagcaggttctgccagcatctttttctgggcagcttgttgagtttatgacacaatctccttttactggtccctgttgtgattggcaccctgaccttttagaaagtgtgatggtggccaggcgcggtggctcacgcctgtaattccagcactttgggaggccgaggcgggcagatcatgaggtcaggagatcaagaccatcctggctaacacggtgaaaccccatctctactaaaaatacaaaaaattagccgggcatggtggcgggcgcctgcagtcccagctactcgggaggctgaggcaggagaatggcgtgaactcaggaggtggagcttgcagttagctgagatcgtgtcactgcactccagcctgggcgacagagcgagactccgactccgtctcaaaaaataacaaaaacaagaaagtgtgatggtggctgtggagcagaggagtcttctttagctcgtccacgtgacgtgcaggagtacatgggagtcgtgtgctggtggacacacagaagcgactttttcctttgtctcatggtggaatgctggaggagcaagtgttcccacctgctgagcagctgaaagcaggctttccgcggatgtgtgcgggcgggcggtgtggcacagaaaggcctcgatggactgtctgctcttcacggcaagagtgtgctgcccctgttctctgtcgtggcctctgctgtaaagatgagagaagtccaacgccagtctaattcatgattcttttttagttaagctttttaggattttgtggaaacttgtaggattttctgttgatatgtgggagtctgacattttgctatttttagggtttagattgtgacttttttatattggttagcatcttgaagctcttttaatatgcagacttgtctttttaactccatctcagtttttctgtcaagggccagttagaccttgtggccgcatgttctctgacagctcttcagctctgctgttgtatcatggaaggaaccggggccacacttaaaacgagcctggctgttttccagttacaactattactaacactgaaattagaatttcatataattttcacttaccacaaaatgttattttctttttcaaccaggtataaatataaacctcattcttagcctgtggactgtctaaaaaagacattgggccagattcggcccctgacccccaggtggtttccccatcatagtaatcatagtagatgaacttggaactgtgtagctttattggtttttcatccttgaagcttgcttttcctctgcagtggtcctgactttctgtagagtttgatctctgcggcttcttccttctgtagagtttggtctctgttttctctaaacttaagttatttgtctgatttcatttactttctgttaatttaggtgcttaattctggtcaactattgacatgtcattcttctgttttccagtgctgttacagatttattcttttctttttttctttttcttttcttttcttttttttttttttttaagatggagtctcactctgtcgcccaggctggagtgcagtgttgcgatcttggctcactacagcctccacctcccaggttcaagcgattctcgtgcctcagcctcctgagtagctgggattacaggtgtctgaccccacgcccagctaattttttgtatttttagtagagatgaggtttcaccatgttggcctggctggtcttgaactcctgacctcgtgatctgcctgcctcggcctcccaaagtgctgggattacaggcgtgagccaccacgctctgccagatttattcttttcaaaatgtttgttactttaagaaattttagataa

SEQ ID NO: 19350 - DNA, 1057 bp, Homo sapiens
atgcacatattaatagatacctaattaatatttggttggaaatcttaaaagttaggattttttttttctttttttttgagatggagtctcactctgtcgcccaggctggagtgcagtggtgtgatctcggctcactgcaacctccgcctcctgggttcacgcgattctcctgcctcagcctcccgagtagctgggactacaggcacccaccaccaggctcggctaatttttttgtatttttaatagagtcagggtttcgccatgttagccagaatggtctcaatctcctgaccttgtgatccacccgccttggcctctcaaagtgctgggattacaggcgtcagccatcacgcctggcctaaaagttaggatttttaaaaaggcttgtggtctgagaaggaaggcaataatacttggcaggaaagacttaattttttttttttgagactgagtcttgctctgttgcccaggctggagtgcaatgacacgatctcagctcactgcaacctctgcctctcgggttcaagcatttctcctgcctcagcctcccgagtagctgggattagaggtgtgtgccatcacgcccggctagtttttttttttttttttttgagatggagtctcgctctgtcacccaggctggagtgcagtggcacaatctcggctcactgcaagctccgactcccaggttcatgccattctcctgcctcagcctcccgagtggttgggactacaggcacctgccaccacccccggctaattttttgtatttttagtggagatggggtctcaccgtgttagccaggatggtctcaatctcctgaactcgtgatccgccccctcggcctcccaaagtgctgggattacaggtgtgagccactgcgtctggcctttttaaaatttaatttaattttttttgggggcggagtttcgctctgttgcccaggctggagtgcagtggtgtgatctcagctcactgcaacctccgcctcctgggttcaaatgattctcttgcctcagcctccagaatagctgggattacaggcatgtgctacca

SEQ ID NO: 19351 - DNA, 1046 bp, Homo sapiens
gcctcagcctcccgagtagctgggactacaggcccataccaccactcccagttagtgtttttttttttttttttttaaagtagagatggggtttccccatgttggtcaggctggtctggaacccctgacctcaggtgatccagccgtcttggcctcccaaagtgctgggattacaggtgtgaactaccgcgcctagccagaaaccccacagtgctaaagctggctctgtgaataaagggttaagagggttttcagtgtgaaaataaaagtaagccgtcctgtctgtatggctgagatttttcaggggcctagaggaccgaatcctgttgagtgaaaatccagtcttctgggcttccccacacccgctttctctcttcctcttggaggtcaaggttgagacagctgtcagggtgctgctgtctcagttacagcgtccttgtggctggtggagggtgagacctgtttccaggcctgtccttcgcatctgtgcagtgaattatttattatcctggaaatctgtagggctcttttttccacgtgtaaagcaaccaatgtgtacctgttcattatttgaaaatgttggctttttctcaacaaaccatttttataccatatgaaaatttcttttgtcatggtaaaattcagaagactttccccttcattacttaactctaaaaaatgtgacttttaagaatggctgaaattgaaatgttatttgtaaatgcctaataactttatgatatcagaggttattttttatgtaaaattagcaaataaacctcttttcttggtgcattgatagtaagttgcccttcctcgactccctatggctcttttcagacttaggatgctaatggcttagaataaattttggaatgcagtatttccaagtaaagggaagattgcgtaggctgcttggttcctgaggttttactagagttaggattagcttactgctgcattcatatctgacacaatcaaagaagactttggtttaattctggatgatgatgtaaacttgaaatcattatggctgtactgtttaa

SEQ ID NO: 19352 - DNA, 1014 bp, Homo sapiens
tcccaagtagctgggattacagacacctcctaccaaacacggctaatttttttttattgttagtagagactggagtttcaccatgttggccaggctggtttcaaactcctgacctcaagtgatccacctgcctcggcctcccaaagtgctgggattatagacgtgagccaccatgcctggcctcaaatgttatttttatgataacgtcccaaatggtgactgtggcctaactctgataccatgccccattcttgaccctgccccaagcttccagtcattctggctgcgttggccttgcctttcctcagttgggccatgtgccatagtttgtggcatggcctcgacatacctcgctgccatctcatgcagatccccccaaactccaagataactcctactcagcctttgcgtcttagtgtaatatcacttcctttagtaagtcttttttttttttttttgaggcagggtctcggtgtgttgctcaggctggagggcagcggccagttgcgtgaacgtggctctcttcagtctcgactccctgagctgaagcgatcctcccacctcagactcctgagtagctgggaccacaggcatgtgccgccgtgcccagctaatttattttactttttgtagaaacagggtcttcctgtgttgtgtaggcctcagccttctggggttggcttacctcagtctcctaaagtgttgggattataggcatgagccactgtgctcagcccccttttgttttcattacaagtttgcttttataacttagataaaggtgggaagacagttttcacaattaaggcagaacaagagataaagaaacataaagggagagttgtctttgtgggaagaaagtgctttctgtgaaagcacttttagcaggactgctgttttcaggccagagtagaagggccagaagcagtttttattcagatttcctcatcgtttccatcaaggtctcagtgactgtaaaggatgggttgaaatcagtctggactaagtgtggtt

SEQ ID NO: 19353 - DNA, 1073 bp, Homo sapiens
tgctgaggactaataaagtctgtggtaaaagcatgactggctgctgagagaatggactctagagaggccagaggtgggaatgtgaggccagggaggagggaggcttttgcagcagtgccagaaggtaaggatcctggcaggaccgaggcatggggctggttctcccagaggatccagtaaagcctggggtgtcttggtgcccactctgggctgcgttctctgatctgcagcgccaggaagagagaagccagcagaggccagcatgtggctgctggtggcccagctgctgagggcgatgagggtgagtctccagaccggcctctgaaacgccaggacagggccgcagacaccaggctcagtgtggacatggagcaggaggagggctttctttttgttgtaacttaaagggctggtttgacaaggaacaggtggtcatttcatttttttttttttttgagatggagtcttgctctattgcccaggctggagtgcagtggctcaatctcggctcactgcaagctccgtctcccgggtcacgccattctcatctcagcctcccgagtagctggggctacaggcgcctgccagcacgcccggctaatttttttctatttttagtagagatggggtttcaccgtgttagccaggatggtctcgatctcctgacctcctgatccacccgcctctgcctcccaaagtcctgggattacaggcgtgagccaccgtacccagctacaggtagtcatttctacataaaatccgaaccccggctggcccacttcagacctcctcacctcgcggacccatggacaaacagaaccacatgagtggacttgggctggtgctgggattttcctggggtgctttcagcagccttccagagaccagcatgcctttctggtttctggaacgctcagtgagctttggctggggagcacaagggctgatcaggttaagttcaagattatctggagatggacaggtacttttgctttatacacaccttgaaaccttgaacgaaagcatgcagtttgggtttaccatccccgtccctgctgtgtattttttttttt

SEQ ID NO: 19354 - DNA, 1047 bp, Homo sapiens
cctcacctcccacccagctgagcagcctgtgattcaaatgctcaaaggaagccaggtggccactccgagcggctgtgcctggggaggggcctctccaccgcagtgaggctgggctctgggaaacggtctggacagtgtgggtggtgagggtccctgccccccgtgcagagatcagcaccttttcttagggtcgtacatgaacaggaagtgcagcaggcgcagcccggcctccgacagccatgggaacttgtgcttcaggttgttgtagggctgcttccggaggctgtactggccgaccagtggcagcttggaaaagccctatgggaggcaggagctgaggcgcagagggcgtgggcacgggcgggggctgcgggcgcagagggcgtgggcacgggcgggggctgcgggcgcagagggcgtgggcacgggcgggggctgcgggtctgcccaggacgcccaccggccagatgttctcactgggcgtgcccagcagctgcacgatcaagtcgatctggtggatctcggaagtgccggggagaagaggcctgtgcgccagcagctcggccagtatgcagcccacagccctgcagagaacagtggacctcactgcggccagacgtctgctgaccccgccagcgcgaggaacagaggacctgactgcagccagacctttgctgaccctgccagtgtgaggcacgctgggtcagggacactgtgaaggacaggcagggaccactggctcccctcctgggccccgcaggcctcccggggtgacaagtgcaggggcaggcgtgcctcctccagacctctgtgctcccagcctgagaacagcaagctaagttctcacacctcctcctgggtttccaggctcaggcccacctccctgggagtgggaggctggcaaagaccccactgcactcctgcccctcccctgaggctgagctcaggaaccaggtgacccggctcctgtcccagcccttcctgaggccccaggagcggtaaccgtatctcctcaccacatgtcgatgctggtggtctgcgtggtgg

SEQ ID NO: 19355 - DNA, 1137 bp, Homo sapiens
gggtggtctcaatctcctgacctcgtgatccacttgccttggcctcccaaagtgctggcattacaggcgtgagccaccgcgcctggccaggttgcccaatttcggttgttattcctttatttaagaaacatttactgagctcctaccatgtggcagacaattctagagtgttctagaagcagggagtatagaggggaataaacaagcctgcccatatggcacctttgtatcaatgagggcagatgtggcacgtataaggcacccacttagacttcaccctaccctggctgggctatggctgctgtccgggagctgtacacctgtgtccaggccctggcaacacacaggtagatacagaagtggattaaaggtaggaatgagccctggagataacagacagggccgtgtgagaggaaatgaccaggcaggagcagaggctggtgtggagcaggtggtgcagactttgaggagtgatgccagccttgacttgggggcaccaagaagtgggtaaatgaagcagtgaacccccatgagtcccagggctgatgactgagaccatttgagactatttgagaggccagatgtgctgttctgggcataggagtagggagcccagaggaccgttgggtttaagggtgtggagtttagggtggaggtcagggagaggggaatgtggtcactgcagatatggagtatcctggtgggtatatgggcctcagggtgcctgccacacctagactcaggagagggttggcaacagccaccctgtgctcctcgtccttccggccatcaggggccttccaggcacatgcagcactgtcgcctgcacctggatcctggtatcagattctggatgaaaccaatggaagtaataggaaaaggaaaacataggggccacaaaaagaaaactcgctgctgcctgcggcaaaacacgtgctgatggttcaggtcgtgccaagcccgctctgcaggcgcttccttcactcacccccgtttctcctcccggctgctctctggggtggagtctaaggaggaggtcagagggaggggcttgtctgctgcatgaggtcatgctgcatcaggtcaccgctgcgtggaagttgtgttgagatgtgttgcgggattttctttcttttc

SEQ ID NO: 19356 - DNA, 1034 bp, Homo sapiens
ccaatgctcaggccatccagttcggaatgcactaaattcagttttatgaaattcaaagtaactttttccttcatcccttattttgtatggattacatttatatgttataatttctgttttcagattttgtacagcagcaatttcttactctctctgcaagttttcttcccagtcacgagatactttgtgcagctgcttatctccaggccttattaaaaaggtaggttcactcttttcctatttttccattctgccatacgtttcaggtttacgcagctttcggaccggaaggccgaggtctgctgccgctttgtgcccatctcaggggcagctcctgggtcaggctggctgtcatggggcagctcctgagtcaggctggctgtcatggccacctctgctgtctgcttaggcagcctgactgctgagtgctgcctttccttgtgttctctgagtgtaaagtgaagttgtatgaagacaactacaagtctgtaattgtaatgaaatagatgttggcatttataggatagatgaattaaaagatcagtattcataataagtatctttccctggaaagaagaattcttattcctctcatctagtaaatgttccttacattgttcagacaaaggaatttttttttttttttgagatggagtcttgctctgtcgcccaggctggagtgcagtggtgcgatctcggcccactgcaacctccacctcccgggttcaggcagttctcctgccttagcttcccaagttgctgggattacaggcacgtgccaccatacccggctaattgttttgtatgttttttagtagagatagggtttcaccatgttggccaggctgttttcgaactcctgacctcaagtgatccacccgccttggcctcccaaagtgctgggattacaggcgtgagccgctggtgcccggcccagacaaaggaatttaaagatgagcattggaaaccctgaatgtcaaaagtaaaggtgaaatggcactgcaaaccagtgttgtccttttataggattttaa

SEQ ID NO: 19357 - DNA, 1085 bp, Homo sapiens
ggctgtttctggccccaaaacctaaaatatttttctggccccttacacacaaggtttgccagtcccgcctgctgctgtagaattttgtgattggcgattacttgagggctgctattcccaagattggggaatgggggccctgggcaccagtttgcattgtaacatgccctccaaacaagcctgttttggaggtctttttgcaaagcagaattgcgatgtctgtggcgggagcgctggccggcttccttcctgctgctcccgtccccaggacaccacgctcatgagaactgtgtctctgcaggctgtggacctcctgctgacgtctttctgtcagaacctgatggctgcctccagtgtcgctcccccggagaggtgaaggcgcgggcagctccctgagtggtggggctcctctgggtgccacctcttgctgggccaagtctgcagaccagggactcatgagctcgtctccgcaggagcatgcggcgatgctgagtttcatcaaataggacgcagcagaagttgggaagcactgcagaagatgggttgtcttccagaaagaccactgttttggggaacagcttggctctttcttcggccgctggtggttggattagctgttggagggatgtgcaggactgaatggctagtactgatggtttcacggctgtctctgcaggcagggtccctgggctgccctcttcgtgaggaccatgtgtggacgtgtgctccctgcagtgctcacccggctctgccagctgctccgtcaccaggtgaggctctccttcatgggggccacccttgggggcccactctgagggccaggctgctacttctcaattcgtcttcagtgccctggaaaattccagcttggaagagggcagtctgctctgccaccctcattctcgttgcagggcccgagcctgagtgccccacatgtgctggggttggctgccctggccgtgcacctgggtgagtccaggtctgcgctcccagaggtggatgtgggtcctcctgcacctggtgctggccttcctgtccctgcgctctttgacagcctcctgacctgtaggacgagggattccttg

SEQ ID NO: 19358 - DNA, 1010 bp, Homo sapiens
ctgcaagctctgcctcctgggttcacgccattctcctgcctcagcctcccgagtagcctatagtgggcctacagatgcctgccaccacgcctggctaattttttgtatatttttagtagagatgaggtttcaccacgttagccagtatggtctcgatctcctgacctcgtgatccgcccgtctcggcctctcaaagtgctgggattacaggcgtgagccaccatggccggcctaatgaaaacattctttactttttacttttttttttttttttgagacggagtctcgctctgtcgccctggctggagtgcagtggtgcgatctcagcttactgcaagctccgcctcccgggttcacaccattctcctgcctcagcctctccagtagctcagactacaggcacctgccaccacacccagctaatttttttgtatttttttagtagagatggggtttcaccatgttatccaggatggtctcaatctcctgacctcgtgatctgcccgccttggcctcccaaagtcctgggattacaggcatgagccactgtgcccagcgtattgtttttttttttttttttttttttggaatggagtctcgttctattgcccaggctggagtgcagtggcgcagtctcagctcactgcaagctccgccttccgggttcatgccattctcctgcctcagcctcccgagtagctgggactacaggcacccgccaccacgtcaggctaattttgtgtgtttttagtagagatggggtttcaccgtgttagccaggatggtctcggtctcctgacctcgtgatccgtctgcctcggtctctcaaagtgctgggattacaggcgtgagccactgcgcctggccctccattctttactttttaagacctttttattttaaagttacgagttactgaagaacacttataggtgacattaaagtgttaggtgaaaatatttaatataattttccatttataatttattgctgtttataaattacttttt

SEQ ID NO: 19359 - DNA, 1026 bp, Homo sapiens
tagggtggcaggagctcgtctggttttgcaggtaagcggttcagtgttcacagaggcccacattctgtctgcaggttcactatgatgcgttcagggccatgcccatttaaaatctccttccttccctgactcactgcagcccccaggactttgctgcagcccccttcgttcctgggagggtttgctcatgttcctcgcttgctctgctagggtcttgcagcttcattgtctgaggggtggccctccttggcctgtgttccttacccacctctcttgcagtgatctgtccactggtggatgaggttagaagttaaagtgtgttcagaagtggcttcatcccacaaaatcaatttgtttgctgtgcacaaacacttcttagggcatttagcaaattgtacccctaaggatcccaaaaggatcccatagttagtgtttgttatagctaatgatttttaactgtttttcttcgaataacttttagatatctcttcagtcaaagcgcagtcgtgacatctgtaaatgtatgaaccacatgactttttggtgtttctcttttttcctttctgtttaggaggccgactacagcagccgcccggacactgcctaggtgggcttcacactcttctctccacacaggacactgcctaggtggtgcagctgcgcctggctgtcctgggcttcacgctcttctctccacacaggacactgcctaggtggtgcagccgcgcctggctgtcctgggcttcacgctcttctctccacacaggcctcctttgggagcacacgaggctaccatggctgcagcaagaaggccctggtcttcctgtttacgttcttgtcagaactcgtgccttttgagtctccccggtacctgcaggtgagaagctggctgccacatccatgatttctggtgcttcgctcacctgctgcatctgaggactgccttggcctccccaagagcctcctgcagatctgctctgagcctctcagccaggcccttccccttccccttccccttccccaagc

SEQ ID NO: 19360 - DNA, 1064 bp, Homo sapiens
ctcctgagtagctgggactacaggtgcctgccaccacacctggctaatttttgtaattttggtagagatggggtctcaccatgttggccaggatggtctcgatctcttgagtttgtcatccgccccacttagcctcccaaagtgctgggattacaggcatgagccaacgcacttggcctgaacatctgttttaatttttacttttgagggcaaataccagcactgtgggaggacgaggtgggccgattgcttgagcccagtagttcaagaccaccctgggcaacgtggcaaaaccctatctctaccaaaaatacaaaatttagctggtatggtggcaggtgcctgtaatcccagctactcagaaggccgaggcaggagaattccttgaacccggaacgcgcaggttgcagtgagccaagatcagaccactgcactccagcctgggcaatggagcaagaccccgtctcaaaaaaaaaattttttttttttacttttaggaaatgttaatataagtagaccaaatgatcgtgaatttgagccctttggggtaattaatataattctcagcatatcacattatgtagttaaatgtaatttgtggggtttttttgtttgtttttttgaggcaaggtctctgttctgtctcccaggctgggatgtggtggtgtgatcatggctcactgcagtctcaaccttccaggctcaaatgatcctcccacctcaacttcccgagcagctgagtccgcaggtgtatgtcaccacacctggctaattattaaaaaattttttgtggacatagtgtctcactatgttgccctggctggtctttttgtttttttaagatggagttcgctcttgttgcccaggctggagtgcagtggtgcgaccttggctcacggtaaccacctcccgggttcacgccattctcctgccacagcctcctgagtagctgggactacaggcgcctgccaccacacacggctaattttttgtatttttagtagagacagggtttcaccgggttagccaggatggtctcgatctcctgaactcgtgatctgccc

SEQ ID NO: 19361 - DNA, 1197 bp, Homo sapiens
ttggccaggctggcctcgaactcctgaccttcggtgctccacctgccttggcttcccagagtgtcgaagtgttgggattacaggtgtgagccaccgcacccagcgtaaaatagaaatatctttattttatttatttatttatttatttatttatttatttatttattggagatggagtcttgctctgttgccaggttggagtacagtggcgtgatttgggctcactgcaacctccacctcccgggttcaaaccattctcctgcctcagcctccacagtagctgggattacgggcatgtgccaccatgcccggctaatttttgtatttttagtagagacgggctttcaccatgttggccaggctggtctcgaactcctaatctcaggtaatccgcccgtctcggcctcccaaaatactgggattacaggcgtgtgccgctgtgcccagccgctgtctagtcttttaaaacttggtgtttgagcatgcacattctccttctggaatacctgatcacccagcacaactcacgttatctttctgctggctacccttgccttgctgtgactgtgtcatggttctcagctagactcggtggcgtgtttgatggcccaggcatcgtctgcccagtgggtgtcctgttacccatgtatgacagactgtacccaagatatcagtcttacgaataaggccacgatgaacactttgagctttttctgtatctagcatatccccagggtagatgctcaggcaggaaactggtgggagatgagggatacacagatggctcccaacaggtgctgtgaggtgctcaggagtttatcatcacttgactgagctgagcttcctttgaacagcatccccaccatgattggtttattcccagtttatcttattttatgtatttatttatttttttgagacagagtcttactctgttgcccaggctggagtgtggtggtgcgatctcagctcactgcaacctctgccgcctgggttcaagctattccctgccaagcttgaattacaggcgcctgccaccatgcccagctactttttgtattttgagtagagacagggtttcaccatcttggccaggctggtctagaactcctgaccttgtgatccacccacttcggcctcccaaagtggtgggattacaggcgtgagccacctagcctgaccttactgacagtttaa

SEQ ID NO: 19362 - DNA, 1034 bp, Homo sapiens
tgagggtggcctgcctgagtgtgcagcagggaggtgtctgccaaattaaagagccaagatattttaaacacttccagagcttcagcagcccgctcctgagcacacttcctctgccagttacgataacgtgcgtgaggaggaggcgaccatgggaaagcccggggaacgctctggtcagccttttcctgtgaggatgaggtcggaaggtgcgcccactgcagtatcctgttccgcctctggaagtcctgcaccaatgtttgtcccactcactgtgacctcctcctgtgtggagtctccccttgctcctccttccctgggtgtgattcaggctctagagctggccctgcctctcagccccccacatttctagaacacactgtagctgtgcctctacagactcccgctgcctggcctccacagatcctgctcagattcaccagtaggcaaagcttggccctattagctttttctctccatggctctgtggagatgtgcggagacccttacaggtcgggaggcggaagctgaggagtgggggctgggtggaaggtggacatcggggtttggtggaaatggggctctggggtttgcttccctctagtgtgggcaggggaccttgaagtgaagtcttgagaaaccagtagaatttgccactgtttccaggccttgtcaaccttttcattctttattttgctcctcatttcccatccctcacagtaactgtttaactgctcaattaaatgtgttgtaccgttcggtacttttactgaaacagtgaataaagcactgtgtgatttcctgaatgtttacatgtgcatcagttagcttgggctgctgtaacaaagtgccagagactgcggtgtggacggcagatgtgttctcacagcagtggaggctggaagttggaggtcagggtgcccctagggttgggttctggtgaggaccctcttcctggcttgcaggagacctactttttctgtgtcttcatgaggtagagaggggagagcaagccctctggtgtcttctccgggcag

SEQ ID NO: 19363 - DNA, 1026 bp, Homo sapiens
aacttgagactgggcacagtgccacaccagtcatcccagcactttgggagggcaaggtgggagattgttttgagcccgggagtttgagtccagcctgggcaaagtagtaagacctccagctgggcgtggtggtatgcgcctgttgtcccaactactcaggaggctgaggtggaaggattgcttgagcctgggaggtcgagggtgcagtgactgattgcgccactgcactccagcctcagtgacagcaaaaaactgtctcaaaaaaaaaattgggacatatggctcaactcaatcccctgatgatgggatttagttgagccttacgtctgcctctgtgtgtgtctccagccatcccgacatgcatgctgtgggatcgtggctcttcaggaatctgtgctgcctttgtgaacagatggaagcatcctgccagcatgctgacgtcgccagggccatgctttctggtgcgttcatgacaagatgcgggttcttgggtaaaactcattttgatctgtgataatgccttctgctctcaagagctctgcgaggcagaacagcctgtctctccgtggccgtgggaacctggcatgacagactcccagtctcagcctgttgtggggttgcattttacttgactgatgtggaaatactagtaagtcggccttgacatgagtttaagtgtttccattcacctttcccatagagtgaccgcagctgcttccttctgtcgcccaggctggagtacagtggcgcgatctcagctcactgcaacctccgcctcctgggttcaagtgattctctgcctcaacctccttagtagctgggactgcaggcacgtggcaccatgcccggctaattttttttttgtatttttagtagagacggggtttcattaggttggccaggctgctcttgaactcctgacctcgtgatgcacccccctcggcctcccaaagtgctgggattataggcgtgagccactatgcctggccttcctgaggaatgatattatgagaaaaacttgggact

SEQ ID NO: 19364 - DNA, 1025 bp, Homo sapiens
actgcactccagcctgggtgacagagcgcgactctgtctcaaaaaaaaaaaaatagagtgtgagttagggggatgagaaggggaggctgcagggagatcagggcagtgtgacaggcacagtgttcacagtgagtggctaaagcagatcctgttttatcaaatgggagagggttgagtgagaaagacaagggacatgcacagggcacactgaagcctgacctttgtcctggcagcttcgaggagccagtgaaggcttctgaaggagagactgtcatgtcagtgtgtgtaatactgtgttggctgtagtgtggagaaagggttagaagtaggctacagtgcgtaggaagagagaaggaagagaagcaagtgttgggcaacggtgtgtgggtgcccaaaggccagggagtttgaaaaccagtacagctttgtaaaaaaagatgtgtttcaggctctaagtttttgcttgaggttaattttcaatacggcatggttaagaacctaagttgaacattttgtaggaaaatgcattcataaaggactcagaatgctgggggtttttttgtttttgtttttgtttgttttgttttgtttttcagagttctttgttgcttgaagcggtgtggcatcttcacgtacaaggcattgtgagcctgcaagagctgctggaaaggtagcgtgctaatgatgattcagtgttactgtttttgcagtctagtctagtataaattatatttcaaagcccagaatcagacgggtttgatttctggctttgacatataatttgtactagactagattgcattgcatatttatactagactagacctggaggaactattgctttattatttcaagagaacgtttatggtgttttggttttgtttgctttttgtctgttttttttttgagacggagtctcgctctgtggcccaggtgggagtgcagtggcacgatttcagctcactacaacctccacctccagggttcaagcaattctcctgcctcagcctcccaagtcgctggga

SEQ ID NO: 19365 - DNA, 1009 bp, Homo sapiens
cggcctcctgcagtgttgggattacaggcatgagccaccgcaaccagcctgtaaatgtttttacttatgtattgataatgtgtttttagagccagtacattacaataacaggttcgtactgcagttaacagttttttttttttttttttttttttgagacggagtattgctcttgttacccaggctggagtgcaatggtgtgatctcgactcaccgcaacctctgcctccctagttaaagtgattctcctgcctcagcctcctgagtagctggtattacaggcatgcaccaccacgcctggctaattttgtatttttagtagagatagggtttcaccatgttggtcaggctggtctcaaactcccgacctcaggtgatccacccgcctcggcctcccaaagtgctgggattacaggagggacccactgagcctggcctccagtttttttttgttttgtttttttgagatgaagtctggctctgtcgcccagactgcagtgtagtggcgtgatctcggctcactgcaaactccgcctcctgggttcacgccattcttcgcctcagcctcctgagtagctgggactacaggctcccgtcaccaaacctggctaattttgtttttgtgtctttagtagagacagggtttcaccgtgttagccaggatggtctcgatctcctgaccttgtaatccgcccgcctcggcctcccaaagtgctgggattacaggcgtgagccaccgtgcccggcccggtttctttaaacaattaattttggctcacgtggtggctcacacctgtaatcccagcagtatgggaggccgaggcgggcggattaatgaggttgggaattggagacgagcctagccaacatagtgaaaccccatctctactaaaaatacaaaaaattaactgggcgtagtgacgcgtgcctgtaatcccagctacttgggaggctgaggcaggagaatcgcttgaacctgagaggcggaggttgcagtgagctgagatgg

SEQ ID NO: 19366 - DNA, 1076 bp, Homo sapiens
tttaaaaacagcgtctgattcaacctgcgactcagaagcagtaggacccagagtgtcccttggaaaaacatgggacatagcaacagcagggatgtgccccttgctcatggaagtagtgagacaggctgtggtgtgcccaggagagcagacgggagaacaattttctaggtacctccttctccccccagtttgagagtgggagatagggtaagttctgggtcaacaacagtaagttattttctgatccttcacgtccttatgtgatgacttgtttctgttaaaataaccttcagtaatagcgctcccttgacaactggtcactgaatgtcattggcaaatgatacagattttcactgccatgattgtatttgaatttcacaaattgcatattatcattccaaggaaccaagctcagccacacagataaacctttaattcattaatttttgagtttgtttttttctgctaaagatatagttagtacatgcacgcacgtgcacacggacacacacacacacacacacacacacagtaaaagacttgtagataaaaaaactttcctatggagacacattggaaacaaatgactagaaattggcattgttggcctggcacagtggctcacgcctataatcgcagcactttgggaggctgaggtgtgcggatcacctgaggtcaggattcgagacgagcctggccaacatggtgaaaccctgtctctactaaaaaacacaaaaattagccgggtgtggtggtgggtgcctgtagtcccagctattcaggaggctgaggcaggagaattgcttgaacgtgggaggcagaggttgcattgagccgagacccctccattgcactccagcctgggcaataagagcaaaactctgtctcagaacagaaaatggcattgtctacttttttttttttttttaacagacagggtctcactctgttgcctggactggagagccgtggtgcaatcacggctcactgcagtcttgacctcctggcctcaagtgatcctcccaccccagcatcttgagtagctgggactacaggtgtgcgccaccatgcctggc

SEQ ID NO: 19367 - DNA, 1025 bp, Homo sapiens
ggtaaggacatcaaaggccaggcatagtggctcacactcgtaatccagccctttgggaggccgaggcaggagggtcacttgagcccaggagttcaggaccatcctgggcaacatagtgagacctcatctctacaaaaaaaactacaattagctgggtgtggtggggtgtgcctgtactcagtcccagcaacttgggaggctgaggtgggaggattgcttgagcctgggatgtcaaagctcatcacatgtcaagtgagctcatcactgcactccagcctgggcgacagagtgagactccctctcaaaaaaataataaaccaggtggattagttggtctggtctttttttttttttttttttttattaaagagatggggtctcactatgttgcccaggctggtgttgaactggctctgactcaagcagtcctcctgcctcagtctcccaaagtgctggaattataggcatgaacaactatgcccagccaagtcaatcactgttaggtgagctatggctctgggcaggcagacatgcattggatcttgggtctgccttcactagctgtggtccctgagcagtagctggaatgacaggcatgaataaccacgcccagccaagtcgaccattgttaggtgagctagggctctgggcaggcagacacggctttggatgggtctgccttcactagctgtggtccctgagcagtagtccctgaagtgtcagcttcctcgttggtgaactgggaggaataacagaatctccctggtcactgtgaggattaagtgagatgatgcacagaagttacttcataccttacctgcctcacgagtaattcagtcaatgttgattctcttttttaaaaattatgttttttgtagagacggggtcttgctgtgttgcccaggctaatctggaactcctaagctcaagggatcctcctgcctcggcctgtcaaagtgctgagattataggcattagccgccatacccagccatgtttattatcttttaaaattatcatgaaac

SEQ ID NO: 19368 - DNA, 1042 bp, Homo sapiens
ttggggactttcattatctttgcatcttctgcgcagtgtctggcacgtgtgaatgggagatgttgaagggatgcataaaatatcttcagcactagcaggagtgactcctatagtcgctgtgctggatgctgtcagagagaggcagaaggtcccatccctcaagaaagctatcatagaagaactggtttatctcctgatccaaaattgatcagacttactccacagtcccctggtctgggaagatttgtaacatcttgattgtttcctttttattttccaggctgtgtggatgcctgggagcccaaagtgctccgggcgggtatgggcgcacatttccggatgcccattatcaataatctggaatgggaaaccgtgcccaattacctgccccctgacactcgggtctatgtggctgacaactgtggcctttatgcccaggctgagatgtctaataaagctagtgaccatggctgggtgtgtgatcaacgagtgatgaagtttcacaagtatgaggaagaggaagatgtagaaaccggagccagtcaagattggctgcctcatgttgaggttcagagttacgactcggactggacagaggcgccggcagctgtggtgattggcggggagacctacggcgtgagcctggagtccctgcagctggccgagagcactggtggcaagaggctgctgatccccgttgtgcctggtgtggacagcctcaactcggccatggcggcaagcatcctgcttttcgaagggaaaagacagctgcgggggagggcggaggacttgagcagggacaggagttaccactgaggacgcagaagtgacttctgcttgaggacgtctgcagctcctcctacaccagcacactggtgggaggctggcggagtcagtgactatggcccccacgttcaggaggaaggtgtgatgccgtcatacagttacaggaaaaataagaacttcctcagaaagaacaggtccgaattcttcctgtcgcgtcactgattttgaggttcttttttctcttggtgacaatagg

SEQ ID NO: 19369 - DNA, 1052 bp, Homo sapiens
ggcaggtggatcacttgaggtcaggagttcgagatcagcctggccaacatggggaaaccctggtctactaaaaatacaaaattagctgggtgtgttggcgtgtgcctgtaatccctgctgcttgagagcctgaggcaggataattgcttgaacccgtgaggcagaggttgcagtgagccgagattgcaccagtgcattccagactgggcgacagagtgagactgtctcaaaaaaaaataaagaatgatcatggagatatttaaataatttgataagtttttttattttttagagatggggtctcactctgttgcccatgctagtctcaaactcctgggcttaagcgatcctctcgcctcagcttcccaaagtgctgtgattatagatgtgagccactgcacctggccatgtttttatattcaaaattttataaacctatttccagcgtaggtgaagtattttgttcataaatgaagaatgaaagtttcacatgtgtttgtggtgatggaatgagttggagaacctttgctgactttcattatcagctaaagcaggtatcattttcgttcaaaagacacaggccacaaagggtacgcaaataccacacacatgtgaaggcgtttgggcaagagtcacatgataaaataagagatgatgcatagaactcttgtggtcaacagaatacatagcatttgtatcttaattatataacgaaaggggaagggaactaatgtttttgactatttctaatgtgacagatgctttagtagtcagtacttaagtaaccctagaagatagctattatactcccattttacagaggaaggaagtacagagaggttgaataatgtgtccatggggtgaagatttgaacacatgtgcccttgagtattacatttgttgctttatatacttactagggattttttttttaaagggtctcactctgttgcccaggctggggtgcagaagcacaatctcagctcactgcaaccttcacctcccaggttcaagtgattcttttgcctctgtctctcgattacagacgtgcg

SEQ ID NO: 19370 - DNA, 1035 bp, Homo sapiens
taaaaaaaaatttttttttttttttttgagacacagtcttgctctgttgccagactggagtgcagtggcgcaatctcagctcactgcaacctctgcctcctgggttgaagcgattctcttccctcagcctcccgagtagctgggattacagccgcatgccaccatccccagctaatttttgtatttttagtagagacggggcttcaccacggtggtcaggatggtctcgatctcttgacctcgtgatccacccgcctcagcctcccaaagtgctgggattacaggtgtgagccaccacgcccggcctaaaaatattttttgtagcgatggagtcttggtgtgttgtccaggatgatcttgaactcctgggctcaagtgatcctcccaccttggcctcccaaagtgttggggttacaggcacaagccaccactgtggaccaaaatggtttttgagatttacccatgttaattcagtaatctgcacctttttatggctcagtagtattccattgtatgactataacaaaatttgtttatttacttattattgcacatttgggttattttcatcttttggctattataaatgaagatgctatgaccatttaagtacaactctttttgtggaaatatgttttcgtttctctgggataaatatctaggaatgtaattgctgggtcacaggtaactgaatgtgtaaaagaaatcgccaaccttttccagtgtgatcatgagaattctagttgctccatatccttgccagtcatcagtctttgatttcgagtattctagtgaatgtgtaatggtatctcactgtgcttttatttgtatttctctggtggctagtgacgttgagcatcttttcgtgggcttactggccatttgtatatcttcacgaaagaagtgtctgttcacatcttttgttcacctaaaaattgggttttgtgcttattaatgagttgtgagaattcttgattcttgctaggtcttttgttaaatataaatattacatatattttttcccaatctgtgact

SEQ ID NO: 19371 - DNA, 1042 bp, Homo sapiens
gggactggaggcaggagagtctgaagaactcttagagtcaattcctagagggatcttggagcaggggtgacagtcaagctttgtggtataatatcacctgctttcgggtccacgtttctttcctgtgatccttcctgcaaatttaagcgcccacatatcaaaaagatgttttttgagatgagcgttagtccgcctcaggtcagacatgaggcagtttcacgggtgctgttcctggctgtagaatagtgtattaacctcataggctgagagctgccggcattcccggacaaggattggccctgacatttgacttttagttgcagctttttcctttcagtgtttgtatttaatgaccctcctcccatcttgatctaagcctgtgttctgccagcagtttagtatttagatcatttatttctcctttacgcctgctcttttattttcatcatatacagtgtaggtttcattcctcctgtctcatttcactgtatacccttatccatcattgtcaacagcagctcttaagtgctcttatagaacatctcaagaattaaacactggacagatcctcgttgtcctgtcatgggacacccactctttcggttctctgtaatcccagctacccaggaggctgaggcaggtggattacatgagcccaggagttcgactgagcaacatggaagaccccttctcttgaaacaaaaactttattgctgaaaaatgctgacaatcatctgagtcgtaatcttcttgctggtgggggtttgtttcagggttgatggctgagcagtcacggcgatggttgctgaacatcggcgtgtctttggcagtttcttaaaataagacagcagtgaagtgtgccacattggttgactcttcctttcacaaaagctttctccatagccggcgatgctgtttgacagcattttacccacaggagaactttttcaaactggagtctctccctctcaggtcctgtcactgctttatcagccaagcttatgcaaattctaaatcctttgtcgtcatttcaacaatgctc

SEQ ID NO: 19372 - DNA, 1046 bp, Homo sapiens
acgaacagtgtggccacagtcagtggggttctgagtcaggagggcagtcttttaagttagtattcatgtttaacggtttgcttatagacctcatatctagaagctcaaaacttcaaggtgtcctcaggaggtgggagaggggggacattctcccaggctggctgggctggctagactgactcttaggttttccgcagggctgttctctatcagggagcagtatatggactcagactcattctttgccccttagcccctggtgtcacctctgttctcctgaggaagaaggtgagccatattctattcatgggctcaagtcttcgattcccagtgatttcacaacatggaaattataccggttaccttctggcttaatgaattgtctctaccttcaggatgaattcagtgagaacgaaagctgggccaacccccttggtgtctggatctggcccttaaacttggtggagttaacagcttagctgggtcttgttaccaaactcaacttgggtcttcccatccacacaaagcaaaagccaaacactgacatggagatttgcagggagagaacaagcatttattgtaaggcaccaagcagggagactgggcagctaaagcttaagacctaaacttcctgatggcttacaagcaaagggtttttattttatttatttatttatttttgagatggtgtctcgctctgttgcccaggctggagtgcagcggcgtgatctcggctcactgcaagctccgcctcccgggttcaccccattctcctgccttagctgggactacaggtgcctgccaccaggcccggctaattttttgtatttttagtagagagtagtatttccccgtgttagccaggatggtctcgatctcctgatctcgtgatccgcccgcctcagcctcccaaagtgctgggattacaggcgtgagccactgcgcccggctgcagagggtttttaaaggctgggcttctggggatctttaaagtgaattaagggctggggaatttctggaactttcttacctattttctggcttca

SEQ ID NO: 19373 - DNA, 1400 bp, Homo sapiens
ccctgtccttttacccccaggctgaagccactgcgcctggctgctcagagacctgagcctggccgggccctctgctgctcctgccttcccaaacagcccctgaactcctccctcccacagttcccatggacacctcggcccaagacttccgggtgctgtacgtctttgtggacatccggatagacactacacacctcctggactctctccgcctcacctttcccccagccactgcccttgccctggtcagcaccattcagtttgtgtcgaccttgcaggtgggtggaacgaggatcctcggcctcctgcagggtggacagcggccactctccagctgttgcgggatccccaggtgctccaggctgtttctcagccctggctctcctgccccagccgctggcttcacttccctcgtcattcctacaggcagccgcccaggagctgaaagccgagtatcgtgtgagtgtcccacagtgcaagcccctgtcccctggagagatcctgggctgcacatccccccgactgtccaaagaggtggaggccgttgtgtaagttaaaaatgggggccaagtaagtcctagagacatgcgtgtaccctgggagggagcctgaggttcatcatccaggaaagaaaccaaatctaatgctccttacctgtgagcccgaggtcacactgcaaggtagggaccaaacagggagcagacctcaggtttactgtcgctttctccactgcccagtccatcatccagaaggctgtgcagggtgggggcaggaatcagagggcctgatgggggttgagggtgggctggaaatggtgggaatataattggagaagatggatgggcacgcccaggctgcagccccattaatttaccatccggacagctaacaagcagaagcagcgtgtctcctgccgcctaattattttaggtaatggaaatgcttaatgttgtgtgaatgcagccagcctgagagccgacggctcccccgactgggactagggaagggagtcccgttccgtactaatggcagggagggagggtcgctccctgactcagtcccacctctggggctttggaggctgtttccacaggcctgacacccctgtccctagacaggcccacatcagggccttccccagcccagatctggcagccctgctccccgagcagcactgagtggcattccccctgtgcccacgtcactcagtctctacccttggggtcttcaaagtgtatgttggagggagggacaccctgagtgttagccattcatcagaatgaagtgtggtctccaagagggagagaaggagctgccacaggcaggttatcttccacgctctgtaatcttcatgggctgggaagctactgtcagggacagcatgtctgggggcacacttg

SEQ ID NO: 19374 - DNA, 1029 bp, Homo sapiens
cctgcctccctctcccaacagcacctggaatctcgactccgagccttgggcctttcctttgtgaggctgctgctctctgagatcttccccagcaagcttagcctacttcctgaggtggatgtgtgagtatctgcctggctatgactggctaaagaagcttagaagctgggtcttgcccagctcgtcttgaaggctggagccaacaggaattgcttccatggtcatggaattttactgtttacagagacctccctgggagggctaactgggtcatacctgctttgggactttggggctcagaggcaatggcaacatcacatttgtccttgtgagatgagtttgagcggtggctgacacctgccctgtaccaggtactaaatgtggttctggggatactatcaccagtgagctgccctggaaagctcattgtcggcagaggaaacaggagaaaacacgcaacaatacagtattccaaacagcagtgggtcactgtctttactttaggattcataaagcctgttaatgaatgggtgtgctgggggcactgtcatgttcttcagcatgctgcctgggcgacgaggaggcccttcctagggtctgacctggcttcccttcccaggtgggtgcaggtggcatgtccacgtctctccattgactggggcacagccttccccaagccgctgctgacaccctatgaggtaacaccaagctctgggagagagtgggctttggacgtggttctcaaaggtgaggtctggagtggagtggggtgggtgggcagcacttcgttatgttcgtagattccggagtctgtctcgatttctccagcggagtcacttcctagctgtgtagccttaggcaaggccctgaaccacacagttcccttctgtggcaggggacagtgtgcccttcacaggccgtcgtgaggactgaattcagtaatccaggggcagaaaaacactggcagatgttattgtccctccctcccctcccctaggcggccgtggctctgagggacatttcctggca

SEQ ID NO: 19375 - DNA, 1029 bp, Homo sapiens
ggaaagaccgcttccggtgcttccgtcgctccttgccgggcataatggccgcgcagcgacccctgcgggtcctgtgcctggcgggcttccggcagagcgagcggggcttccgtgagaagaccggggcgctgaggaaggcgctgcggggtcgcgccgagctcgtgtgcctcagcggcccgcacccggtccccgaccccccgggccccgagggcgccagatcagacttcggtgagacaagccccgctccggaaacgcactcagtttcctccatcttgtttcgtccccctcgacacccttcagcatcccccaccctgcgtccacccgcattcctcccacccagtccacacccttcatttctcgcgacccataccctctttgctcaaactgcagcctgtcctcccaggcttccgccttcaccgtcttcctccgctgtctcctgttcaggccaatccactcatttcccccctctcatttcccccagacttttgcctcgattccctttttctctctgtcatctcgaaccctcctgccctttctcatttctttccttcctggagcctcccatgccctaatcccatcctttttcctcatatcgctgtagggtcctgccctccggaggagcagcctcgaggctggtggttttcagagcaggaggccgacgttttctccgcattggaagagcccgccgtctgcaggggcctggaggaatcactggggatggtggcacaggcactgaacaggctggggccttttgacggccttcttggtttcagccaaggggctgcgctagcagcccttgtgtgtgccctgggccaggcaggcgatccccgcttccccttgccacggtttatcctcttggtgtctggtttctgtccccggggcattgggttcaaggaatccatcctgcaaaggcccttgtcattgccttcgctccatgtttttggggacactgacaaagtcatcccctctcaggagagtgtgcaactggccagccaatttcccggagccatcaccctcacccactctggt

SEQ ID NO: 19376 - DNA, 1030 bp, Homo sapiens
ctgccaccgcgcctggctaatttttctatttttagtagagacagggtttcaccatcttggccaggctggtcttgaactcctgacctcatgatccccctgccttggcctcccaaaatgctgggattacaggcgtgagccaccgcgcccagcctgaaactttctctttttagaggggcagtgaagaagtagtctttgagcacccatcaacaaatgaacacatctgggatgaagattgtacctaacatgtttgatcagtctggtgtggcaataaggatgcacccaggaggtgataaggaaatccaggaggtgataaggtagacagactgagaaagaagacacaaggagagaaaagtaaagagaggaaagatgagcattaatgagggtgcttacaagcggcagaggcagtgaatacaaaaacttagtggaaagaaagcaacgacgaaacaagaataggatgagttctcagttacctactttattcttcaaatagcccttattcagcacatctttcttgtttgttgtagaatggagagcagtttattacatttgataatccttgaaagcattaatttgcttggagggtacccagggagtagagttcaagcagtatgaagagtgaagaatattcattctggtagagtttagtgacagactaagcttatattaataacggttctatattatagaagaatactactgctggagtatggcagtatattaggtttctccagagaagcaaggccaatagggtgtgtgtgtgtagagattgactggttgattgatgtttgaggaattggctcatgctattgtgaaggcttgcaagttcaaaatctgtagggtaggctgacaggccggggacctggggaagaggtgatgttgcatctcaagtccaaacgcagtcttttggcagaattctatcttacttgggaaatcagtcttttctttttctcttaaggtcttcaactgatagaataaggcccgcccacattataaagataattgactttactctgagtctgctgacttaaat

SEQ ID NO: 19377 - DNA, 1025 bp, Homo sapiens
gctatttggctttgcaatcctgtgttagtttgttaaggataatggcctccagttccatccatgtggaattactattctaaacatctggtaacttgcaaggtgtcatggaacccagcttatcaggaaacattgcttaacagattcttgaaagcaactggcctgaaaagatacttagttcttgactgagaataacttctgccttgcttcattgctgcatctggaaaatatttggattaagagccataatatataatacgtgctattcaagcatggtagataatctgtcttttttttttttttttttttttttttttttttttttgagacagggtcaccctctgttgcccaggctggagtgcagtggcgtcatctcagctcactgcaacctctgcatcccaggtgttgccctcccacctcagccttctgagtagctgagactacaggcgtgcgccactatgtccagctgatttttgtattttttagtagagatggggtgtatgtattcgttcgttttcacgttgctgataaaggcataaccgaaactgggaacaaaaagaggtttaattggacttacagttccacatggctggggaggcttcagaatcatggcaggaggcgaaaggcacctattacattgtggtggcaagagaaaaatgaggaagaagcaaaaccagaaacaagataatcccatccgatctcgtgagacttattcactatcacgagaatagcatgggaaagaccagcctccatgattcagttacctccccctgggtctctcctgcaacacgtgggaattctgagagctacagtgcaagttgagatttgggtgaggacacagccaaaccatatcattccacccctggtccctccatatctcatgtcctccctttcaaaaccaatcttgccttcccagcagtcctgcaaagtcttaactcatttcagcattaacccaaaagtccacagtccaaagtcttatttgagacaaggcaagtcccttctgcctatgagcctgtaaaatgaaaagc

SEQ ID NO: 19378 - DNA, 1018 bp, Homo sapiens
gcttttccaggcgacagtgcaagctgtcggtggatctaccattctggggtctggaagacagtggccctcttctcacagctgggactcacagtagggactcgtatggggggctctgaccccacatttcccttcagcactgccttagcagaggttctccatgagggccctgtccctgcagcaaacttttgcctgggcatctggacgtttccatacatcttctgaaatcaagttggaggttcccaaacctcaattcttgacttctgtgaacccacttgctcaacaccacgtggaagctgccaaggcttggggcttccaccctctgaagccacagcctgagctgtacgtcagcccctttcagccacagctggagtggctgggacacagggtaccaagtccctaggctgcacacagcatggggaccctgggcccagctcatgaaaccacttttttctcctgggcctccaggcctgtgatgggaggggctgctgccaggaagttctctgacatggactggagacattttctccatagtcttggggattaacattaggctccttgcttcttatgcagatttctgcagccagcttgaatttctccccagaaaatgggtttttcctttcttttttttttttttttttttttccctgagagggagtctcactctgtcgcccgggctggagtgcagtggcatgatcttggctccgcctcctggattcatgccattctcttgactcagcctcccgagtagctgggactacaggtgaccaccaccacacccggctaattttttgtatttttagtagagacagggtttcagcatgttagccaggatggtctcaatctcctgaccttgtgatctacccgccttggcctcccaaagtcctgggattacaggcgtgagccactgcgtctggccaaaaaatgttgtttttttttctatcatatagtcaggctgcaaattttctaaactttcatgctctacttccccgttttttttttttttaaagatggagtcttg

SEQ ID NO: 19379 - DNA, 1031 bp, Homo sapiens
tatgttaatttcatatcatttggaggatgatttttttattgctttgaattgcctcttccaatcaaattttatatataccagtagcctctattttaagtaagaccatctcaaatacatttcttaattaggtacattggttaagagagcataagattccagcactttgggagactgaggcaggaggatcccatgaatacaggagtttgagaccagcaatgtagggagacctgtctctacaaaaaaaaaatttaagaattagctgggcatggtggtgtgtgcctgtcgtcccagctgcttgggaagctgaggtgggaggatcgcttaagcccagagggggaaggctgcaataagctgtgatcatgccactgcactccaacctgtgtgagaacctgtctccaaaaaaacaataaaaagcgtaagattgctaagtagtgtatgttataaataccggccattctaaggttattggtgactaacactcaaccttgaaggttacttcagttatagttggcactgttcggcttgtgcagttcatgaaacccttatctgttttaccttttataccttttttgtaaatttgaaattttactttttgtctctaagagagaattacattcgtttagagttacatgttaatatttgaaatcaaatgtatctggcaggttaacatgattgggagtgggtaaatgtatgttaaatttaaaagtaatgctgttttggctcattgaattattaatttaaaagacaaaacagtatggtttttgacattagttgactttcactataagtggaaaatcatcatctaatatttatactaacatcacaataaaatttatctttgaaaatgagtactgtaactaataatttagaaataaattttaagtgaaataatctttttttttcttctctttctccttaggtggaatgaatcttacttgttgaatatcttctggttactagttggattcatttgtgaaagaatcattttcccctgtgtggaagacacttagtggcatatttaaattataagt

SEQ ID NO: 19380 - DNA, 1050 bp, Homo sapiens
aaggcatttatgaaacaaatgaatttcgtgtttagacttggttgagtctcatatccgagatacctcgttagatacatgcaaatattccataatttagaaaaaatgtcgaaatctgaaatacttctgatcccaagcatttcagataagagctactcaacctctacttctcaaatagttttagaattgtttccctcatacttccacgaagaccagacatccgggaaaggattgagaattcgcatgcagctctgctcctgcctgtcctgcccacgacatgatcatcaaatgtgttaataggttacttagaatttgttttgttgttgttttccctctttgcatgatggtattactcatttgaaatatagttgggttcatcttgcttgttttcatcctccccctcactccccgctgtcctatctttaatttttttaatatataaaccattatctatagaaaaacatgtacccagaagtgttactctcttctgaatcccttccaccatgttacccccaactcctttcatcccttgagggaaccaagcttattgtttttaaaaatatgagatagatatatatcttcttatttctccctctttcttaaataaaagtagcatactgtatatgttctttgtttgtttttttgttttggagacaagagtctcattctgtcttccagtctggactggagtgcagtggcatgatcatggctcactgcagccttgacctcctgggctaaagcgattgttacacctcagcctcccgagtagctgggactacaggtgcatgccatgccaccatgctcagctaattttttcctttgccttttttgttttcccccttttgtggagaacggggtctcgctatattgcccaggcaggtctcgaactcctgggctcaagctattctcctgcctctgcccccctaatagctgggattacaggcatgagccactgcacctggccacactcagctaatttttctttagtttttgtagagatggtctcactatgttgcccaggctgcctctgggctcaggtgatgcttgcaccta

SEQ ID NO: 19381 - DNA, 1019 bp, Homo sapiens
agagaaaatttataaaaccaatttaagaaaatttataaccaatttaataaagagaaaagacataaatgaactttataggaatgagaaattcaacataaaatgaactcagatgattttcaaacttatgagagtacggtatcctattaggtttgaaacaatctgctgggcgcagtggatcacttgaggtcaggagtttgagacctgcctggccaacatggtgaagccccatctctactaaaaatacaaaaattagccgggtgtggtggcacatgcctgtaatccccactactcaggagctgaggcatgagaattgcttgaacctgggaggtggaggttgcagtgagccaaggttgcgcactccagcctgggcaacagagtgagactctgtctcaaaaaataataaaataaataaataaatttgaaaatctgaatgacctgggtgctttttctaggaaaatatgtgataacattggttcaagaaatagtaggaaacttgaatagatcattaaatatagagaacattgtaacattaaagatttcaagcccaggcagtttttaagcctagatgctaattttttcaaatcttaaggaccatttgcttcccagattacattgctttttccgggacataaaggtagtaaatttaggagcttattttataaggtgggcaccaccttcgtagaaacactgggtgaggccaggcatggtggctcacacctgtaaccccagcactcagagaggccgaggtgggtggatctcttgagtccagcctagccaacatggcaaaaccctgtctctattaaaaataaatttggctgggcacagtggctcatgcctgtaatcacagcactttgggaggctgaggcaggtggatcacctgaggtcaggagttcaaggccaacctggccaacatggagaaagcccttctctactaaaaatacaaaaattagctgggcgtcgtggtgcacacctgtagtcccagctacttggggcggtgagggaggtgcgagctgaggcac

SEQ ID NO: 19382 - DNA, 1048 bp, Homo sapiens
ctgcactccagcctgggcggcagagcgagactccgtctcaaacaaaacaaaacaaaaaccaaaaacatttctccatgtgttttcatgactgtgatatatttttaagcatttttgttgttgtttactttattgctttaaaaaactgacttttgcagttagttgaggtcctgaggtttctcctgtgaatctgtttgaacatcatatatatttggcattgattggaaagcggtttttccctggcctgtgtgaaatacactgaaggtctgcacctgcccgcgcacttcacgttgtacatgggaatgtactatagctgcacatgttcatgtagtggcgttagatgccaaatagttctagggcttagtttaagattgggtactttttgtcaggaaacaacaggtgctggagaggatttggagaaataggaacacttttgcactgttggtgggactgtaaactagttcaaccgttatggaagtcagtgtggcgattcctcagggatctagaactggaaatatcatttgacccagccatcccattactgggtatatatacccaaaggattataaatcatgctgctataaagacacatgcacacatatgtttattgtggcactgttcacaatagcaaagacttggaaccaacccagatgtccaacaacgatagactggattaagaaaatgtggtacatatacatcgtggaatactatgcagccataaaaaaggatgagtttgtgccctttatagggacatggatgaagctggaaaccatcattctcagcaaactattgcagggacaaaaaaccaaacaccacatgttctcactcataggtgggaattgaacaatgagaacagctggacacaggaaggggaacatcacacaccagggcctgtcgtgaggtgaggggagaggggagggatagcattaggagatatacctaatgtaaatgacgagttaatgggtgcagcacaccaacatggcacatgtatacatatgtaacaaacctgcacgttgtgcacatgtaccctagaacttaaaagtattaaaaa

SEQ ID NO: 19383 - DNA, 1041 bp, Homo sapiens
taattttttttgtatttttagtagagacggggtttcactatgttggccaggctggtctcgaactcctaacctcgtgatctgcccgcctcagcctcccaaagtgctgggattacaggcgtgagccactgcgcctggccacaattagctatttaaaagggaaaaaaggaccagtctagacaacatattgagaccctatctctactttaaaaaaaaattaacccatcatggtggcatgtgcctgtagttccagctactcaggaggctgaagcaggaggatccattgagcccaggagcttgaggatgcagtgagccatgattgtgccacagcactccagcttgggtgacagagcaagacctcatcttttttttttttcaaagagtgaggaaaggggcccgggacaagtaaatgattcatcaggtggcagtgaatgactaccatatactatgacttgacctatcctaattctaaaaatataaatacattattagcagtattgtagataattgaatatcctgctcttcagtgcagagtaaaaactgctccatcaacaattggaagctatatttaatcagataattctggggatgcctattatgaatatgacctgattttaagggatcttcattgttttttagggcttgacttactatacagtggtcttcctttgtttagtttgctgtttcatgtaatctgcctgtatacttctgacacttctgataaataggtcttttaaaattactgttttcattcaattgctttttcttgccttgaatgtcctacatagtctgtttctgtttctagccatttctctcattattttaatgccacctgatttagagcagttttttttttgagacagagtctcgctctgtagcccaggctggagtgcagtggcgcagcctgggcccactgcaagctgcgcctctcaggttcacgccattctcctgcctcagcttcactagagcagttttaagtaataggaatgattatagcatctttgccttgttctttgacacaagtgtttctagtgttctgccatt

SEQ ID NO: 19384 - DNA, 1019 bp, Homo sapiens
gggattacaggtgtgagccactgccacctgctgaggttcttcagtctttacttaacttattacttttagtaacggtagtacaccttgctgaagttaaaggttctacattaactggatcagattgttggcttaaatattgagaggcagggcatcaaaggtggtagtgctaaaattctctggattttttttttttttgagacagagtttcactctgtttcccaggctggagtgcagtggtgcagtctcagctcactgcaacctttgcctcccgggttcaagcaattctgcgtcagtcttccaagtagctgggactacaggcgcataccaccacacctggctaatttttgtatttttagtagagatggagtttcaccatgttggccaggctggtctcgagctcccgacctcgtgatgcgcccacctcgggctcccaaagtgctgagattacaggcgtgagccaccgctcccagcctctggtcttgaacttctgaccttgtgatttgcccgcctcggcctcccaaagtgctgggattacagacgtgagccactgcgctggcctaaccctgtaattattatacgttgatttttggcatgctcataattacctggaacataaagtttttgctggtaattccctgttatctttctttgctgatttgttttaaacataccattgaattaaagccagtaatcccaccagttatacaatactactggagtgtgttttgttttgtattttgagacgtagtttcgctgttgttgcctaggctggagtgcagtggcacgaactgggctcaccacagcctccacctcccaggttcaagtgattctcctgcctcagcttcccaagtaggtgggattacaggcatgtgccaccacacctggccttttttttttttttttgagaaggaatcttgctctgttgcccaggctagagtgcagtgatgcggtcttggctcactgcaatctccgcctcccgggttcaagcaattcttctgccttggcctcccgagtagctg

SEQ ID NO: 19385 - DNA, 2048 bp, Homo sapiens
tgtcagtattggtggaagagcataccatgtagatagtccagggataagccacagtagttgagagtgctttctattaggaagttttaagtatcttttagtactttacataaaatatttgtatgagtatttcttggtaagaaaaactgccaggtcatttatctgtatttgagttaaaaatggttttgtttgtgttttaatttttgttagttgggaaactgaagtccagagagagtaggtcgagtgaaaacgagcccagattctcttgctcacttaagtgaaatgagctgagcgcacagaccccatgccctcgttcattatttcccgggtcttgttgtgggaactgttttctgaggcagtatgttttgtggaaagagagtaatttgctttggagtcagacacctgggttcaaattcctacttgtctacttacggtattagaaaatttaaacctctttcatctgcaaaacagaggtaataataccagagtcatagagttgtcatgaggataagatgaagtcataagataaatcatcttggtgtagtacctgccacataggagatgctcattacttagggatttttgttgtttctttatacatgatgacatttgaatgttgggattttgtacaaggaacacgttaacacatgagtaaactgtgtttacctagagggcataatttgaaggttgtgttttctctgtcccaaattaaatgcattggggaagtttataattacaggaattccacgcatgaacactgtttttttgttgttgttttttggttgttttttttttgagactgtgtctcactctgtcgcccaggctggagtgcagtggcacaatcttggctcactgcaacctccgcctcccaggtttaagtgattctcctgcctcagcctcctgagtatctaggattataggcacgcgccaccacgcccgtctaatttttgtatttttagtagagacggggtttcaccatgttggtcaagctggtctcgaactcctgacctcctgatctgcctcagcctcccaaagtgctggaattataggcgtgagccacgtaaggtctatcatttatttttctttaagttgcctgtatcttctagctgtaactttaaaaagagttctttctaatgcattttttttttttacccccaacaccacctttttttttttttttttttttctggagatggcctcttgctttgtcacccaagctggagtacagtggcacaatctttgctcactgcaacctccacctcccaggttcaaatgattctcccacctcagcctccaaagtagctggcaatacaggcaagcaccaccacacccggctaacttttttatttttagtagaaacagggtttaaccatattggccaggctggtcttgaactcctgacctcaggtgatccgcccgcctcggcctcccaaagtgctgggattacaggcatgaaccactgcgcctggcccaccattttaaacagagaaccaattccccattttttgtatccatttgctttatcttttttatatcttagaatatcaacctagaagctaggcacagtggctcacacctataatctcagcacttttggaggccaaggcaggaaggattgcttgaggacaggagttcgagaccagtgtgagcaaaatatggagaccttgtctctacaaaaaataaaatagttgtgggtgtggtggtaccagatgtggtggtacacacctgtgtagttccagctacccgacaggctgaggcgggaagagctcttgagcccaggagttcaaggctacagtgagctatgattgcaccactgcactttagcctgggtaacagagcaagtccttgcctcacaaaaaaaaaaaaaaaaaaaaaaaaaaatgtttccctagcgttcatatgtaaacattcagactcactgaggtaagtatatgaatatattcaaatgttgataatcgtgatgccttttgtttttaaaccatttgtacaggttgaaatttaatcctaaatggagttgactatttccttgtgggttgttgttttactgattt

SEQ ID NO: 19386 - DNA, 1033 bp, Homo sapiens
tgaggtcaggagatcgagaccgtcctggctaacacgatgaaaccccgtctctactaaaaatacaaaaaattagccgggcgtggtggcgggcgcctgtagtcccagctactcgggaggctgaggcaggagaatggcgtgaacctgggaggtggagcctgcagtgagccgagatcgcgccactgcactccagcctgggcgacagagcgagactccgtctcaaaaaaaaaaaacaaaaagtaaataatctttgtgctggtatacctctgttaggctgaatttggttgtgcatagaattacacttgatttttgtagtacaaagttactagttttactcagattagtagagcatagcttttttccaatatggctggaaatacttttaagtgtgcatttagttttgaaagattttatttcttatacatattttatcttctagatgttgattttattagctccttaatgatatgtctgttagcttattgttcctactttaattaaccaggattgtacatttattctgtcgacttgcatctctaacttggtaccattctcttcatcccagtacatatttttatatcacttctgggaagtgtcctgatgattgtcattcacagtgtaagttattatttatattgacagctactgtgtgaagacattcacaggacacagagaatgggtacgtatggtacggccaaatcaagatggcactctgatagccagctgttccaatgaccagactgtgcgtgtatgggtcgtagcaacaaaggaatgcaaggctgagctccgagagcatgagcatgtggtagaatgcatttcctgggctccagaaagctcatattcctccatctctgaagcaacaggatctgaggtactgtatatacaaatgtcttcatggttttattgctgatatctgaagtccttagataactttgctaattccctgtttcagggctgttaatgcatttaaaaatctgcatccagcaattctgaatcttgaaattctctactcttcacagcttgctgatgtgtttac

SEQ ID NO: 19387 - DNA, 1072 bp, Homo sapiens
gcacgtctgtaatcccagctactcgggaggctgaggcttgagaatcgtttgcacctgggagacggaggttgcagtgagccgagatcgcaccattgccctccatcctgggcagtgaagtaagactctgtctccaggaaaaaaaaagaaaagaaacaagaaaaacatactcttggccaggcacagtggctcacacctgtaatcccaggactttgggaggccaaggcaggaggagcccaggagtttgagaccagcctgagcaacataacaagaccctgtctctaccaaaataaaagtttaaaaattagtcatgcatgatgatgcatgcctatagtcctagctacttgggaggctaaggcaggaggattacttgaacccaggaatttgaggctttagtgagccgtgatcatgccactatactccagcctgggcaacagagttgctgtctctttttaaaacaaaacaaaattttgcagtgctgtgctataactgcactatccagcgtggtagctactagccacatgcagctattatactcttgaaatgtggctagtgagactgaagaactgaattgttggttgtatgtaatcttaatattatatattaaagtaggcgtacatggacagtagctaccatgttcaactgtgcagttctaagcctttttctttaatgtgtagatgaatgtgctattttttataaaaatggtatcatgccccttaaggtagctttgtagcaaacctttaatttagaaagtatgtgatccttgcttatgttgttagatgctcttctacactgatctacagacaatgctttgtgaacatctttgctaactaaatctctgggcatgtccttaaagataaattgcaagaacagaactgctgcgacaggggaaatatggatggatagatggatggatgattaaatggatggatgattagatggatgaatgattggatggatggatggatggatgattggatggatggatagatggatgattggatggttggatggatagatggatgattggatggatggatggatgattggatggatggatggatggatgattgga

SEQ ID NO: 19388 - DNA, 1020 bp, Homo sapiens
tatagttttatcgtattatgaaatagatgctatttaaacattttgccttttactgagtcaaataacttttttgtttttaaggtgggtcatgataactgggtacgtggagttctgttccattctggggggaagtttattttgagttgtgctgatgacaagaccctacgcgtatgggattacaagaacaagcgatgcatgaagaccctcaatgcgcatgaacactttgttacctccttgggtatgtacgcctcgcgaggtctctgaacattagattttggagtgccagacaaactgtgttttacataatcgtgtggactttgccaggtaagaaatgactgtgctttcagggcagaatagagaagacatgaaaatcttgtggattcctaccatttgttttaaattctcctttcccgttaactctttccatcgttagccttataataaaaacattactttctccactgcacaacattggttttggaaaccacaatttgtgaagaggttacttaccactctgatgggtaatttttctcccctattagtttgtttctcaaacaaaatcttcctcaacctttcccactggcaggtgtatactatcagatactagaaactcagaaaattgtatttgatttgagtaaacatcctcactatcatctggacttgaatctggaatttaagagagtgaatacagtcaagtataataaatgcactaaagtataatggaccaaagcctgcgtaaggtgggctaatacctgcctcacaggattggttcaaggattaggcacaaatacggagcatttatgccatgcctggaacatcgtgttcagtaaatggatatggcgagactgtgtattgttagatttgagccctgctgtgccttagtcccagctactcaggaggctgaggctggaggattgcttgagcccaggagttctgggttacagtgtgctgtgctgatgggatgtttgcactaagtgcagcatcaatatggtgacctcctgggaacaggagactcccagg

SEQ ID NO: 19389 - DNA, 1059 bp, Homo sapiens
ccctaactgaattggcaaactagataccttcttgggttatggtatattagagaaacacgaaaactactggcatttggactttcttagaattttgtggctcattaaaaattgtatctggctcagtgtgatggagggttgggaccgggcagggtcttgctctgtcacccaggctggagtgcagtggtgcagtcatggctcgctgcagcctcgacttcccagctcaaacagttctgcatcagtctcccgagtagctgggactacaggcacacactaccatgcccggctaattttttttttaattttgtattttgtagagagggggtctcactatgtttgttgtccaggcttacgtgtgagttttaaataaaccatttctttttctttcagatttccacaagacggcaccctatgtcgtcactggcagcgtagatcaaacagtaaaagtgtgggagtgccgttgattgtgtctccttcggcccctcctccctcttttcctctggatgcactctgatgataccatggttaccccattgagctctgtttaaataaatattgtcctttcatgtaaattattctggatgtagattgagcttattaaatgttacacacaaagtattcatgcatggtgaatccaaattgtatactgtaaatttacatacgttgtctagaagtaccatagggtttaaaaacctgggctggcattggtcacaccaggcctaagaaggcagaagttgaatcaattgaactagggcactaaactgaatagttgacagtgtcattttatgttggattattaattcctgtttttctttctgctatctgttggtgcctgacttgatggcctcatttggggaaaagtggtggttattagggctttttctgaaatgtgtatctatgtaacatcacttaagtgtgcttaataaatcttctgtaaggattttagatgataaggctacaattcagaatcttctgaaccatctatgtaatgaatggggattatacattggaatttttgtcatgacacatttgccaaatcagtaggatatatttgttttggca

SEQ ID NO: 19390 - DNA, 1049 bp, Homo sapiens
gtattcatgaaactccagggtttttgagaattgtgcctagtggcccagtgcagctgaagttggaagcccgtgcatgttgctaatgctactcataataggaagctcagttttaaccctgggggttggggaagagcagcaagcctggggttagagaaacagacacgtataaaaagcatcatccagccgagtgcggcggctcacgcctgtaatgccaacactttgagaggccgaggagagcagattgtatgagctcaggagttggacaccagcctgggcaatatggcaaaacctcatctctacaaaaaatacaaaaattagctgggtgtggtggtgtgcgcctatagtccctgctactcaggaggctgaggtaggaggatcacttgagcccaagaggttgaggctgcaggatctcgccactgcactccagcctgggcgacagagcaagaccctgtctcaaaaaaaaaaagaaagcaaagaaagaaaagaaaagaaaaaaaaatcatcctctgatcacattctccatagtctggtggtctgacctctgaccacacattaagcagactgattcttgctttcacacagcttccaccaaagtcttttcatcatagtctttttttgggacagcatctcgctgtgtagctcacgttggagaacagtggcaagatctcagctcattgcaaccccgcctcccgggttcaagcgattctcctgcctcagcctcccttgtagctgggactacaggcgcccgccaccatgcccgactaatttttgtatttttagtagagagggggtttcaccatgttggccaggctggtcttgaactcctgacctcaggtgacctgcccaccttggcctcccatagtgctgggattacaggcgtgagccaccgcacccggcctccatcatagtcttaacagcacatactcccattttccccagctatttccaccattgcctataacaatgtgctatggttaaggtgatcgcatagtttatcattaaaaccagaacacttttgagagtgcaagtggaacctattaataatgaca

SEQ ID NO: 19391 - DNA, 1047 bp, Homo sapiens
ttacctccactccccttccctcccttcccctcccctccccttccctcccttcccctacccttccctccacttccctcccctcccctcctctcccctccctttccttcccctccctcccctgcccttccttcctctccccttccctctttctttttctttctttctttttttgagatggagtcttgctctgttgccaggctggagtgcagtggtgtgatctcggctcactgcaacctctgcctcccgggttcaaggattctcctgccttagcctcccgagtagttgggactacaggcacctgccaccacgcccagctactttttgtatttttagtagagatgggatttcactacattggccaggctggtcttgaactcctgacctcaggtgatctgcctgctccagcctcccaaaatgctgggattacaggtgtgagccaccatgcccagcctcctatttctttttcttaaataaaaggtaatatcctacaaaacactgttttacatcttgcctttttctctggagaattcctgtctgaccactgagagctgctgctgcctctgccccattccttttaaaaataactgtgtagtatttaacggtgtggatttaattttagagactgatgattcctttcagaaatttaattttgtataacgtaagtaatataagaatacatttttggctgtgcatggtggctcatgcctgtaatcccaggaccgtaggaggccaacgtgtgtggattgcttgagcccaggagtttgagaccagcctggtgggggggcagcatgacaaaacctcatctctactaaaaataaaaaaaattagatgtggtggtgcacacctgtaatcccaggtactggggaggctgaggttggaggatcccttgagcccaggagtttgaggctgccatgagctgtgatcatgccattgcaatccaggctgggtgacagagtgagaccctgtctcaaaaaacaacaacaacaacacaaaaaacaggctgggcgtggtggctcacgcttttaatcccagcactttgggaggctg

SEQ ID NO: 19392 - DNA, 1080 bp, Homo sapiens
tatggaattagtggtggtggttacataacatcgtgaatgtacttaatgctactgaattgtatactttattatttatttatttatttatttttgagatggagttccagtcttgttgctcaggctggagtgcagtggcgcgatctcagctcactgcaacctccgcctcctgggtacaagtgattctcctgcctcagcctcccgagtagctgggattacaggcatgcgccaccacgcctggctaattctgtatttttggtagagacgcggtgggggggggcgggtttcaccatgttggccaggctggtcttgaactcccgacctcaggtgatccacccgtctcagcctcccaaagtgctgggattacaggcatgagccactgcacctggcctggctttctcattttctagctctctgactgtggacaagttacctgatttctcaaagaatcagtttctcatttgtaaagtgtggataataaaagagtctgtattctgcagattaaataagaggcataagattgagctctgtgcctggggaacaatgggtacaccctccctcccctttctcccctctgccaactggacatttgcatttaaatggggactcttgaagactaaaaacactctaaactccaagggaggaatggttggaatttcagaaaaattcatagctcttatctagggtaaggtctgggtcttttcctgtggagagttaagcttttaggtcctcctcacctgaggccccgggctgacggaggcattggaagcttgtaaaagtcagggctgagatgacctatctacaaagagcatttctggcaccctcatttcaagcaggtattcagtgtatgtgcataagaatgacgtggagaggaaaggagaaagaggtggaaaagggggagggagaaaggacccgatcaaggtcaacagcctgaaccagtcagaggcctcagcctggggctggattctggaggaaatgagacggtaggtgctacatcacccatggaaacaaaggagcagccacccagccaggaaaagccccaaacccttgaaaccccacgtttagcttgcgagctctctgctc

SEQ ID NO: 19393 - DNA, 1051 bp, Homo sapiens
ccactggggtggtggagcagacccaggtctgggatccaggtgttctgcaaagagccagatagttccacatataattggccttctgccctggtatctctgtacctttctgtaccaaagtgaacagctggttcttaaggtcagactatgcagctgattctcaaagtcaaacggtagagctccaacaacctgggataatatcttaaagactggctcaggctggagcagtggctcacgcctataattccagagctttgggaggccaaggcaggaagatctcttgaggccaggagtttgagaccaacctgggcaacgtagtgaaaccccatgtctactaaaaaataatttttaaaaattagccatatgcagtggctcgtgcctatagtcctagctacttgggaggctgaggcaggaagattgcctgagcccaggaagtcaaggctacagtgagttatgatcacactactgcactccggcctgggcaacagagttgagaccctgactttaaaagaaaaaaaagaagaatggcttatgcctctgccctgtggacctcacagagagagtcttgggtcctgggaaacactggggaagcagaagaggtagccaccctgttgtacccggttctgccaggcacagatcacctgaggagtctgcccagcatccccttgtaagatgagaaaacctgtcccttagagaggggctgaggaacagggtgcaacagcccagcagggctaggggtcagttggaacacaggctgggatggagtttacacgtccttgtaggaggaatgaccttcagtgcaggcctctttgaggcccgtgcccttctagcaattctcccactgcccaaaacatctctggaattccttccataaagagccatgtttagcacttcaaaggtgccaggcccattcatttgatcctcagcttgcctcttgggtcaaatacaaaaatcagatacatatatatatatatatatatatatatttttttttttttttttttttttttgagacagagtctcactctgtcgctgaggctggtgtgcagtggca

SEQ ID NO: 19394 - DNA, 1051 bp, Homo sapiens
gtcacatgttacatcgctcacacagagaagcagaatttatcaattttcaaagggaaaatgtctctgtctactgacaaggttttaatttttgcttttttttttttttgagatggagtctcactctgtctcccaggctggagtgcagtggcaggatctcggctcactgcaagctccgcctcccgggctcacaccattctcctgcctcagcctcccaagtagctgggactacaggcgcccgccaccacgcccggagaattttttgtatttttagtagagacggggtttcaccgtgttagccaggatggtctcgatctgctgaccttgtgatccacccgcctcggcctcccaaagtgctgggattacaggtgtgagccaccgcacctggccaatttttgcttatttttcctcaaagggaggaaaactgacaggttgctttaagagctgagtgattgagagtccttctgaacaggacttcgggaatttactcctaatcttttcccatggttaacttgtcttcactctgtttctagaactctggtttttatacttgagactctgtagtcactgtggaaagaggtgtgactgataaagaactgcctttaaatacctgagtcctcgtcagcttcttcactgctacaacctggagacctcgtaatttggttgggacgcaaatttgcaactggtattctgctccaaagaggttctccccatgtacctgcaaattaaaatcagagtaggaaatcaaagctggtattgctttgccatctacagctttacaataataagtacttacatggaagaggaattctttgtggtgagaaagcccctggcctgtgttcacgtacattatggatggtctgcaattgacaggacatgcgtcagcccttgaggagtctttctcccttttttggagacagggtctcactctgttgcccaggctagagcacagtggaacaatcatggctcagtgtagcctcaacctcccaggctcaagtgatcctccacctcagcctgggaaagtgttgggatgacaggcatgagccactacact

SEQ ID NO: 19395 - DNA, 1053 bp, Homo sapiens
gcggcttccggcttcctggccgtcaagcgacgaccgctgtcgcaaaggcgccgtcacgtagataggcggcctctaccaactcacgacagctaggcggggagcgccgcctcaaagggtgcaaccttgatttcccagaggacgagtctgtctcagtatctacgtcattccgtagcctccgctgccgccatctttgttggggctgacaacctgcaagccaagaagtacgagaagggccaggcgcggtggctcacgcctgtaatcccagcactttgggaggccgagacgggtggatcacctgaggtcaggagttcgagaccagcctgaccaacgtggtgaaaccctgtctctactaaatacaaaatattagccggacgtgggggcgcgtgcctgtaatcccagctacttgggaggctgaggcaggagaatcgcttgaacccgggaggcggaggttgcagtgagccgagattccgccagtgcactccagcctggacaacaagagctaaaactctgtctcagaaaaaaaaaaaaaaagtacctggaaaaagtcgcagacagcgagcttttcgccagtgccaggaatacagataaaacgagagagactaagggagggagcgcgagcactagcgcgcgagagagagagcgagagcgcgcgcgccgatgacgtcacgctcggcgtctcggccatcttagctgtagatagaggcggcaacctcggaagtgcggagcgggtgggcctatatagatgttgaggtgcggaggccgtgggcttttgttgggcctggctgtagccgcagcagcggtaatggcagcacggcttatgggctggtggggtccccgcgctggctttcgccttttcataccggaggagctgtctcgctaccgcggcggcccaggggacccgggcctgtacttggcgttgctcggccgtgtctacgatgtgtcctccggccggaggcactacgagcctgggtcccactatagcggcttcgcaggtatcagcgaggctgctcacgcctttctctccgctggcgcgagccagtagccacctgcgcg

SEQ ID NO: 19396 - DNA, 1032 bp, Homo sapiens
tgacctccaaaatttaaaaagaaaaaaaaagtgcagggcaagcctaagatcagctactaggctgacattaaataagcattttccacttgtcattatcttaggggaattgggaagctgcctctagcacttaaaatacaagccacttccctctgtctaggaagtactaaagaaatacaaaagttgacagaaaaggaatgaagtccagttggtctcgcaaatcccctgagatagtccagcaggggaagggacttactcaggggtacacagtgagttagaagcagagctgggactggaatcaaggtgttttgtcgctgctagttgaaggcagttttcgttgcgctgccctgctgcgtgctgtgggagctgtcgttggatgtttgcacaagtgtgggcataaaaccttcgatgtctggagtgctttttatttttcagtgtgctctgctgtttactgagctcccgtgttctggtattcattgaccatctttatttaccactacctaccttgtgtcaggggctgtggaatccaagatgtctgcaacatgctccccaccgcccacacagtctagttgggaagcagttatgtccacgtattcgttcattcagtattttatttctcattgagatgtaattcacgtgatgtaaagtccttttaacgtatacaattcagtggggttttttgttgtttagagacagggtctgcctctgtcacccaggctggcgtgcagtggcatgatcttggctcactgcaacctccgcctcccaagctcaagcaatccttccacttcagcctcccaagtagcggggaccataggtgtgcaccatcacgtgcagctaatttttgtattttttgtagagatgggttttcgccatgttggccaggccggtcttgaactcctgagctcaagtgattcagccgctgaaagtgttgggattacaggtgtgagccactgcccccaacctttttatttatttatttttatttttcgagataaactggttctttagcccaggctggagtgcggtggcgcaatc

SEQ ID NO: 19397 - DNA, 1036 bp, Homo sapiens
ggagggtacctgcagtgatggcttcaactgctgtcttaaaaacaggtgaggcgggcatggtggcttgtgggccacacctgtggtcctggctacttgggagactgaggcaggcaggtcgcttgagctcaggagttggagtccagcctgggcaacataacaaaaaaacagtaacaaacaaaaaaaaccactgcaaattcggagttctcagccttaaatgagcggagcaagggcaaaggtagcaggaaggaaagctccttctttcctggccgctagctttgaagagacagcttctccagtgtcatctcaagaaagaggggactgtgagaacctggcctgctcactttatggagagaagctaagataggcgtgggccttcctgtgacacaggcctgaatgcaggtagcctcagagagcactggtctctgagactccaggaggaggagactccaggaggcctgcgtgcgttcagatgcttgactttgcttccttgggccctgcctccttttccctccccacagccttcccctgtgtctcctgaacctcttcttgctttcatgactgagtagttcaggctctgccttccccacaaaacccttccagggccaccctagtgaactgcggggccctatccctgtgcctcagctcagtttgttgtcttctgttcacctgtgtgtgtcccattagactgagaggaacaagtgccgaaggcagggacaaggtgtggagtacagatccccaatgatgggatggaggctgggtagaagagggaggcgtttgggtgacagccttgttcttggtaagctagaagtaggatgttttctcgctgggggcagtttctctgacagcaggcaccggaagctgtctgaggcgtcagttccaagaacctcagtttctttcttgcaaggcctctgagtccatcagagactgagcccagtgccctgaggtgggcaaggcccctgcccaagataggagggtgctcaggttgttgggccacagctgaatcctccgtgtctgaagcctagtgccatcaaggact

SEQ ID NO: 19398 - DNA, 1018 bp, Homo sapiens
ctggcctaggctgtcatttctcacttggattactgaaggatcctaactgtactccctccctccaatccctcctccacactgctgggagccgtctttctttctttctttctttctttttttttttttgagatggagtcttgctcttttgcccaggctggagtacagtggcgcgatctcggctcactgcaacctcggtggcacaatcttggctcactgcaacctccactccctgggttcaagcgattctcctgcctcagcctcccaagtagctggggattacaggcacgtgccactacacccagctaatttttgtactcttagtagagatggggtttcactatgttggtcaggctggtctcgaaatcctgaccttgtgatccacccacctcgtcctcccaaagtgccaggattgcatgcgtgagccaccgcacctggccaagctctttcttaaagatgatcaaggcatcccccatttaagcctcctcaggggctcccctgatctataaggactgagtgccagctcctctgctgcgtgccacacgaggcccttctgtggcctctctcctcttaggcctgtacctttcccatctcctcccatgtgcacctcctgtccagcctccctctcactgcgttatgtctgcagtgccttcacacaagctgtttcttttgcctggaatgacgcttcttcctccgttgaattaatccaccccgtattgcttcaatattcagctcaatcaggcccctcttgggagccttcattaactgttgggccagcagtgagctatagacgcactttccctgctccatggctgtgctcatatcacagtgggctcttaccatgaacttcctatcaacctcttgcactggacctcagacactctgaggacagagccccagtgtgattcagctccatacccctatatccacatgactcagctccgtacccctatatccacgactcagctccatatccctatatccacaactcagctccgtacccctatattcacatgactca

SEQ ID NO: 19399 - DNA, 1020 bp, Homo sapiens
cttgccgcagaggctgctcagcctgagccagccacagggctgggtggggcaggcttgggtccccaagcaagaccacagaggaggaggccaaaagcaagccatgtgcctgtagccctcctaggagccaacccaaggtgcgtggggctgggaaaacctaacagcccccgggctatggcctatttatcctagagccccttgaggggacctagtgagggtggcagctgctctctagctggctggttgggctgagttctccccgaggatccaaacacacacacacacagacacacacacacatacacacatacacacacacctggctggttgggctgagtcctccctgaggatgcaaacacacacacacggacacacacacacacacacggacacacacaaacacacctcgctggttgggctgagtcctccctgaggacacacacagacacacatgcacatacatgttcacacacacacctgactggttggctgaggacacacacacacacacacacacacacacacaaacacacacacaccgggctggtgggcagaggtgtgcagagataaaggagcagctcaaaagcctaaaggtccactagtctgagaaacgccaccaccctcactttccaacactattgggaggaaacctggaacaactccttcctgatagcccagcctggagatccccgggcagggcagccagttttgagggctccgatgccctgtcaccatcctccccaatctcccctgtgaccccttgacatcctcagctcaccgtgtacttgggcaagcgggacttcgtagatcacctggacaaagtggaccctgtaggtaagttttcccagaaagggacagctcgttccccaagaggggaagaagttcccgggcccaggaaagcggggagcggccctttcaggaagtgagctggtgtgtccccctcctagatggcgtggtgcttgtggaccctgactacctgaaggaccgcaaaggtactggccccaagtccagggggcccaggga

SEQ ID NO: 19400 - DNA, 1049 bp, Homo sapiens
tgcggcgtagactttgagattcgagccttctgtgctaaatcactagaagagaaaagccacaaaaggtaagggaagtgacctcctctgtggtgtaagaggaggctttcctccccgcttccaggagcccaggccccgtgcgggggaggagtagggttggggtgtgtgaggaatgacccctcctgcccctactctgatcccaggaactctgtgcggctggtgatccgaaaggtgcagttcgccccggagaaacccggcccccagccttcagccgaaaccacacgccacttcctcatgtctgaccggtccctgcacctcgaggcttccctggacaaggaggtggggcgtgagagggtgacacggatgccacggtgcagtttagaccctgggggaggggcgaagccacacatcaagaggacatttgtaaaggaggttgccttggctgggtgtggacagttgccgtgggcttgggtttgaggggagggggccagaacaatgtgtctgtgtttggggacacactgatgatgggaacagtgaaaaccagttccaattcacatgaccccctccccccaaaagctgtactaccatggggagcccctcaatgtaaatgtccacgtcaccaacaactccaccaagaccgtcaagaagatcaaagtctctggtaggaggtggggtttggaagggggtcttcggggagggcgttactgcacaggtggctcctggtgtgatctcagcccaggccatttcccagtgcgggagacccaccagggctcaaagaatttaggttgttccataatgatacggggagcctcggtgtttactgcttcagtggggagcatgggggggccacgccacggggtctggagttgtggtgtggtggtggcttgtgctccatccagagctgcctgaccccgtcccaccccacagtgagacagtacgccgacatctgcctcttcagcaccgcccagtacaagtgtcctgtggctcaactcgaacaagagtgagtatcgggagagacccatgttccaatctaggggagaagagcaggatca

SEQ ID NO: 19401 - DNA, 1042 bp, Homo sapiens
gttgcagtgagccaagattgcaccactgcactccagcttgggcgacaaagcgagaccttgtcttaaacaaaacaaaacaaaacaaaaaaacggggcgggtccaaaccacaacctttgctttgaaccttgtgggactctgcttgggtttctcttttagcctcttttggtagtttggcctggaccctcaacctgggatttccagcaattccacaaataccctctgaccttagatgtggtatttcccttctggacttctcggcttgaagcaatgttagccttcctcagttgcctccagccttactctcctctcccctcaggagaccgggtgacctgctcccagtgcttctgtctggcctgccttaagctgcttaagaaagcattctgcttccccctttccaccctaaaatgcaagggcttgagggagggctgtacctcctttgacatggggctagccagggcctaccttctccctgctgcagaccttttctcagtgcctgtccccctgactccacctcagagagctgtggcactgtcaagcagctagtgtggtcatctcttgtgctattcctgtctgttttccagtgagaaatggtgtctccctttactacaccatcttgtgttgggggctggggagagggatgggagaggaacatattcagtatttatttgctggccttaaggagcccaaggtgtatttctcctcttgtttcaagataaggcttggttttcagctggtgatgagggtaatcgtctgatattagggaagattgaattgcgttaatctcttagccatgtgtggggaggccagatggacctgctactttgtagccacagccacacttgacctctttgaggttccttttctccaccagcctggctgcagcgtggtgaggaaaagcatgtggtttgaagttgcagccctgagttcaagtcctagtttcttcccttacaatgtaaccctggccctgctccccttactgcagattctgccaagagccttaccctctctaagcttcattcagtcctgtatcgtgggcatggt

SEQ ID NO: 19402 - DNA, 1050 bp, Homo sapiens
atcaggttaataagtcaactctcaaagcatttcttgaattcacacagagtatagtaagatacaaaaacgtgacttggtagaagacttggatcctgtccacagctcacggccatttgctctctccagttcttttgccattctcctccgaaccaaccagtccttgacttgagactgggcttctcttatctataggaagctcttctagggggtaatggaaaaagggttttgaggctctttgttcttactaagggcgggaatagtaaagggaggagagaaaagagggatggaattgtagtgacccaagagagcccctggagattttgtccagtggctagacagcctgaggttgtacgtgctacgtgtgggtaggattttgtgttctgtttgaggaaagatctagaactaggcacagaggacacagtggtgatacagtctagtagtagggagagacattaatcaagtaattatttattaatgtgtgtgtgtgtgtgtgtgtgtgtgtgtgtgtgtgtgtgtgtgtgattgcaagccatgataaggactgtagtgaaaactttaacatgccgtgggcacatataacaagagttgttttgagcatatgttctcaggatctcctgagggctgtgtcatggaaaaaaaattgcttttacgagacaaaacttttataagacaaaaatatctagttgattgagagagacgtaaatcatgtcagaaagctaaactggcattgctgcagaaagatgagatagagttgaaccagcaggtagagtttggtgatggtgagaattgggagactctggaatggggccattcttatggtgaagcatttggtcaacaattgagggcaagaagcctgaggatggggtggaaactccaggcttaattccaaaaggatttcttctgaatcttcctgtgggaggggaaaaaaaatggtttatttgtttgtctcaaaagttaagagcatgtatatggaaagagcttatgactcatataatcctcatttttacttactgggggagggactctgggtcctgggtctgtagtttagat

SEQ ID NO: 19403 - DNA, 1032 bp, Homo sapiens
agtactttgggaggccgaggtggagtggatcacctgaggttaggagttcgagaccagcctggccaacatggtgaaaccccatctctactaaaaatacaaaaattagccgggcatggtggtgggtgcctgtaatcccagctactggggaggctgaggcaggagaatcgcttgaacccgggagatagatgttgcagtgagccgagatcgcaccattgaactccagcctaggcgacaagagtgagactccatctcaaaaaaaagagctatggggagagtggacaatgacagtgatctctgagatggccgatatgggcaagctcctaaagtggtaaagatcaggaccggaaggatggggcagattacagcactcattgtttagaggagggtactggaaagccggttagaccaccgcagcttgaatatgtcttcttcaaaagaaccttttcctggctccccagcctcggtcaggtgtgctctcttggcaccctgcacttcacagcacataagacagaccagagctctttccacgaccaaaaccttccttcctcctttttggtccaagagacacacttggcagcagcaggaggagtgtcactccatacgtttttatttttatctttacttttttatcttttctgttttacatgagatgtgtatttaaataaccagacactgggccgggcgcggtggctcacgcctgtaatcccagcactttgggaggccgaggcgggcagatcacctgaggtcaggagttcgagaccagcctgactaacatggtgaacctccgtctctactaaaaacacacaaaaaattagccgggtgtagtggtgggcgcctgtaatcccagctacttgggaggctgaggcaggagaatcccttgaacccgggaggtggaggttgcagtgagccgagatcgcgccattgcactccagcctgggcaacagggtgagacactgtctcaaaaaataaataaataaataaataaataaccagacactggactagagggggaaagtttcaaggatttttttt

SEQ ID NO: 19404 - DNA, 1051 bp, Homo sapiens
tcaagcagtcctcccacctcagcctcctaagtagctggaagcacaggtgcacactgccacacctggctaattatttatttatttatttattttttgaggtggagtctcgctctgtcgtgcaggctggtgtgcagtggcgtaatctctgctcactgcaagctctgcctcccaggttcacgccattctcctgccccagcctcccaagtagctgggactacaggcgccagccaccacgcccggctaatttttttttatttttagtagagacggggtttcatcatgttagccaggatggtcttgatctcctgacctcatgatctgcctgcctcggcctcccaaagtgctgggattacagatgtgagccaccgctcccggcctaattttttaatttttaaattattatttatttatttatttatttatttatttatttatttatttatttttgagacagcgtttcactcctatcgcccaggctgcagtgcaatggcacgatctcggctcactgtaacttccacctcccagagtcaagcaattctgcctcagcctccctagtaattgggactacaggtgcataccaccacgtccagctaattttttgtactttttatagagacacggggtctcgccatgttgctcaggatggtctctaactcctgggctcaagtgatcctcctgcctcggcctcccaaagtgctcacattacaggcgtgggccactgtacctgacgattttttctcttttggatatatacccagcagtggtattgcccgatcttacgatagttctgttttcagttttttgaggaacctgcttactgttgtccatagaggctgtactaatttagattcccaccaaaagtgtataagagttcccctttctccatatccttggcagcatctctttttttttttgtctttttaaaattattttatttttatttattcatttttattttatttattattttatttgtttatttatttatttatttatttatttatttttgagacagagtctcagtttgttgcccaggctggggtgcagtggc

SEQ ID NO: 19405 - DNA, 1050 bp, Homo sapiens
agacggagtctcactctgtcgcccaggctggagtgcagtggcgcaatctcagctcactgcaagctctgcctcccaggttcacgccattctcctgcctcagcctcccaagtagctgggactacaggcgcccgcaaccacgcccagctaattttttgtatttttagtagagacggggtttcaccgtgttagccagcatggtctcgatctcctgacctcgtgatccacctgcctcggcctcccaaagtgctgggattacaggcgtgagccaccgtgcccggccactcacttcttccaacttttcccgtagaacattcactctgaaccaatccaggaaaagggcagccagccaccagggttcctgccacgtgccctcctgatatgctggtcttcactcccatatcttgactggataccactttacccccctctagctctgtaatccttttctaaagtcttgacacagtattcttctgtctcctgcccctaggaccctgctgggatctttgagcttgtggaggtggtcggcaatggaacctacggacaggtgtacaaggtgagacgaatggtgtggaagtatgacctccacatctgcagggcagtcttgggaggagtggaaggaagtagattcctggtctgcaggtctgaagggggctatgggagatgctagagtctagggccctggaaaggtagagtgggggagaggaaagagcacccagaaggaggtactgttgatgcctctctctacctgagtgcagagccagtcccggacatggtgggaacaggccagcagccaggcagggtggcctgcagcagtgagagcaggtggaagggcatacggccttgtgtgtcagaactctcctgggattcagagagagctaaggccagagatgtgggtttggcctctccccagaccacaaagagacccaggactttgaggtagtgggacctaatgggtggccttctgcagaggggatgtggcctctgctcccacagctggcctgctggggccagagctcaggcttttggcttttgagctgcctctgtccctga

SEQ ID NO: 19406 - DNA, 1048 bp, Homo sapiens
tgtccagcatagcaacctggcacacgggcttgggagtcagaactcctggggtttgcaccctggctggctgaacggtagcctgtgatcttgggcaagtggggacctctctgaggttgttttcccatctgtgaaatgggaataacccctccctcaaggctgtagcaagggttaaatggggtcacttgggactgggcctggcctgtggctggacactttaggtgtgccctgaacaggagcttctctgtatttccctgtgtccccctccagctctgtgaggacctcttctctcgcgttagtgagaaccagagtgctcagctatcctactctgtggaggtaagcccgggtcttggtggcagggctgagaggggtccagactgctgagggctgtcgctggaatcagacagcctgggatctaatcctggctctgctggttactgactgtgactttggggcagtgattctgtccttcagcttcgtatgttcatctgggagacgctgttgatcggacacacctcctggcttgttgggcaggtcgctgagctagcatctgcagaatgcttcgcactgtgtattagctgcagtcacctggatcgtgtccagtggagtcagattaagttgcgttgtcattgtttttgctagttttgttacttctcatttgcttctcccactcaggtgagctatatggagatctactgtgagcgggtacgagacctcttgaaccccaagagtcggggttctctgcgggtccgggagcaccccatcctgggcccgtacgtgcaggacctgtccaaattggctgtgacctcctacgcagacattgctgacctcatggactgtggaaataaagcacggtgaggcaggctgatggagcagagggcaagggggccagggttgggaaggtgagaggcaggatccagtgactgctttctttaccctaaggactgtggctgccaccaacatgaatgagaccagcagccgttcccatgccgtctttaccatcgtcttcacacagcgctgccatgaccagctcacggggctggactcggag

SEQ ID NO: 19407 - DNA, 1058 bp, Homo sapiens
gcctgtagtcccagctactagggaggctgaggcagtagaatgacatgaacccgggaggcagaggttgcagtgagctgagatcgcaccactgcactccagcctgggtgacagacaagactctgtctcaaaaaaaaaaaaaagaaaaaatgttctcctagagatgctgtctaggagatgttataacacatgtacaggcatatgttatatagaactatacacatttactcacattcacggcctctctaatagttgtagttgcatatctattttatttatttattttgagacaagagtcacactctgtcgcccaggctggagtgcagtggcacaatctcagctcagtgcaaactctgcctcccaggttcaagtgattctcatgcctcagcctcccaagtagctgggattacaggcacccaccaccacgccgggctaatttttgtattttagtagagacagggtttcgccatgttggccaggctggtctcaaactcctggcctcaaatgatgcactggccttggcctcctgaagtgctggtattacaggtgtgagctactgtgcttggcctgcataccttattttaaagcttcctttatttttttcacggtgtcagggtattctattgtgtagatgtaggataatgtatttaaccagcttcccactgatggacattcagattgtttcccattccttgatactacaaaaaaaggctacaatgcatagtcttacaaatgggtgttatctgtagagcagattcctagaaatggagattttgggtcaaatggtagccatgtaaaattttaatctaggccgggtgcggtggctcacgcctgtaatcccagcactttgggaggccgaggcgggcggatcacgaggtcaggagatcgagaccatcctggctaacaaggtgaaaccccatctctactaaaatagaaaaaattagccgggcgtggtggcgggcacctgtagtcccagctacttgggaggctgaggcaggagaatggcgtgaacccgggaggcggagcttgcagtgagccgagatcatgccactgcactccag

SEQ ID NO: 19408 - DNA, 1029 bp, Homo sapiens
gggatggtcttgatctcctgacctcgtgatccgcctgcctcggcctcccaaagtgctgggattataggtgtgagccaccgcacttggcctctttctttctttttttggagttttgctcttgttgaccaggctggagtgcaatggtgtgatcttggctcaccacaacctctgcctcccgggttcaagtgattctcctgcctcagcctcccgagtagctgggattacaggcatgcaccaccacgcccggctaattttgtatttttagtagagatgggatttctccatgttggtcaggctgatctttaactcctgacctcaggtgatctgtccccctcggcatccaaaagtgctgggattacaggcgtgagccactgcgcccagcctggtctgtgtttcttttactgctgtcagtttcttgttcaggttcacaaatttgttatatatacataacaaatataatatttaatatatatatacttttttttttagcctcactctgtctccgaggctggagtgcagtggcatgatctcgggtcactgcaacctctgcctcccgagttcaagcaattctcgtgcctcagccttctgagtagctgggattacaggtgggtaccaccatgcccggctaatttttgtatttttagtagagatggagttttgccatgttacccacgctggtctcaaactcctgagctcaagtgatccacctgccttggcttcccaaagtgttggggttacaggcgtgagccgcggctcccagcctacggatatatatactcttaactacagtctgtaccagcctgggcaacatggtgaaacccggtctctacaaaaaaatacaaaaattagtcaggcaaggtggcgcgtgcctgtagtgctctgagcatgcagagcattatattaagtactttacttcagataactttgattttacatgtccacctcttccattagactgagtgtaactccagtgtgctcaataaatgcagagatcttaaaatatgtttgactgattttttttttctttta

SEQ ID NO: 19409 - DNA, 1050 bp, Homo sapiens
cactgtaacctctgcctcccaggttcaggcgattctcgtgcctcagcccctcaagtagctgggattacaggcgtgcaccactacacctggctcatttttttgtatatttagtagagacagggtttcaccatgttggccgggctggtcttgatctcctgttctcaatttatccaccctccttggcctcccaaagtgctgggattataggagtgagccactgtgcctggttgaagtgtggctttttaatttgcacttccaggataggaattatattaattatggcctctttgtttattggctggctggcttgcttccttcctttcatccatttttttctttctttcatttttttctttttttgcttgccctcccttcctccctccctttcttcttcttcttcctcttccttttctcttctactatgagttgctgtttcacatctttcttttgtggcttgtctgtttatatctgtttcccatttttccattgggttgtccttttctcagtaatttggaggagctctttgtaaattatattagccctttggtatgtgttgcaaattttggtctcacagtttgtcatttacctcgttttaaaaattttttgttatgcagaaagctttaatttttatgtagatctgaccttttttttttttttttaaatttatggtttctgggtttcttattttgctgaggaagacctccccaactctcatgtttatttaaagagaaaaaaccttatcattttcaacacttgtggttttttatattttgtagtccaatccatttgcaatttatttatttttaaattagagaagtttaatataaagaattattaactaaactggagatcacccactaagacaaaagaaaaccctaaagaatacaagactagtagacataaggaacagtctcgcttccagggctgaggcagagcaccctttatttttttttctgaatagatagatagttgtcttaacgtttattcaatagttcatgtttttgtttgtaaattataacttggtaaatctcccaacctttgaactagcag

SEQ ID NO: 19410 - DNA, 1043 bp, Homo sapiens
ggagtttcgcttcgttaccaggctgtagtgcagtggcgcgatcttggctcactgctacctccacctcctgggttcaagcagttctgcctcggcctcccgagtagctgggattacaggtgtgtgccactgtgtctggctaactttgtatttttagtagagatagggtttcaccatgttgatcaggctggtctggaactcctgacctcatgtgatccacccaccttggcctcccaaagtgctgggattacaggtgtgaaccactgcacctggcctttatttatttgcttttgagacagggtcttgctctgtggctggagtctggtggcatggtgcgatcttgcccgattgcaatctctgctttccgggctcaggtgatcctctcacctcagcctctggagtagctgagactacaggcatgcaccaccatgcctcgctagtttttgtatttttagtagagataaggtttttccatgttgcccaggctggtcttgaacttctgggctcaagccatctgcctgccttggcatctcaaagtgctggcattacaggcatgagctgctgtgccttgttcattttcttattaatttataaatattggccaggtgtggtggctcatgcctataatctcagcagtttggaagactgaggcaggtggatcccttgaggtcaggagttcgagaccagcctgactaacatgaaaccccgtctctactaaacatacaaaaattagctgggtgtggtggtgcgtgcctgtaatcccagctacttgggagggtgaggcacgagaatcgcttgaatctgggaggtagaggttgcagtgagccgagattgcaccattgcactccagcctggacaataagagggaaactctgtctcccccctcaaaaaaaaaaatctgtatatctttctctctatatatatctctttgtatataatatcttcatagacattggcctttgttttttatttgttacagatatttacaggtattttccatgttttttcttattttggcttttggggtaatttatttttttgagaca

SEQ ID NO: 19411 - DNA, 1027 bp, Homo sapiens
gcctcccgagtagctgggactacaggcgtccgccaccatgcccaactaatttttgtttttttggtatagatagggttttgccatattagccaggctggtctcgaactcctgacctcaggcgatccatccccctcggcctcccaagatgctgggattacagtcatgagccaccacacccggccagcttaccttagtctataaagttaccttataagctttttaattttttagactttttttttttttttttttggagtgtagtggtgccatcttggcttactgcagcctcaacctcccaggcgcaagcgacaggcacacacaaccacacctggctaatttttgtatttttagtagagatgggatctcactctgttgcccaggctggtctcaaactcctggcctcaagcagtcctcccaccttggcctcccaaagtaatgggattatagatgtgagccactgggcctggctaggaaaatcttaagtgtagtttaaaaaatgattttatagactgtgagtttcttaagagcaaaatttaaaaaatgattttttttgtgttgaaatattttaagaccattaaattatgaatacttttttatgagcaaatagattgaggtagagcaataaaataattcttaaaacaagaaagataaagcatctcattgccttttgatttaaatctcatcagcataattcttttactactctgaatgccattttggatattcattacagtctttttttctatataatttttgtgtagctcatactgtgctatgtataatgtatttacttaatataactttttctggcttggtattacttcactgaatgaatatgtaggatgggtaggatatacctaccatacttaatagttttattttattttattttattttttttgagataggatctcattctgtcacccaggctggaatgcagtggtgcgatcttggctcactgcaacctctgcctcccaggttcgagcaagtcttgtgcctcagtcccccaagtagctgagatgacagg

SEQ ID NO: 19412 - DNA, 1018 bp, Homo sapiens
tgcgtgttctcttgtttatatcaaaattattattaggtctttactccatttatttattgtattcttttttcgttttgtattgctgttgctatttgagacattctgaattgagtgacatagtcatttttccctttggatgtcaagcattataagtagccattgcatggctggatgtggtggctcacaccggtaatcctagcactttggacggctgaggcgggtgagtcatctgagatcaggagttcgagactagcctggctaatgtggtaaagccctgtctctactaaaaatacaaaaaaattagccgggtatggtggtaggctcctgtaatcccagctacttgggaggctgaggcaggaggatcgcttgaacccaggagatggaggttgcagtgagccaagattgcgccactgcactccagcctgggcaacaaagcaacaactctgtctcaaggaaaaaaaaaaaaagtaggcaatggattagataatttctccctttttcttattgctcaaatgaaggcaacaaatacgggatgtgtggaactgttgacaaaggctggcatactgatattctcagccttctaaatttcagaaggtttaattttgttgaaggctggcattacagtaattagtattagtttgttcatgatgctataaagatacatggtaatagggaaggatatgagctggaagtctcagcatggaactgagtcagaatcttgaggttggaagtgacttctggtcttttctggctacatacaaagtcatttgatcactactttttttctttattcattaaataaatactaccaatttaataatgacagctaacacttatcaagtttgttctatatgccacactaagtactttttacatgaactattagctaatgatagtgacctattagttaccatgttataaaaaataatacagcattttgtgtgatgagagctattttctccttgatttgtggttggttgctaatgcattaggatatgcttatttgtaaactttctca

SEQ ID NO: 19413 - DNA, 1028 bp, Homo sapiens
tcagttaggagaattgcttgaacccaggaggcagaagttgcagtgagccaagatcgcgccactgcactccagcctggtcgacagagcgagactctgtctcaagagaaataagttctatctggttattcagtatctttacatgaatttatcgtctcccttttaaaatttgttcatgtttttgaattaatcaagcaccactgtcaactctgaaatgctatattcttgtcaagatgacctgtaatacatttgatgtatatataaaaggttgtggtagtattttctctggtgataagttgaaacccagcagtatgatgctggctaatgatatccattttctcctttacctcttataccaaaacctctgtagcttgttcatcctgtctacagctaattgaagtcagtcttgtctaaaccttgtttgttttgctttctttttctctgtccccaataaaactgttagggttcctttgttttcttattttctttgaaattataaaatagaattttcccaaaaactctgaagaaatgaaaatgactaagaacctcccatttctgaaatgcattatcaactgcagttttagatctgtgaattaaagagcttgtaacatgggttggttcagaaaacatgcttggtttgttaagattgcattgatgcatctaaacccggtaaatgggctttttgtgtactgttgtatctttactgtccagagcgctcagtaaactcagttggccacagcgaacagttggggtagctttttacaaaatttcaaaaaaaatactgtgatcctttttgagtttttggtggcgttcctaaagaaaatgcatagtatataaaaggtcaatgctgattattagtttttgtcttggccgttagcctatatcataataaaaatcaaatgtgaagatttcccctgagacagcagcttttattgtatctactgtgaagtctaaatctagtctttaatgattgccacaggtgtttacagtataaaccaggattttgatgtggacagcagtctttgttttat

SEQ ID NO: 19414 - DNA, 1076 bp, Homo sapiens
ttataaatatttctgaaagttttttttttttttttgagatggagtcttgctctgtcacccaggctggagtgcagtggcacgatctcggctcactgcaagctccgcctcctggcttcacgccattctcctccctcagcctcccgagtagctgggactacaggcgcccgccaccacgcctggctaattttttgtatttttagtagagacggggtttcaccgtgttagccatgatggtctcgatctcctgaccttgtgatccgcccacttcagcttcccaaagtgctgggattacaggtgtgagccaccatgcccggctatatttctgaaagttttattgcttttctgttgaagtattttctgattcagcttttcctaaactaacttcagagcttggcattacagcagtgtttatgttttgtgctttggaaatttgtagtgttggcaatgagtaagagacggttacgtgaaacacagaacaaaaggccatatagttttcaatttgacgaaaaatagtaggaatagagcttatagctaatcaccagaggacactgaaattttctactggtgttcagaaggtctttatacatggttgtaatttatataaagctgttacgctaactaatcagaatttcaatagtgaaaagctagatttaggaagctatctgtggttccagtgccataaacttgcacttagatagggaaatgaaaacagagtatataaaattaacaaaacccattagtaatactgtaaacaaacgattagaaattaaaatagtgtttgctaatagatttaaccagtagagacgatacagaggttttagtaaattagaaaccagtactgagttcttcctcctagtgagacaaagagggaaatatgaaagaatataaagacaaagaggatgaattaagagccttcaacacacatctgaaaagagttccagggcaagagaatggaaggaatagtaaagaatatttgaagagataataacttagatttttactaataaaaaatgtgagtccttaacataaatactgagtaccaaacaggaaaaataatagtaaattcaggccgggca

SEQ ID NO: 19415 - DNA, 1041 bp, Homo sapiens
ccctccttttttttcctgttgttttttatcagatgacctttataagcatcctaaactagccttgactgagatattttaacttgtcttttccaaatagtatttaattcaaaataaaataaatgatggctttgtgtaaggacctgaaaacaaagtgaatctgaacctgttttttgaggggtatgttatttggggaaaatccccctcacgtttgggcatttatgatatttttccctatcgtgcacaacttagtataactttgcactcatttaaattcagtgaattaggttttcagtttctctagaaggaaaaaagccaactttttgagcctgcctttgtttctctgcgtgtaagtgtatgtgtatataagaaatgaaaattcattttctcaccagtttactagtttatgtaagttggttccttttaatccatgtttttgagaatggacttgggaaagcaatgatagttttaaggggtcactctttgtgtttgtttcatttagatggtaaaagtaaaatagtatttaaagtactctgtttaattggatggaagcctttttatagcaacataattttctaacattttagaaaacacgttattctattttgggtgtttaaaatgtaatcagccctttcattattcataagaaattattgtctcatgaacttactaacccaggaattttaaaaattatttattatgggctgggcgcggtggctcacgcctgtaatcccagcactttgggaggccgaggcgggcggatcatgaggtcaggagatcgagaccatcctggctaacacgatgaaaccctgtctctactaaaaataataataaaaaaaaaattagctgggtatggtggcaggcgcctgtagtcccagttactcgggaggctgaggcaggagaatggtgtgaacctgggaggtggagcttgcagtgagcggagatcgtggcactgcactccagcctgggtgacagagcgagactccgtctcaaaaaaaaaaatttatttattatgtgtatttccttttatatatgggatatttt

SEQ ID NO: 19416 - DNA, 1050 bp, Homo sapiens
aactacaaatcagtagaaatttaaaaataacaaatactataaactgtcacacaaataaatttgaaaacagatgaaaaaatttctaataaaagataattagcccaaattattccaaaacaggaaaggtagtcagtaattattaaagaaagtggatctagagtaaaaaatcttattgtctcttgcctcctctcaccaaaagatattaaactgttgattttacaggtaagtttttccagactttctggaaagagcaaattcttatattttacgaactctcagggaatacaaaaagagagaaagctctccaactgtttttatgagactagtagatcttcactacaagtgagcaaacacatagaaaggtagtatgagaagaaattatagatctgtctcaggaatacagaagctaaaattttcaacatcgtaggtaaaataaagggggagaaatacatcatgaccaagtagggtgtattcccagaaatttatcggaaaatctatcattgcagtgtacacgtgaaatgattgtagaagaacagcattatattcattttggattcagagaggtatttgagaaatttgaccactcaataacttagtaaagggctatttatcaaacctttggcaaacatagttaagggtgaatatttagcagccttaccattaatggtgggaacattctggggcagacccatgctcagtaattcagaaatgaggcataagaactggaaagaaagcaacgagactgattcaattgtctgtataaagaaaccagagaatgtacaacagattgttagacctaataagagttcaacaatttgaaagttgttcaaacaaaatcaacatactaagataattgtttttctatgccccagtgataaccagttgaagaatgcagtggtggaaaaaagattgatcctattcacaagagtaaaaaaaaagaaaaaaaagaaaaagaaaaactagttagctaccaatatagctaaataaagatgggcagggtccttatagactacataataaatgaggacctgaatctgtattttcctgaat

SEQ ID NO: 19417 - DNA, 1049 bp, Homo sapiens
ctattctggactttgatgtgaatgggattttataatatgtgcctttttgtgtctggcttcagtgaagggttttagactggagagcggtaatattagttttgcgttttagaaagttcagtctcatagcactgtggtgaatagaatagggagggcaagactgagggcagaagaataaaaaaggggcctctgttgtagttgtttaagtcataagtgctggtctaaggcagaagccagaagatagatatatcatattgcagagaaggccgagttagcaggtctctgtcatagttgaatatgttggggtgaggaaaaatcagaagtatgagttggcttgggtggcttggtagatgggtggatagatcatgctacctattctctttttagcagaagatggctgagctgatgagtatcaacaacacatacattttacaaagattccttgacttgtcataagaagtctatattaaccggacccaacgaggatttctggataacagatttatcagaatgtattaaacacaattaggagtgtttattccacctttggcctttggagcaatgtttcccaaagtatattccctagagtacttgttatttgagttgtactgtgaaaagtttttttttttcttttgtcaaataaatttgggaaaggctatattatatattaccttccaagaaaacatagacataattaagaccccgagttcaaagtcctgcagtaaagaaatctttaaaaatttatttaattatggaggagcctttgcaaaataacaataataataaatttctccctttaacttgaagtttctaagacttactaagaacagaaatctttctttgctgtattcctaggagtgcactttgggagactctgctttaaagagatggtgtggggataggttgccccttggtccagccaaggacagaatcctagagatgtggaccattggtcagacctgggctaggagccctgtgctaaagaaattgcctaccattggccgggcgcggtggctcacgcctgtaattccagcactttgggaggccgagac

SEQ ID NO: 19418 - DNA, 1058 bp, Homo sapiens
caactgttcgtatttgggagctctttgagctaccagagcattcagcacatagctccagcccatccttttatcacagtattataacagtctgcttacttatcttttttttttttgaagccgtatgtatctcgaggtcagggattatatcttgctcacagttgtatcctgagggcctggttttgtgtccagcatgtagaaatgacacttagtgtttgttcaatgagtctgtgaaggtagcacattaatgattatcatgtgtaatgagtggcggaatacatttattatagtttttgtctttaaaaacgcagagaattgtctaacttggccatatgtattttcacatttcaggagcatttagacagcacccgtggctcagttcattccttagatgcaggcttgctgttgccatctggagatcctttcagtaaatcggacaatgacatgtttaaagatggactcaggagagcacagtctacagacagcttgggaacctcgggctcattgcaatccaaagctttaggctataactacaaagcaaaatctgctggaaacctggacgagtcagattttggaccactggtaggagcagattcagtgtctgagaactttgatactgcatcccttgggtcactccagatgccaagtgggtttatgttaaccaaagatcaggaaagagcaatcaaggcgatgacaccagaacaagaagagacagcgtccctcctctccagcgttacccagggcatggagagtgcctatgtgtcccctagtggttatcgtttagttagtgaaacagaatggaatctcttgcagaaagaggtgagttacctttctcacgtttttcctcttgctcacgctgaggcacactgggaagctctgggatttagcgttcattcaacagacggttcctggagtcagtgcaggcacatgttgccagcaagtggatattaacgtgtgtcacctgacccttgtcatagtctgccttgggtattccaggtaattgtgacagagaaaggagctagctagttaatcacagtgaatgtgaacctccccacctgaac

SEQ ID NO: 19419 - DNA, 1039 bp, Homo sapiens
aggctcccacacatcctgctggttttctgtaagagagactggggatagctggggcgtattcactaagtttcctggtggatgcttgactgtggaggttgtcagaggaagtcctgtatgtatccctgttggtgtgacagacaccgatcttagcagctgttttggtgattatcgtcactgtcaccagctgctgggggtgggggagggcagcactttaatccatttcttcctttggcttttcatacccagttcatctcaggacttagagcaagtagtctagatggcctgcacgcttgccctatagataaagagattggtcgtgtataggagtgcgacggatatccacccacctttctgccctagtagtaggtaactacaagttactggatttcctaagtaattcggccctttggcattaatcttcattcaaaacttgtattttttaggctaccgttgaacaactaatgtttgaagagaagaataaagctcagagattacagacagaattagatgtcagtgagcaagtccagagggattttgtaaagctttcacagacccttcaggtgaggcatttggggaaccacatacagagcacgaaggcagttttgggggacagaaccttgccgatccctgacttgaccactggcagtagctagaggtttagagactggctgctcctacctccaccccaaatgtctgactcatcattcaagccagaaacctggtgtgttcttcacacttggcccatttttctttttctgtatgccttgccaattttgcctccttatgagtaaagtactgactccttagcataccatgtaagactcttcccaaccaggcccacccctgtattttgctcatctctctgccttgttttacatgtttaactgcttgtggttcctcgcccacagcgtggtgttctgtctggtaagcatcctcatctcatcccctcctgactcctttctttcaaggctcagcgtaggtctgtcccctctgtggagctcttctaggtccctgagctgggctaaagtgcccctccctc

SEQ ID NO: 19420 - DNA, 1046 bp, Homo sapiens
tttccatatatgtgtatgtatgtatgtacatgtgtatatatatcacacaaacacacataaaaccaatatgatacgtattattattgcttttagatcccaggcagggggagccttgggattaggagcacactgtacttcaggaagttcatagccatggctttctactgggaatttagaattccttcatggccctgtcattccaaatgcagttaacctacagaggtcatttttattataagcagcattgcctggtaacagccatttcacctttatcaagtttcttccataggtattctactcattcattaaaaaaaaaatgaattgaggactcattaacattgagaaatacacatctctcacagagctcaagccttgggttggtaataagagaacagaataaacaggcagtaccctggagagctgtacaaggagggcttatgggagttcagaggagggtgatctcctttatggtgacaccttcctggaggaggcatttaacttggccttgaagcatggaatcgatctggacagacatggagatctggtgagttgtgggggtagagcttaagtggaagatccccacatagaagaacaaggcagagaagcaggaaactggagtatatacaaagagcatcttgttctacttagctggagcattaggttcatgagggagaggatagttcctgttaggaataggaaacagattcagagaagtgatgtaatctggccaaaattttactactaataagcgatagagctggtgttagaccccaggtctttgtggttccagtgcccctgctgtttcctgctccaggctcaggccttggtggaaggatgccattttccatcagcttgtatggaaagagacatagcaggtgaaagtttaaataaaacccctcactacttcctgttgactacaagcatatgttcccttctgttccagctatccagcactggtagcagatgctcaaatatgcagtgctttcaggcctctgtgctgttgtttaggctgttctgtctgaatgactttgactcctcccactaca

SEQ ID NO: 19421 - DNA, 1048 bp, Homo sapiens
cttgttaccaggtgtaccgagtgtcatggccacctccagataacaccatgtgttcagaacatcatgatgacctgcatttgcatattaaaggactaaggtgggagggccaggtttttcaagggctacgtaaatgacacacctggtcaaaccaatcccctgggccttatggaacgcagacaccgcttcctccagcatcccaatataagcagccacttttccgctgcacacggggttttctctttgttcaaatcccccctccctctgtctctgtacggggagctgttttcttcttccttccttctttcttgcctgttaaacttttcactccttaaaatcaccccacatgtgtccatgtctaaaccggcacgagaccaagaaccctggtgtccctccagtcatcagagccatatagcttgaatgcctgcctcaaggttgagacttttttcagtgggtgggaggggctggtatggcttgtgtggcactttatagctgcaggtaggatgttctggagcacggagaggatgagagctaataaagaagggagtaggtctaagagacaccacagggttggaatccacaagagaggatgtgggggcatgaaagaaggagtgggaacccccagggaggaggatgaggcatggatgggtttgtgggtgagcggggcagctgacctgtccaatgtgggagggaagttctccttggatccttctgggatacagcatttctcaggggtaccctcagagatgccttggcaaagctgccacagaagtcgacctgtgacctggttctggagttagggatttcaggtagggcaagaacagtgccctggatgtcatgcctttaagtcaaaccgccatctgcccaacggagcgagcctttggctcccagattgtccatccattctcgcttgtctcgcccgtggatgtgggtgtaacttgaactcaaaccgtctgtactgttagcccctcagctctgagctctgcagatgcctggcaggggttttgctggaattctgacttcactctagagcaggggttcacagccttgg

SEQ ID NO: 19422 - DNA, 1035 bp, Homo sapiens
tgatctttgtctcccctggaattgggcacagagcacagtggtggaaggatggtggtcatccctgtggattccatacagatacagctggcaatacatcgtccatgttcatcccattcctgagccctgggaagcatgaccctcaaattcactcagtgtgcttctcttcttatcgttccctggcaggagttccccttggccattctcaggggctgggaatgctactgtgcttaccctaccccccggttcaacctgcgggatgccatggacagctcagtatgtggccaggaccctgaggcacagaggctggcagaatactgtgaggtctaccagacacctgtgcaaggtgggttctgcatccccgactggtagtggcatttggtctggggggtggggagagcttccagggtttggagatgccagtcatggccaagcatgcagttatgaggtatggcatgtgtctgtgtaaaggtcttggcatcttgatgggtgttggagataatggggagggtcagttttccaccctccacagaggctgaatcctggactcactttaaaaaacactggaccctttatctaagtctctctggagatgacaatggtaagaggatgaacagagaggggcaggtcctagagagatagcaacagaaaggtggtaggattgggaggcgtgggaagaatgagatcccaggagctgcaggggccactggtgcctccaggacctgggaaccctccttggtgtgagcatcaggtctgcccctgttgaccttaggaactgatgaaaggaagagccggggacgagggatgttaccacctttatcaagtgcctactgtgacccagcatggccctggatgttttggggctttcccctggtgatttcatgtgctccttgtagcagccctggggatgagacataacgaatgacttgcctgtcattagtccagctctggtttattgttggcagtacctgggtgtgttactttgctcagcctagcctcaatccccacccacttcccctattagaatctggaattatc

SEQ ID NO: 19423 - DNA, 1041 bp, Homo sapiens
acctcttcctgcacccagggaggcacattgttcgaagctgacttctccctgctggatgggatcaaggccaacgtcagtctctgtagccagcagcacctggctgcccctctggtcatgctgaaactgcagcctgatgggaaactcttgcccatggtcatccaggtgagaggactcaggatttctgctcccagtctccagccttctcagctcagccccttatcgaaatgcactaagcaccatcttcaaaggcgctgggctaaggcaccagggagacgcgaaaggaggaaatgcgccaagtctctattcgaaggccttgcaatgtagctggagagacacatagggctagtctgcagaagctccgggactgaggaagtcccggaggacagagacagcccaggagggatcggggagttgggatgtcaccagccttggaggagggccaggtctcagacaagcaggagggagaggaaggaccagtcctcaggggcaagacagactgggcagaggctaaggtagaggagtcaggagattcctaggggacagttggactggggccagactaagccaggctaaggagcatgaagtgggaagctggagaaggctgtgatgaaacatgctataggcacgcggtgtgggcagtggtgtttagggtgggttggagaggggagatgctagaaacagggactggggcaacatgccccagcactgaccccaggaggaggggagctcggatatgggtagtgaccgtcgggatggagaggaccggtggatgcgagtgcagagggagatgaaggagaggggaaaggggagccaggccaggtgcctgcagaaatagcaccaataaagagaacagggtgcccaggtagacttttgtctggccaatgttgaggtaacgggaagacatttaaattgtccagcaggcagctgagaacaagagattcagtcatttgtgtagaggtggggccaaaagatgagatttcgaaaaacagtgtgggatggaggaagcaggtggtttgaatcttgtccacaatgcggggactg

SEQ ID NO: 19424 - DNA, 1022 bp, Homo sapiens
cattttcaggtatctttatggcaatgctccacatcttggtaccattttattagtttgttctcacactgctataaagaaatacctgagactgggtaatttatacagaaaagaggtttaattggttcacggttctgcaggctatacagcaaggatggtggcatctgcttggcttctcgagacacctcaggaaacttacaatcatggcggaaggtaaaggggaaatatgacatcttacatggccgaagcaggaggaaaagagagcagggaggtgctacacacttttagacaactagatctcacgagaactcactaccatgacagaagtaccaagggggatggtgttaaaccatgagaaactgctcccatgatccatttatctcctaacaggcctccagcattggggatcgcaactgaacatgaggtttgagcagggatagattcaaaccacatcactgtcccaccactgctccaacacttttgcaagattttttcttgcaaaaaaaagactttttctctgaccatccatcactaaacctgtacctcaccattaccaccacaccactacaccccattatttctgtcttctctgtccaccccgtgaccctcactttgggatcggaccacacagatgacaaccaggagcaggaggccgaggcacagggacagcaggaggaggcagtcccagagtgcagatgctgcaggagggcctggggaggaggcagccctcaggaggagggggtgtcaagacgaggagcgtccaggacatgacagagacgggaagaggagaggggccagggagctgtctagagaggagggctgagcataaaggacaccaggaaagggcgggatgggaaggatttcagggtgggggatgcccaggcctttgacctcagggaccagcacaagtcctcagtcacacaggcccctcacacccgtggggaccaccaaacacacacacacagatgggggataatggagatatgtgaggtcccatggtcagagctgaggaaggggcagaagga

SEQ ID NO: 19425 - DNA, 1025 bp, Homo sapiens
gatcatgccactacactccagcctgggcaacagagtgagactccgtctcaaaaaaggagtaagtgggctgctctgcctaaggagtcgccatccttttattcctttacttccttaatcaacttgctttcacttttgaaaataaaatagaggctgggcgcagtggcttacacctgtaatcccagcattttgggaggccgaagtgggcagatcacctgaggttagtggtttgagaccagcctggccaatatagcaaaaccccatctctactaaaaagacaaaaattagctgggtgtggtagcacgtgcctgtaatcccagctactcgggaggctgaggcaggagaatcacttgaacctgggaggcggaggttgcagtgagctaagatcacgccactgtactccagcctgggcaacaaagccagaccctgtctcaaaaaaaaaaaaaaaagttgagggcaggagctgaaagcagtcagttaaataggtgattgggggctgaggatgtgaggtcctggagtctgtctagtttcttcagtaagatgaaaaaaactcttttcttttttctctccagactcagtggttctccatccttccggacttcagcctggatctccaagaggggccctctgtagagtcccagccctactccgatcctcatatacccccggtatctaagaatgccaaggccagaacaaggaaatgtagtttagtatctggtcacgggagagaaaataaaagctgcagaggttgggggtggggtcagggattctagggatggggcagagtggcagcatcctttgtacctacaggtggatcccacaactcatttgacctttaaccttcacctgtccaagaaagagagagaagccagagatagcctgatcctgcccttccagttcagttctgaaaagtaaggttgggacctgggtacgtggatccctgagtagatcccagcatctgggccatggagaggttggggcaacaggttattgattaacctgactttatagggactgaagtccacctc

SEQ ID NO: 19426 - DNA, 2918 bp, Homo sapiens
gtgggggagggggctattcggtgagagggcatgatggggggggttggcggacggccggggggaggggaggcggcgtggctccggcctggcgcagtctctgaggagggggcggccgcggcaccggaagtgccccccacgggaggctgccctcggggtcgcaggccgcatggccaagcgtggaccggggccgcatggcagcgcggggacccctccccccaggtcccggccaccggaagcccggaacggccacatggtcggcaggagccggcagcccctagcgcggggagctagtcctcgcgggggttccgagggggcctgagattttgaggagtggaagccggaggctcgggtcctaatcaccccggagggcctgctgcaggcatatgttagcgcttcccaacctcaagggccccaggagctttcctgaaaaaccctcctgtgaagtgtggcggtcagccaggtgtaagtggcaccccttcgagctgggaggccggagaaatggggaaacagggcgtttggacaggagcccaacttttctgtcggcctgggtggacagcgcctaaaagcctcaggcagatgagtttcccaccgtgataggcgttcttcaccttgtcactgtcttcctgttgtaactggtttgggagttccacggtttcgaagtccttaactctactagcctagtatgattttctactactcactactaccaaccttttgctttcattttattgtcattcaccaccccccacctctcccactttctactgactgtactggcccggcctgaaaagccgacaggacagatgcatcctgggaaaagtgggagggccttccaggagaggctgggttcctgggttctctttgggaaccaagatcgaggtgtttggcagggggatcatttcggaaacaactttgctttctcccccttggcttgttgcaagtgcatgttggcgaggcgggaatcccccaaagaggccttgtggtttcctgtagcagtgactggtttgtgtgtggatgggggggggcagtgtaacagatgggtggggccttgtcctccggtctccaccctccccccccccaattagccctgcccttttgctggatcatagctgctcacctaattatagccctggctatatgtggggaagaggggtggttggtttcagtggcaagtaacacctgagtcctccccactcccaggaagtaggccttttctcatctctgagatttgacattccagctccctagagccttcctttcccaagccaccactttagctttgatttatgggggagaaaccagctattccaccctcccatacacacaccagttcttgagtatatttgagcccagtcagtattttaagttcaggaactttgactttattttaggtgggtaatggaataaagagttgggaaaatgtttctggagagaaatgggatagattggaggtcctgttgacctccatgcttattcacttcagttctcttcttggctctagttggaatcgaagcctcttaaaatggcagatgacttggacttcgagacaggagatgcaggggcctcagccaccttcccaatgcagtgctcagcattacgtaagaatggctttgtggtgctcaaaggccggccatgtaagatcgtcgagatgtctacttcgaagactggcaagcacggccacgccaaggttagaatttcacctccgcatcttgccttccccatgcctccagtatctttggcgctcccagcagcaagctgccaacagtgctgactttcctttaactctgcttttactgtctgattgtttttgtttagcgctcagccttcatacccattcagacaactacacctgctccccagtcttcagcctcttctgtggttacccttctgtccccgcatcattctctggcagtccctccgtttctccagctttgtgccaatctcttcaattcataggcctttatgctctagctattcagttgctccttccttattcttggttttcactttttctttcttcccttgagccgttgttaagtggttgcttccatcacgttgcccagggtttctccaattctacgccttcccctggagggactcctgcgtcaattctgagctttcaggtcaccttgctgcttcgttccccagttctagctttccctttggaactctgacgcaggatcaaactgcccctacctgccccatcccactctccttgggttccttgagcctccatgctttcatgggttttaacattcttgctagcacttccctcatcacctcagacttttcctgtctctttagaatttcaacctgattcgttcttgttgaatttcttgtggtgtttttccttaatcagtttttccatcttttgacttgacattgatcttggattattctctagtgtctggatccctctctgtgctcttctggcttccttattttctagctacatagttatttctgatctccctgcaagtccttttcttcagctctttcacatttcttagtttcttatcctttcccttctaccttccttattccccagtttctcagctccttctcctggtgtccggaaaactcttcgaaacttttactcagactcctcccactcccctagactcttagcatcttatcttttatcaaggtaactgtcttctccaagcctgccatgcagttttctattgtgctgtcaaccccaatctcaacggtggttttttagcctctgttttttttctttaagaggctttactgtttcttgagttgactggttcaattccaacactccagtctttgccccaacaatgtaattctgacttccctcatcaggcaaggtcaatttgagcctttatttcctccgttttagagtttggttgggtttctctttgtgatgcatacatacaggtccatctggttgg

SEQ ID NO: 19427 - DNA, 1056 bp, Homo sapiens
tcattaaatagtttctccattcatccatttgctcaggccaaaaatctaaaagccatctttgattctctttctcacaatctccacttagtccatctgccagagtgtcagtcctacctttcaaaatatgcctggaatccagccatttatgaccatctccaccaccatgtcccaccatatcccaccctactgtcatctttcctgtggggtgctatagagccctaattggtcttcctacagtttgtaagaacagctagaacaggctagagagatctcttcatcccttcccttcatagaatcctttccagaggtttcaggactccttactctgacctataaagtgctgttttatctggctcctgcttgcttctccatctcattactagtctcctctttgcttttcttgaaccacgctgactgcttgctcctctaacactgcaagcttattcccacctcaaggactttattattcactattcctcctgcttggaacaacgttgctcagacctctgctctgcatgcctgttcctttatgtctgtatgttctgtgttgaaatggcatatctttttttttttttggacacggggtatccctctgtcccccaggctggagtgcagtggctcgatcccagctcactgcagcctcttgggctcaaaagatgctccctggccaggctcaatcacgtctgtaatcccagcactttgggaggccaaggtgggcagataacgaggtcaggagtttgagaccagcctggccaaaatagtgaaactctgtctttactaaaaatacaaaaattagctaggtgtggtggcacgcctctgtagtcccagctactagggaagctgaggtaggagaatcagtttaacctgggaggtcgaggttgcattgagctgatactgtgccattgcactccagcctgcgtgacggagtgagactgtctcaaaaaaaaaaaaaaaaaggccaggcgcggtggctcacacctgtagtcccagcactttgggaggctgaggcgggcggatcacgaggtcaggagatcgagaccgtcctggctaacacgg

SEQ ID NO: 19428 - DNA, 1092 bp, Homo sapiens
cccatcccgatgatgaagacagtggcccttacaagcacatctctcctggggacaccaaggtagggcttggcttctggatatgtgaggacagaatttggacgtgggagccaggaccagagcaggggccttgagtgggtgctttgtccttaggtggtggtggagaatggggagctgatcatgggcatcctgtgtaagaagtctctgggcacgtcagctggctccctggtccacatctcctacctagagatgggtcatgacatcactcgcctcttctactccaacattcagactgtcattaacaactggctcctcatcgagggtgagcatggaggcgtggtaccaagacgtctctgtgaattctctaacttcttactgtccttccatccctttctttcctccttggatttggtgccccctgcttctactctcttggctataattccattccatgtttcttagaggtccaaaggggtttgctgatgtttttccctgtctctaggtcatactattggcattggggactccattgctgattctaagacttaccaggacattcagaacactattaagaaggccaagcaggacgtaatagaggtaagaggggaggccaccagagacggaataaggggtttccagggacttcgaagttagcatcatcaagagcaaagggagtgtaaggttagagggaaggggcagagagtagggattgatgtctcaccgagaactctgcctccaggtcatcgagaaggcacacaacaatgagctggagcccaccccagggaacactctgcggcagacgtttgagaatcaggtgaaccgcattcttaacgatgcccgagacaagactggctcctctgctcagaaatccctgtctgaatacaataacttcaagtctatggtcgtgtccggagctaaaggttccaagattaacatctcccaggtgagaagccttgtttttccatatacggggccgctgtgaagtttgggaggaggaaggaaggtgtttgtatgtattagggtcaggagaatcacgggagttgggggaaattttgggaactgttattcttaaggcagagggaattcagtatacac

SEQ ID NO: 19429 - DNA, 1110 bp, Homo sapiens
gagcgttgagttccagaacctggctacgcttaagccttccaacaaggcttttgagaagaagtgaggaggcgggcaggcgggtggttctcgcccctggggctcagggcctgagtagtaggattcccatacctattccagagagatagcctggtatgtgtcttgcactagagcttacctttcagcatccttccccacctatctgaaacagctgtgtgacatgggggaggtggtggatggaggtggatttaagattggtccccacatcgtccctgctgatattataaagcagatgcagaggggtgggcctgtactcaggtcccagtggcagtccttgggcctgaatttttctctgtccaggattcttgcctccaaaccactgtacttggtcggctgtgcacctttgggaaccttacagtgcgttttgtggggaccaaggtcccagagcccacctgtccactagctaccccttgcacttccaggttccgctttgattataccaatgagagggccctgcggcgcactctgcaggaggacctggtgaaggacgtgctgagcaacgcacacatccagaacgagttggagcgggaatttgagcggatgcgggaggatcgggaggtgctcagggtcatcttcccaactggagacagcaaggtgcgtgtgggtcgaagtgctgatgctagagatgtgcctccctggatggctgtccccagacacagccctccctccatttccccctctctcaggtcgtcctcccctgtaacctgctgcggatgatctggaatgctcagaaaatcttccacatcaacccacgccttccctccgacctgcaccccatcaaagtggtggagggtaagtacctgcttaggggtctccaagccaggctaggggataggagactgctgggccctggtctaatgatctcctcacctttaattggtccccaggagtcaaggaattgagcaagaagctggtgattgtgaatggggatgacccactaagtcgacaggcccaggaaaatgccacgctgctcttcaacatccacctgcggtccacgttgtgttcccgccgcatggcagaggagtttcggctcagtggggaggccttcgactg

SEQ ID NO: 19430 - DNA, 1081 bp, Homo sapiens
ggagtttgagaccagcctaaccaacatggtgaaaccccgtctctactaaagatacaaaaaaatattagctgggtgtggtggcacgcgtctgtaattccagctacttgggaggctgaggcaggagaatcgcttgaacctgggaggcagaagttgcagtgagccgagatcgtgccattgcactccagcctaggcgacggtgagactccgtctcgaaaaaatttggatctcagatggtatagtagctttctttggatgtgctgcataccaggtgccaaatggcgtcctataaatggaagctcttgtgtgaggaaggggatgatcaaataagagttttgtttttgttaagagtctgtctgccttttccgaactcatctacccatgtcctttaagattacagtcctggccctgtgataagccagatgcagatccacatcgtactcattcactgaaagagaggcgttggctttgtctgatgctagctttttcttaggcgcatcccggggaaatggtgggggctctggctgcgcagtcccttggagaacctgccacccagatgaccttgaataccttccactatgctggtgtgtctgccaagaatgtgacgctgggtgtgccccgacttaaggagctcatcaacatttccaagaagccaaagactccttcgcttactgtcttcctgttgggccagtccgctcgagatgctgagagagccaaggtagggatcaggactgctgggctttttggccggaagaaaagaaggagaactcaactgggtatggtggctcatgtctgtaatcccagcactttgggaggccaaggcaggtggatcacctgaggtcaggagttcaagactaacctggccaaggtggtgaaaccccatctctactaaaaatagaaaaattagccgggcatggtcgtgtgtgcctgtaatcccagctgctagttggggctgagacaggagaatcgcttgaacctggggggcagaggttgcagtgagccgagattgtgccactgcactccagcctgggcaacaagagcgagattccatctgaaagaaaaaaagaaaaaaaaggagaacttt

SEQ ID NO: 19431 - DNA, 1923 bp, Homo sapiens
cctcctactcccctacctctccatcctattctccaaccagtcccaactatagtcccacatcacccagctattcgccaacgtcacccagctactcaccgacctctcccagctactcacccacctctcccagctactcgcccacctctcccagctactcgcccacctctcccagctactcacccacttcccctagctactcgcccacttcccctagctactcgccaacgtctcccagctactcaccgacatctcccagctactcgccaacttcacccagctattctcccacttctcccagctactcacctacctctccaagctattcacccacctcccccagctactcacccacttccccaagttactcacccaccagcccgaactattctccaaccagtcccaattacaccccaacatcacccagctacagcccgacatcacccagctattcacctactagtcccaactacacacctaccagccctaactacagcccaacctctccaagctactctccaacatcacccagctattccccgacctcaccaagttactccccttccagcccacgatacacaccacagtctccaacctataccccaagctcacccagctacagccccagctcgcccagctacagcccagcctcacccaagtacaccccaaccagtccttcttacagtcccagctccccagagtataccccaacctctcccaagtactcacctaccagtcccaaatattcacccacctctcccaagtactcgcctaccagtcccacctattcacccaccaccccaaaatactccccaacatctcctacttattccccaacctctccagtctacaccccaacctctcccaagtactcacctactagccccacttactcgcccacttcccccaagtactcgcccaccagccccacctactcgcccacctcccccaaaggctcaacctactctcccacttcccctggttactcgcccaccagccccacctacagtctcacaagcccggctatcagcccggatgacagtgacgaggagaactgagggcacgtggggtgcggcagcgggctagggcccagggcagcttgcccgtgctgctgtgcagttcttgcctccctcacggggcgtcacccccagcccagctccgttgtacataaatgccttgtggcagagctcccggtgaacttctggatcccgtttctgatgcagactcttgtcttgttctccacttgtgctgttagaactcactggcccagtggtgttctcactcctaccccacccaccccctgcctgtccccaaattgaagatccttccttgcctgtggcttgatgcggggcgggtaaagggtattttaacttaggggtagttcctgctgtgagtggttacagctgatcctcgggaagaacaaagctaaagctgccttttgtctgttattttatttttttgaagtttaaataaagtttactaattttgaccaaaagtatgtacatcgagtgcttcattggggttcaggagacccccaggcccctgcctcctgcctgggctgctgcttgatctgttagggggaggggaccaggaaaatgggagggtaccttacagtcagcccacacacagcccctgctctgtgccaggcactgctctgtactgagtttgttatagtcacaacagatgcagctcttgtcctctattaaggtgatattgaccataacagctttttaacttgttttactgattgtcataaataatttggaaaagtgtagaaaagtataatgcagagggagaaaaatgatcacccataatcccaccactaggaggcatactttctttggtattttttcctatacttttcttgagtcactaacaagtgaacaaaaatgtactttgattttggcctcaaaccaagaatgaaaa

SEQ ID NO: 19432 - DNA, 1028 bp, Homo sapiens
cagccctgccttggcctctcccattcctgggcctcgctcccaccgaaccggggcccagaggcccgcataggggcttcttaaggcccgtgtgcgccgagccatccaagctcgtgggaccggactggtgccgggttgcattctggtccccgaggatgaagtaggagggggctgggccggcctggcttgtgcgctccgttctgtcccagcgtcttgattcggttctctttaagtttccttcaaagttcttccccgtttatcagcctctgccccctgaaccatatccctggcatctgcacttgagatgaccgcagccttcccatgccccccgttcatccagggtgttagagaactgtctcccattccagtccagtttccacgtgcaagttgcattctcctcaagtaccacggttatcatgtccctgaggaaagaaactgcccttgttgggccctcaaaggacagccctggtggtattaaaataaagacgtagaacctggcagtgctattgggtttggcctggtgatcttagaaataagatctctgaggcctgctgcttagccattttcccttgtctctggactggggagagatgatggcacagaccctgaagggccccttgtggaccgcgttaaccgggaagatcttaagttaggagttttgcgttttttcctcttttctttatttgcatctgaatccagaggaggcatggccaggaagagaggcaggatctgcggtggggtgatgcttagattttgataccctgatcttttgtttttcagggtactggaagatgaaagagactatacaagggaccgggtcctgggggcctgagcctcctggacccggcatacccccagcttactcaagtcccaggcgggagcgtcttcgttggcccccacctcccaaaccccgactcaagtcaggtggagggtttgggccagatcctgggtcagggaccacagtgccagccagacgcctccctgtcccccgaccctcttttgatgcctcagcaagtgaagaggaggaagaa

SEQ ID NO: 19433 - DNA, 1006 bp, Homo sapiens
gcttgaacccgtgaggcggaggttgcggtgagtcgagatccacgccattgcactcccgcctgggcaacaagagcggaattctgtctcaaaaaaaaaaaaaaagacaaaaaacaacttcggctgggtgcggtgactcattcctgtaatcccagcactttgggaggccaaggcgggtggatcacccgaggtcaggagttccagaccagcctggccaacatggtgaaaccctggctcaactaaaaatataaaaatacaaaaaagttagctgggcatagtggcgggtacctgtagtcccagctactcgggaggctgaggcgggagaatcgcttgaacccgggaggcggaggttgcagcgagtcgaaatcatgccactgcactccagcgtgggcgacagagcaaggccctgcctcaaataaaaaaaaaaaaaaagcctggtttgttgactcatacctataatctcaatgctctggaaggccgaggcaggcagacagacagattgaggccaggagtttgagaccaacctgggcaacatagtgagaccctgtctctaccaaaaaaaaaagaaaaaacccagaatttgtttttactgtcagtggactgaggaggggagacttagtgggagagtctgaggtcttttaattccattgagcttttttgtgtcattggcacaggtgcatttcttcaatagtttcttctatgataaactccgtaccaaagggttatgatggggtgaaaaggtggaccaaaaacgtgagttttgaattcacatccacttgtgtaatgccttgcctctaaagaatgagagtcttgttttctctgagccctttccctgaccgtgttcattcagtctttcaaagattaaacgtctcttgtgtgtgtaggcactaaggatacagtgttaaataaggaaaacttgcccttaaagttaaattgcagctagtgataagtgctgtgggcagatcaacacagagtaacgtgaggctgggcgcagtggctcacgcctgta

SEQ ID NO: 19434 - DNA, 1489 bp, Homo sapiens
ctccgatctgggaggtgaagggcgggacttccagcgcgctggtgctgcggtgggaggtgcacgcgcttgggctttaagcggctgggtcgggcccacgtggacccggcggcaagcaccacctctgggcaccgtgagcgcggcggcacgcctgccggcctgtcttcagaaagggtcacccccttatgtcgggggtggcctggcctgagccgctgcctgcatggggcaaatgcctcagttttatagaaactcctcctttgggtattttttgggagctggtgggagttggatctgggacagcagattgatggcatcatgcaggccactcctgacagagcccggctgtcaggatttctgagtgcttcggtcgggcaggggacaaaacttatgctttaaaccaacagatccagagacaatggccccgatgggatggagcccgaaggcgtcatcgaggtgagactggagaaatggaattctgtcctcccccattacaactttcagccgtatagagttagagtggcctcttgattgatttcccagatcatctagaagcagctggtttccctaaagggaggagggttgtaagctctgaggcttttgttagtaggcaccagattctgtttgctcggagactacagctcagctccaccttttccatgactcaagctttaatttctttgcatcccctagagtaactggaatgagattgttgacagctttgatgacatgaacctctcggagtcccttctccgtggcatctacgcgtatggttttgagaagccctctgccatccagcagcgagccattctaccttgtatcaagggtgagacctctcagtcccagaagacattgtggactgtccctgacctgggtagagtggcatctggttggtgatgcccatctcatatcagccagggacaaagcaactccttgttcatcccagcttggcttttgatccgtgcccatgcctggttcatgccttggacacataggtttcctttaaagaggtggtattgtagccagcttatatttgcatctacagccatgtttctagtccagcttggtgtgcaatactagatgagttaataactggtccttgtttctgatctggttcccattgtgtaactgtgttgattgggaaggtagtttgtgagccatgaaatgcttggttcattggttgcttattgacctcattaacctaggacttgaatatcccaaagggtatgctctttaccacattcaactcctaatttatttgtttaggttatgatgtgattgctcaagcccaatctgggactgggaaaacggccacatttgccatatcgattctgcagcagattgaattagatctaaaagccacccaggccttggtcctagcacccactcgagaattggctcagcaggtaagagtggcttctattccctccttcagggctgatttagggatgatgagtataatccaaggaccagagaagtcttctctgatcaccac

SEQ ID NO: 19435 - DNA, 1638 bp, Homo sapiens
tcgtagcttgggtcctatggcaggagtgcaataggacatggatatgcatcacctgttctataaaactggttgctggctgggtgtggtggctcaactcgtataatcccaacactttgggaggccaaggcaggcagatctcttgagatcaggagttggagaccagcctggccaacatagtgaaaccccgcttctactaaaaatacaaaaattagccaggcatggtggcgtgtgccttttatcccagctactcgggaagctcaggcaggagaatttaacccaggaggtggaggttgcagtgagctgagattgtgccattgcactccagcctgggcaacgagcaaagctctgtctcaaaaaaagaaaaaaaaaatggttgctgcgtgatgaggcagttggtcaaattagttttcagaaggttaagggttctaaatatctagagtaaagaaactgaattaattatctgagcggcctcattgtgaatcactgtacactcaggaaccagactgagttgaaatcctgtctttgccacctattgacagcacgatcttaagtggattttagcctctgcctgtttctcagctgaatgtgagtttaataatagtgcatgccccaaagttgttggttaggaatcaatacatgaaaaacatttaagaatggtgccgggcacagtggtaactgacatatgagcacctgcctctctctgctcagatacagaaggtggtcatggcactaggagactacatgggcgcctcctgtcacgcctgtatcgggggcaccaacgtgcgtgctgaggtgcagaaactgcagatggaagctccccacatcatcgtgggtacccctggccgtgtgtttgatatgcttaaccggagatacctgtgtgagtaattcggttctccaatcccctgggtcactttgctcttgtgcacgctttccagtctttcagcgtaagccagagtcattcccaaggatgctggtttctctctgggggaagagctgctctgtgatggagcccatgcgtgtcatctgagcctctggcttccctgccagtgcagccctggcagtgtcctacttcccagggctgttgtctgcctggcgggaaggtcctgggcaaaggatcagtctttgtactctgagagcagactacttggctcctctctgttttttatcagcgaagttggatatatctctcccacatttccctaatcatatgctatatattggctttttttttcttctctagcccccaaatacatcaagatgtttgtactggatgaagctgacgaaatgttaagccgtggattcaaggaccagatctatgacatattccaaaagctcaacagcaacacccaggtgagggcagtcttgcttgaatagctaatgattcttgaaaaatagtaagtgccaggggaaccatatactggattcttgagcctttttatgcatctgcttcagttttaggtgtggctagggaagggagcaggcctcaggaaggaaccagcactctaagactggcctttttttccactaggtagttttgctgtcagccacaatgccttctgatgtgcttgaggtgaccaagaagttcatgagggaccccattcggattcttgtcaagaaggaagagttgaccctggaggg

SEQ ID NO: 19436 - DNA, 1073 bp, Homo sapiens
atccgccagttctacatcaacgtggaacgagaggtggggcccagtgcaggaggcgggcctggtagtgagttgttgggtatagcccctgactgatttttgtcccccaacctccaggagtggaagctggacacactatgtgacttgtatgaaaccctgaccatcacccaggcagtcatcttcatcaacacccggaggaaggtggactggctcaccgagaagatgcatgctcgagatttcactgtatccgccatggtgtgtttgcccgctgccagcctgttgtgggtctgcccgtcagaagtgtcctacttgaagccagggttcctggaacccaggtgcctacctggtctgctgcatatttgttttctcttccagcatggagatatggaccaaaaggaacgagacgtgattatgagggagtttcgttctggctctagcagagttttgattaccactgacctgctggtgagtagagggaactgatagcaaaggcagaagggaggatccaaggtgattccctctccaaggggacatcagtgcctctcaggaaagtagcagcttggaatagaatctggcatgcctaaggcctttggggaactgggatgcttatttcctctgccttccttggctgcccacatggatgcctaagtgtcttccctccgggatagagtgtcctccgtgcacatgctgaagagttgtctttcttgacgtaggccagaggcattgatgtgcagcaggtttctttagtcatcaactatgaccttcccaccaacagggaaaactatatccacaggtaagcgtagatctggaacactcccctaccccttcacacctggccctccctgggcttaaagctcctgatattcctcatccccttccttgttttccagaatcggtcgaggtggacggtttggccgtaaaggtgtggctattaacatggtgacagaagaagacaagaggactcttcgagacattgagaccttctacaacacctccattgaggaaatgcccctcaatgttgctgacctcatctgaggggctgtcctgccacccagccccagccagggctcaatctc

SEQ ID NO: 19437 - DNA, 1074 bp, Homo sapiens
ttcctccccttcctttgacagcaccggggtttcagtgtccatgtctctctcagcgtggccagcagcagccgggagaacccgattcatatctgggacgcattcactggagagctccgggcttcctttcgcgcctacaaccacctggtagggaccgccatactcagccccagcactcgtactggcccggctctccttccttgagggcagctgaggctttgcaagacctgttttcagccctttccttcccccaggatgagctgacggcagcccattcgctctgcttctccccggatggctcccagctcttctgtggcttcaaccggactgtgcgtgttttttccacggcccggcctggccgagactgcgaggtccgagccacatttggtaagcatctgtgcctccaagggaggaggagagggaagggcactgccacctgcacaggggccttttgtgagccgggggccacctgtgggggttcacgccgtcctctgtacggccccgggagcaggtgcagcccagtcggcagaggagcaaacaggctcagagcaggtaggaaaccttcccaaggccaaccagctggtcaaaggactgcttccttcctgaactcataccctgtcagctgtggagcttttggtctctgaaatctttctagaaaattgttgataaagctgattccgttttcctgtaggccttcaacttgcatctctccaaggaagaactgggatttgagagggatgaagtggggcttgggcatttaggtcctttgggaggatagatgtggggagcatcagaggtctttgtcctgcttgtgacagacagcatgggggggatgttgagtccaagcatgttggtgctgggacgggagacagacctctgcttagcctggttagtgccaggagccattgccccctcccccactttgttccttccctctctagcaaaaaagcagggccagagcggcatcatctcctgcatagccttcagcccagcccagcccctctatgcctgtggctcctacggccgctccctgggtctgtatgcctgggatgatggctcccctctcgccttgctggg

SEQ ID NO: 19438 - DNA, 1025 bp, Homo sapiens
tctccttaatgaggggggcagggagcccaggaaaattctccatcctggaagacccccacctctaactgacttttttcttttaggttccccccagggcaacatgccagccccgtagcactgcccaccccacccactgtggtctgttgtaccccactgctggggtggtggttccaatgagacagggcacaccaaactccatctggtaagtcctgtctgagtgaccctctctcctcagcagtctaactctgcaccacatggttggagatgctcggtatgatctggatcatgcccactcttcagaatggtccagtccaattctaagcaccccaccatgtggtgcttgagtggttcagccctcctggtttatggacctcccttctatctcctataaatggttcagccctgtacttcaccagcctctccactactaccaaaaaatcttttccccactatctccctagtgctacaactcagttgcttattgaaatgaagagggagtttgcaagctgaaaagtggatatgagctaccctggaggaattttttcttggtagggaaacagctttgtccctataggagttgttgaacaccctggcttttggagggtgttcagaatttatttggggagatagtggagatcactgccagccacagcagtcttggcatttcacctttccttccagatctctttcagtcccattctctccccactgcactatagcatttgcccccatacctaagtcttactcttctgcttccctctctccttctgtcagttctctgcctgaggccctgctttatttcccattcctttgtaggagaaaagggaagataatccctaagccaggggcttaagttctctctgtgttgttcttcctcattacatatggggtttctcgagtgggactgttttcttctatgtgtctctcactattttgcttgatgttttgcacattggggtgcatggtggatttgtgttgaataatgttaactgaatgagcttcattatgaagaacctatgacttct

SEQ ID NO: 19439 - DNA, 1027 bp, Homo sapiens
cctctgtctaggataccaggccgtttatttggctctctgtgccttagtttcctcatctgtaaaaagtagataaaggccggttgcagtggctcacgcctgtaatcccagcactttgggaggctgagccgggtagatcatttgaggtcaggagttcgcgacaagcctggccaatgtggtgaaactccgtctctactaaaaatacaaaaatcagccgggcgcggtggtacgtctgtaatcccagctacacaggaggctgaggcaggagaatcgcttgaacccgggaggtggaggttgcagtgagccgagatcacgtcagtgcactccagcatgggtgacagagcaagactccatctccaaaaaaaaaaaggagataaaaaattagttactatcacaggattgttgtgaagattaaaagaggtaagatatggtatgtgctgagaacagtttctggcaatggtagggatgaataaatgttatttttatttctttctcttaggacagtgaggaggaatttggttctgagcgagatgagtaccgggagaagtcagagagtgggggcagtgaatatggaaccggaccgggtcggaaacgaagaaggaagcaccgagaaaaaaaggagaagaagacaaagcggcggaaaaagggggagggagatggggggcaaaaggtgagtagaattagggaatgagagtgagaaatctgcattaaagacgggcatgaggaggggaggaatggagactggactggagaatggggcaagaagcaagaaagcccagggaagctagtgggtaggtagacaggcctgtgtgcggcctggaataggggctggaggagcacctacttcaccaaagcccctctcccgcagcaagtggaacagaagtcatcagcaactctgcttctgacctggggcctggaggatgtggagcatgtgttctctgaggaggattaccacacgctcaccaactacaaagccttcagccagttcatgaggtgcggtaagactggggaatcctcgctaattgacact

SEQ ID NO: 19440 - DNA, 1216 bp, Homo sapiens
tcttcaacccttctccctctctctctccatctccccctgccctgcttccttatccctccaccggggtatatgacagtcctgggctgtcctgcagtggccggggaggaggaggttgatggctacgagacggatcaccaggattactgtgaggtgtgccagcagggtggggaaattattctgtgtgacacctgccctcgtgcctaccacctcgtctgccttgatcctgagcttgaccgggctccagagggcaaatggagctgccctcactgtgtgagtacctaatgccagcatctgatggccctgaggaacccacccatctctttcccccttggtttcacttaccctcttcctgcccccagatggctggacttcttagtaacagatgtccgagtgtctaggatcctaatgtattcctttctcccacaatcaacatttctgaaactggagtgtccttttccttagttcccaccagtcttctctgcacttctaggattcaggtgtcctgtctttgcctgtatcttccagtttcattccttaatttcttccatctgtctgtgtgtctatccttggccccctaggagaaggagggggtccagtgggaggccaaggaggaagaagaagaatacgaagaggagggagaggaagaaggggagaaggaggaggaggatgatcacatggagtactgccgcgtatgcaaggacggcggggagctcctgtgctgtgacgcgtgcatctcctcctaccacattcattgtctaaaccctcccctgcctgacattcccaatggtgaatggctgtgtccccgatgcacagtgagtggaaacatctcccctctgtatttactgtcaggcctgatcccttcccccatccctggggcccacatgtccagcttttcatttctctgcactcccccacccttgtgggacccctatcttctcatctaacaatgggttctttctgcctctttctttcctcctccttgtacgtgtccatcccaaagtgccccgtgctgaagggtcgagtgcagaagatcctacattggcggtggggggagccacctgtagcagtgccagcccctcaacaggcagatggaaatccagatgtcccacccccccgtcctcttcaaggcagatcagagcgagagttctttgtcaagtgggtaggactatcctactggcactgctcctgggccaaggagcttcaggtactaggacct

SEQ ID NO: 19441 - DNA, 1027 bp, Homo sapiens
gaactcccaacctcaggtgatccacctgcctctgcctcccaaagtgctgggacgcgcctgttattctcttattgccccggctggagtgcagtggtgtgatcttggctcgctgcaacctccgcctcatgcattcaagcgattctcctgcctcagcctcctgagtatctgggattacaggcgtgcgccaccacacctggctaatttctgtatttttagtagagacggggtttcgccatgttggccaggctggtcttgaactcctgacctcaggtgatccacccgcctgagcctcctaaagcactgggattacaggcatgagccaccgtgcctgggccaatccatcctttttcatagctccctttccctgtcccattcctcctgccggcctcttcccggttccttgttgtcctctgtgagtgtcaggactatctctttcccttttttctgtgccctgctagctggaaatcttccatttggttatgtatcgaaactaccagcggaagaatgacatggatgagcccccacccctggactatggctccggcgaggatgatgggaagagcgacaagcgtaaagtgaaagacccgcactatgctgagatggaggagaagtactatcgttttggcatcaagccagagtggatgaccgtccaccgcatcatcaaccacaggtgaatcctcggtccctgggaagtcagacctggtatatgacattattcttaccatggtgatggccccatgttagtatttgctgattaaccaggtaattgatctaaccttgataacctctgctgtagctccagcctttctggccttgtttcctccaggggaacgggagaaaacaggaggaaaatccggccaggcagtgcctcttttgtcctttgcctcctgtcatctccagtggcataagacatagcacatgagtctggggatgagggcatgaaagcaaaacatgagagacataattcatccagaccagtgttttgaatgtttcttcttcatagtacttattactgcctaaacttaat

SEQ ID NO: 19442 - DNA, 1082 bp, Homo sapiens
ggctgggctccaaggcaggctccatgtccaagcaggagcttgacgacattctcaaatttggcactgaagagctattcaaggatgaaaacgagggtgagaaccttttctgcagctctgtgaaagcaggcccctgctctctcaggagtacttatcagccccctggggagagaaaaacaactcttctctgcagcctttgaaggaaggagagccttcttttagtagcccttggaggaaggttggcctctttctttgcctgtagggttaaaacaaacaaaacaaaaacctttcaacattggctcccggggaaaaagccttctctagggctcctgtgaaaaggacgcagagtagaagctttcccatcagcctttctaaactttggaacccaaagttcccgtttgttttccctctcaccaggggagaacaaggaggaggacagcagtgtgattcattatgacaatgaggccatcgctcggctgttggaccggaaccaggatgcaactgaggacactgacgtgcagaacatgaatgagtatctcagctccttcaaggtggcacagtacgtcgtgcgggaagaagacaaggtgagaggctttgggggccagacattatctatcccaggccatctccaaaaggcagtatcctttactcagccttgaagtaggagggtctgtcccccttaaaacagtagtggacctcaaacaacttcttcgtctaataggtgagactggacttcagagagaaacgtaggcacagacagtactggtaaacacagaagggtaccttctgagacagtgcaggagaaacactgtcagagggattagaggagagatttagaaaacatgaggagagcacattgcaggtaagagatggcatggaacatgcgcaatgtccagaaaatgtatgcagagccacgaagctgcaggagtggggagaccggattgggctgacgcagcagagtagggatttccttgcagtggaaggattagcaaagaaggagacccccagtgttcattcattctgttgcccttcagattgaggaaattgagcgagagatcatcaagcaggaggagaatgtggaccct

SEQ ID NO: 19443 - DNA, 1051 bp, Homo sapiens
ccctctggccttaccccatgaaacttccctttgaccttcgacctttcctcctaccccctctcaccttgccattgatagagattatatcccaaagccctctaaccatctaatcctgcctggtgtagtcactgactcctggcccctttgatccctgttctaattccttgaatctgtaatactgaccttctaacctccctctccccttacatattaaaaccgtgattccttaaagctttgacacttaccacctcccatgcctcctgactatttcctccccatcatccccaaccccaaaccttgctcttccagtatgagatgttctgacaactccccgcccccatgtcttccaatgtccccccatcttcctttcctccatgctccctttttctttcttctttctctccatctgtcttctgtggtaatctggtctctctgtctcttttcctgacactttttcttttcccctgagttgcttctgttttccatctacttcttttactttcttgatctctggttctttgacatctgtgttctcctctctcgctctttttctgcctgtatctgtccatctgatgcctctcttttcctggctccatctctgtatttccctgtctttctcttgcccttctttctctgtggcccgggccccagttctgaaccagctggaggagttgctgagcgacatgaaggcggacgtgacccgcctgccagccacgctgtcccgaataccccccatcgcagcccgccttcagatgtccgagcgcagcatcctcagccggctggccagcaagggcacggagcctcaccccacaccggtaaccctctttccccctagctccagttttccctgtttgtgttcctcctgcacacatacaaacacttccatcagaatcctatacaatatggaaaaacaacttgctagaacacagtcatcacccttgagtgagtctccctgcctgtgtatcctacccttagcagttgtggagtgtggctcataatgtctctcctacagcttctttcctctcacagactatgaactaactccaacttc

SEQ ID NO: 19444 - DNA, 1060 bp, Homo sapiens
gaggccagcatttgagaaccacaatcctttggcccggtatggtggctcatgcctgtaatcccagcactgtgggaggccaaggcgggtggatcacttgagcccaggagtttgagaccagcccggccaacatggtgaaaccctgtctctactaaaaatacaaaaattatccaggtgtatggtgcacacctgtagtcccggctactaagaaggccgaggcaggagaatcgcttgaacccgggaggtggaggttgcagtgagcccagattgaaccagtgtactccagcctgggcaacagagtgagactccatctcaaaaaaaaaaaaaaaaaaagaattgacctagggcttcaggtgttacaatgagatcacatgcgataaagactaagaaagcatccgggtgtggtggctcgcacctggaatcccagcactttgggaggccgaaacgggcagattgcttgagcccaggagttcaagaccaacctgggcgcaatatggcagtacctaaactctgctaaaaatacaaaaacttagccgggtatagtggcatgcacctgtagtcccagctactcgggaggctgaggtgggaggatcaactgaaccctggaagtagaggctgcagtgacccgtgatcacaccactgcactccagcctgggtgacaggagcgagaccgagtctcaaaaaaaaaaaagacagaaagggccaggtgtggtggctcacgcctgtaatcccagcactttgggaggctgaagtgggaggattgcttgagtccaagagtttgagaccagtctgggcaacataatgagaccccatctctacaaaaaataaaaatattagctgggtgttgtggcaccagcttgtagtcccagctactctggaggctgaggtgggaggatctcttgagtctgggaggtcaagactgcagtgagccatgatcacaccactgcactttaggctaagcaacagaacaagactctgtctcagaagtaggggctgagaaataaccactatttggatttagaaattgagttcttggggccatgcgcggtggctcacacctgta

SEQ ID NO: 19445 - DNA, 1033 bp, Homo sapiens
ggagaggagggtctggactatgcctcccatggccgtggccctgaagcctgtattgcagcagagccgggaagcaagggacgagctacctggagcgcctcctgttctttgcagttcctcctcagatcttagcctcctgttgggcccctcttttcagagccagcattctttccagcccctggagcccaaaccagacctcacttcatccacaggtaactgggggcagaagtcactggggttccccttctgtgcatgaattggctccctctttcgtaccctgctttctgtctgatacttgagcatttagtttcccagatgcctttagtgatcgcaagttgcaaggagcagaaatctgctcacattggtccaaataaagggattgagatctcatggaaatatgacatcgctggacttaatgagaactggagttgggaacggggtactatcaggaactgaggcagctagctggcccttttctgtgggcctgcatagcctcctgggtccacctctcctgcacatctgctcttttttcttgctagaccagcattcaaggttctcacccttcataacttcagtttacacatgggtttgaccagctgtgatactgactctagctgagcctctagacatttatagagacatcggtgtctcagtttttttaggtccagtttaaagaggccatctgattggattggctgaccttgggtgtggtgtccacccctagtttaatgtcacctgtgatttgagtggatgggggcattctgtgtggtacaaacatgacaacctaggtcgaattaaaaatgagggatggggccgggtgcagtggctcacgcctgtaatgctagcgcgttgggaggctgaggtgggaggatggcttggtgccaggagttccagaccagtctgacccatatagtgagacctcatctctacacaaaataaaaagttagcaggatgtggtggcacacacccaaatttccagctacccagggaggctgagacagaaggattgcttgagccaaggagtttggggctacag

SEQ ID NO: 19446 - DNA, 1034 bp, Homo sapiens
gtttttaaagctaggtgatacagaaacttgatttccacaaaatacagcaaacgacggtggagggtaataaacatactttaaaacagtacaaacgcgagccgtattatcgaatttacattttctggtagccacattacaaagaataaaaagcaagcgaaattaatttcacggatctattttacttaccctaatataccaaaatcttattttaacatataatcaacattctaaaaatattaatgaaattttaagtctttttgtttgtacaaagccttccttcaaaagaagatgtgtatttagaagctggcaatacatctgaattcatatatttcaagtgctcgataacggtgtctaccatatccaacagcagactttgttttgttttcgttttaagtgacgggtgtggaagacacgcaaaatagaatgtccagtaatgtacacaatcttgaaagacaccacgagggaggttccatggtgtaatggttagcactctggactctgaatccagcgatccgagttcaaatctcggtggaaccttgaagcttttcttttaatatcagcatgttgaatattgttaattgattttcacagaggggatactcctatgacccaagataatacgacaaaaaaaaaaagtaaactaggacactaccaattatttgtgcttttcctaccggataattgagtcctataacacagtgttaagagaacgtacaataaattatttaaatatgttggaagttgagctaacatttgaaaacatgttaaaatagagatgttatgaagaaacgaaataatagagatgttatgaagaaacgaaatattgcttcagcagttaccatcaggtcttagcttctgggatggatgcaggcctatgatctctctggaagaccaaacacggaagatgatggtgaaaccattaccaggggaattcgtaaaattactttctgcatgtaaataggtgtaacctcacagaactgttaacagaactgtagcaggtgcgtaatccaccagaaaaactccagcctggcagc

SEQ ID NO: 19447 - DNA, 1055 bp, Homo sapiens
caggcacctgccaccaccacgcccggctaatttttttttttttttttttttttgtatttttagtagagacggggtttcaccatgtggccaggctggtctcaaactcctgacctcaggtgatccacccgcctcagcctcccaaagtgctgggattacaggcgtgaaacacagcccctggccctctctgatttttttgagacgaggtctcgctctatcgcccaggctggagtgcagcggcgccatctcggttcactgcagcctcgacctcccgggctcaagcgatcctcccacctcagcccaccaagtagctgggatcgcaggcttgcaccgccacacccggctaatttttgtatttttctgtagcgacatggtttcgccatgttgcccagactggtctcgaactcctgggctcaagcgatctgcccgcctcgggctcccaaagtgctcggattacaggcgggagccaccgcgcccagcctccgtctccctcctaagtgacatcctgtccggcatcccgcaggccttcagatggatggggtagcagagctcaggaactcaaacacagcccgcctggtggatgacttctaagcatctttcagtctccctgatcttgccaagcagagaagggcttcctcgtaatgccaccaaagcacaactttcacatgcttgctttatggccttaactaactgatgtcattacttaactgtccccgcggggacggggaactgaatgtattttcacaaacgtcagttcaagacagatttgtgggagaaaccacctggggataaacctctccccaccaagaacctagaattcggccgggtggctggggaaaagtgggcggggcgtagtcgccccggcgctggcaggtccagtctctgcccgcggcgcacgcggatgacgtaacaaacgcgcgcgacgattcgaggtgctctgtggccgcgagtgcatcttccacgtgagtatagttaccgcgtgcggacctggatcctcctccaggtgcagcgtttcgtcatctagcccaagcttggtctggcggcttcagtatccccac

SEQ ID NO: 19448 - DNA, 1030 bp, Homo sapiens
agcggaacccgagcactgtggaggcctttgacttggcgcagtccaataggtgaggagaaatggggttgttcccatacctgagcccatgggtgttgggagagaccacaggggctcaccttcatgttcctcccttggcttaggggcctccctgagtctctgagggcctgggctcccgtcatccatcaaggagtctacattcaaatcttggttttatcttcactttggctctggatagtccaaaatgacagaatacttgaagattatgactttttggaatatattttgatctgtcatctaagtatgaatttggctgtaactctgctgttaaatgctggtgagaagacatggcattaagaaatgaccccgtttccacctgccttcccctccctgcatcgccccctgcagcgagcacagccgacactggttcttcaagggccagctccacgtggatgggcagaagctggtgcactcactgtttgagtccatcatgagcacccaggaatcctcgaaccccaacaacgtcctcaaattctgtgataacagcaggtgctgtgccctagactgggttggcgtcaggacccggggaggggaggccccaggccctggttgggttagtgtaggtcccagaaaggaagcaaggtccatgacgggtatgtccacagtgcaatccagggaaaggaagtccgattcctacggcctgaggaccccacacggccaagccgcttccagcaacagcaagggctgagacatgttgtcttcacagcagagactcacaactttcccacaggtgagctgggttccctggagaaataggtgagatcacagaatagggtagggcaaaggtcccaggcccctggagtgggcctggggaaaataatcagggaaattggttgtccttattttcagtgggggtggtcagagatgggggtttgtctctgaggcacccagacctctccccactctctctttgcaggagtatgcccctttagtggtgcaaccactggcacagggggccggattcgagatgtcc

SEQ ID NO: 19449 - DNA, 1043 bp, Homo sapiens
ctgcctgctgatgttccttctgtggctgtgtctattttcagttctgctctaacatggcatgccctttctcagcccaggaaacagcatgtggttcagagaaaagagcgacaaggaaaagttaggactcctgaggtccgaacaggggcttctgttgcccacttcacaacacccagtgatcaccggtgtgcaattgcctccttggctctgagggatgttttgcgctcccttttctcatcattggggttagcgggtgcagacaaattcagcaatagtatgcagatcagcccctcaccacctcattgttctcatctggaactgaaactttctggatttctcttgaagtgctacactgcactgaatgtaaggaattgttgcttgtggaagtttctcagcgtttctggctgtcttagggctggcctcagaacccagcattcctgttatttgcttctaaattagcagctctctttttttttttttttttgaggcagtctcactctgtcacccaggctggagtacaatggcgtgatctcggcccactgcaacctctgcctcctgggttcaagcaattttcctgcctcagcctcccgagtagctgggagtacaggcacacaccaccacacccagctaatttttgtatttttagtagagatagggtttcaccatgtctcccaggctggtctcaaactcctaacctcaagtgattcgcctgcctcggcctcccaaagtgctgggattacaggtgggagccactacagctggcccagcagctctgtttctgatagaggtggttggggctctcatccctagatcctaaccctttagtatgctggaattctactcttcacttactgcattgactgttgttgattagttattattgcaaagcactgtcaccggcctcagggagtttatgtgtaatagaattaaaaataatagctgtgtataacacttagctcaagccacgcatgtgtgaggcatttggtatgtatctgaattaattctcactaaaattcagcaaaggacttgatagcccctccccgcct

SEQ ID NO: 19450 - DNA, 1037 bp, Homo sapiens
agacgaagtctcgtactttcacccaggctggagtgcaatggcacaatctcagctcactgcaaattccgcctcctgggttcaaacaattctcctgcctcagcctctcgagtagctgggattacaggcgcccgccaccacacccagctgatttttgtatttttagtagagacgggatttcaccatattggccaggctgatctcgaactcctgacctcgtgatccggccgccttggcctcccaaaatgctgggattacagacgtgagccaccgcgcctggccccatccagctaattaagaaaacattttttttgtggagacagtctcagtatgttggccaggctggttttgaacccttggccttaaatggtccttctggttctgtctcccaaaatgttgggattatgggtgtgagccactgtgcctggcttcttaatcattttaaagtgtacagtccagtagtgttaagtatagtcaaattgttgtgtaaacaaatttttagaactttttcatcttgcaaaactgaaactatacctattgaatagtgactacccattttcccttcccttcagcccctggcaaccacagttctattttctatgagttcagctactttagatacctcatataagggagattatacagtatttgtgactggtttattgcatttagcataatgtcctcaaggtttatccatgtgtagtatgtgacaaaatttccttcttttttaaggctgaatgatactccattgtatgtattcattttctttatctgttcatctgtggatggacatcgagttgctcccatctcttgctattgcgaatgataccgctgtgaacatgggtgtccaaatatctctttgagatcctgttttgaattcttttggatacatacccaaaagggggatgactttgttccttttttaacacaagcaaatattctgtaagttaaattgcataattggaaaagataacattaattttgggttaaaaactcgacattggctgggtgtggcggctcacgcctgtaattctagcact

SEQ ID NO: 19451 - DNA, 1031 bp, Homo sapiens
tggagaagtatggcttgtagtttcagcatgagaaaagtgccccatttgaaaaagccctccactgcagaacctgcctgccctccctctcactcctgaggagtctgtagcaccgtggtgatggctcactagtgctgccagaaacctgcggcaggattgtttgggggagagacatcatcaaagtaggtttgtgtgtgtgtgcatgtgtgcgggtgtacatgtgttcaccttcccacccgctgaaacttcagatgcagtgaagccttctcacataaaacaatataccttaactgggcgtattgctctgtgggattcaaaagtattttgtaaattctggtcacttgagggcttcttggaatcaggtttttgtctagtctgtgagcacttctgccagttcctgaaacatgggctgccgtgcctgcttcccaggtgccgagctgtttccttcaaccatggtcaccctttgtctcaccatctgaaaggacacacatttcatgtggagtgtggtcgcttggagtctctcaaaaacactcttttttttcccataactttatgtagtttcttaggtaacatgtgctctatttttgtaagccactctgagttcttttgggctgtgtgtaggtgggcatggactaattttagggcgtgatgtggaaatagtattcgtattactgtttaatatgttctcctttcttttattaggcaagaaaaagtcatatttcccacgttgttcatgggtaactgaatttgtttgctgtgctctttttcattctttcttaatcctggtgtgtggtggaagacacattaacaatctggttttactaactgcatggggctgactcagctttaaccaacttacagcccatcagtgaactttcacggtcctgttcgacttgactgtatgccgttattagttcagctgtgagaaacaagaacaaattagttgcagtggtcctggggtggctgggagtagcatgccaggtggcacgcctgagatgggctagggcgctgtagtgttgatttcagagtctggc

SEQ ID NO: 19452 - DNA, 1167 bp, Homo sapiens
cctcccaaagttctgggattacaggtgtgggccaccgtggctggccttagtgacgttttttttgtggctctagcagctcttggcaaatgatcccccgtgaagaaagcagccaactccctggctcatctcccgctttctgtttggactgtggggtgtaagatgctactttggacatggtcagagagagcatctgccacctggcatgaatgccgctacgtaccgtttgcctgtctagctgaagagtgcctctgggtagagtgcctctgtgtgggttttcttcctggagctgccgggtacctggttttgcatggctctccatgaaacctcgggaatgagccttccttgagccgcatctgtgtgccgttcctccctgctggtggggctgatctcccgggtggtggacagcttcttgcctccaggtgttttcatttcagccgctcagtcctatcccttgctcccaaatattgtcttacaagagagtagtagccagcgctccacttccttcagcccagagtggccagaaatgatccctgaccaacgcagctgagacccaggagccaaagctgggaccttgagtcacagtgaggcctgcaagaactatacagaggtgacctgaggacaggacacagtgctctgacctcaggtggcagaaaggacaatgggcccgggtttgagttgactgagcttgcacggctaattcatggtgaagccaggcttgggcacgagcccagtctttttctgctgtgcctttccagacttgaggcctcactggccttgactcccacgctctgtcctgtgccttgggagaggagcaggttttgaaggcttggaaatgacgagcggcggggccggcacagcctttgtagcaggaggaatcggttcacgtagccttcctcctgtgcccgctgcgcatgctgactccgcctttcttggcagctgccccggagatgccactagtgcgcatctcctgagagccaaggtggaagctggcacttctgggagaggggaggcatcctgggtggagccacggctttagggagcacccggtagccagctctgccccctccccgactgtaacagtgttgtgccttgtctcgtgtgttggtgatacagcattcctgaaaagcagattccagtgaggctccacaatttccttctaagctgctg

SEQ ID NO: 19453 - DNA, 1660 bp, Homo sapiens
aacttctttggaaggatgatttgccatggaaaggagtcaagggtgcatttatcttataaatgaggaaactgaggcccacctggatgaagatactggcccaaagtcccaaggttagtcagcagcaaaaagtcagggttcctactccctgtccagggctcttcccaccagctgccccttccaaaagatgccacatttggcaagagcacaccttgaaggtgtcttaggagcagggctgcacgggagctcctctgtctgctccagcacgtgcacctgccttacatgagtgtaggctgaaggtcctctgacaggcctgggttctagcacatcctggcacacagggcagggtgggagtcaggaaggaaagagaggcagctgacggaatgttccaggcctgatcccagggccactgactccagacagctctaccatctggcctctggtgttttgtcttcttgggcctatgaaacactcactgtccactggcttgggggtggggctctaggcagactgagggacccacgggagaaaggaagggaccccggggcctctaagccagatgaacggaggtgtttgagggaaggaaaagtgtcagaaatagggggaagggcagggccagctttccagctcagtctcttctccctaatgcagtgtgagtcaggccttgcctgagagtctgaaagaaacactttcagaaaaaacagtgtggtacagagaatgcctcttggacacttgggtaatggcccaggagcgctctctaggaggcaggctccaacagccacatcgcctttggggaaatgagcatttggggatctcaccaatcaactccatgatggatacatagagcttacacatctacttcattgatgaacatgcatcatttttaagtacccacggaacacttataaaaactaacgtgttctaggtcccagagctctttctcagcattctctgaccacaatgtgataaaactagaaatcaacttaaaaaacaagcaaatgccatacatttggaaatttaaaccgcaagcttaaattattcacaggatgaagaagaaaccataatagaaattagaaaaatttagaattacatgacaatgaaattactccacatcaaaatttgtggaacatgatgaaaaccgatcttagaggggaatttacagtcttttataaacatatcagacaagaagcttgagagctgatgagctaagtgtccaactcaagaagtcagaaaaaaaaggagcaaaaaatggtgagatagaggacagcaggacgaaaacctcttgaagctggctctcaggttctctctcagggtcggctccgtgtttactgatctggttttgagttccttgttcattcctgacacctagagagccgtcctcctttcttgcaagctcaactctgcctttgctaatattttatccaatatttataggtgtttgtattgggagttttttcatattaactgataataacatttaacttaccttttcaggtttgaagaaatgttgattatccatcatttatacggtaatgtgtatatttaagtgtgccttgcactgttacagttcctatatgcaacactttatcagtctctgcttcatgagaacttacaagaaagataaatgaaggaataacaggaattcaatgaaacaaacttctct

SEQ ID NO: 19454 - DNA, 1029 bp, Homo sapiens
atttttcttgtcttactgcattggatagaatgtcaaagtaatggtatatataataatggtaatgtactcttgtattactactgatttaagtgagcacatttctagagtttcattgttaaatatgttgtttgttgctagtttcatatggatgttctttattgtactcaatggagagacctctattcctgacttactgggagggttgctctttcttacttttttttttgtttgtttttttgttggagagataaggtcttgattggttgcccaggctggagtgcagtagcatgatcaatcatagctcattgcagcctcaacctcctgggctaaagcaatcctcctacctcacactcttgagtagctgagactatgggtgtgcaccatgcccagctaattttttaaagaaatttttgtagagatgaggtcttgctgtgttgcccaagctgatcttaaactcctgggttcaagtgatcctcctgcctgagactcccaaactgtgctctttttttaaaaaatattcaagaatatgtagaatgttaatcctttagatattaatcaaaatgatcatatcatttttctgctttgactattaatgtaatgcatttctttaattgatttctgaggtataattcacatgtcatacaattcacccatggaaagtggtttttagtatgttcgtcgattggtacaaccataactgaaactaatcctataacatttttgtcatccccaaaaggagctttctacgaattagcagtcactttccatccttcaccctgatctgcacccacaccctaagtaggcttttgatctttacagatttgcctattctggacatttcatataaatagaatcacgtaacatatggccttttgtgactgacgtctttcaattagcataatgttttcatggttcatccatgttatagcagtacttcatttccttttaatggctgaattccattatgtaaacatatcaaattttgattcattcatcagttgatggacatttgagttgtgtccatttttt

SEQ ID NO: 19455 - DNA, 1035 bp, Homo sapiens
tagaaaaaaattaatagaataagccagaaaaggagatgggggcagggaaggagagataaaaataagagcagaagtcaatgagccagaaaacaaatattcagcagagaagatcaacccaagccaaaagttgattgtttggaaggactaataaaataaacaaatatctggaaagattggtcaagaaaaagaggaggcacaaatgaataacattaggaatgaaaaagagacataactagagatccatcagagacttaaaaaaagtaaggtaatgtgataaacaactgtatgctactaaattttctaagtgtcatttccgtatcatcattagcaaacccctggagaatttcaacagagtggtccatagaccacttgaatcaaattcttaggtggaatcaaagaaaaaacataaattggactttatcaaaatttaaaacttgtgcttcaaagatacaatcaagaaaatgaaaagacaacccatgggatgggggaaaatatttgtaaatcacgtgtgatgaaggtgtagaatgtgtaaggaatatgtaataaatcttagaactcaacaacaaaagacaacccagtttagaaacgggcaaagaacttcagtggatgtttttccacagaagatacacaaatggccagtaagcacattaaaagatgcactaaatcattagccatcagggaactataaatcaaaaccacaatgagataccactttacattcactaggatggctatacttgaaaagaaaggtaataacaagtgttggtaaggccatggagaaattgaaaccctcatgtactgctggtgggaatgtaaaatgatatggctacttttgaaaataatcccttccgaaaccccccaaataagagtccaggcatggtggctcatgcctacgatcccggtacttcgggaggccaaggtggaaggattgcttgagcccaggagttcaagaccagcctgggcaacatggcgaaaccctgtctctaccaaaaagatgaaaattagctgggcacggtggtatgtgcttgtagtttc

SEQ ID NO: 19456 - DNA, 1026 bp, Homo sapiens
tgatggttttgatggggagccgccatcttgtgggcacggtgaggagttagatttaattttgaggtctatgggaagccatgagagaattttagataggatggtggtctgtctttctgttagttggtggctaatgggtacaaagcagaagcagggaaggaccctgggctggagagtcctgagttagagaccaccaagtaggtctggctcaacagctctggtcagaccaacagtagctggtcagcctcaggtagagtgtgtggggtgctgagtgatggcctggggtagtttggggccgaggaagggcactcgtgttctatgagcaccgtccagaatgaggccacagcccagctcactggaaacgtgccctggagtgtgatggcctgggtagtgatgtgagcacttaacccaggctctgctcagagtccagaagcaggggctccaccccgtgagatgtggcaatggctttttgaaggaagaactgatggggcgtgggactggtccagcatgaaggatgaaaagacgctggagagatgagatagtaaagacaacgcctttcgtgcctgcgtgcttgctgtgtgccccccgtctcgtcccttcaacagaggcccccctgtgatgttatcagggcaagcgcttttcatccttaggattctttctccatgcaaaatcttatttggaaactcagtgtggaaaacaggcaaaactcgggctgctttggctgaagaaggtgttgttgaggtgggggctggagtgtacccccttctccccctcaccccgcagagccctgtcctcttctttttgccccccacccccacttcaccctcagcatgaccaaaggacccctgtggtccccagggacacagtttctcaagagaggcctgggaccaacatgtacagcattatttttgctcccactgaatttgctgtacaaacaactggcaattggggtatgttggctgaaataatttcatcacttaatcctcaattttacgtgtgactggttgattgcacacagatcctgtgacc

SEQ ID NO: 19457 - DNA, 1041 bp, Homo sapiens
ccaggaggtggaggttgcagtgagccgagactgcaccattgcactccagcctgggcgacagagtgactccatctcaaaaaaaaaaaaaaaaaggcacattgagccggagtcggcactttgggaggccgaggtgggcggatcacatgaggctgggccaacatggcaagaccccgtctctgtaaaaaatacaaaaattagccaggcatggtggtgcacacctgtagtctcagctacctgggaggctgaggcatgagaattgcttgaacccaggaggcggaggttgcagtgagccaagattgtgccactgtactccagcctgggcgacagagcaagaccctgtctcaaaaaaaaaaaaaaatggcatgttgttagggatgtggacatgataatgtctcctaaggctattaaatacagcttcaagtgtggaagttgagtatgaagcaggggtatgtgttctgggtgagccatagaagataataaatgttttggatctctgtttctttgagcctcctgttacaataagataacagttttcactgtattaaatacatttgtcagtggaataaggtccatttgacttaaatgcacccgggatacattaatttacacagccattcacacagccaccagagctgccttcctttatgactccattctccactcctgtctcttacagaattaagtccaaactcctttacgtggaatttgaggcccttcttggtctgtcccaacccactcatcttcctcacttcttcagtcgcctcccatgccccatcgtgtttatgctgtgcaagcatcttcaggcctggatcgggagttagttcttccaggcatctctgcccatctagcccctcaacaggtgactcagggtgagggctctgggcttgggggatgggagctaggtccatccctcggcagccaggaggccctgggctcaggtgctagaagcctctggtgcaaactcacacattagcctctgcctccatagagttcagattgtattgaagatatcataaaccgggcatgctggtgtgcgcctgt

SEQ ID NO: 19458 - DNA, 2046 bp, Homo sapiens
gttcatgcagaaaaatgctttttacttttatataagtattttatgtttaacttctgcctttggtgtcatttcaataagaggttataagatattcatctactttttagtgtattctagcactttcatagcttaattttttatacttaaatcttgaatccattcctaaaatgatctgatgtaaggtaaagaatccagcctttcactttgtccatgtggacctttccctaacgcattcgaaatgctcctttgccatgtgttaattctctttggtctgtttctggagttctttctgtccaatgatacacatctgtgttcttttgccagtgccacactgttttaatattttaatcattttagggcatgaatcccatgattacaaaatcccttggctggtcttttgcattttgtttccagatgaactttagactgatttgatcaacttaaaaaataattcctctgtgcttctgattgaaatggctttaactttatagataaatgtggagggaatgagaatctttataatttttttctttttctttttctttttttttgagatggagtctcactctgtcacccaggctggagtgcaatggcgtgatctcagtgcactgcaacctctgcctcccgggttcaagcgattctcctgcctcagcctcccgagtagctgggattacaggtgtgtgtcaccacacctgatttttgtattttttagtagagatggggttttaccatgttggccacgctggtcttgaacgcctgacctcaggtgatctgcccacctcggcctcccaaaatgctgggattacaggcgtgagcaactgcttccagccaaatctttataatattgaatcttctcgtatgaaactttgatatgtccatcaggtatccacatggtttcctcatctatgtccctgaatgtttcttaagtttatatgtgggcattttgaattgtttgtagcatggtgaatggtgtcattttccagtatattttccaattgtttgctattggtatatatgaaagaaactggcttttatgtatttattcagtgactggcctggtcactgaataggggctgtcttcctgggttttatgggtagacttttttttttttttttttttttgagatggagtcttgctctgtcgcccaggctggagtgcagtggcacaatctcggctcactgcaaactctgcctcccgggttcacgccattctcctgcctcagcctcccgagtagctgggagtacaggtgcccgccaccacacccaactaatttttttgtatttttagtagagacggggtttcaccgtgttagccaggatggtctccatctcctgaccttgtgatccacccgcctccacttcccaaagtgctgggattacaggcgtgagccaccgcacccagcccatcatagcatctttaataataataattctgcctttttcttttctgccattcattctcttttcttgtcttcttgcattggctacaccattcagaacaattctaactagtagggatgataatagcaggcgtctttgtcttaattctgacttaaatgggaatgtctttagtgtttcacatttctctgcttaaggagtgttaaatgcaactaaatcttattttgatgtttcagagtcattggtaatacataattgaaaaacattctgtcatacagtcataccatcagcaatcagtggagcttacttatctgttttacttgaaggttccaagttttatttttctcactcatgctctctcttttgcattgctgactcactgagactttccttgtttctcttctcttgctcccaagctgtctattgtcggtaatttctgttgtttttctcctttttcattttataaaccattgttttaattgaggccataatttgaggacgtggaaaacatttcaaatagtacaaaaataagtcaaaagtcagaaattcaaacgctgctgtaagatgtgtttccctcctatgccgacgcttgttcaccctggaaaatgtaacattttgtgtccttccagacctattaaatgcagtgtg

SEQ ID NO: 19459 - DNA, 1036 bp, Homo sapiens
tgttcactgcaatgttgtttataacagcaaaaaaagatgtccaacgatgggagatgagctaaataaactctaatgtagacataaaattaaatatatatgattcaggccaggcgcggtggctcacgcctgtaatcccagcattttgggaggccgaggtgggcggatcacttgaggtcaggagtttgagaccagcctggccaacatagtgaaacccatctctactgaaaatacaaaaattagccgggcatggtggtgtgtgcctgtaatcccagctactcgggaggctgaggcaggagaattgcttgaacctgggaggcggaggttgcagtgagctgagatcacgccactgcactctagcctgggtgccaaaaaaaaagaaaaaaaaaaaaaatatatatatatatatatatgattcagctattcagatattgtgtattatttattgacttaaaaggagtaagggaaaaaaaaggaagattcaagtgtaagtatgacgggtctgatacttttaaaaaatgtgcatatgcttacttagaaaaagctttgcatgattctattaacatatttagggtgtataaggtatataaaagttacttttaattacaaaatgcatctatttctgtagtgtttgaattttttgcaaaaaaatatattgatgttttacttgagttaaaaaaaaaaaagataaacatggaggccgggcactgtggctcacacctgtaatcccacactttgggaggccgaggcaggcagatctcctgaggtcaggagttcgagaccagcctggccaacatagtgaaaccctgtctctactaaaaatacaaacattagctgggtgtggtggcgggtgcctgtaatcccagctacttgggaggctaaggcacggagaatcgcttgaacccgggaagaggaggttgcagcgagccgagattgtgccgctgcactccagcctaggcaacagagcgagactgtgtctcaaaaaaataataaccataaataaataaataaaagtgggatgaaagatgttaccagtata

SEQ ID NO: 19460 - DNA, 1029 bp, Homo sapiens
tctggccagttgtgataattaagtgtcccttgggggacagaggagcctctggctaagaaccactggatcagacccagattttctgacatcagcccaggttgctagaactctggtccaggaaagaaagccagagcccaagccaaggggccgtgggactcttctagtggggggacctgctcattgcccctccgccttgagatcagacatcccgtgtgtattaggtcaaaccgtgcggaattgctgctgtatgtgaccatttcagacccacaaaaatggcaatttcctagagttcagcttaacatttacttccccttggccaggagaacctgcttctgagcagcctgcacaagtcagtttcccctctcttctttctcactctctgctgtctgtctccctctctctctcctacaccccctacccccaccttcctcattccctcattttccctggcctcttccccaccccctcgtccttttcccctctttctccttttcgggacctgcacaaagggctggggcagaggtcaggctgggggtgaacagggccaggcgagctctaccacccctccacccctccaccctgggcctccatcaccccaaggagcacagagaagccatttgcatggtgggtttcaggagccccattgttcccctgtctctgggcctttgcaggtggagctgccaccagcctcgaggaggataaagggatgagctgggaggccagaggagcaagtgggggcggaatatttagcccttcttgggagctcttcccactgggggatcaaggagcatggctgatgggaacgggacaagtgacaggtgtcagggagagagaggatgggagtccttggacccacctccatgtcacacagctgtcacagcgaccttgctggcagaggctggcaggggtggggcagtgcaggctgtggagctaggctgaggcaggggtggatgcagagaacccccaggtggcccaggctcagagctcggcctgaaaccccttgcagattcctgtacaggtcctgggctg

SEQ ID NO: 19461 - DNA, 1084 bp, Homo sapiens
tactcaggaggctgaggcgggagaatcgcttgaacccgggaagcagaggttgcagtgatctgagatcgcaccattgaactccagcctggatgacagagtgagactccatctcaaaaaaaaagatataaaagatgaacttggcaacttgttgaagcctgagacatgtcctgctgagatgggcagagcagggatgaagtccaggctatccactggcctcttgatgcccttcagcctctaggttccacaccctacagtgggctctttgtgagggcagctgcgtctctggctgtgtttctgctagcaccttccacacagggtcatttgagtctgtgggtacctggagtgtattgagaattcattactttcctaaagcaaacccgatacctttattctccatgtgagaaggtagcagaatttggtcttgccggtggggggacttcagtatctaccatggtgtgacattgttgtgggttgagtggttccccataaatagggttcccagaaacctgagacacattattcattgaaatgccacaaaactgtaaaaaaaaatttggagtggaaatctcttccaaatgtatcaccaacttttttgccttattaagcaatgcacaacaaacataattttacttttcaggatgattcagccacggcacaaggaatcgtgctgtctgaacagtcatagttacaaatcttattcaactgttgggactgtttgcctctgttcaaaatgatattgcgatattctgcgtctgtgtttcatggtttcataattttctttttttcttatttttttattttttatttttttgagatggagtctctctctgtcggccaggctagagtgcagtggcgcgatctccgctcactgcaagctccgccttccgggttcacaccattctcctgcctcagcctcccgagtagctgggactacaggcgctggccaccaagcctggctaattttttttatttttactagagatggggtttcaccatgttagccaggatgatctcgatctcctgacctcgtgatccgcctgccttggcctcccaaagtgctgggattacaggtgtgagccaccat

SEQ ID NO: 19462 - DNA, 1046 bp, Homo sapiens
ggggtcacaacccagggagggagggtcacagcccagggaggctgggagctgctccaaggccctggaactctgcctcagtcgcggcatgctggagaggggtacggacttactttcttggagttgtcccaggttggaatgagactgaactcaagaagagaccctaagggactggggaatggttcctgccttcaggaaagtgaaagacgcttaggctgtcaacacttaaaggaagtccccttgaagcccagagtggacagactagacccattgatggggccactggccatggtccgtggacaagacattcctgtgggccatggcacaccgggggggatcaaaatgtgtacttgtggggtctcgccccttgccaaaagccaaaccagtcccactcctgtcattggacgtttcttcccattccctcctcccaaatgcacttcccctcctccctctgccccctcctgtgttttggatttctgttcactcagaattgtaaatgtttagttgtgaccatgacgtattgtttgggtcaatgtccctttccaatgcatactaatatattatggttattatatatgaatatatttaatgacatggaaaaagttgtggattttctttctttccttttttttgggggggggtggggggttggttagagttgtaatggacccagatggaacttgtaatgtgggccccacatgatagaactaaattcagatatcattaaataaactcttgtacactatgccgtctcgcagtcttgattggtggcctgggctgtgggaggtgggcgtgtggggaggcaggggaaggatggagttttcggggagtttgaggaatatggcttcaggccgaagaactcccctgcaagtcagagcctgggttttacccagagcctcagagacagagccctaactaactcccccgagaaggcaggagaagagcagttttgcttggaatgtcctagggccttgctggccgtgctgttttgagctaaaaggttctcgaatgggacagtctgtattgcaggctgcaggaaaccactccag

SEQ ID NO: 19463 - DNA, 1088 bp, Homo sapiens
atgtcacatgtaggctcagagctgaggatgagatagaactagctatgtgaataatgggatgaattgcattatgagcagagctcgtagcatgtgcaaaggccctgaggcagaaagcattcggtgtgtttaagacatgatgacagcctggatgaagtgtagccattcaggggtaattgatgaagggtggggctggagaagtgggcaggacactctaggccacggatgggagtttgcattttttccaaaggggtgataaatcatttaaaggttctaagcagaggagtgaagacataatctagtgtacaaatcaaactagttgctctgctgtatggagaatgtgtagaagggatctagagtggaagctggaattccagttaggagggtgcttcaggggccgagtgagagacaccactggctgagatgttggtgttgacaatcaagatattcgagacatagtttggaagtagaatcagtaggtctggcttttggattaggtgtggggcggaacggaaaagcaagagcaaagatgaactcctaggtggctggcttggattagtgtggaggtcagcaaactgtggcccacgggccggatccaatctagggcctgttttttgttgttgttgttgttttttgagacggagtctcactgtgttgcccgggttggagtgcagtggcgtgatcctggctcactgcaacctctgcctcctgggttcaagcgattatcctgcctcagcctcccaagtagctgggattacaggcgtgcaccactacgcccagctaattttttgtatttttaatagagacggggtttcaccatgttggccaggttggtctcgaactcctgacctcgtgatttgcccacctcggcctcccaaagtgctgggattaaaggcatgaaccaccacgcccggcctgttttttttcccccgtttattaataatctatgggttaaaaatggtttttacaattttaaaagtgggagaaagacacgcagaatatgcgacagagaatatatgtggccatatgtgacctgcaaagtctcaatatttgtcatctggtcccttatgggaaaagtttgcaaacttcca

SEQ ID NO: 19464 - DNA, 1035 bp, Homo sapiens
atctcatttgacgacaatttcctgttccctttggttaaaatagtttggcagggctcagtggctcgctcttgtttgtccccagctgtatgcaaggaggatccttgagtcctggagtttgaagctgcagtgagctatgatcatgccactgcattccagcttgggcagcagagtgagacatggtatttaaaaaaataaaagtaaaataatttactaaaataaccatttagatattaaggtgagagtgtaaatgcctttctcacactatctctgtgcagtcagatggtggttttcattctgcccaagttcccttcctatgttccacctctcttgattcttctggcctttgtagtaaaaatccttcttgggcctgaagctgggcttgcccactcagatttcagagaaacatcaaacagctttggttgctggcaatgaaccagggaggaggcctatctggctcctctgcagacttaattagctcttgagctgctctttctgtcaatctggccttctctgctcctccctccctcttgcttttaaggagagaatctcattttctgctcccaggggcccattctttgcaagccactttagctttctttcctttctgtgatcaggaaagccggatgtagatgtcaaggagggtaattgtaaaagctgactgacactttttctttctgcaattagggaagcgtgactttgacaactaagccaaatcattcattcccctgcctttgaaactcacccctgggtacaagttattttgcataaaattactcaatattttcatagaaccaacccggggactgctacccagttttcttctgagtctaggtcatttgtttgtttgtttgtttttttcttctctttttctaagtatttgaaaacacatctgaaatacacagttgccaatgttatgggtcagttgctataaatacaaactttttggaacaatgcacatgaaatgatgaacaatgaatgcctctggggacaagactggatgtttgagctggttcatgttctcgtataaaatcttct

SEQ ID NO: 19465 - DNA, 1088 bp, Homo sapiens
accaagcaattctctgacagcaaccgtgtatccaacaattgaattcatttctgacactatttacctggagttagcatcagatctcacaagttgaagggctcagtgcttcaagattctcctcacttaggatgctagtcacaaatggggtgtttaggatactcatactcctgcttggatgacttcaaatttgggggttcccattatcaaacttgaccacaacccccatcaagtttgataatttgctagcatgtcttatggaactcaggaaataactttatttactgttattggctttattataaaggttacagctcatgaacagccaaatggaagagataggaccctgtatagggcaaggtattgggagtaaggggacaggggaatagcgcagaggttctgtgacctttccgtgcacactatccttgattcatttaccaatctggaagctccccgaaccctattgttaggggtttttatggaggttttattaggtaggcatgattgattgtatcattggccattggactccgtctctagtccttttcaccttcctggaggtgtgtgtatgggggcgtggcagctgaaagttttaacagtctactcacttggttgtttttttctggtggccagcccctatcctgaagttatataggggccctctgagagttaccagactcttgcacaaagtcaggtatggttgaaagggccacattatcggtaacaaaagacactcctgtcactcaggagattctaagggttttcagagctctgtgccccaaacctgggacaaaggcaaaatacagttatatttttcattgtactacaggtacttctgtagcaaaattaccttgcacacaattggcccacagctttgaatctatctgggaaaaagagtggtaatcccataatgggttgtctactggattggtgatttttctgtcgtgaaaaggatgaacatggtttgtttccttggagcaaatgggtacttaggctaggaagttctctgcatcttatagctttctttattctaatctacttgctaatgaagttcatatagaattgaagtgcagaagagttaattacttatg

SEQ ID NO: 19466 - DNA, 1060 bp, Homo sapiens
caaaaaatacatcaccttggaaattccaagaatttaaggagttgtgtgccaggaaatggggacaaaaccaaaaatatatatttctcaataccatatttggtagctcctcaatttgtgtgctgttgtgagtacttacgtgtcagctgaaatatggatccccttagccctgtggcctggggccactcactagagctctgtgtcattgtccttgagtcaagaacagacttatatttctttcattgtgttgtacacattttttttttcatatgcacatataaaaaaggtttggaagcactgattgaaaaaatattgatgttatagttataaaatatggttaatgtttttatttcacttataggtggtgaacagttgttaaaatagggtggtgataggatgtcatggcatttaccaagcaggaaaaataaatgtgatgtaagacctgtgtgcacgtggttccttgctagggttcaagcaagctgttcttcagagagtatctgatatgtgcttctgtctgtacagtgaggtcagactagaagccactccgtgggctctgggatatagatggaaatcagaacaagccttatgacttttcttgacatagctttcataagtttgcatattctattccttattccattagtaagattgctactaaaaaaataagcatcagttatgtggatggttttccagaaatctgagtatcttgttcttgttacattgtgagacagtaacttaaaactttggggtgctcatgaggagcttaattagaatattgagttggattaggaggcagaggttatcaaagtggcctgtgtattgcaaagtaagagaccactgttgactgttgtacatagaaaattttgttggggttgatcaatttgggtttgtgtctcacttgtcttcatgggatttctgttgatatactcacaagttcgaggcttaaaaacacaaatgccctttggatttgccagagatttaggcatcacatggatttaaaaatggtctgagcacctggataaaatgctgagtacctttactgactcttgctatgctgcaaatg

SEQ ID NO: 19467 - DNA, 1054 bp, Homo sapiens
ttaacatatagatgaggagtacctcatctatatgttaaccagctctctggttaaatgtagcggggtaaagcccagagttcagaccaaatgtttgaagaggcagttaggattaggtttctgagctagggtaattcagatctgggagaaacacctagcatcatcagtcagaatcaggatgccacagaaaatctagggacacaggagaaaagagagtaaatgaaatgtcacagcttagaccatgggcttacaagctcagatggctgacagagggaagaatgactgtaagcctctgatgcctgacagtatattctccacctgactctgcctgcagtgtaaaaaatcctgcatgcctagagtaccagcttccctgttgttttctagcagactcatgtccagattgacttcttgaaggtatgcatgcccttttcatgtttgtagaatatgtgcgaaaaaccaaagaaacgtgaaaaagtaagaatgaaaatgagagggagtataaggactgaagtacctgtcactaaagatgatggcaggcagtggaatctgaattgttgtgtgaagggttaatactgtaataaagctgtcatctcattgaagaactgaataatattgagcaggtaggtgggaataagaatgtgtcatgttaaatttgtcattgtggatcattatgatgacttttcagtcttctgcttgagaaattatctgggttaatcaggaaaaacagatctgttgtttgagggtaggtgcataggccggactgagttagcaatgtgacctggtatgcaagagtttcaagtattttctttctgttggagatctgcctaacttgtcttgttcttttgaacctcagctctaccctttcacctctactgtttcattgatgtgagtcttgctgattctggcctgttaacctgattttgattcctgcaatcctgcctctccttgattatttggattttgactttagtgtccttgacctggagttgagacccagcctaatcctgatgcttgatagtaaggactagagccctctgctgacagtatcagcagccca

SEQ ID NO: 19468 - DNA, 1050 bp, Homo sapiens
gtcccagctactcgggaggctgaggcagaagaatggcatcaacccgggaggaggagcttgcagtgagccgagatcgcgccactgcactccggcctgggcgaaagagcaagactccgtcttaaaaaaaaaagttagctgtatttgttcaattccaaacaattcagatgcaataccagcagctacttttctacctactgccagatacttagacaaaatgttcagagaatgtggggaggtgttgatctcttgaaaagcacaatcaatttcatgttagactagtaggccattcagctgctctgtgttctattttgtactaaagtgacattaaagaatacttacagatgaataggttttcctgccagtgctgatgatctcaaagatagagctgtgctaggaactctctacattctgattagtaacaattctgtcagagattgtctcagtgttaggtatcagtaagatgttggaacttcagttaggcctttagatcatgtagtccatatatcctttctgtagctacggtagggttttcggacacaggctcgctcccaaaagtcagttattgatgataactgttgaggttttgactgtaatatgcttcctagttgaaatataaatatttgtacaaatgtgtatttagcataccacacaaccagttttgtgaaacaaaagataaactagtaaagaggacaccttttaaaaatagtagtttatgtgtgttagtatatatccatttgccaatatattcatactagtaaaaatagaaaaaaatacatttgttaacaccttttaatagtgagaggtagaaatcttccccaaccaaagggttatttgatttttcttctctacttgtctctaatattaaacaactcttcgtctgttttaaatttagatatataggattattaagattcttttataaataattaccttcctaaattagcattttcacagctacacttttagagttattttttaaaaaacaggtataaaggtagaatatttacaaaaattattacatcatgctttgaacaaatacagatcacatct

SEQ ID NO: 19469 - DNA, 1159 bp, Homo sapiens
gaacatgtgggtgagtgagagatagaccatatagtaagtctgtgttccctcaacaccacatggataccttcactgaggccctacagtgtgttgaatcatgtgattgaaggtttctcaagaagacatggctaccaaacaggcagatttaaaagacagaccttggaaaagaagattgaatgatagagattttatgttatcccagtgtgattttatgttattccagtgtgatagttatagaagacctgagaatatgtgagtctcggaagaacaacctttgtttctttcacttgttcgggcaggcagaggctttgaagaccatatctaaaaccctgaagaatggatagatgtctcctggctttttggaagagaaagaagttataaaggttttaactgtagttaactgccctaatctttatgcttttccaaatatgcccattagattttagtttggcatatgggaagatatttggcactgatgacaatctcactgatttggcgaatttatcatctatttgaacaaacagctaagtcagaagaggtgacattatagactagcagaaggcactggccaaatctgactgaaatcaaaacaggacagttgtgcaactcagcaaggattaaagacaaaaacaaaaacgtgggcatggggatgagtaagggatgtgttgtcttcaggtgtttccatttacctggttatcaattgatagaaaacaatgttatcagtaaaactgaagttttgagattagattattgtggtttttgtttataacctgggtcagaaggttattcacaaaataaaaaagttctaaatgtgccttgggccttggaatttgcatggcttcatatatgcagctctttcagctgtgatatccttaaggcaaacaagagtcattttattatacattgcacaatgttagaaaaccagtcttgttactgtatgagttacagaagttggacagacagcataggtggggcagatagctttccctggcctaccgtgagctagagagccattgcagtgcctgagcattaatctcaaactttgatcctaaaacaccaactagagaaaatagaaaagcaaaaaatcaaaacagagcattatgtttctttcttccaaaaggaagcagagcgttatgttcctttccttttggatgttttc

SEQ ID NO: 19470 - DNA, 1070 bp, Homo sapiens
tggattggggacacaaggccagatgagccaatttattgatctgggtggtgccagctgatccactgagtgcagggtctgaaaaataccttaaacaccaatcttaggttttataatactagtattatctgtaggagcaactggggagagtagtgatcctgtggcctcttagcttcatgactcctgagccataacttctaaccttctggctaatttgttagttttacaaaggcagtctggtccctaggcaagaaggggctttgttttaggaaagggctgttctcatctttgtttcaaagttaaactttaaactaaattcctcccacagttagttcagcctatgcccaggaatgaacaagagtcaacttggaggttagaagcaagatgaagttggttaggtcagatgtcttttattgccataattttctctattataatttttgcaaagtcagtttcaaaaggagcctagctagagtttggtcaaggagaaaatctttgtcactgctcttgtttgtaaaagggaaacattggaagtctgtaaagatcattctggattgtccatggttggtttctggagttaattttgttccagctcataaaatcacagatctcccttgttctgctagaagcccaacctggcatggcctaaccttttccttccccgacgatagctattctctgtttcactcatgagcatcacagtttctgtgcctgggcacagtactatttgagagctcccctgtgtccctgctccattcccaggctctggcaaagctagggagactatcctagctagaacagcttagggtagtcttcgttctgtttctctgttttgtcggagagggcagtgccactggataggagtaaagtttggggaagaaaggggaccaagtaagaattactgagcatgactctgagtatccttgaatagtgtcctgtgtctgtgtaaggctttagcactgcatatgtgtttcatattgatggactttttcgtacgtgtctgtctgtattcatcatagtcctgatgacataataacccccattttatggttgggaagctgatacccaactag

SEQ ID NO: 19471 - DNA, 1043 bp, Homo sapiens
tattctacttaaggataatcttattttttcttaagcctttgcatttccatacaaattttatttatttattttgttgttgttgttgtttgtttattttgagacaggatctctctgttgcccatgctggagtacagtggtatgatcataactcactgtggccttgaactcctgggctcaagagatctttctgcctcagcctcttgagcagctgggactacaggcatgcatcttcgcacccagctatgttttcatttttgtaagacaacgtctcactatgttgtctaggctggtcaagaccagtcttggcctcttggccttcagtgatcctcctgcctcagcctcccaaagtgccaggatttcggtcctgggccactgtgccaagccttccatataaattttagattctgcttgtgaaattattttttaaaattcttattgggatatttaattgaagctgcattgctatgaagagaactgatatgttttcagaactaattcttcccattcatatatacactgtatctctccatttacctgacttcattcatgtcttttactaatttttaaatttttccctatgaagacattgctcatcttttgttaaatttatttcaagtttctttgctgtatggaatgaatttttaaattagacttttgagtatgtactggttatattaattttgttatattgatcttgtatctagccatctttctcaagttttattatttataataatttctgtagattactttggattatctttgtgaacaaacatataatcttcaaatgtcagtataggttcttcccttttagttttaaaatcttctattttagttgcttactgagctgggtagacagtaatagtgggaatccttgtcttactcatgattctaaagagcatggttttattttattttattttcaccctctccccaagggcatgtttttaacatgtttccagtaagaataatgttttataggtgctttttaaaaataagttagggattttccctgttatatttttcatcaacagacatggagt

SEQ ID NO: 19472 - DNA, 1005 bp, Homo sapiens
tgtttctaaagaaactctcttttgtcatttacacaagtggcctgagtgtcatgctgctgacaagttaagaatgactatagataagttatgcttataatgctgccaccccaaaaatgaggcctctcagcccgtaggcatcagatgtggcctctgtcaacagcaggagcttcatgtgtgccatcacttagcacatccaccctgcagattagctctcgtctcttgttgtcccatttctgtcagttacagcattcttcgcttccttcagaggagaaaccttagaaccagtcttcttcactttttgctctccgctctccccttcatcttgagtctaatttctgtcaccagcagaatcttttgtaagccctgtgacatttgctttcccatcctcatttctgaagctgccatcctagtttacattggaaacacgggaggctgttggtttttgcagcagcttctaactgttctttcttttgtcctccgccccgcttaccctgccgttcatgctgcccagcgttgccaaactaacttacccaaaatattgctttcgattttcctaacttatacgagtctatagtttctccatattagcttctgtctcaaccctgcttagtgttaaaggaacactgtaacctggaatgatcaaactgttcctcagaatcaaccttttttccctttccctgtccctccaccctaccattgaggccagtcctttcaccccaccatatttgttcccccgcctccatgggaaactggtctgcctgtcttatatccagtcagatcctttcaaggcctctgttaatcctgctcttggccccagtctcccttttcaaaacttggaatatggctttgaagtcaagcacacttgagttcagatcttggctctgacatttactagccagtgagactttgggcagttccttaactttattgagatgatatccacatctataaagtaggaataataatagatcatttaagaattaaataattaatgcatataaagca

SEQ ID NO: 19473 - DNA, 1053 bp, Homo sapiens
actcccggatattctactttgggtcagaagtgagacccagggatctgcatttataattaaggactgcagaagattttgatgcagatgaaccctgaactgcactttgagaaacacttaatattgaggttttttagcattgtattgtagaagcaatagagtgttgattttgtactctaaatgtgtataaagaacatcgttttgttttccaaaaataaatttttattcaaatatggaattactgttttttcatagtcttcctacgtaacctattggaatttttagatttcaacattgcaattcagtaatacctgtgctctgcaattgaaatctttttcaaattcatggccagcaactcaggaaaagtaaaggcatttgagtagcaaagaaaagagcttggaatacaagttgagagccaccaaaaagtgctctgtcaatagttgtgtttcatcaaataagttgtttggattttgttttcttcaggcatttttaattttccttttaaataatgacaaaagaaattaaaaatagtaagttggggattagagacgaagatagagaggaagagaacattggcatcaaacaaaacaaagaaaatgtaaaggtgattgattttaagaagctaaggagtttgagcaatctaatgtgacagcaagtacactgagtcattcattgggaaagagatgaaataatattcagtaaattgttttgaaggctcagaaatacgagaaattttagaaatatttccatcaaaactggtttcaatttcattaatatttgggtatgcaaacaagaaaattacttcattaatctagaaaattcatttgtatgcaacatcttatttcccagagatgacataaaaatgaagtgtgacttattcatttgagttttgagtaacaggcatccttctaaggaaaagctaagtaattatacatacctttttttagacttttttctttctattagcaaaacaaagcctagatgtgctttccattcatttccagtttgctcagactgacatttggcttgtgtgggacatactgatgtttcaggaaa

SEQ ID NO: 19474 - DNA, 1059 bp, Homo sapiens
gcttgctctcctctctaaagcacattaacttccatcatctgttttacgtaaatttccaggcatctgtttgcctgttgtgagttaggttacgcccatttcaataatcttttttattgttgtgtaatttaccagttcaaacagtaacttcaattgctgggctataggaggagggatatcacccgaggaaaggaagaagcagaagaagatattagggcaacatttggtactgggtaacatcagaattatagggctttttagaactgctctggttcattttaatttcctacgcctttagccttcaaggttggtttttaatagtccacttctagctgcagtatttaagagccccagcaagagtggggatgttcagtggtaaagtctcgtgtttctccaaagccctgggaccgccattccccagtgggaaactgacttggcaggaagtcagctcatcttctcagctgaccactctattctggagaggaaaggcaaggggcagaggctatctccgactgcagatgaaaattctaaatcttcaaatgtgattctgagcatcctgcctcaatattgggaaaaaggaaaacaggaatttatgccattaattcatcttactttcatggaatttttttcttttaaatgagaacttagtgtctttctttccttttccttccttccatcctttctttctttcatttataaagaaaggagtttatttcttacagttctggaggctgacaagaccaagattttggggacacatctggtgagggccttcttgctggtggggactctgttgagtcctgaggctgcttaaggcatccgatggcgagaggctgagtgcattcatatgctctaaaagagcactgagattcatttgcagccacaaactcttatacaagcataaattagacaatctaatactagtattattctttacctgtctgtttttcttctgcttagggtaatattatttaacttttgatgatgaaagaattagatacctctgttagcttttctttatcacaccagtagaggtggacttatctttcttctagtttcctt

SEQ ID NO: 19475 - DNA, 1059 bp, Homo sapiens
cagctcactgcaacctccgcctcccaggttcaagagattctcctgtctcagcctcccgagtagccaggattacaggcatgtgccaccacgctcagctaatttttgtatttttaggagagacgaggtttcaccatgttggccaggctggtcttgaactcctgacctcaagtgaaccacccacctcagcctcctaaagtgctgggattccaggcgtgagccaccaagcccggctgagtaatttttttcttggcatcttgggagatgccaagtctctttatcacagcagtagttcccctggctcagttattttgacaataatcaaaataaattctgaggctccttgagtgctttctgacacatgtggacaaacaccagactgtcctggggagaggggccctcatatgggttgtgggaccagcaggcggtcgagcacagtaaatctgcccacggctcagggaatctttatttatggttgatctctcatttcctttttactagctttattatgtggtttcctatacacaattgccgatttagcattctgttcagctactgacaagcccttctctagggccagtgaggaaattccggctgcagagttcagggaaggttgtggaccccaggcaggctgagagcagaatccagcattcctgcacttagcctcttccaggagccaaacctccctcattgcccccctgtggggtagaactgaatgagtgacaagtcccctgtgcacaagtcttgcttccttacatcctttccaagatcctgtcaacagaagataattgataacatttttgtaacagcctactaggtaccaggctgggtaccaaagctaactttgcagttctttcaaaagccctaggaggcagacatcatcttttttttttttcattattcagatgagaaaactgcagcatggacagattaagtgatgtgttccccaggttcacacacgttagtaaatggaggtgctgagagtcagactcggtggcctgacttccaagcccaggctaagtcagactgacagcgagatacccctaaacccccttctctgca

SEQ ID NO: 19476 - DNA, 1051 bp, Homo sapiens
ccttcacctggtcttgccctgtctactttctgatcattctgatggtctgatgtggctgttgatgtggaactgcagaagagttcagagaagagtatgcaacaaagccataggaaaacacacaggagcttttccctccccttcaggtccccgccctctttccaagctggacaattttttattaagttgtttattccctgccttaaaactgaaacaggaaattttctggtagaaggagggtcatttagtcacgaacactgaagtgggtcaaaattctattctgggtcaaatccttgaattcaaacagatgtccataatcagtactgatggaatagagcaagtttttctatgtaagacaaataaatcaaacatcatgtgcatctcctcataagggtctgcaagggtctgatggtttaaagttcctaacagatctggttgcagcatctgccggagcttgcaccccatcatcggacggtcatcttcctgctgcagaagttaggtaacataagacttagatttcttcctgttctagcaatctgcaagaccaccaggcttaactttttagctgccagaagacaaacccccttttctgtttcggcaatttgtcctggcacgtgttttggacttcctccgatttacacgaaaagctctgatattcattggagtactttattttttttcctcagttttgtttcttttctcatgtaaaaacaaacaaaaaggtcaacaaaaaaaaattgaggtttttcttgtttctatctagttcatgctttctttgcggtgtttgaacagtagtctgttaacttagtaggtggtacctggaaaggtattttaagtatagtgactgtttaataaatacttaattggatgatggaggaggagaaattgttttcttcccaggattctctttgggggtcattttgtgtgacagatatattttagacatttggagaaacagtttcagatcctgccaggatatttttgtaaaaaaggaaaatggaagattccaataaactagaaacagtacgtatctaagatgctgacacagaagcta

SEQ ID NO: 19477 - DNA, 1050 bp, Homo sapiens
tccatgctgaaagccaataagtccagcattgttcatggaataatcttatgttactgatttgtaatgctacctgtggtaaacccagttcctcagcatacttagttctatttcttgtctctctggtttacttgtctgtctatgtctaataccagactgttttatttactatacttagtattatatatagctcataaagaaaatccttcctggatattattatttttaaaaaagttatacttttgaatattgaaagagtttaaaaatctttccgtgattatggatatatctgtttcaccccagagacctattagtttctgtgacttacccactcaccacccatctcccttttttggggtattgcagttttcatagtgatctgttaagaggtccttatatatgaggtttttaccttttcttatgttacagatattttttctagtttttgactttcagttttgctatgcattttgatgtacaagtttaattttttttttttttgacggagtcttgctctgtctctcaggctggagtgcagtggcacgatcttggctcactgcggcctccacctcctaggttcaagcaattctcctgcctcagcctcccgagtagctgggattacaggcatacgccaccaaacccggctaatttttttttatttttagtagagatgaggtttcaccgtgttagccagggtggtctcgatctcctgacctcatgatccgcccgcctaggcctcccaaagtgctgggattacaggcgtgagccactgcgcccggccctcaagtttaattttttataatctttttttttctgccttttcagtgctgcttaaaatgtgtttcattaatccaaggttacatatatatttgcctctgtttactagtatattctttaattttttctttagattcttaatccatttggaattgcttcttacttctctgagtgtatcttcttagccttcttttttgaacaattaaatattctaattactcaaaatttgattttaatctcccttccttttgtatacctggagtcataaacttgagt

SEQ ID NO: 19478 - DNA, 1031 bp, Homo sapiens
aaattatgtttagcccagggtcacacggaagccgggactgaggcagcctatcttcccaggagcccttaaccatcatgtgagcagctggagggaaggactgcacaccccgaggtcacccccaaacacccccttgatgaggggtcccttctagtggtggatgaataaggacactggcaaattgtgattagattcctttaattattacctggacaaagaagactccagctaacctgtcaaatggacgagtgaggaaagaagctaagccctggccaatgtgaatggaatctcacagcatttgcctgacagctgtgaggctttgtggatctcctcccacctgcaccttcctcggattggggaactgaggcccaacctttccttttgcctcagatttattagtgactccagaattaggctttagccatggttattctctcctaaattattaactcgataggctcttggactccgaggctaaccagctggagacagcgccacgggcagcgggaactcaatggcaaatagcaaatgtatcttcttggacagaattaaagtggagaacagcctgtcccaggcacgggcgggcaggcttccactcagtctaggctgaggggcagggctttttctggagggtggagggttgagtggtgtggtaggtgggaggaaagtgcctgcagagctgggagtgcagggtgcgcaggagcagggggactcctgagctggcctggcaccttgggtgcttcgcacccgtgagtgggcatgggatttgggctgtggtgggggacgggccagggagcaggcagctcgaggagggccttgagcttgctgagggttttggattttgtcctgaaggtgctggtgagtccatgaatgagtcgcatttattatcttctatttttttgagttagaaatcaaccagtgggcatagaagtaaacagtcaaaagtacaaaaaggcccaaaagggaaagcaagagacccccaccagtccctctgccgggggcagcccccagcctgtttctcttggcatttgccc

SEQ ID NO: 19479 - DNA, 1047 bp, Homo sapiens
caaaaaggagaggtacaggagaaacaagacacatctgtagtatgatcgcacaaatttgctggagaaatcctttgtttaagtctctctaccaccaagcagccaaaaactttttgttgaggtcttcattcctagagttaacttcccacctggaggcgtaagattattattagtatctgagggaagcagaaatgtcctgagggtgattttataatgaactgccacttaggaatttgccacacagccttcaaagcacttttaggctctcagatggcaatctaaatgaaaaagcaaggacttttaaattttttttgaattacaatgttagcactcctaggattctttaatctttcttacccacagagaataaagctacaggtatggtttgactgcaagaacaaacagcaggttccactgctgtgcttttgtcacattttcagtggttcatataatgcagttatcccagtacagcttttattaacatttttttttaatttttgttttttggagacaggatgttgttctgtcatccaggctggagtacagtggcagatcatagctcattgcagtcttgaatccctcggctaaagtgatcctcccacttcagtctcctgaggaggtaggagtactggtgtgcgccaccaccctatgctaattttaaaattttttttgtagagatggggtcttgctatgttgtccaggctggtctttaactgctgggcttaagtgatcctcccaccttggcctcccaaagcactgggattacaggcatgagctaccacacccagcctcagtatggttttttgacgcagtcagaattcctcgggagattttaggttaccagaaatagccaatgattgggtaagaagatgcctactgaacacattcaagatttcagttcaggccgggcatagtggctcacgtctgtaatcccagcactttgggaggctgaggcgggtggatcatgaggtcaggagttcaagaccagcctggtcaatatggtgaaaccccatctctactaaaaatacaaaaattagccaggtgtggtgg

SEQ ID NO: 19480 - DNA, 1043 bp, Homo sapiens
tcttctctctagatttaaacttaagcaagcagaagcctctgggattctgtactgactagaataattcactgcttccttcttattgcgagtccccgtccatcataatcctccctggatcatgctgaataaacagctggtgacttgagatggggagaaattctacagagtttccttgcctgagcctttcaagggctaagactcaaaatgttcaactgcctaaagcaataaacaccaaaagaggttaaatttcgaatttgcttttcgcttatctagcagtggacaactaatgaacccaacaatcaggcaaaatctgagttagaaacatttagaactggaaattgaccttaaggataacataattcaattccttcacccttcagtgaaaaaacaacttcctcttacaggaattgctcctagttttcccgcttatagtctggaatgtttatccccagaaggagagagctttttaaaaaaggaacatgctggaaagaggatactcagaccatggctgacagaacttgtaggaacctcacttggaggtggtttctactgtggttctactgtggtttcagttaggtcgcaaggagaggtgacccatctacatggtcatccattcatgggtacagttttattttatgaccgctccaagcctcttaggacactccacagtgtctttgttattgttccttgtgtttggtgcttctctctgaaaacaggattatacattcctggcctgttaaatacaggctggccatgtgacctgctttagtaaaatctgagtagccaagcgaaaaatgttaaaaattgtgtaccatgttttcctttttctctttgagattcacagtgttccagatatgggctgctttgcccactgggatccctgcatgaagctgttttggaacagagctacagctggctcctggtggatacacagcatgaatgagatctaaaactttgtttttgtaagcctttcagatttggggtcattgataccacagcataacttagcctctcctgactgaaacatcctccttattaagtga

SEQ ID NO: 19481 - DNA, 1094 bp, Homo sapiens
gccggccgggcggggacaggggcgcgggccgggcccgatgacctcagagccccttcccgcagcgctcgcctggttctcgaggcccgctgcggcagaggaggaggagcagcagggagccgacggggccgctgccgaggacggggcggacgaggccgaggcagagatcatccagctgctgaagcgagccaaggtgaggcggctccgggccctgcgcccggccgagcgcggtagcctttgtgagcggggtcttggcgttgctgcgcattactctctccgcctcgccgaagagtggatggaggctccgcgggtaaaattgccgagaatgaggtgggtcatccgagaggggattggaatccatccaggcttttccgactctaaggcctgcagtaaaacctctgcagtgtcaagtgcaaatggagatggcgccctaggcatcacgctttatgcaaacgaaatatcgggaacgttttgtagtggttttatcaattaaccagcctatctgaaatgacataatttcgcacgtatatagcggcctgaaaatggcaacttagtgttggttatgcggttcggttctcctcctgaattcttccttttctccacatccttttctatttttttttcctcctcttttcccaagttatctcatctcttccattgagctaaatacctactcgatgccaacaacgtccaaatttgtatttccattctgtagtgtgctactgacatgccatttgcactttaggaccatacctacctctcagatttaacatgcccaaaactaaacgatctttaatgcctcctcaacatacgctttcgccatctctttactaccatcagtttttcagcctaaaaacctcatagtcattcttaaaacttgtggtaccttaccattgccttccaatacacttacagtccagcaacaagtcctgttgccaacaaatgcaaaatatttctcaaatctttccccttttgtctatctcccttgctgtcaccctagtgcaaaccatcattgccaccaactatgctccagtagtctttcctggcctcctggcctcttgcaatctattctccatgcagaaaccaaagcgaccaaa

SEQ ID NO: 19482 - DNA, 1918 bp, Homo sapiens
gagttccagaccagcctggccaacatggtgaaactctgtctttaccaaaaatacaaaaattagctgggcatagtggcgggcacctgtaatcccagctattcgagaggctaaggcaggagaatcgcttgaaccccggaggtggaggttgctctgagccgaggtcacgccattgcactccagcctgggcaacaagagcgaaactccatctcaacagaaggaagaaaaaaaaaagaagaaaaggtaaatggctgattattgattttgctttacagacaggaatttgctgttgctggctatgaattctgcatttcaactctagaggaaaaaattgaaagagaaaaggaattagcagaagacattatgtcaggtaggaaacccattatctgggcattgccttttctccacaaaaggctttactttacacttttgagaaatggaaagagatctaaattgggaagagggaaagttacctattttgcaaaataagtgtctgtctttaaggtatcagcagaagttttggaataagatgttttatttaaaatatttgactgctgttttggtggtggttttttttttaacccccttggtaacatggtcataatttatttgttaacttttagttacatataacttaaggaaaattggggagcagaaggagaaggtgtttctcgtatctcttagttcagctaccaatcaaaatgcttattacgttttagccctagatatacagcaaattaagaaagaagagaaaaaaagctcatgtttttacaatccatcctcactcattctggaggctaggaatagaactggatgagcaggaagctctctagctctccaccattttgggtttcttaatttgggttgaagtattgagaattttcagatttgacatttattcaatacctactctataccaagagctaccgagatggtagggatacagcagtcaactcttctgtacctagtggtcttctaactctctcttgaacatagagtagtcccccgttatccatggggaatatgttccaagacccccagcagatgcctgaaacgacttctaatacactgtgtttttttcttatatatatgtacctatgataaagtttaatttataagttaggcacagtaagagattaacaacaataacttttaatagaacaattataactatatactgttaacagtgtcacagacaggagattcattcttattgtagatcttatcaacctcagcatacagttttttgttttttgttttttgttttcttactaagttgagaactttcaccttttcattaaaaggaagcactttatgacttctctttgtcatattcaaattgccagtatcaccactctcacactttggggccattatgtaaaatatggattgcttgagcacaagtactgcaacattgtgggttgatctgataactgagactgctgctaagtgactgaggccagctgccgtatacaacttgggtacactggacaaagatgattcatgtcctgggcaggatggagtgtgacagtgtaagatttcttcatgccacccagaatggcatgcaatttaaaaacttacggattatttcttgaatttttcatttaatatttttcggactctggttgactgcagataactgaaaccccagaaaatgaaactgtggagtaggagggatcactgtacaccaatttttttgttttcatcactccactgaagctacctttatcaaagtcaccaaatccaatggttacttctcaatccttaacttactcatcagcagctttaacttaggggatcactgtctcctactgaaaatactttcacttggcttctgggatgcctcactggtctctctagtgaggtgaatagacttccctacctcttaatgttggcacgccttagggctgttttcagccct

SEQ ID NO: 19483 - DNA, 1117 bp, Homo sapiens
caaatggcagacttataattatgattgcccacccgacatcttgacttgaagtctaatggtcatctcatacttaacatgtccaaaataggtctcagttttgccgctcacaacttgtttcgtcaccagtcagccccagatttgtaaatggcacactactcatttagttgctttggccaagaacctaagaattgtccatgatttcttcctcattcctcatatctaatccatcagcaagttatactggatcagccatcaaaatatatccatactgaccatgtctcatcccattaccctactgctttggtccaggccatcactgtttcaagacctcagtacctttgtatcacctttagaataaatttagaatccctgcatggacctgtaaggcgcttatgacctgggcccacccacctcttccatgccatctgctgctctccccttgctcgttccagtctcaccacactggtcttattctggcacattccaagcttagtgccacctcaaggcctctttgcttgatattccccctacctagactgttctctcttacctttctctggccaactcccgtacttcactcaggtctctgctcaaatagcacttcctcagagtgctcccttcactaaaactatcatctcttcccaccttactattgctctactcctctttcctttacttttcttcatcacacttaaaagtagaggtgtgtgtgttgtgtgcttgtgtttctccactaaaagtatgtttttgtttaaaaatttttagtctttgtcttccatatcaaagaaggatagagacttcatccattatactcagtgctaaatcctcggtgcctagaacagtgcctggcacataatagaggctcaataattactgaatgaaagaacaaaagacccaagaaagaccagcaaataaatccagtttcagtgcagtgtggaagtgctttgaggaaatccacaagaggtgtaaaaacaagtctagctgtcaagtaagtcacttctgaactatttacacctttgctgtctttcatttatagtgttgactatggtttcttaggagtgtaaagctatattttctgattcaaaaaataataccagtaaacactgaagaaagttta

SEQ ID NO: 19484 - DNA, 2012 bp, Homo sapiens
agaaatttcagctaaattaggtttaacagtaaggacatttatgtcaagtaactggcagttcagcaatagggagcaggctgttgagttagttgacagtgtgattcactgaaatcataaaggaacaggctctttccatccttcctcactcatgtattggctttttccccatgctcccctggtggttgaaacgtgaaactataacaattcccaggaatctcatccagaaatgacagtgtccagaggaaaaggagacttctttgatgtttctcataggatcaaggtaatctttcctagaagtctccaagtagatttgtccttacttctcattggttagaattgggttacatgccatttctaacccagtccttggcaagaaaaatggattatcatgattggctaaaatacatcagtctcctttcctgaggatgtgagtcatgtgagaaaagaacggatactgggacaaagcagctgctctgctagcaaaggaagatctttgtaatagtgagccgtctcactgaggaacattctatagctcctgcttatagttttcttcatatagatgacagctatttattaaatttgattctaactgactccttgactgaactctttgcttttcagttgatattcacactaattccagatttataatcatacattccggaaatcatgatacaggttgagcatcccccagaaccgaagctttctgagtgccaacatgatgcataaagaaagtacgcattggagcatttggatttgggtttttggttttgggatgctggcagtatccaaaggaaatattccaaactcaaaaaatctgaaatctgaaacacttttggtcctaaacatttcagataaggaatacttaacctgtaattgtttccttccagagagttatactactgtctcccttccccaccctttataaaattagttcattggctgtaccttcagaacatcaagcaatagtagtaataggaaacttagtcttatatccaatttggtaccaagatatatgaatagatttattactattatatatctagagcggaccaggcttgcttgtaggttaattgcttagtacctgtgtagtgctggataatatttaatgctgatatgtaacttgcgtttcttatgagatccacagtaaatttcttattgtattgtttgtactattatgtttgtattatttgttatcgcaggattgttattaatgtgataaaatgaattgggatgctttctgtattttctattctgaaataagtgtgggatattgcattggaatggtctgttccttgaaagttgcagagtctgtgatgccagatggaccagaactcctgagttaattctccggcagctttttttttccttcttgattactcatgtatttcttccattttcttaatttcaatataggacagtgctaaaaacataaacattaataaatatctattgaataaatgaacgtatgggtgaacaaattttataactattaatttcctagaagaaactttaaggaattatatttttaaagcatattttacactactcttacgtatctgagatcctcttccttttctagatcctaattttatggatttccttttaaattagtaaaaagatgtttcccattgattccttcctcctcctttccttgaaagtttttattttcatatattaaataaaacatttctagaaagttatttttgatgacataatatttggttccatgagtgcttaaagtctggagcctgagttcagattctggttctgccacttactagcagtggacaagttatttaacttctctgttctcagcttccttatcaataaaatgaaaataataatagaacttacctcatagagttacaagaattaaatactccaggactatgaccagtactcattaggcactattatataagagtttgtggaatgtgatatatttactaatcttatttattatatgatttggcacctatattttactattatcaatttatgaaggacct

SEQ ID NO: 19485 - DNA, 1033 bp, Homo sapiens
attttgtttattcattcaaagagccaacttctggtttcattaattttctttattgtctttctattttccatttcacttatttctactttgtctttattacctctctcctgtttgctttgggtttattttgttcccttttttctggtcccttaggtgggagatgaggttattgatttaaggtttttcttctaacataattgccatttataactataagctttagctgcatctcattaattttggtaagttatattttcatgtatctcaagtattttccaattttgggggggatttcttctttgaccctttggatatttaggagtatattgattaatttccacatacagtgaatttctcaaattttcttctgttgaatccagtttcattccattgtgttcagagaacaactgtgcttgattttatttattgagatttgttgtatggcctcacatatggcttatcctggagaatgttgtatgtgcatttgagaagtatgtgtattctgttgaatggagttttctatgaatgtctgttaggtctagttggtttatagtgttattcaagtcttctgggtccttactaattttgtctagttgttctaatttttttttttttttttttttttgggatggagtcttgctttgtcgcccaggctggagtgcagtggcgtgatctcggctcactgcaacctccacctcccgggttcaagtgattcttgcacttcagcctcccgagtagctgggagtacaggtgtgcaccactgcatctggctaatttttgtatttttagttgagatcgggtttcaccatgttgtccaggctggtctcgaactcctgacctcaggtgatccgcctgcctcagcctcccagagtgctgggattacaggcatgagctactgtgcccagccagtttttggtatttttagtagagacgaggtttcaccatgttggccaagctgttcttgaactcctgacctcaggtgatccacctgcctgagcctcccaaagtgctgggattacaggcatgagccacc

SEQ ID NO: 19486 - DNA, 1271 bp, Homo sapiens
caacatagtgaaaccccgtctctactaaaaatacaaaaaatgagctaggtgtggtggcgggtgcctgtaacctcagctactcgggaggctgaagcaggagaatcgcatgaacctgggaggcggaggttgcagtgagccgagatcacgccattgcactccagcctggttaagaagagcgaaactccatctcaaacaacaaaacaaaacaaattagtattgaaagggataattggtctaattattgcattttaaaaagtgctttccatttttgttaattcctttgttttcagttcctcttacaggaacttttccctctctgatctgtatttgtattttgtagggaaggtatatgtatatatgattttcagttgtataaggagtaacctaaacatttcttaaagacagttgactcagaggaaaaaaaatttttttcagtttcttctctaaaatgagatgagtacattttaacattatccttctttcccttttcctcacttgttttttctctgtgatctggaattttagacttagtggaatttattgcagaggagaattctaaagcctgcatatttgccttgttttttaaatagtctattttctcctgctcagatgctttgctggactcagaagttaaatgagcataaggttagggagttgtctgtttatgaagcttgcttagtccctggtgaaccttcatttttagcatccagttctctggagcttctgtagtctattctggctcaatgcttctgtcccacatgctctggcctcttaccctggaatgtcatttacctgtatgttgacctctcttctctatccttcacattatcccctcttccatcagttttctcatgtatattttgggagtttcttcagttgatattccacattaccaatttattattaagaaaagtcagttctgtgcttttcttttgatttgttttttgttttttgagatagggtctcactgtgtcgcccaggctggagtgcagtggtgcagtcatggctcactgcagcctcaacctcccaggctcaactgatcctcctacctcagcctcccaagtagctgagactgcatgctcatgtcaccatgcctggctaatttccggattttttcatagaggcggagtttcaccatcttgcccaggctggtcttgaacttctgagctaaagcaatctacctgccttgacctcccaaaatgctggcattacaggcatgaggcatcacgcctggcttccctctgatgtaattttttaaaattagatttcaa

SEQ ID NO: 19487 - DNA, 1024 bp, Homo sapiens
atggcttaaatctgtcgtttttgatattcaggtttcctcaatttagccttagtgaaggaggggttgtacacactgccatttttgtattttaaaggaaaaatgactttcattcccaactgattatgacctttcaggatgtcgtcaagtgatgctttcagttgtaacacgtgacttggtgctgtccctgctggtctaagtagaactgtagattcatatgggctggtgttcctgtgcgctgtgggtgtggtgattcagcctggcatttctaccataagtttttggtctgctgatttgctgccctgtcttctcttactttactttatcaatacctggcaaactgaccagaattaccttcctcatggcaaagggggattatggtgaattgttgttcttatagtctgtttcatgaagcacaagtggaatttaatacataaaagagaaaaatatcttagtttgctaccagcatccagcatgaagttgtaaagtggggattaggcacgtgacagtatagcacccatttgaatttaaataaaagtgaaccatatttatctggttatataaaactaaaaatgggggtgtttatataaaactaaaaactaagaatgatgtaaccttttgtctgtgttatctgaacactctacttcctttgcagccttagtcacacaactgagtcatctcaagtactctttaaggacacacagcccaggctgttctgagtcagaataggcccctacaggtatattttaaaactcttcgtaattctaatgtgtactgctggtatagctgaactactgacctggatcttagtcctagcctttttgcttttgcaatttcagtatcttcatctctaaactagggaaacactgggattctttcttagctgtgggggaaggtatttggttagatgactttgaatgaatagactgctgtgctgaaagagctttatcacactgtctcaaagtatgtaaagatacataggtggatgctcttactgcagcagtcatgaatacatttttagccattt

SEQ ID NO: 19488 - DNA, 1025 bp, Homo sapiens
tactgattggtctaaattcaaaagtgaattggttaaaatcgtgtcattaaaattttttaactgtccaatggtcactggagttttctgggcataaatatttttaaaatagaatcactcagtgtaccaaaattaaaagcattatgaaatttgcagtcataaacatgcagtggaaaactggctgtcagaatacttttatgaagagtattaggaagaccttaatttagttctgggtgctaaaaaaatcacgtgtaaggatatagtgtcagaacactgaaatctaagtctacaaagaatatcatgttttggtttgcagtgaaccacagtaagttgtcagtgctgctctgtgcttaccacttaaatcatgataaggtgaacctccataggtaaaccatgtgagaattctgtcctttcatttattttgaaccaagaactattattggattttaactctcattctgagatttcttctccaggtgatggtaaataaagtaatacgcacatgcattatgatgaggatggagggagtggttcacagcacctcaccttcgggtcctcaggtagaactgcaagagtaagaagttaggctctgatctgacatgttctcagaaactatacggttgaccttcaaataatgcaggagttaggggcatagaccccctaagtagtcaaaaatccacatctaactttgactcctccaaaacttaactactcatggcctactgctgaccagaagtcttacggataacatagtcgattgacacatattttgtatatgtattatatactgtattcttacaataaagtaagctagagaagagaaaatgtttgttaagattataaggaagagaaaatatatttactattcattaagtggaagtggatcatcatgaaggtcttcatccttgtcatcttcatgttgaataggctgaggatgagaaggggttggtcttgctatcttgggtggcagaggtggaagaaaatccatgtataagtggacccacacagttcaaacccgtgttgttcaa

SEQ ID NO: 19489 - DNA, 1279 bp, Homo sapiens
accactaagcctgatctaaagtttatgttggggacctcaggtatacaggagtggaacagggacaggagtgaaagctttgactgaagacaaatgtgggcttatggcctatctctgtcactaatttaactatatgggcaaagtactaaacctgtgtcttcatctgtaacatagggattagacaccagtgataggagggtcttggtcagtagctaatcacagagctgcttccttaaaagccttgagtacttttgtttaaaagtttaggtctacttgaaagtctgtaaagtgctaatttttatcatcctgagagatctgtttctcccctttccagttaccagtggcattctcccaaaactgttagtatctatgttatagaaagatacttaaatgctatgataaattgtatgaaaaaaactttaaaattcagcaagcaattcttaatgaaagataaaactggccctctagtaccataattagtttagaattcagtcttttaaattatttgcaccttgagactctgtgaaatgaaaacatttaacagtaaactcttgtcccaagggagcaaagtgagagtaaatgctggtccatagtgatggggaaaaaggactgtgttcaccatgagtttttcaggatgcagcataaagcttatctaaatactacacagatcattatcttttaacccaaccaatcatatattcaaactaagggaaaaatatgtaagcttttcctttggaacctgagacaccaggagccttaaaccacaaataatctactgtagctatggacagggtagtcaaatttatttcaaaacaaaagctttgttgggctgcatcaaatgcaggagaaaaggaatacttaggggcatggttaaattaccagtgtgcgtaacagtgaggtatgcctcaaataagcctttaaaactttataaactgaactagaacatacccatgcagtaatattttttcagtgctactaatgaaaaaaaaaaattaaagcctgcactggaaatttacaatatggcagaatttgttacttttaccttttgaccctaatgtacagattttatgacagggtctgtgttaaaaatctaaacattttcacaagattttaaacatcactggaaagctgaatttagaggaaacaatatcagataaaagtacaatgcccgtgacagccaacattatgtaactgggctgtatgaggttgtttagaaggctagggttaaaaagatagatagacaaaaagatttttaaaaatcacccccaaagttgatgcgctg

SEQ ID NO: 19490 - DNA, 1063 bp, Homo sapiens
tgaagttttatgggctttaagacatgttttaggctgggtgcagtggctcatggctgtaatcccagcactttggaaggccgaggcaggtggatcacctgaggtcaggggtttgagaccagcctgaccaacgtggagaaaccctgtctctactaaaaaaaatacaaaattagtagggcgtggtagctcatgcctgtaatcccagctactcgggaggctgaggccggagaatcgcttgaacccgggaggcggaggttgtggtgagctgagattgtgtcattgcactccattctgggcaacaagagcgaaactccgtctcaaaaaaaaaaaaaaaaaaaaaaaaaaagacatgttttaaagcccaataataaacactggaatgaggcagaacagagaacagatttatgatattttcctgggagctggaaaagaaatcaccagggaaacatttatggaagaggttaataaacaaatgagggagtagatctcaataactgattccaatgattccaattctgtgggacactctgttcttagaaaaacgctgaggctataaagctgcttcattcaccaccatgatgattttaaagctatggattatataacactatataatgattttctcaaataaatggagtattgctaacaaaacttactccaaacattaataattttttagcactgtgttacattgtgaaaataaccagaaatggtagagaatgtctgaagggaagtatattcccagaaagggaggatgtcaaccaactctggaggatacccacatcagaaaaggacctcctctaagacacagttcccaagtaaacagagggctatgcagtggggctaacaggcagcttttcacagtcctgccatagcctcagagctgacagttgggagcagatgtaaccgcctgctcaggaacctctgaattcagagggctcttcacatccacaaactgcactacagaatctgagagcactgtcagagctccaaagggtgcatggccctgggctggacacagatgcagcaggtgggaatgaactctgctccctagccaccacctgct

SEQ ID NO: 19491 - DNA, 1031 bp, Homo sapiens
aaataaaaaacagatgctccacatacggttattactacattacagaagcttttcatagttttccagtgctcttaaaaagtgctaatagaaaaagaaacaaaatgttttcttaaccatttacatgtatacatgtattttttgcatcctcaaacctgaaaaggaccaaatataagataatctatagggccgggcacagtggctcacacctgtaatcccagcactttgggaggccaaggcgggtagatcatgaggtcaggagttcaagaccagcctgaccaacacgtctctactaaaaatacaaaaattagccaggcatggtggcgcatgcctgtaatcccagctactcaggaggctgaggcaggagaatcacttgaacctgggaagctgaagttgcagtgagcctgagatcacgccactgccctccagcctgggtgacaagagcgagaccctgtctcaaaggaaaaaaaaagaaaaaaaaaagataatctatagactgagttatttgtgaatataactgatctgctcgactatattttataactttctagtatttagtagtgtgccagaacataaaaagcacctcatactggttgaatataagtgagtaaacaaaaatatatgaatctctaatctacaaataagactatacacaataaattctgatcaatctttactagttgttttatatcatagtctagtaaaatccagtatcttaagtaaaagaacagatggaactaaatatgcaagagttccatcattcccaggcatcaagaagaatttgaaattacaactaagatagatcacagaatacaattaaaaccaaataaccaaaacatattttttaaaaaacaaacagcctgacactcacctacatcaacccccagtctatccaaaggcctttgccttctacagcagataacaaaggtaagaaaagaaaatttcaccaattcataacacaattttttttaatgcttttaaggccgggtgcagtggctcacccctatcatcctagcactttgggaggctgagac

SEQ ID NO: 19492 - DNA, 1002 bp, Homo sapiens
aaaaatcaagtaatctagggagaaaaaatgggagagggtatgtgtagagatttgagggaaacccaaaatatacacaaaatagtttatgacttaaaaaaaaaaaacgcaaaaaaaggtatgatgaggacaatacaaaactaaacctgtaaactaaacctgtttgctgggcgcagtggctcacacttgtaatcccagcactttgggaggctgaggcggatggatcacaaggtcaggagttcaagaccagcctgtccaacatggtgaaaccccatctcaaataaaaatacaaaaattagcccggtgtggtggcgggtgcctgtaatcctaactactgagctgaggcaggagaatcgcttgaactctggaggcagaggttgcagtgagccaagatcgcgctgctgtactccagccagggcgacagagcaagactcttaaaaaaaaaaaaaatggccattatctccacttaactggtgaagaaactgtggctcaagaaagttaagtaacttgcacaaatcagacctgcaattatttattggagagttgaagtaacaggtgcattagctggacagttgctcaaaatgagtccaacttaagtgataccaaaatgtcactgtattattatttgtaaggttacagaggagttttatttaccagaactatttttagggaatatagtatatgttttgggaaaataaagaatatataagttgtttggggtgccaatgggatcaagatccccttggggtatgctggatagctggctatgaaactcttcaaaagaggaagctttcctaaatggtatctacacattttcctgtaatactcaggagtagcaacctctattttctttttctataccaacaagaatgagcttggaaagcttcatccttaaatcaatgttaaacaggatttgaggactgtcaatgaagagggggccccagttgttctgagtggtcgtacatggtgtgatcctaaatctgcttaacttcaaagttagtaccc

SEQ ID NO: 19493 - DNA, 1046 bp, Homo sapiens
tcaagggttcaagaccagcctggccaacatggtgaaaccccgtctctactaaagatacaaaaaattagccaggcgtggtggcatacacctgtaatcccagctacacaggaagctaaggcaggagaatcgcttgaacccaggaggcggaggttgcagtgagctgagatcgcaccactgcactccagcctgggtgacagagtgagactctgtctcaaaaaaataaaaaagaaaaaaaaaagaaaaagaaaaggcagtaaagtttaggtgagctgtgaacaaattagctttggcaaaacatatatctctttctgttgaaccttcatgatatcatacagaaatgtaaactgtgaatagtggagagagatgatgagttttgtgcttcagaatgattactctaatgaaagtatggattgaagagatcaagattgtagatgagtctattgtctttgtcccagtggagggaggatatctcaaattagggtagcagcaactgagatggagatgatgggatgaattcaactctttttttttttagagacaaggtgtcacgctgacacccaggctgtttaggcagtggtgcaatcttagctcactgcagccttgaactcctgagtagctgggactacaggtgtgggccaccatgcctggcttattttttaacttttcgtagagatgggttctccctgaattactcagtgatatgatttcgatctgtgtccccaccaaaatctcatgtggaactgtaatcctaacattggaggtggggcgttggatcagtaggaggtgattggatcatggaggcagatttctcatgaatagtttagcactatcctccttggtactgtccttgtcagtgagttctggcaagatctgcttgtttagaagtgtatagtacttcctccctctctctcttgctcctgcctctgccatgtaggatgcttgctccccctttgccttctgccatgattggaagcttcctgaggcctcctcaaaagtggaaactgctatgcttcctttatagcctgcagagccatgagccaattaaa

SEQ ID NO: 19494 - DNA, 1035 bp, Homo sapiens
agtaatttgctcaaggtcatccagctaataactggtagagctggcatttgagctgatgcaatctgggtgtacagtatatgcttcaaccactattttccacctactccatgcctgacacatgctttcacaaaggcagtctcatttaattcttagactaactgcacaagataggttttattttctttttttgtttcacaggaagaaactaaagctcagagagattaagagaatctttgtggtcacacgtttaataaatgacaatgtgaggattcaaaaacagaaagggagatggaatagattctgactttcttcagggaagcagatcaccactttgttactgtatttgaaagacgagctgggcacggtggcttgtgcatgtaatcctagcactttgggaggccgaggtgggaggatcacttgagcccaggatttcaagaccagcctgggcaacatagtgagaccccatctctacaaaaaataaaactaacctggtatggtggcgtgtgcctgtggtcccagctccttgggaggttgagatgggagaatcgcttggggtcaagaggtcaaggttgcagtgagccttgatcacgccattgcaccccagcctgggcaatggaacaagactctgtctcaaaaaaaaaaaaaaaagaccaacgtgggtttatgagtacatttaattgacatcgtatagaatcagctctattttccccttgttctgaacttcactgcaaaacatttagccagaggagctcacccaagtaaatccctcaactaatcagttaaagaggggggaaaaaatctagttctcaagaaaagaaggcataatctcagttgtaagaccactatatggggacttttggcaactttacccagtaccttaacatctagtatgatgttaaaatgcatgctgcacagatgttaacagatacctattcagtacctagaatgacactgtgctagatgctgaagaaagagaaaagcagtgaaaggtataggaaatgaataataggttttgccatgacagtcattgctgtt

SEQ ID NO: 19495 - DNA, 1061 bp, Homo sapiens
aaaagagctgtaatacagccggtcacagtggctcacacctgtaatcccagcactttgggaggctgaggtgggcagatcaggaggtcaggagtttgagaccagcctgaccaacatggtgaaacccccgtctctactaaaaatacaaaaattagctgggcatggtggcacatgcctgtaatctcagctgctcaggagtctgaggcaggagaattgcttgaacccaggaggcagaggttgcagtgagccaagatcatgctactgcacttcagcctgggcaacagagtgggactctatctcaaaaaaaaaaaaaaaaaagagctgtaatacaaatagggctgaaacatatccctctgcttgccacattcccagcaacaagaagaaaagaactgcagccctttggagagcccggcccaggctgttgcgttgcctgctgggctgagtgggcagaacaaacccagtgggtgcaagcaatactcaggcagaaggcatcactggccacagaggtttctagctggcgaagcaacaccccaaggatcctgtgacaatttattgaatatgacaccaaaacagtaatcaacaaaagaaaaaatagataaattggactttgtcaaaattaaaaacttttatgcatcaaaggacactatcaagagtgaaaagacaatctaaagaatgggagaaaatgtttacaagccacatagctcatcagggattgatattcagaatatataaagaagtcttacaacaaaaagacaaaaaatagggtgggcacagtggttcacacctgtaatcccaatactctggaggcagagagaataataatacattattattattgcttgaagccaggagtttgagacccgcctggaatttgagacagggatgatccctccacctcagtgcctcccaagtagctgagactacaagtgcgcaccaccatgcctggctaatttttttgtattttttgtagatatgaggtttcaccatgttgcccaggctggtctcgacctctgaggctcaagtgatctgcctgcctcagcctcccaaaatgctaggattatagg

SEQ ID NO: 19496 - DNA, 1026 bp, Homo sapiens
gcgcgatcttggctcaccgcaacctctgcctcctaggttcaagcaatcctcctgcctcagcctcctgagtagctgggattacaggcacgcaccactgtgcccggctaattttgtagttttagtagacacagggtttctccatgttggtcaggctggcctcaaactcctgacctcaggtgatccgcccacctcagcctcccaaagtgctgggattacaggcgtgagccaccacacctagctaaaaattctttaataggtctctttaatgttttaagtagtcctagatttcccctgtgaaccatcttgaaagttttgccttttattctcagttctcttttgctggcttcttatcaggaaacaccacctgactgatttgagatgtaaagtgatggagtgcaaagaccacaggtctctgtattcaaaggtctaggtgcaaggtacaaccttaccggatatttcagagcttgtcttttataatttttgagctgagaaggtcaggtgagataaactgtatggactggaattctgatttgagatgtaaagtgatggagtgcaaagaccacaggtctctgtattcgaaggtttaggtgcaaggtacaaccttaccagatatttcacagcttgccttttatcatttctgagctgagagggccaggtgagataaaccctatggactagaattctgaaaggagagcagtatgtcaacaaaggaggattcagcaactgcctgatgcaatctctagttatcttcgtcctgcaccagcagtatatgatgctatctcatccaactccattcttcagatttgtcatctctcctttacttggataaaacctggctggaaacttggcttcagtcctccatatccatctgttttaggcagacttaactcagctttacatctttgcaaacttacccacgcacatcagcatccgagaaatttccatactctttgattaaaattgcagtaaaagtcacaaaggaccttgcttaaaatgaaaggaagtttctaggaactctaagctcag

SEQ ID NO: 19497 - DNA, 1034 bp, Homo sapiens
aagaatcgcatgaacccgggaggtggaggttgtggtgagctgagatcatgccactgtactccagcctgggtgacagagaggattctgtctcaaaaaaaaaacaacaaaaaacctgctttaacaatacgttatgggctgggcacagtggctcatgcctgtaatcccagtactttgggaggccggggtgggtggactgcttgctgggcaacagagcaaaatcccatctctacagaaaaattagccaggcatggtggcacatgccagtggtcccagctactcgggtagctgaggcaggaggatcacttgagcccaggaggtcaaggttgcaatgaaccctgatcataccactgcactccagcctgggcaacagagccagaccctagccaaaaaaaaaaaaaaaaaaaaaatcaaaactatttattatgaacattttctcctatttcatttagtattcaaataccaatggctgccaattacgccactgtatgtatataccataagatatatcacgaatcccttactgttagacattttgatttgccactttatcactgttatacatggagcgatgctcccagcttgagtttaagaagaattcagacctgccaggagcctctgtaaagagcctaggggaggccagacgccgtggctcacgcctgtaatcctaacactttgggaggccgagacaggcagattgtctgagctcaggagtttgagaccagccagggcaacacggcgaaaccccgtctctactaaaatacaaaaaagtagccgggcgtggtggtgggcacctgtagtcccagctactcgggaggctgaggcaggagaattgcttgaacccgggaggcggaggttgcagtgatccaagatcgcaccactgcactccagcctgggtgacagagcgagactccgtctccaaaaaaaaaaaaaaaagagcccagggcagactgcaagaagcccacatgcagggtgaggaagagctaggccagctcaggtcatcctagggaaaactcttagctgtccatggaacaggt

SEQ ID NO: 19498 - DNA, 1064 bp, Homo sapiens
agaaaagaagaaggaaggaaggaaggaagaaaggaaggaaggaaggaaaatctaagagaatagaaactcaggataatgattttggttttggggtttttttgtttagctttattttctaaattttctttgagatgaagtcttcctctgtcacccaggctggagtgcagtggcacaatctcggctcattgcaacctccacctcccaggttcaagcaattcttctgtctcagcctctccagtaactgggactacaggttcacgccaccaggcccagctaatttttgtatttttaatagagatgggatttcaccatattggtcaggctggtctcgaactcctgaccgcaggtgatctacccacctcggcctcccaaagtgctgggattacaggcatgagccactgtgcctggccattttttttttttttttttttgagacagagtcttgctctgtcacccaggctggggtgcaatggcacgatctcagctcacaacaacctctgcctcccaggttcaagcaattctcctgcctcagcctctcaagtaactgggactacaggcgcatgccaccacgcctagctaatttttgtatttttagtagaggcagggtttcaccatgttggccaggttggtcttgaactcctgacctcaaatgatccgctcccctctgcttcccaaagtgctgggattacaggcatgaaccactgcgccgggcctttttttttttttttttttttagatgtagtttcgctcttgttgcccaggctggagtgcaacggtgcgatctcagatcactgcaccctccacctcctgggttcaagtgatttttctgcatcacactcccgagtagctgggattacaggcatgggccaccatgcccagctaattttgtatttttagtagacacggggtttcgccatgttggtcaggctgatcttgaattcctgacctcaggtgatccacccgccttggccttccatagtgctgggatcacaggcgtgagccaccatgcccggcccatattttctaaattttctacagtaaacctttgtacctaataagaggca

SEQ ID NO: 19499 - DNA, 1352 bp, Homo sapiens
cttgtttgtgtccctgtgggtggacgtggttggtgattggcaggatcctggtatccgctaacaggtactggcccgcagccgtaacgaccttgggggggtgtgagaggggggaatgggtgaggtcaaggtggaggcttcttggggttgggtgggccgctgaggggagggcgtgggggaggggagggcgaggtgacgcggcgctgggcctttccgggacagtgggccttgttgacctgaggggggcgagggcggttggcgcgcgcgcgcgttgacggaaactaacggacgcctaaccgatcggcgattctgtcgagtttacttcgcggggaaggcggaaaagaggtagtttgtgtggtttctggaagcctttactttggaatcccagtgtgagaaaggtgccccttcttgtgtttcaatgggatttttatttcgcgagtcttgtgggtttggttttgttttcagtttgcctaacaccgtgcttaggtttgaggcagattggagttcggtcgggggagtttgaatatccggaacagttagtggggaaagctgtggacgcttggtaagagagcgctctggattttccgctgttgacgttgaaaccttgaatgacgaatttcgtattaagtgacttagccttgtaaaattgaggggaggcttgcggaatattaacgtatttaaggcattttgaaggaatagttgctaattttgaagaatattaggtgtaaaagcaagaaatacaatgatcctgaggtgacacgcttatgttttacttttaaactaggtcaaaatgcagatcttcgtgaaaacccttaccggcaagaccatcacccttgaggtggagcccagtgacaccatcgaaaatgtgaaggccaagatccaggataaggaaggcattccccccgaccagcagaggctcatctttgcaggcaagcagctggaagatggccgtactctttctgactacaacatccagaaggagtcgaccctgcacctggtcctgcgtctgagaggtggtatgcagatcttcgtgaagaccctgaccggcaagaccatcaccctggaagtggagcccagtgacaccatcgaaaatgtgaaggccaagatccaggataaagaaggcatccctcccgaccagcagaggctcatctttgcaggcaagcagctggaagatggccgcactctttctgactacaacatccagaaggagtcgaccctgcacctggtcctgcgtctgagaggtggtatgcagatcttcgtgaagaccctgaccggcaagaccatcactctggaggtggagcccagtgacaccatcgaaaatgtgaaggccaagatccaagataaagaaggcatcc

SEQ ID NO: 19500 - DNA, 3851 bp, Homo sapiens
ttgtgaggattgggatattccgactccttaagggcctggcgcacataaggtgtgaccttttcattcccgttgttatggaggtaggctctctaggaatctgggagtagtagctggggggcaagagcaaataaagagctcgagcttctgtggtctctggggagatgttcccgggaagcctgtctagagggcggagggcagctgttgagatggcgtggctccccggctcctgcgcccgcgtggctttcgcggcgggcgctgcggcccggtattggacagcctggcagggcagcgcggggccgaatccggctgccgtggctgaggctcatggatcactcttttgtggtagggccacatctgccagagcctggagtctgcgaaggccgggacccggttccccggcccacagtgggggtgtgcaaacccgagagaactgggtaagttggggtcggcttgcagtttggggtaccccgagggcggtgtacgtcggtaagattgtaacagtattactggaagacttattcgactgtcctgatgatacttgtaataggaagtgccgtcagaagcgataactgacgacgtctaatgtctatctgaccgcagtcgctgaaacctctacaacttagttgaccgtaactgccagagccctgccctgaattcctgtccttactccctctttaagattgcgtacccactgcagagtgctgaagacggggtagccacgaggtgagaggctctctggtgtagggtttaacatggaacgtagttttgtcacttgaatgcacggaaattggcgttttgacagttttctacgtttaggtgttttatacactttagggtaacgttatcatgtcattgcatagggtggaacttaaatagaaactggagatggctgcttcagccacagtcctaacctagaactgcatttaaagcaaactgataatgcagaaacaaactccttcgttaagaaatgtctccagtagcagggttagcttaagtttcaggtagggtctagatctgcggttggaacagtactggagggttgtgaggtgcttgactgctctgatgaaatcactaataggaagtgccgtcagaagcgataactgacgaagactactcctgtctgattgcagtcaagtcttcaccacttgctggttcccaggagtaaacttgtttgaacggtgacctaattgctatattcacctaggttgcaaattcgtgaagaatcagcatcatgtttggcagctgagtattggagccaggagcctgccatgaggtaagccttgctctatggggaggctagtggctgaccacgcctagctgtcaggtcgaatattggcaattggatttggttaacctaataccttgtaacagtgtagcctatcccagagatactgattttagtttccggtggcagtggagccagggtggattacctagaaagaggggctactctatttacctcttggctgtttagtctcgggcaaattacctgtctgctgagatgtagttttcctcagatgtgaaaaggaaaagtaatcttagctttgtgaagtttaaattgatatgactgaaatggagattacaactcccctgaggctgggcacagtggcctgtaatcccagcactttgggaggctaaggtgggtggatcacctgaggtcaggagttcaagaccagcctggctggccgacatggtgaaaccccatctctaccaaaaatacaaaaattagccgggtgtggtggcgtgtacttgtaatcccagctactttgggggctgagccaggagaatcgcttgaacccgggaggcggaggttgtagtgagtcgaaatcgtgccactgcactccagcctgggcaacagcgagactccatctcaaaaaaaaaaaaaaaattacaacctactgagaagctaattaagatttgtagtcctcaataatttacaaaaacttagaaaaattacctctaattaggtcttaaggggcttttgttaggatggacttaaatttgtaaagtcattaattgactgtcatcagaaatgcctgtcctgctctgcatctgcagtctctaaggtgtatgcgccttctccattcccccaggttttgagaacagagtgctgttttagagctggcagcagcatctcagcccaagagaaggtaagccttgagctggccaatgatcccttcaaccccatagtggaatgaataaacagctgatcttgttaaaactcgcttcaaaaaaaaaagatatcaaatgatgaaatcacccaaaatagctggaattaccggcagattgtgtagtggtgaacctatggttttctgaagatatctcttaccctgtgattgactgtcagttggtgcagaaagtgagattgaaatgtagtttctttgcaggttatattcccagaggatgtcagtcccaaggaccagtagctgccatcagtttggattctgaaaactaactggcatcaacactgggtgtagaaacatgcttgccttatgtatcagaggacatgctcagcagatccaagagatatatttggcaactttttctagaaaaggcacattgggtatcattcattacattcttgagtttttttgggtttttttttttttttttgagacagtcttgctgtattgcccaggctggagtgtggtggcacaatcacagctcattgcatcctcaatcacccaggcctaagcaatcctcccaccttgtagctgggactacagctcacagcacacctggctaaaattttttttttgttgagacggattctctatgttgcccaggctggtctcaggctcctgggctcagatggtcctcctgcctcagcttccaaaggcacaggccaagttgtagctttgtcccttgccatcatgcccaacaagaggttctataccttttaatgaattgactttcataaattggttatgttggtgggcaaagttctttaagctggaaattgtaaattcctcctgaaatgttttttcatgcagttaccatgaactaatactacaataaaggatggtcttgggtgtcaattcttgaaaatgtgtatttgaagaaaaagtaaatttcgcctactgttgtcagatattagcagtccagatattcgctctagcttgtaaacttccctgtggtcagcctaagctcttaaccccctattctacagctttagactgaaggcaaaagctcaaagcatttaaggcctcctcaatttcggcccctgctgctctgtgctctgttccttggtgtagctttgttccagctcctgcagcattgcaccattcctaaccacaaccttaacagcatgtagggccccatactctaggccccatcttgctgtcttcctgtgttggaatcttgcctaccaaggcctgtcaagagggtcctcccccatactgtttgcccacaaggttcaagagtgattggctcccagtcttcctggactgaactacttggatctaggggttgcctgttatttagaagagatcccttaactggtagggccctttcagtaggacagtatttgggtaaggggagggtataagatgagaacctttgctaagttaggttcctttgggagcctccagtttgtttctccctctccccagccatcttgttggatctgccaagggattggactccttcattgtcctaggtttttaaggttttaaagcccaccttctgcagtcggttttctggaatgtgttggtggattacttaagagttatggggaaagagttcttacggcctgtctaggtcagtgaagtcatactggcaagtgacaagaaggaagccaggtttgtcacttaccctgcatgctaaggacatcagagcccacatagaagtct

SEQ ID NO: 19501 - DNA, 1035 bp, Homo sapiens
gtggaggtgtcaggaacagaggagggaggcccacgtgctagagcagagctcgcagggtggcaagtgggagaggggagctcaagagactcaggcaaagccagatgaggagtttgggttttgtttaaactacagcacagcccctcactaaaggatgttcagtgaggtccgtgtagtatccaatttacctttggaacgagctctccggtcttgacacctctgcctataatctctagacccataacgtgggctgacatgaacttctcagatgcaaattgctctgaccaggatgtcctggtcagccctctggggtggatggaggggctgctcctaccaccagcctggggacctcccacccctgcctcatccagagagcctcgcttgccacatgggcacgaaaggggccttccaggtctctgggctttagcagggctcacccactctggctggctctgattttgttttgaggaaaacaaagtccaggtgttgaagtggtctgaggaaggttacaccatgcaatggactgaatgttggtatctccccagaattcacgtgttgaaacctaatccccagggtgatggtatttagaggtggggcctttgggaggtgattaggccaggggggtggagctctcacaatgggattcctgctcctttgcccatttcctgccatgtgaggacacaggaaggtgactgtctgtaacccagaaaaaggtccttgccagtcaccaaccaggctggcacccagatctcagacttccagccttcagaagtgtgagagataaatttctactgtttgtaagccacccagtctacgataatttgttacagccacctgaatggaccacaacaacccaggtatgcaccccctggccccgcctctacccagatggaaagggaagatcagaaggcaggagttcccgcccctcctcctggccttgcctggtcctgtctcacagggtctcacagtggcccttacccactccctggcctgcctctctctctgagagggtgggtccttctccccacacaggctgtc

SEQ ID NO: 19502 - DNA, 1062 bp, Homo sapiens
tatcaggtgacctgcaattattattattttttattttcatcttttaagttcaggggtacatgtgcaggatgtgcaggatgtccaggtttgttacataggtaaatatgtgccatggtggtttgctgcacagatcatcccatcacctaggtattaataatagcccagcatccattagctgttcttcacgatgctctcccttctttcacccgccaccatcccacatgcccctgtgtgtgttgttccccgccatgtgtccatgtgttctcattattcagctcccacttgtaagtgagagcatgcagtatttcattttctatttctgcgttggtttgctgaggataatgttctgcagctccacccatgtccctgcaaaggacatgtctcattccttttcatggctgcatagtattccatggtgtatatgtaccacattttctttatccagtttatcattgatgggcttttaggttgattctttgtctttgctattgtgaatagtgctgcaatgaacatacgtgtgcgtgtatctttatactagaattagttatattcctttgggtatataccaagtaatgggattgctgggttaaatggtatttcaggttctagatctttgaggaatcaccacactgtcttccacactggttgaactaatttacactcctatcaacagtgtaaaagcattcctgtttctccataatcttgccagcatcttttcatttttttgaattatagccattctgactgttgtgagatggtgtctcattgtggttttgatttgcatttctcagatgatcagtgatgttgaagtttttttgtttgttggctgcatgtatgccttcttttgaaaagtgtctgtttgtgtcctttgaccactttctaatggggttgagtttttttttcttgtaaatttgtttaagttccttgtagatgctggatattagacctttgtcagatggatagagtgcaaaaattttctcccattctgtaggttgtcggtttactctgttgataggttcttaatgctgtgcagaagctctttagtttaattagatcccattt

SEQ ID NO: 19503 - DNA, 1223 bp, Homo sapiens
tggtgaggggaagggacagaagaacccttgagagaagggatgtgggtggcctccagggaagtagttggagaggccagcagagcatacgcggtgcagctcagggccatggcaggcaggcgtcactgaagaaggcccgtggccataccctgtagacccctgaggactgactgcagaggccacagtggctgagttttgtttttcggttttttttgttttgtttttttttttttgagatggagtctatctctgttgcccaggctggggtgcagtggcgcaatctcggctcactgcaacctccgcttcctgggttgaagcgattctcctgcctcggcgtcccaagtagctgggactacaggtgcgtgccactgtttttccttttttattaaactacttacgttgagataatcgtgtttcccctgtggttgtaacaaataacagagatcccatgtacccctttgcccaggtcctccgatggtgaccttctgcaacactgtggtacggcaccacggctgggatactgactacaatgcagaaagcacccagtgtctccatcgccttctccctcccacatcaacccaaccccagccacccaggaatcctgctccatttccataaatctgacatttcaagaatgttatgtgaagaaaatcatacaacctggaacctttgagattggcttttttcacctagaattctctggctattcatccaggttgttgcttggatcagtagtttgctcctttttattgctgactcgcattccatggtaagaggggacacctaggctgtttccagttttggtctgctacgaacaaagctgctataaccattcacatgtagtttttgtgtgagtgtatgttttcattccctggaataaatatccaggagtgcagttcctaggttgtaggtagttgcatgtttagtttttttaaaaactgccaaactgtctcacaccagcagtgtatgagtgatagatatacttactttgtgacgttgccagcatttggtgttgtcaccatttgttttttttagccattataaaataagatgttcataaatagcatgaacacctcttcatgctatttatcttctgtagaaagtcttctcgtgtcttttgctcatattctaattggattgttttgtgttttcactattgagtttgagggtctttatatagtctaaatactagtatatagtctagatattagtcctttgcaaaagga

SEQ ID NO: 19504 - DNA, 1051 bp, Homo sapiens
agcacacaacatggcaggtgtgtttgtttcctgtggccactgtaacaagttgccacaaacttagtggcttaaaacaacacatctttgttctctgatggctctggaggttgagagtccaaaatgagtaccacttagctaaggtccagatgtgagcagggcagcttccttctgaggtcccgggggagaatcccctctccactgtttgcaggctccagtggccacctgccttccttggctcgtggcctcttcctgtcaccactacagtctcttgctcctgtcatcacatttccttatcctctttgtcacattttcctctgcctccctcttagatcagaatctggatgactttttctttcattttttattttttagagattgggtttttttttgtcacctatcctggagtgcagtggcgcagtcatagctcactgcagccttgagctcctgggcccaagtgatcttcctacctgagcctttcgagtatctgggattacagatgctccggtgttgagctctggggagttcagcagggctaagtaggacttgtgggggtgctgctaggtgtgaggtgtaggcgtgagaaacggggaaaggaagatggggccaccagagactgccctgatggatgacatagtcaccacctaggtatcagcatcaccccacttccagagcatttgtgttttcagtgtgaagcaggatcagggaatgtcattgctggaaaggacctggaagagccagccccgtcctcagttgggggcgatggagaagtggcttttgctccggttggggcagtgtggagcctggcactgcagagctttgaaggtttccctgactcaagtcagcgtggaagctgagcccctcaatgtgtagagcgcagcagacacgacgcctggcctcctgttcactgattcaaccccagggggaggtggggagacggaaaagactccttgtccttgagcagggtcgtcttgttggtgagactggttttgtgtttctcacgtgtgaggtgcagacaggcatggtgttgcagaccaagaccttggggcacgaa

SEQ ID NO: 19505 - DNA, 1034 bp, Homo sapiens
acacaagtgtgagagtgctgggggttggaagactcatgtgtgccagcctccaggtacagctagcctgtttcctccatgccaaggccttgtctcccttgaggcagagtggtgtggtggagcgagtactggactaagtcagaaggcccaggcagttcaggcagccacagattaagtcacttccactctggccatggggtctttgtaagatgaggaggttatgtcagatgcgctctggtgaaagtatggaaaaaagcattggtgacgtgtggagctaaggaggtcaggcttgtcaccaggagctggccctgtccccagccatgtgtccccatcagcactgctgggaaagcagctcagaccccagggccggcagccgtgagggtatcttgcagtggctctttgggagcagcggctgctatttttagtaagctgcctaattggaggtcctggtggagcttaaccagctcaccttgtgctttgatccttctgtttggccttctctttttacgtggaaagagctgaagttcatgccctgaccaaagcagatttgtttttgcaggagacggaggcttttgctgttaaaaaaaactgccccttcccaggcccctgctctgtctcttaagtaatttccagtgggttgtcagcattgatgttggttccttcctaataagatctcccccttttatctgctatatcaggacatcaggggtgggggctgaaaagagtattgaaaaagatggaagcattactctctgcaggaaaacagattggttttaaaaatgctgtcctacatcctgcctcagatgatggcccttcgcacatgatttctctcacttttgatgccctcactttattttaagccgaagaaccaaaccttcgagtaaagcctctttgttcctttttagcagtgagatatctcctaggatgggagaccaggtgttttctcgggaacagtcatcatttagctttttcccaaaggaaaggaactctgtgtgtccctggtggctctgggaatggcgtgtgagcccatttcctca

SEQ ID NO: 19506 - DNA, 1030 bp, Homo sapiens
ccaggtgggtgtgggagcttgtccagggcgaagtgtctgcagtgttgcagtgaggcacggggtggcctcaccaccatgtctttctcagccctgccggcgtccaacacagcagaggtgctcagtaccccgttttctactgagtgactgaatgggtgaaaggcaactggattcctacactcttggtcttttccagggagtctgtgtcttggtgtttctgctgcttcactctttgtggtcgacttgtagaagcccctctgcccagaggacttgatcctgggcaggcagcagcaggaacacaccatgcctggcgtgggcagaacctgtgatcttgaaagagttgagcctccaccacttcagagagagggcagcaagagcgctctggagcctgccctccacagagcttggtgctttgagacctggacagtgcccaccagacagaatccacatagtgtttcctctcctccttccagaaccggatcttcctgagtccctcagtggctttgactggtgaaggctggccaggcctgctggagagatccgggatgcagagctgtttagtctgggaggcaggtcagtctcagaggatgggtgggtcagggctgaacacaaggaaaaaagacgccacacatggaaggaaatcaccactatgccatcataactgaccaactacattttcccaaccttggaaggacaaggtaggagtggcaggctagaaggataggtcttcaaacatcactgttgatgcaaagctcccataacaagttggatttctgagaagcagattgggaattcccagtgggagagaggcagatgagagcatccaagataacgacttctttcccagatgctggccttcctggaatgctggcagaggatctcagttcttaataattattttattgggtggggaagtctttggaagcagaaaataagccaaagaggaacttaatgtcatacccctttctcaaggaaagttttatctacaacacatttggtctattcttagcttctgctcctgtcctttggaaac

SEQ ID NO: 19507 - DNA, 1030 bp, Homo sapiens
aacttgaggctgcccttgcagacggctcctggccctgccctgcagtctcttcttccactgattggtatccctgcctgccctccccagctgagtccatcactagtggtatagctctcaagggtctgttttctatgaagacagggacagaaatgccagagaaaggtagctggggtataggtcaggtacagaatttttgaaaagaaatttgccagtagctgttctcaccctggcaaccaccattctactctctatgaatttgagtactttgggtgcttcacataagtggaatcatacagtatctatccttttgtgactggcttattgcacttagcatagtgttttcaagattcatccatagtatagcacataccagaatttctttcctttttatggctgaattatatggcagtgtatatacatactacattttgtttattcatctatctattggtggacactggagctgcttccatctgttggctattgtgaataatgctgccatggtacgtgggtgtacaaatatctgttcgagtccctgtgttcagttcctctgggtatatacctacaagtggaattgctggatgaaacagcaaatctataaagtccagtttaattttttgaagaagctccatactgctttccagagtggctgcaccacggttccagttactccatgacctcaccaacactgacagttttctgttttttaacttacctctaccctagtgaatgtgaactagcatctcattgtggctgatgtgatttgcattttcttttcttttcttttctttttttttttttttttttacttaagagacagggtctcactctgttgcccagactggagtgcagtggtgccatcacagctcactgcaacctcgaactcctgggctcaagggatcctccctgctcccaagtaactgggactataagagtacaccaccacatctggctatttattttttaatttttatttttagagatgaggtctcactatcttgcccaggttggtctcaaacttctggcccca

SEQ ID NO: 19508 - DNA, 1107 bp, Homo sapiens
gggaaagggcctgccccgcatgcatctgcagctggggagaggggtcagaaatgttttgcaggtagtgtctggggccaggtgctgtcagcctggggctcagcagaggggcagaccctgctctcccctggaatgtggcctgggaaaccagcctctggtgctccccagggccccaaggcaagggccagagaggcacagggagaatctgcacggtactcagctgcctttggattgacccttcggcttggtccattgttttcaagagcccttatcagccatcttagcacaagtagatggccatggtctctgagtagaggatgtgccccctccccttgcagaagacggtggcccatgatgcccagagctcctcagtccactgagccctgcctctctgccacagggtagaagacggaacatgcccgacactgtcctccctccttcccaaacattcgaggaaagttgttgaacccatcgtcttctgaccaccacccttgcttggtaggagagtggtgatgtgcactgagaagcagcaggcggcacgggtgtgccatcccgagcctgagctcgagtcccgcttcagctgtgcagtatcgtttgtagtcttgtgacagaagggggtagattatcaccccaaagggaaatctctaggccaaaacattaggccacttctcattcccctcccctagcccctggcaaccactcctctgctttttctctatgggttggccttttctgaacatttcaccaagatggagtcacacagtgtgtgtccttttgtgactggcttcattcacttagcgtgatgtttccaaggtttgctcatgttggagcatgtgtcaggatttcattctttttatggctgaataaaataatattccattgtatgaatattgcattttgtctatccatttgtccactgatggacatttgggctgtttccaccttttggctatcgcgaattatgctgctacgatatgatttgtgtatatgttcgagtacctgtcttctgttcttttgggtatatatccagtaatcaacttgttgggtcatatggaaactgtctgtaattttttgaggaactgctaaagttttccacaatagctacaccac

SEQ ID NO: 19509 - DNA, 1037 bp, Homo sapiens
ttctgtctcccacaatcttaatccagaaccatatgatcaagaatgtcaagggcctctgaagaaccctcgtggtacagtcgaggagacccagggcctagagacaggagcctggccaggggcaccttctgcactttctggctcacacctgtttctgctgttggccgggcagcacacagccgaggcttcctctgcccaggtggcttccctaggaaaccctcaccctttccacaggagctgggtcccagggagggtgtgggtaacaggtgggatggatgggagtcctgggtctccagggcaagctggggagtgtctggagcagggttggttctaggaccagcacatagaggtatgtgttgtaccatgtggtattaggagagggtgatgtttagcatttggactgcctccagcaggcagcttaagtcctgccagaagtcctcactccatcccaagcccctctcctgggtcacttctctgctctcttctgttgcatattcaggcttgccatacccatgcagcttgggtagacaagatcgttaatggaccaaggtaccgggtgcacatgccatctgggccctacgtgtgtggtggctcagtggcgtatccaaagccagaataagctgcctgacgctcttccccttcccctcgccctggttgtgggccacgttagttcgtgtccaacaggcaggttctcacgtggcataacctcgtgatccgccctcaccttcccacaagctgggatgctcagctgcgtgagggagtcaggtgtggcctatgcaccctggggacaagtgcttttgcctccttctcccattcctctgtctcctgccctcgctgacagcccccttcctctgctccctctcttgcctccctctgtttcccattataactcctcttcccagtaacctcatccctaggctctggagcgccattctgggtctgagctctctggtcacatcaaagctggtccctaagaaggtgcagacacttccaccaggcagctgggagctgggtgggttggggacagtcccacccagtct

SEQ ID NO: 19510 - DNA, 1067 bp, Homo sapiens
cgttcccccctcgttttgacttcttacaggtagagattagttcttcctgttactctagaggactgactacactttccacaggaaaatgtttggatgtcaccttgctgacatctcccgagtgttaccttccttccttctcctcctgtcttagaaggaagtggcatcatttacctacaccttgtgtcctgcgcttgtttaggatttgttgtcaagactgcgtactttttgttttgtgaaacaaacagctgcaggtgctgtgctcctcccgcctgtccctcttcctggcgctctcttgtcctttagtctttgttttgcttcttagtgtgttccattattcagttttgtttggtttatttctcctagaagctgtttggttaaagctgttttctgatgttattgtccatgttttctgtttacctggaagcagctacttactaaaaaaaaaaaaaaagaaaatttgttggatttttttaatgggaaaaaaaaataaagttgtacaaaggataaaagccaaagccatcaaggagctttctgtggttgttcctggccagaggtgtgacactcagaactgggaggcccgagtgttactaaccagtatttaatcggtttttttaagactgaagtggccgcctccccatcgggtgcctggcagaggctccatagagtcaaccaagaccttcaaagtgagcttgaagcccagtgccagcgccaggagctgattacacaccagattcagaccctgaagcgtagctatggggaggccaaggacacgatccggcaccacgaggctgagatccggagccttcaggcacggctcagcaatgcggccgctgagctagccatcaaggagcaggcgctggccaagctcaagggcgacctgaagcgggagcagggccgggtccgcgagcagctggaggagcggcaacacagcgaggcggcgctgagcagccagctgagggctagcgagcagaagctcaagagtgctgaggccctgctgctggagaagacgcaggagctacggggcctggagacacagcaggcgctgcagcgggaccggcagaaggagg

SEQ ID NO: 19511 - DNA, 1027 bp, Homo sapiens
aacaagcaggtctgttctgggtagagctgggtggggtgggggacagtggagctcccccttcccttgagctttggagggagcctcaagctgaccagcccatgctcagtccccagtctatcacaccagagtctccaggacagtgccagagtgtgcctgagcctaagctggcgacttcccagtagatggggtacagcctgcagtttcacgttgctcaggtttttggttgaaactggtagaatcaggcagaccctgagctagagcccatcccttcagcttccagtttctcagtaaagcctgtacctgcaccagctctggcaagggtaagccacagggagtcagcagggctgagtgtgatggcgacacttagcgtgaagagggagataagtgaagagccacagcactttccagtcagtactggaatgcccttcatttccagtcattctctgaaaagtgctcttccttttcttattcagaaattaaatcattgaggaaagtctgtaagaatgagatgggaaatactctgtcccctagttagtaagatctcattcatctctggacatacagatttaagctttagcaagattccacgtgaacagagtattggttttatgttttgaaaatcttactagatacgttggcgtgttcccacatccccataacactcacaggcctctgatgagggaatgccagaaatgggtctgagggcagcaggtgctgcggaggcactgtaggagcgaggccctgtcccgggacacccatcctgctggggattccctggagcatctggtcctcctcagctgaggctgtcaggtgaagaatctctggagctggatgtggacaaatccattcacaagacaagacacggggatgggcagtctccttgctcattgcactgttttccctggctggattcgtttgatcactgcttctctaaagagccctaagctcagaatttagctgcttaaacacatggtcttgtctctctgatttttttttcctttttcatccaagtaattttgtgaagggg

SEQ ID NO: 19512 - DNA, 1033 bp, Homo sapiens
caagtgactgagactatcccagaaaactatgcagctagtgaaactagagtacaactaagaacattttcagacctccagtgtggatgacctgggcataatctcacaaactgatgggactgcaaggattgtaaactgaaattgacatgaatatactctgttggatcagactaaaaaaaaaaaattgggcccggcacagtggctcacactggtaatcccagcactttgggaggccgaggtgggcagattatgacattaggagttcgagaccagcctggccaacatagtgaaaacccgtctctactaaaaatacaaaaattagccgggcgtagttgtgggcgcctgtaatcccagctactcaggaggctgaggcaggataatcacttgaacccgagaggcggaggttgccgtgagctgagatcgcgccattgcactccagcctgggcgacagagagagactctgtctcaaaaaaaaaaaaaaaaattgtgggttgctttaaaaacctatagaactggctgagcgtggtggctcatgcctgtaatcccagcactttgggaggccgaggcaggtggatcacctgaggtcgggagttcaagacaagcctggccaacgtggcaaaaccccgtctctaccaagaaaaaaaaaaaaaaaattagctggacttggtggtggcacacgcctgtaatcccagctactcaggaggctgaggcaggagaatcgcttgaacccgggaggcggaggttgcagtgagccaagattgcaccattacactccagcctgggtgacaagagcgaaaactccgtctcaaaagaaaacaaaaaccctatagaaccaacatagtgctttaaaatatggcatcattgcattggttcattccaacaacctaggaatattcaacagtgtgggcagactgttaagggcatatggtactatcagaattttttgtttgttttgagacagagtcaagctctgtcacccaggctggagtgcagtggtgtgagcttggctcactgcagcccccacctcccgggttca

SEQ ID NO: 19513 - DNA, 1064 bp, Homo sapiens
actcatgggagtcagcttctagcttggtggtgttgagcatacatccaaggcaggaagaggtggctggggaggagggaagagccaggaaacagagtgcaggtgtcttctgagggatggggagctagtgaaactgtcaggctggaagccagtcaagacacagtactggcgggtggagatgagggctgggaccatgtccggtccacccaggtggcgctctctggccctgggtcccttcctttcctataacttccccaatgatccttttattctttgtttacttcttgcacaggggtgagtaaggaggtaaaatctgaagtagtgaatttagcctttcttgttctcataaagaattcagagtttttgaaaaattatttaataaaagtaacaactgcaagtttagaagtacagagaaacgtaaaatggaaaatgtgttccttcccccaagtcccctcacctgtagtaactgctgttaatactttcctaagttccttctgggaattacatatgaatgtcatttcaaaaatttatacaaattgagatcacgtcgtacttgacttttttcactgattagtctcttttggccacctttccatactgcacataaagatctacctcattaaggcagctgcagaaaattgcatcttgtggatgcagcataactgatggaactggttttctgttgatggtcttctagctgtttttcttattcttgctattaccagcacagtgctggggttagcatctttgtgtaggagtaagtttatgatcagataaatcccagcagtagaattgctggggcatagggtacaaacattttttatagtgatagttatgctaaatttagagcactacgtctttttagctaactcttttccaaaattcagtccttgtagactagactgcttcagttaacctaaaatggcctataaatctgccacccagaaagcattaaacaaaaattaaagttgtagacggattctacaagtacccatggatatgaaatggaaacagggcctctcccttcactcctcccagctcccttgcaaagctgtgtaatattccac

SEQ ID NO: 19514 - DNA, 1094 bp, Homo sapiens
ggaactacaagacccccggggtctttctgagtgcaaggctgaaatggacaagggctcctcacgggggtggagggagccggagcctgccttgtgttccttttttgacttgtgacatttttcaaacacataattaaaaggacttatgctctgctgtctcaggacataatgctttttgtactgagaaattcatagtgggatggctctcagatagttgagaggaaaatgtttctctcagtctcttcagacacaaccacacctctgctcctcactccctccgccccagcacacacacccgccccagcacacacacccgctgaaccagtgtggaacaggaactcctctcccggctggcctcaagggcagtttgcctggcgggtcatccctgggctgtccttagttgccttttatttttggaggggggaggtggggggtgccttttggtgactcgaggaggttcagtcctgtggggagccgccctcaccagagcagggttgaaatccttctaggacaattttgagtgtctctcacagggctgagcgtcctctgaaagccaccaattacttggattactgggtggccggcatttatgctaagtacttttcaaacatcacacttaatccccacagtgagcccatgccgagggtgttctctcttcccggggtgaagaattagaggcttggcaggtgtcacccaccaacaggtttgcagtactagtggcagagagattggtgttctggggtgccttagccatgagacggagacagcaaggctgaagggggatggggctctacacctggccaggagcacttcctggagctagaggggagcagaggctgaggagttagctgtttccagacagggtggcaccctggagtgagcgggtggtgggggcgcgccaggatggtcctgtttccagatggggtctcaggctctttccccagggcctgactgatgcctccaacagtccgaaagtttgcctgggcccacactgagtctggtgacaaaatggttaggcacagttccagtggcttttacgctgaagaattcagaacattctctcagaaaatgaggccttttgtcatctaacccaaaga

SEQ ID NO: 19515 - DNA, 1050 bp, Homo sapiens
catattccggccttctgggaaatgtagttccccgtcaccgcgaagtgcctctttatctgggggctcgcgacagcgtctagaggagccgagaactacaagtcccagtgtgtttcgccgcagagcctgccggttccgctgcagctacgtagcagtatccccttggatccggcctcccgcccagtgcctttggtcgccggctgccgcacccgagcctgtaactgacctggcgtccctgcccttgcctggcggcggtggggctagaggccgggggccgcgggtcgtagctataagcagcttcccgcgcagcctcctgcggacttggacttggcccgggtcacacacgcccagggccccacacgcccagggccccacgccctcttctgaaattcgctttactctgggggcggtgcgcgacgagcactgcctagagcttcccgcccccgcggcgcccaggctctttagctcggccaaagacccctcctccactcattttttccttcattcattctctcattcactctcgagtattttctgaaccagactgtgcgctgagggtacggtagggaacaacacagagtcccccgccctcgcttcctcctgactgagataaaagacaaaatgtgaataaagggttataatatggatgagtactgtggtggaaaaaacggggtgggtcaaatggtacggaaggatgctgtcttagaatgtgcaggggaggtgccagatgtgccaagtgtgagggcagggcaaacaaggcaagacgaatggtatgtacaaaggcctggagacaggacgggcacctaaggaacagagaaaagaccggtgagctgtggagtagtgatggagggggtcaaatggagaagagtttagacgatcgggtcccagaagaaccccttttgtaggccgggtgtggtggctcatgcctgtaatcccagcactttgggaggccgaggtgggcggatcaccagaggtcggcagttcgagaccagcgtgactaacacggtgaaaccccgtctctattaaaaatacaaaaaatagccgggtgtggtg

SEQ ID NO: 19516 - DNA, 1057 bp, Homo sapiens
gcttctcttcctgcccctgcccccctccattctccatacagtcctcgctctgctcagggtcaggcccaccccaggtggggggcagccctcgctgcagactgaatggtggcccctccctgctgaccacacagctgggttttcagaggctttcctgggacgtggccctcgggatctagaaactggaaaggaatcttctagtttcccacccctccccctcttgacaggcaagccggtatattcggggcccaggagcaaggaaaagtggccttttgcgtgacacagaagtggacacatcattctgatctcagggcaggctcagccccataactctggcaaaagctctcacaagcaaaagccttggagaggaggagaatgtatcaaggtgagatccaggccccagaagccaactgtggagtgggcaaaataggacctttcccaccagcctagcatccctctggcttctgtggagataaagggaactcaggggtactggagctgcctttctcttccactagactgtggggctctcataggcagggaccctgtcttactcctctttgttttatttttgagacagggtcttgctgtgtggcccaggctggagtgccttggcacaaacacagctcacttcagcctcaacctccagggctcaagcgatcctccagcatcagtctcctgagtagctgggatcacaggcgcccgacaccacacgtagctaattttaaatttttttttttttctagagacaggggtcttgccatggctggtcttgaagtcctgggctcaagcgatcctccctctttggcctcccaaagtgctgggattacaggagtgagtcactgcacccagccttactcctctttagactcccaagcctagaccaattgctttcaaattcttgcccgtgacctatagtaagaaatacatcgtaggtaactacacaggtcacactgtatatagctgaaacaaaagtttactgaaataactcccttactgtgtctgctggtctgtaatcctttttgttcttgtgtatttgttttttttttaattactgatt

SEQ ID NO: 19517 - DNA, 1051 bp, Homo sapiens
ccattccactctgcccagaaccttcgtctggcttcccagagggcccaagtccttgtcttcagaggtcctggctggggagccttagagcatggtcttccctcactccaggcttctcgggtctccctattggggactgaccgtgggagcagtgagccactgtgcaccagggcagcccggctcctcggggggtggcccaagcagtcagggcggcaggcttgatgggccagggcctggggactctgccatggtggaccattgtgcccttgcctggcttgccaggaaagtggagtgcgtgtgctcacccttgcttctgaggggccttcctgaggcagaggctgtccctggacacccagtgctgttgaggcagctggggacactcagaccatggtggacaaagacttgaagtctcgtttcagccctgcacaaggtgtgaccttggctccagcactgctccctctgggcctgtctctttctcagcagaatctgggactggccacatcatctccaggggttctagcattggacgcctgaaagtggacaacatggcagtgtgagggggctctttgtggtggggtggtcagaatggccctccatgtggggggctctttgtctccccagggcagtccttaaccaccagccagcctccccaggcacccgtgccgggcagtggggtgtgtaaaggcctggcacacacagacaggagttccgatctcaactccatcctcatgagctctgtgaccttggtgagtcccttttctgtgtagcctttaactctcatctggaacgcaggatatgcatagtcctgacatcaggacgttaccatgagtagtaagtgaaactcccacttcaggtccttcgcctggtgtccagggcatgggaggagctaatacgtggcctctgctgcttgtgttgttattggtggtggtgtttgagatgtccttagagatgttggccaaagtttccagttccccaccctcccaagcccgtggggaaattgtgcttcctggtggtttttgggtgggggggccgggggagggtcatgtgaccagtt

SEQ ID NO: 19518 - DNA, 1048 bp, Homo sapiens
gtagagacgggtttttgccatgttgcccaggctggtctcaaactcctaagctcaggcaatccacctgcctcagcttcccaaagtgctgggatcataggtgtgagccaccgtgcaggccagactctagctttcattctgagtgagctggagactgcaagaggcaggctccaagctgacttactatctcacaggctccctcaggagttgagggggccagacagagcttgaaggggagtagaaggctcctggaggctctggcagacctcagaagctgcagccacatcgaccaagctgaccccacccaccatctccaaggaatgggttaatgggcaccccaggcctctcaggtctctgcctctgccttgctcctcctccttcctcctgctgccaccctctgatggtgcttcagcctgtgccatttttctgggtcctctccaagtgtatattgaccctgaggtggcagcaggaggggaggcaggccccctccccaggaggagacccccttgatgaactctgagaagctggttgcttagcaagcccttttttctccaacaatacttgtgctaatcagcctagattgaatgagcaaggaattggcttttgcaccttcctgtcctctcttctcatatatatatatacacacacacacacacatatatatatatgtacatttttttcccttagagacagagtctcactatgttgcccaatctggattcaaagtcctaggctcaagcaatcctcctaccttagcttcctgagtagctggaactacaggtgtgtgctagagtgcctggctagggactccattctagaatcatggaatcttaggggtcccctgggttgcatcttgactcagtgagtgagtgggttactttttcacatccctccttgtacacctcctgtgactcctggcagctcactctctttctagcgactgagggcctctggacaaggtgagggggacagagcaatggtccagaagttagaagactgtggtcccagtcacaggctgggcaccataagtggacaccataactgacccatc

SEQ ID NO: 19519 - DNA, 1033 bp, Homo sapiens
ctggaatctgtgaagggtactcactgagcgacctggaatctgtgaagggtactcactgagcgacctggaatctgtgaagggtactcactgagcgacctcaggtgagtcttccgacatgtcctggccctgatgttctccatgctccaccccacccccattttatccaggggaactgttggctcaaagaagagaaaacttgggcttggtcaggcttatgggaggagggcttggtttaacttcattgttccatgcattcactcactcattcattgaacaagtgcttatggaatgtataccaggaaccattccaaatacggaagatacaccaaggaacaaacagacaaaaatacctaccagatacctaaatatgtaaattacatggtatattagaaggtagggaacagcattccaggcagatggatcaacaagtgcaaaggtcctaaggtgagagtgtgcctgctgaattcaggaactgcaaggggcaatgtgagtggggcaacaggctgggactgagggcaggagttggtggggacctgattgtgtgggctgtcatcaaccacctgggggactttctcctcctcatcactcagaaactgaggaggggagggaagacattccagccaggttggtgatccccagcgggcatttgggcttttccgttgccaccttaatggtatacacaatgcgcatctcctggttcactcagcagcctcaggactgagtgaccctggtccccaagacagatattgaagacagagactaagcagtctgacattttaaatatggggagccccgagtggggcggggctgcccaggaccttagggattcacttctggtagggagggctgctaccaggcttcagggaatgccagaaaaaaggtgcccgaggcccacctggcatgtaatgatgggcaggattggctgtaggatgtatagagactttagtatgggcagggttgggggttagtaggtggagaagggagattgggacatcattgagcagcaaaacccaagtgtgacaggtggtcggtg

SEQ ID NO: 19520 - DNA, 1048 bp, Homo sapiens
cctgctccccacccttcccacacacccactcagctgcaggcctggccattaaatgtgggtgtctgacccataggttggaccatgagaccctagtggctgagggaggcctgggtgaggctctgggaggcaggactgaaaccagcaagggattcactgctgctcatgccctatggcacaacccccttatttatggggctgccttcccttccccagacctcgagtttccgttttcaagaacctttttcttcctatcttccttagggcccccagggcctagcacacagcagtcactcacagtgtcctgtatttgtccagctaaatggagtgaatgaatcagtggtgaatgaatgaaaagggaaagtttctcaattggaagcatctagcccttgtggttttttttaaacctttttgaaatatatattgtaaaatagcattcacagaaaagctgaaaaaaaaagagaaaaataaggttattgacagtcttagagggctctgacaatgttagtattttgatgtagttcttcccagtccttttcgactcggtggttggtttgttttttaaagactttgtcgtcattctctatattcagatgtatatcctgcttgctttgccggcataatgtgagccttttcctgttttgtaaccaatgcttcataaacaccatggttaatgtcttcaggcttttccaatcaagtggatgtaccataatttacttaatattccccttttgtccaacattctggatgttcctgatgaatgatgtagtggatatattttgtatagcttttcttgatacttaaaatgatttgctcaaaatgccactgctgatgccgaaggctccgactgcctgcagtgggagaaacggcttctctagttttccttggataaatgggacactatttttccttccccacaatctagaaccttccatcagagccgaaaagagccttggcaatgaatcacctatctgacctccctcctttgacagaagaggaagccagagcccagagaggggaagcgagtcccaaggtcacacagcagttgctg

SEQ ID NO: 19521 - DNA, 1071 bp, Homo sapiens
ttgtttctagtcaagcactggctagttggggggtatcagacaaaggggtccacatagaaggcaaactgaagggcatgttcaagtgctgttcacgcctgcctttagcccccaacgaccaaaagggggcttggcatagcgagaccctctctctacaattttttttttttaatttagccaggcatggtggtgggtgcctgtggtcccagctactccagaagctgaggtgggaggaacacctgagcccgggaggtcaaggctgccatgagccaagattgtaccactgcactccagcctgggtgaaagagcgagaccttgtctcaaaaaaataaaaagttggggggatgttaaggaggttccagttaattgtggctgattctaaattgggaggcctaacaaatggtacttatcctcccgtgggagcagaccagggctaaccaaggccgctgggaatgggggtcatggagacagagccccttttccctcccacccacctgaaggctccaagaacttccactgcagaggtgtcagggacggacctggtgcagaccagtgggcccacacctgctttcctatgtgcgggtcagagcgtgtaggtgtattacatgcctgcctgtgtgtctgcgtgtgagctccttggacacacacaggggcacatatctgtgcttgcatgtttgtacatctaagtgtgtgcgtatctgtgtgttctgacaccagctcgcgacaccagctcgccctccacaaagctatttccaggccccattccccaagaacagccatctctctctcctttcccacctgacatggggcagggaggagagaatctgtttgaaatctcaacaggacatgggctttgcacctccagagagcaggacttgcttgtgtggacagaggtgacatagaaaggtttcagtttcatccaaatagaaacttactttttttttttttcgagacggagtcttgctctgttgcctaagctggagtgcaatggcatgatctcagctcactgcaacctctgcctcccgggttcaagcaattgtcctgcctcagcctcccaagtagctgggattacag

SEQ ID NO: 19522 - DNA, 1207 bp, Homo sapiens
gctgattttttttgtatttttagtagagtcggggtttcaccatgttggtcaggctggtctcaaactcctgacctcaagtgatccacctgcctcagcctcccaaagtgctgggaatacaggcgtgagccaccgtgcccagcccaaagatgcacttcctctcattcagaagtgatttagaagtggcctgggctgctccaggaggtagtgagtgccccatcttaggtgggtaggtgtgcaagcagatgcccaacctgtgccttcctctcttttgtggtcccttctaagcgcaaagtgcctagggctgtgtatctcctggcggcagttctgaggtggccctattttgccaacccagcctggttggagggactgacagggcttctgcccctaggtgtcccctgaacttggcccacaaaaggcctgaggaatataggggactgtgattgtgtgtgtggtgtgtgatgtgtgacagtggacttgtttgtgtatctgtgttatgtgtgtgcatctgtgtatggtgtgtgtacttgtgcgggtggggcttcaagggttgagtgtggatatccatgttgtgagtgtgcattgcgcatggccctggaggatggggggacatttctgggctgtgtgggtattgactgtgaactgtgagtatgtgcacttgggccagtggaggtgtttgtggctagaacgtgtctggagggaactgtgctgagacccccaccgcctctgtcctggttcattccttcccaccccaggctcctctcatggcccctgcccccaggtcagacctgggaggctctcagtcatcccaaactctgaccattcatgctctccctcccagagaccttggcacctgccagcactgctcttgactttgtccttgctctgggataagagcaggcccagcagatggccgagaggtcccaaggaacagaggaacaggcggggaggaggcccagtcactgcttagcttctctgtaggagatgtagaaggaagtgggtctttgtgtttctgcagcatctggaccagatggagagacctttctggagatggcatgcacacttccagataggagctggaacatttccagaaatggaatgtttttagaaatgagacatggtgtttctggagacaggatgaggacgtttctagagaagagatgaaaagcatttctggaggaggggcatttctgaagatgaaatgagaaca

SEQ ID NO: 19523 - DNA, 1037 bp, Homo sapiens
ggtgaaggcgggggcagaggactccagggaccagcaggaaactgggagaagccatgggcttgaaatgagcctggggtccacccctccgtgagcttctcaaggtggctctgaggtgctggggtaaacgtagcaactgccagcttgcagctgtgtgtgtctgagctcaggcaacccaggcaccacacaggaagctgctgtactcactggaccctgatgggctgcagagggccagagagtctacttgtgggcccttctgggtgtcagtcttctccatctggggaatgggttggcttggtgggagttttcaggcctgcattaccttcaaagggctcatgctgcaagcatgggctgtcctccctgtttttataagtacacgggccccagccttacccagacagcccagcacgctgcccgtagtatcctggggaagggcagcagctgtcatcagtgttatttctgaggtgtgttttcctggcaaccaggaaatttctgtcagtgggaacagcctgcccaaggcctcctccacccctggggaagacaagttgtatgacaagggagacagaggcaattcaaagtgaagaacgggagtgaggccgcctcctccgtgcatattgctcacacactggggcagccacgtgcccagtaaaggctctcttgaaaaccgtggagataggagccaagctctgcaaggccctgactagctcacctgacccctggcatctagaagctcacagcctattcttggtggaggtgtggctatggctgccctccaaggaggggaagacagagatggctggacaggatgggacaagccagcccccaggagctggggaagcgaaggtgggtgcaaatgaaaacgcagaatcccatttgcagtccatttgcttagcagccctgaccaggagggagagaaagaagagggcagagcagggagagatggggagggataaggatacagagagagaatctggcagccaggggtcagggagcctttggccgtaaggcctgggatgcctgctgcttactgaggctgtggc

SEQ ID NO: 19524 - DNA, 2950 bp, Homo sapiens
gggcacggtgggtggctcacgcctgtaattccagcactttgggaggccgaggcggacagatcacgaggtcaggagttcgagaccagcctgaccaacatggtgaaaccctgtcttactaaaaatacaaaaattagccgggcgtgatggtgcgcacctgtaatcccagctactcaggaggctgaggcaggagaatctcttgaacgcaggaggtggaggttgcagtgagccgagattgtgccactgcactccagcctgggtgacaggttgagactccgtctcaaaaaaaaaaaaaaaaaaaaaaaaggaaaactgtagaggcacataaacaggtcagagttcctgtctaggcttccctagaggtctttacttttactagtgtaatctgagtctttgactctgtttgtgggcatttacatacacaattaaatctttactgtgtacctactgtgtgctgaaccccgaggatttcagaccttgagccctgctgttaggggctctcacagtcctggtggggagactgacccctaagctgataaatgacccctccatggggagtgggcctgtaaagtgatgatggaagagggtccacaaaggagggaactaactgtgggttggcaggacagggaatggggatcggggaaccttgaagggacatggagtgtgaactgggactccacagagatcacaagtttttaggtagaagaaaggagagggaaaagcttggaagagcatattctaaggaaagggaggtatttgggatgtgctgactttggagtccctgtgggatggccatgatcaacccactgtagggagccaccaaggggttctggatcttggatgccaggccatggagtttctgttttattctctaagtcagggagccattgaaggcttttgtgtgtgtgtgtgtgtgtgtgtgtttgtttttgtttttgttttttttgagacagggtctgttgcccaggctggagtgcagtggcacgatctcggctcaccgcaacctcagcctcctgagtagctgggattacaggcacgtgccaccacgcctggctatttttgtattttttggtaaagacagggtttcaccatgttggccaggctggtctcaaactcctgacctcaggtgatccacccgccttggcctcccagagtgctggattataggcatgaccaaccacacccagccctgaaggcttttaagcagggaggtaagtgagctggtccagcatgtgtttttaaaaactctttctccagcagagcttacagaagggtgagcagggtgtacccggggggcttgtgtggagtccaggccaggcagggacggtggccagcgggtggaggaagccgtgaggatgtggccggaggagaggggcaggcttgggccctgcgaggtgggtgctgccctgggccatgattgggcatgagtggggagccgagccataccatggccggggacagggactgggtgcgttgttcccacatgagcgttgtggagttggcatgcattgggaggcatccctctgggctcagcccctgcctaccaggccaccattgcccctttcttggccagcagatcctccaccagcacctgtcagccccgagcactggaaacggcagccggcggggcctttgtgcttcaggattccttctccagggacacgggtgatagccaagcccggcagatgcccccgggggtgccaccgtgcccccactcgccatctccgatgctcagctgctccccagaatgaaagaccttgtcacaaagggaggcagggagaggatgcgcttccgtgccgcagcccatctgggagccaacgttattttcctgattgaaggaaacatctgttcagtcctctttcagagcgaggcaggcagcggactgggtcggtctggctctgggcaggaggtagagaacctgggctgagcccagagcccctgccctaaggggtttaagaggagctaccaccgttctctgtccctccctaaactgggagttcaggagctcctgccatccccttaagaagcctcggtcactgcctcccccaaggatgggggctgctggggcaaaagccatcgcctgtcccagagcaccatatgtgttttctttttttttcttttcttttcttttttttttttttttttgagatggagtttcgcttttgttgcccaggctggagtgcaatggtgctatctcggctcaccacaacctccgcctcccaggttcaagcaattctcctgcctcagcctcccaagtagctgggattacaggcatgcaccaccacgcccggctaattttgtatttttagtagagaaggggtttctccatgttggtcaggctggtcttgaactcccgaccttgggtgatccgcctgcctcggcctcccaaagtgctgggattacaggcatgagccaccacgcccagccccatgtgttttctgaggactccttcattatttcacacacacactagagccatgtttttgaaagatacggctgccaaacaaactgcatttattacataatgattaattcatcgcccccatttcttattaatcaaagacatccataactgcctatctgagctttgagttggggagagaaccagcggggcctcaagctgacagccttcccacccagatcaggggcactggtagatttgtgtcagtggagcctcatttggggtaaatgcacagtacccctgaggtttctagaagaaatggagacagctcacagacccccacacgtcacctccccaaacccctggggctgcctgggatgttttataaccccttctccagccagccctgagctcaggctggctgcttggcacttagccactggctgactagtggcctgtcagaggatgtggaagatggggtgggccagtccctgttgctggaggctgcaattagtggcagcctgggaaggagactgaagcctgggctgaggt

SEQ ID NO: 19525 - DNA, 1051 bp, Homo sapiens
aggaagatagggcaagggtgcaaggcccgtctctgcacagagggtgggagagaggagtaactacatagtaggtgcttggtaagcactttcccagtctacattcattgggtccattttatagatcaggaaaactgaggctctgagagggctggtaatttggattagagaaggcccacctgtctggagcggctttatgaacacaggctttggagtgcgacagcggggaggtcaggagaggagaggaaatagccatagctgtacccccacaacattcacaccatgcctccccctgaaggctttgcctgacgtttggactgtttagagggctcctctgagctcccacagcctgagccttcctgtcacggtgctgccaccctggtttagcaggcctgtttacacactgtcaccccaagagcctggcagcaccccagtgctggactgtgagccctccacacagggcccagcgcatggtgtgtaatacagctctatggaatgctgagtggctgattaagtgggctctagcttctggcagctttgctccctgggtggatggggcgggagtgatgcagaaaggagaggtgtaggcctagagttaggagggcagggagagcactgggcactggaaccacttggcagggtgagttggcattccctgtttgccacgaccttggggtcaccctcaccaacttgccccagctgggcctgactgaagggcagggggcctggacattggagcccagggagggcagagggtggtagactcaggagagagctctttgtttgggggcatttctccagcagagacccttagtccctccaaggagcatgtcctcctccatcagtcagtgtcctagccagcaggggtgcgtccccccagatccttccctgcttatcctatcctgggcccagccatgctttctcccatggggtcatgtcatcctgaccctcagatttggctgggtcgccccagggctctctgacaaagcccagctcctcccctggcacccagcatccctcagacccggcctacaccctgtcaagcccgccttct

SEQ ID NO: 19526 - DNA, 1034 bp, Homo sapiens
cgagcaggagagggtggggtggtgtgagtctgagggaggtctcagatgggaggggagggcggagtggggcagggaccagtgagggccagagtggagactgggcaggagggcatagcacacacatggacatgcttcccaatgagccctggcccagtcaactcccagctccaggaaccccccacagccctttgctggggtgcacaccgtccagagcactgacttccccaacgagccaggtggaaatgtcccagggaggaccccggggcctgaggagcctactgaatcctcaacaaagaagggaagagaggcctaggccacagcaggcccagaattattgtgttatgctctggatcttggggaatgtgtaatccccacaccgtatctatggcaactctccattaaccagaatttggttctacaaattcctgttcccattcattctagaaaactcagagctgttggtctttttaaaaaaactcgctgaaaaaaaaaaaaagatactaaagaatgtaaagaagaaaatgaagtcagctccagcccctctgctgagaacacactgatgttagtactttcgtgcatttccacccagtttgtttaagaaaattgggattgtgttgaatgcctgcttttgcatcctgccttttccattgtgcttcagatcatgagcatttggcaggtcagaaaaaaaatgtctttggaagctgggctgtggggactggggtttggaaggcttgctgtgtgctgtgatccttcaggggtcatcgccctccctaagcctcagcctttgcctctctgcagggagagactgaaggacatttctcaggctcccgccaagagtctcagtgttttccttgcaatggtggccttgttattccagccttgctactcacaggtgggcctggtgatgtttgtggcagggtgggcacagggctggcactgccaccaagtacgtagttgagccggtaagctcagaaacgtgggctcactccagccttgagcactttcccatctcgtgatcctgggcaaatgacttt

SEQ ID NO: 19527 - DNA, 1015 bp, Homo sapiens
gcctggatgccccccagcaccctttcatgagggggagagaggagaggagcaaggcccaggccacctggtattcagaaggctgaagtgacagtgtcaggcagtttggggggcagatgaagccgtggcaaagggtggccaggaggccagagcagcactcacagatgaggtgggattggggccacctgcatgtgtggggaaggagcccccaggactcggtgtgtgggcctctggctgacaaaggccactctgcagaaaggaaattagaaagaagaaatgatttcttggctcatgtcttcacgaacaagggagaaagttgctggcgtggtctcctcacagaagagccagggtatctgaggggagccctttctctgccagctgggtcaccctcagggctggaggtgctggatgccagagtagaagtggatggatgggggtgtccccccaaaaggagagggagacaaggtgaggctgtgccttttaagccttctgcgcaggcctccttgggacagcccgggtcggatctcagactgcagcatgtggggctgggagccagctcccccgaggcacgggggctcaagaggtctgagcagcatgctgaggtcagggctggaggagcagaaagtagtagggagccactgatggcgtcataatgaaggagcgacatgacaagcttgtgaggggccacacagggcagaggctagggacgaggagatcccgctggcagctgggcatggaatttctggtgggtagtgaaacagccagacctaggacctgtggcagtgaggatggggagggggccagatgggcacacttcaggcaggggaaccccaggacttgggggcctcctcagagaggccttacagaaggactggggcagcaagcaaggcctgtggggcgaggaggcctaaggacaccatggatgcactggagccaagccattaaggaccctgcaccccggccagaggcctcactcaggatggctgcagtggagactgaagagatgggtcgggtggag

SEQ ID NO: 19528 - DNA, 1044 bp, Homo sapiens
tgttaatgatatccacaggacactcagcaggaaatgagagtgatctgggactaataaaagccgaaatgtaatttgtgcagatatacgaggcgcagccttcagagtggtcctgggtttgcacattctgggctcataaacatgcgcctggggagggcagggagcgggcgctgtgccctcggcctgggcacaggcccgcctgggctgccctgtggcagtctggccagggcaggagcgtgaggctgcccacctggcagggagctgccagaccagaaccaagtgccgtccccagctcctctgggttggcgcgtcgcagcaggaacctcctgtaatgttttatccaagctgccaggggtaggattgaagtgggtcagaagggtgggcacgctgcttgttagggatgcctgcgacaaatccagggagaggagctggagcagagggaaagcggctttgataagccggtgggcaggggctcgcctcgtgggaaagtggccggcccccacactgggctgactctcctgcatttgtgggccagggcaagctgactccagagagcaggagaggtggtcccaggactgggctgacgggcttctgggggccatctggctgccctgggcttgccctgctctcaggcagatggaggccctctgtcgccttccctgcatccatccccagacactaaatgaggaaggcacttgtggtggggtccgggccaaggaagaagggtaaatggagcagcacccccagctctcccccactccccacctttctgcctcttccctgtgcccctccccgactctgcgtgcctctccctctctgtgcccctctccccctctctttgtcccttcctgaccccttcaacaacctggaatctttgtagcctgaggcaagccaccccttccttttggagcatttgggaaccagcactggaaagtcccctatcccctcctgggggcctgggccacacaggccgagctgagcccctttcttcctgcctccgggccagcatggttctgggtaaatcccaaaccctctgggactcggcca

SEQ ID NO: 19529 - DNA, 1068 bp, Homo sapiens
ctggcccagaagcccaacaagcctgctgtgcccgaggcgcccatcgcaaagaaagagcctgtgccacggggcaaaagcttacggagccgtcgggtgcaccgggggctgcccgaggccgaggactccccatgcagggcaccagtgctgcccaaagacctcttgctccctgaatcctgcacagggcccccccagggacagatggaaggggctggagccccaggccggggggcctcggaagggctccccaggatgtgtactcgttctctcacggccctgagtgagccccgcacgcccggacccccaggcctgaccaccacccctgcacccccagacaaactggggggcaagcagcgagccgccttcaagtcgggcaagcgggtggggaagccctcacccaaggctgcctccagccccagcaacccggccgccctgcctgtggcctccgacagcagcccgatgggctccaagaccaaggagacagactcacccagcacgcctggcaaggaccagcgctccatgatccttcggtcacgcaccaaaacccaggagatcttccactccaagcggcggaggccctctgagggccggctccccaactgccgtgccaccaagaagctcctcgacaacagccacttgcccgccacattcaaggtctccagcagcccccagaaggagggcagggtgagccagcgggcaagggtccccaaacctggtgcaggcagcaagctctctgaccggcccctccatgcgctcaaaaggaagtcggccttcatggcgccggtccccaccaagaagcggaacctggtcttgcggagccgcagcagcagcagcagcaacgccagtggcaatgggggagatgggaaggaggagaggcctgagggttcccccaccctcttcaagaggatgtcttctcccaagaaagccaagcccaccaagggcaatggcgagcctgccacaaagctcccacccccggagacccccgatgcctgcctcaagctcgcctctcgggcagccttccagggggccatgaagaccaaggtgctgccaccccggaagggccggggcctg

SEQ ID NO: 19530 - DNA, 1032 bp, Homo sapiens
agattgaggcaggaaagggactgggaatgctgcaaatggagacatacacctcagagactgagttggcacagaatccatgggacttgatgatgagggagagggaggtgacaagcctgatgcccagcttccccatgaaggggagaagtagggtgtggacgtgcaaatggagtattagctgctgctgcagagctactggcccttccaggcccagcttcatgtctccagcaccagcccttcattagttctcaaaagggcgtgagttggctgcaggctctgctgggagcaggatgatctagggtggccccagctgtgccagcttgtctttgctccatcaatctctcatcctccagcaggctggcctgggtgcgtcctcatggcagccccagggctttgagagagtggaggtcacagggccactcacagcctaggtcctggactttaccacgttctgttagccaaagcaggtcccaagtccagcacagagaagtgcaggccacctggggtgagctgcagagccacaccacaaaggacctgggtgcggggaggggactgggctgctctgccaggccatctacacacacggcagttccctttggccacacggcagtagaggcagctgtggacatacaaagtgtagatagctgggctcaggatcgagtctcgcccaccatcagcaggcgagggctcatcagagccctggaagggacaaaatagcagggttgtgttcaccatggaacagctggctgaggaggagggtggacccctgggaaactgaggaacagctgccagagaaggcgagggagaacaagtgagctcgagagtgaaggcggggaggacgggcgcttggggtgcagggagggcccccagcgtgactctgccagccaggcggtggggggggcgggggggtgggagtgagagggcactgagggagtgggctggtcaggctgatctgatgtctggccagggaggagccccaggcctctgtgtcaggcactgggactgcagggcaccagggctgcccactggctgcca

SEQ ID NO: 19531 - DNA, 1057 bp, Homo sapiens
ggttcgggcaaagccggggtagacctgggctatgctcagttaggggttgcgggatccccgagtgtgggcgggactgggacaccctttggcctctgtttgtcccctttccagtcctccaccccacccctggagcccagcctgggagcgcaaaacccaagaagcggccagaacgcacctccggctccggcggacgcgcgaccgttgtgcaccaccagggaccgccgcgcctactctgcacgggagcagggacagcgctagatttcgtgtacaaaacctgtgtacccctctatatatatgttacatagaatgtatatatgttgggaacatgctcgcttctcccgtgtgtcgccgccgtgcgtcgtgcgcccgcaacagagccccaaccgggcctttgccgggtaaggggctaccgcgacgccacttgtccacgcagccaccaccggcccgggccagtccctgccagtccgtccgcctgtccgtccgtgtcctcagctctgtccacgcttcgataggcctgacgcagcccccagcccagggccgccctagcaacttcctgtacatatgactgtaaaatggtaaacgtgtgtattatatctggcctcgttatatagtgtatatatatgtatacatatacatatatataatatatatgaagactgtaaatgttaagacgactagtgttcttattagtatattgcttcacactgaagattgtgtgtatcgagctgtttctaaaagatgtttattttccttaagagtaaaaaacagtcattgcattcagaaaaaaaaaaaaaaaaaagtcaataaagatacaacgattgttttggaaaatctgcagcccgtggattccgaccagattcagctgggagccgggccaggctttaggttggggaatgggaatgaagggaggggctgggggggggggcatgaatggagtcagggagtcggcctttcacagaacaggaaacctcccccgcccctgtgccccctctccagtgtggcggcaggtcgggagggaggaggcttctttgctgtgagatgaccaggggccgggatg

SEQ ID NO: 19532 - DNA, 1033 bp, Homo sapiens
atcctgcatataaactggtaagaagtggtgctttctcttttcctggtacagatcctagcccagaggtgatgagcagtaaagctgcagattggaagggaggggctggtgaaaacagtggtgcggtgcagatggggagggattctagtagtaggcatcttagacttcagttggtgttggtggcaatggtatctgtacccctctaagaccgcatggcaagaatacaattttatatttaatagtgatcagcatggatgttggtgcgtcacaaacattgactcagcagtgtctaaacctgggcatttagaacaaggcctcacagaatcttctggaagtgcttcaaactcctttccaaacctagtcgtcagttgttttttgtaaccttcccatgttaggcctgggtggatcccctcttaaggctgtactttagggaaatattttttatcttcatatcactttatctgtcattcattctcctattccctgttggctgcatggggcagattaaaacagactctgattggactaattagaataattacttcaaggctaattgcttacttgctgctatctttaatcactgctacgtggtctgtggtgtggtggccacatgcccagagacccaggcctaggccagccgtctggaaatgactgtatcacccaggcacggggcatgcactggtgagctcagcctgtgactcttccagttaacggttggtattgggtggagtgggcacccctgtcagttctgggatagtctgatcttgttcagctggttgaaagcaaaatttagctttctggcttaaaatagttgggaaagtagggcagataggtcctgggccacatctcttgtgtggactcttctgattccactggagggggaggaaccacaggatgaagtcagggctgtgcaccgtcaggaggagctctgggccaggggggttggctgcccttgctgctgccagagcctgacaaggcagagggcagtaaaagaaaggaagctaacagtgaaccatggtgttaatcatgaagctca

SEQ ID NO: 19533 - DNA, 1036 bp, Homo sapiens
ctttggttgtctgtctactcttcatggtcacatgttctgtgtttcttttcagtggatatgctgctgatgaaatcactcactgcatacggcctcaggacatcaaggagcgccgagcagtcatcatcctcaggaagtaagtgccttgatgtctgaccttctgcctcacctgcaggcctgtctggagatgtagctctgggtccacttagaactcagctcctatgtatcagtggcatggcagagtggagagcagaactgttaagttctctttttatttgaatcctgtgaggataaagttgttttgttgttttatcagaaaattaagtactctatttagggagtttaggactgagcaaaagcatatacgcccaatatttgtgggtataatcttgagacaagatttgggcaacattcttccaaacctcaccccaccccttagcctctattcctcacctccttcgttcttatttgttacacgtactcttggtgattatttttagactgtgcctttagcagcctgctttaaaaatgcctgggttttcactgctggaaggaacagggagtgaagagaggagacaagggtgggaggttaggatgtagtattcggcagaatcatggcttgtggctcttctctggggagggaatcagggatgtgctacttaacatcaacaaacctggcttcaccagcatttatttctttcacggggtgagtggaagaagccatagcctcacagacattggatcaagacaagccttgccccactgtccacccatcttgctcaggctggaatgcagtggtgccatcatagctcactgcatcctcaaagtcctggactcaagctctcttcctgcttcagcctccccagtagctgggaatagaggcaagtgccaccatacctggttcacgcctaccttttgaatagagtcccagagaagataggtgattgcccagagtcatagaagtcagtgagcagagcaaaacaagcacgtaaacttaggcttgacccataaaacttgctgtctgtcgtcttcttccttc

SEQ ID NO: 19534 - DNA, 1081 bp, Homo sapiens
tcggggccttgagttggtgactagggcacccaatcccttggtttttaggaggccctcaggattgcactgtgagacttgtattcttgagattggtactctccagttaaccagataaagtggcacaaagcagtatatatagcccatttatttgcttttggtcaagtggaactcagctcagagtggtctgaagctgggaaatgcagctggagatccctttgccaagtggtaacctaagctggtgtgtgctaggctctgtgctagtacccggaatggggtttgtatgggttcctattctcttttgtcctttgggaaaaggcagacatttagcatctcaacaggaactggtcaaagaaggctttccagataagtgccacctgaaggtagtcaaggatgcttggaccttagccagcatagaatgaggctcaggggcaaagatagttcagtcagaagagatgctctttacagaggcttggagtccaggaactctgttctggaacacagaatagataaggagtggaggacttgatacaccggcctaagacagcaaaagcttcacgctgtgcagagaaatgttaagcgcgctggggagccgtggaggcatgtgagcagtggggtgagggatttgcatgtgagagattgtaggaagcgaagctcaatagcttacttggtcattagatccacagagttcgaggagtcaggagaccttccatgagagcagagcaatctgaatgtgaggctgagtggatggatgagcagtggaaggaagtggaggtctcattctggacctcgttcctcagcagtggggtgaggggtggctagctcttagtttctctgaccagggcttggtgttgctcctttctccatgatttgtgtctcctgtggttagatttagcttacatttgttccctggttcagtaagtctgtgtccacgtgcatacaccctgcccttttggcagcctgactgttctgatgtgtctgtggcctgcccaaggaatatgggtacaatgggatcaccaggaaggtgacaaacttgggcttctgccctggctctgccactcctctccaaatgcagtcttatctg

SEQ ID NO: 19535 - DNA, 1067 bp, Homo sapiens
atgtcccaaagactgggatggtcactggcacttagtgggcaagaacctccgataccagggcctctgccaggactacccttcgttgaggaccactgagctgaagtgacccatcccaaggatgagacgaggtacagcggtaaagccaggcgcctcctgccagcctctcagataacgtcctacctccctttccttgcaggccacggatcctggagatggacaaggaagagaaccggcgctcggtgctgctgcccacacaccggcggaggggtagcttcagctctgagaactactggcgcaagtcatacgagtcctcagaggactgctctgaggcagcaggcagccctgcccgaaaggtgaagatgcggcggcactgagtctacccgccgccctcctgggaactctggctcatccttacgtagttgcccctccttttgttttgagggttttgtttttgttcattggggggtttttgttttttgttttttgttttttttgattctatatatttttccttggttttgttgcctgttagggctgaagaatagaattggccaggacctaggttctcatattcttggtattcctcctggatggaaaggctgttggcatcaataggggacagaggctgatgctggagtggccagtagaggtggtggagcagagcagccatcttttaagtggggctgtatcaggctgggtttatttaaaagcaacaaaatgttttggttaagaaaattattttgctttcagtgtaaatcttcgcagtgttctaaacaaagttcagtcttctgctcgcccctttccctcactgatgtctgcacttggttgaggtctcctggagcctcacaggctctgctgttctccacttctcacctgccatccacgccctgcaagctcatgcaaacaccctttcttcctcctgcggcagagttgttcaggttgcctgggcaggggcttaaacagtgccagcccctgccatcccaaagctattgttaagccccccaggcgtcctccacccacgcccactagcctgccatgtccacagttccttgggctgctgaggggct

SEQ ID NO: 19536 - DNA, 1044 bp, Homo sapiens
acatcaagacctgctgaagcagatccgctcataccctcatcggaagttgaaggggcatgatttgtgtcctggtgagatggagcacatccaggatcaggccagccaggcatccactacctctaaccctgatgagtctgccgacacagacctttacacctgcagaccagcctacaccccaaaacttatcaaagcaaagtccaccaagtgttttgacaagaagttgaagaccttggaggagctctgtgacactgaatatttcacccagaccctggctcagctcagccacattgaacacatgttcagaggagacctgtgttacctcctgaccagtcagattgatagagcacttctaaaacaacagcatataacaaactttctctttgaagactttgtggaggtcgatgacaggatggtggagaaacaagaaagcataccctctaagcccagtcaagacaggccgccttccagttctctagaagaatgcccaattcctaaagtgttaattagtgttggttcttacaagtccagtgtggagtctgtgttgatcaagatggagcaggaactgggagatgaggagtacaaggaagtggaagtgactgagttgagcagtttcgacccccaggaaaacttggactacctggatatggatatgaaagggagtatcagcagtggtgaaagtattgaagttttgggcacggagaaatccacctccgtgctttctaaatctgacagccaggcaagcctcacagtaccattgagcccccaggtggtccggagcaaagcagtcagccacaggaccatcagcgaggacagtattgaagtcctcagtacctgcccctctgaggccctcatccctgatgactttaaggccagctacccaagtgccattaatgaagaagaatcatatccagatggcaatgaaggagccatccgcttccaggcaagcatcagtcctccagaactgggtgagacagaggaaggcagcatagaaaacaccccatcacaaatagactcctcctgctgtattgggaaggagagcgatgg

SEQ ID NO: 19537 - DNA, 1035 bp, Homo sapiens
ggcagccaggagaacgtgttatcacttgaatgttacccattcattatctggtttcccgatacactgtgttgttttctttctttatttttttattctttttattttttagatagagtcttgcactctcgcctaggctggagtgcagtggcaccatttcggctcatggcaagctctgcctcctgggttcacgccattctcctgcctcagcctcccgagtagctgggactacaggcacccaccaccatgcctggctaattttttgtgtttttagtagagatggggtttcactgggttagccaggatggtctcgatctgacctcgtgatctgcccgccgcagcctcccaaagtgctgggattacaggtgtgagccaccacgcccagccccctttggttttaagagcagctgatcttgcctgctggctgccaagtcttctcaccttctctgaatctcaggcttgctatgtagaaatgagaccatgtgtatgtgtgtgtgtgtgtgtgtgtgtgtgtgtgtgtgtgtgtgtgtatgaaatctggactccttctatgactgcctttcctgtttgttctgacccatgaagcaggtatggttctttcgtgttcctcaagcgtatcaaatgttactgagtgcttcctatcgctaagtgctgggctgcactgtctagcctctaggagcttggactctaatcaggaagccaaggcacataccctaactccacagagtgccaagaggctggcacggtgcaattactgcacctttggaaccaaccctgggagcgaggtcagtgcaggttcctaaggcaggaagacctgagctgagccttgtcctagatctttggagaacattaatgccaggccacgatgctgaacctcagcatcagtcccagaaagttcaggactggatgctggctgcagacacagtctccatggtgagcaagagccaagtatctagagccaaaagtatccacgctcatctggggagtggttaactggcatcactcacagcctgtttgctggcagccgaaaggtggatg

SEQ ID NO: 19538 - DNA, 1053 bp, Homo sapiens
ccagcctgggcgacggagcgagactccgtctcaaaaaaaaaaaaaaaagaaaagaaagaaagaaacaaactacctgataactttgtcttaatgtctgagtgatttctgagggctaaggaattcttttggtgtgatttgaaaataggattcaaattctaagatacagtttccttatttctccaagagagataaaattctttattatctattttgtgaaagtttatattcaatgaggtgttaaagtcatctgtgcatagtgtattttctgtaactacagggcctagtcaaatagtggggcttaagaaaaagagagctaggaggtttgcttcatcctactaaagtcacctcttttattttgacaaaactcttcacagttacacgatggctaaaacatttttctctacatttgctagtacctgtagtaaaatgtaattgcatttctttcattgtgttttggttttcagacatccagtagcatcgtttttccacttattctttcgagtcagtgcaatcatcgtctatcttctctgtgggttgctcagcagcagctttattacctgtatggtgacaattatcttgttgttgtcgtgtgacttttgggcagtgaaggtaattttgattgtttttattttaaaattatatttaatatgaaaatgatgtataaaaatatgagttagcattttgcattattgttaatcttttgttacttcaaacctcatctgtgttgaagtgctagatatatcaaattgcatgtagtttttttttttttttttttttttttcattttttccctttgacaatacaagatgagacatgcaggttactgtgctgctgatttttctgtgccatattctaacctacatcagctttaaagtcaaataaacaaacaaaagtgactagcaaccatagaccctacaatgttgcttctaatccataccatgggttttgcttcaggcttacctgtaggtgtgttgtatataatttctagataaggccccagtgtagtttgtccacaaatacctaaaaaatacctaccttttgaaaaggctccta

SEQ ID NO: 19539 - DNA, 1089 bp, Homo sapiens
cactttgggaggtcgaggtgggcatatcagttgaggccaggagtttgagaccagccaggccaacacggtgaaaccctgtctttactaaaaatacaaaaaattagctgggcatggtcatgagcgcctgtagtcccagctactcaggtggctgaggcacgagaattgcttgaacgcaggaggcagaggttgtagtgagctgagatcacgccactggattccagcctgggtaaaagaacaaggctccatctcgaagtaaaaaaaaaaaaggctgggcgaggtggcttacacctataatcccagagctttgggaggccgaggcgggcagatcaggagttcaagaccagcctggccaacatggtgaaaccctgtctctactgaaaatacaaaaattagctgggcgtggtgatatgcgcttctaattccagctacttgggaggctgaggcatgagaatcgcttgaacccaggagacagagggtgcagtgagccaagatggcgccactatactccaggctgggtgatagagtgagactctgtctcaaaaaaaaaaaaaaaaagcctgtaatcccaccactttgggaggccccaggcgtgcagatcacctgaggtcgggagttcaagaccagcctgaccaacatggagaaacgctctctctgctaaaaatgcaaaattagccgggcatggtggcgcatgcctgtgatctcagctactcgggaggctgagacaggagaattgcttgatcctgggaggcggaggttgcggtgagccgagatcatgccattgcactccagcctgggcaacaagagcagaactccgtctcaaaaacaaacaaacaaaaaaatgatttagtgttgtcagatacatcttatacttcattttactacagattagtgctagcactaaaaataaaagagaaatttaaaattaagaaaattccatccattaactgaagttttcctgtatttcaaacaagactgtccttatctgagttcagtaatggaaagccttgttcctccactcttatccttcccatagaatacttttctgaaaatctttttttttcctaagttaattaacagggtgaaagtctc

SEQ ID NO: 19540 - DNA, 1051 bp, Homo sapiens
aaaaaaaattaatatgtgggaactcagtgttaaaaaggaatttttgtgtattgcttttttcttttttttggagacagtctctctctgtcactcaggctggagtgcgattttggcttactgcagcctccgcctcctgggttcaagcaagcatatctggctaatttttgttttttgtttttttttgagatggagtttcgctcttgttgcccaggctggagtgcaatggcatgatctcggctcacagcaacctccccctcccaggttcaagtgattgtcctgcctcagcctcccgagtagctggggttacaggcatgtgccaccacacccggctaattttgtatttttagtagagacagggtttctccttgttggtcaggctggtctcgaactcctgacctcaggtgatctgcccaccttggcctcccaaagtgctgggattacaggtgtgaaccaccgcacttggcctaatttttgtgtttttagtagagatagggtttcaccgtgttggccaggctggtcttgaacttctgaactccagtgatctgcctgcctcagcttcccaaagtcctggtattacaggcatgagctactacacctggcctgtattgcctttttatagtatacgtatcttgtctcttttgttttcgtgtgttagagcctcttaaagcaggggatagatattcatgtttcactgaatctaaggtgctgtcagtccaggcttacattattttacgtcaccaagaaagaagaaaacactgctaattatactgtggcactgtgccttcttgtcacttagtgatcctattctgcaggttttgatgctgacgctttctccatctcttgtgtttgtcactggaatttaagcaccttctgccagagtcagaaggaacattctggtactaggatgctcgttgccttgaaatttttgccatctatacttttttttttttttgagacggagtctcactctgtcgcccaggctggagtgcagtggcgcaatctcagcttactgcaagctccgcctcccgggttcacgccattctcctaggcc

SEQ ID NO: 19541 - DNA, 1857 bp, Homo sapiens
tttcaatgctgataaagttcaatttatctttttttttttttttttttgagacggagtctcagtctgttgcccaggcttgagtgcagtgtctcagctcactgcaacctctgcctcccgggtacaagcgagtctcctgcctcagcctcctgagtagctgggattacaggtgcccgccaccacacccggctaattttttgtattttttagtagagatggagtttcaccatgttggccaggctggtctcgaactcttgacctcgtgatccgcctgccttggcctccccaatcaatttatcttttttgtttgttattgcctctgcttctgatgtcatgtctaagaatccattggccaggtgcagtggctcacttctgtaatctcagcacttcgggaggctgaggcagaaggatcacttgagcccaggaatttgagaccagccagggcaatatagtgagacctcgtttttaagaaaaaaaaaaacattaactggatgtggtggcatttgtctgtggttctagctacttgggtggctgaggtgggaggattgcttgagcccaagaggtcaaggctacagtgagccgtgattgcaccactgcctggctaatttttgtgtttttagtagagacggggtttcgccatgttggccagactggtctccaactcctgacctcaagtgatcttgacctcaaatgatcatcccaaagtattgggattacaggcatgagccaccgcacccagccaccatagctttttaatttttttgagatggagtttcactcttgttgcccgggctgcacaatcttggctcactgcaacctctgcctcccaggctcaagcaattctattgcctcagcctcccaagtagctgggattacaggtgtgcaccacttcacctggctaattagtagagatggggtttcactatgttggtcaggctggtgaccaacctgatctcctgacctcaggtgatccacccacctctgactcccaaagtgctgggattacagacgtgagccaccatgcaggcctctatagcttttttttttcttttgagacggagtttcgctcttgttgcccaggctggggtacaatggcacgatctcagctcaccctgcaacctccacctctcgggttcaagtgattctcctgcctcagtcttctgactagctgggattacaggcatgcgccaccacgcctatctaattttgtatttttagtagagatggggtttctccatgttggtcaggctggtcttgaactccagacctcaggtgatctgcctgcctcggcatcccaaagtgttgggattattggcatgatccaccatgcccggccctctgtagcttttcaatagtcttttttttttttttttttgagacagagtcttgctctgttgcccaggctggagtgcagtggtgcaatcttggctcactgcaccctccgcctcctgggtttaagcaattctctgcctcacctcctgagtagctgggattgcaggcacctgccaccatgcccagctaatttttaatttttgtatttttagtagagatggggtttcaccatcttggccaggccagtcttgaactcctgacctcgtgatccacccacctcagtctcccaaagtgctgggattacaggcgtgagtcaccacgcccagccttaatagtcttcaagttgggtattgtcacacctccaactttgttcttcaatattgtgttggctattttgggtcttttgcctctccatataaacttcagaatcagttttttgaaatacacaaaataacttgttgggatttagattgggatttgcattaaatctgtagatcagattggggagaactggcatcttgacaatat

SEQ ID NO: 19542 - DNA, 1029 bp, Homo sapiens
agtactagtgggattcagtataatccttaattttttgtttgtttttagtaattcttgtaagcagttagttaagaacttgttttgaatttttggtgctggtaagccaagactgcgagaacttgttggattcttaaacacttgaacatttaccatgcattaggtgctgaggatggaaaaaagagtaagactcagcatggcccccaggaatcaggagtggctgtattaatatcagacaaatcaaggcaaataattttgccatggttgaagaaggtcttttcctaatgataaaggggtcagttcttcaagaggacaaaacagttctaaacatttataaactaaatgacagtgtttcaaagtatatgaagcaaacactgataactgcaaggagaaatagatatatccataatgatagtgattccattattcttctcttagtaattgatagaataaggagactgaaaatcattaaggatgcgggagacttgaacaaccccttcagcctgctggatctgactgacagtcatagcacaccatccagagagagcagaatgtagttcttttttagtataaacacaaagatagatcatattcttgtgagccataaaataagccccaaattgataattatgcaagccatacaaaatatattctctgaccacagtggaattaagaataattctaataacagaagtatctttggaaatgtcctgaatatttagtaactaaataacatacttttagataacccataggtcaaagaagaagtcaaaagtgaaattaaaaagtatttagaaccaaatgaaaatgaagacacaggccaggcgcggtggctcatgcctgtattcccaacactttgggatgccaaggccggcagattacctaaggtcaggagttcaagaccagcctggccaatatgatgatgaaaccccatctctacaaaaaatacaaaattagccgagcgtggtggcacaccctgtaatcccagctactcgggaggctgagacaggagaatcacttgatccagaggtg

SEQ ID NO: 19543 - DNA, 1019 bp, Homo sapiens
acttccctgcagtcacatagtgacaagctggacatgtctgactaaaacctgtgctttttccactgtgttcttgggtctcttggacttagtaatggggatttaaggaggaggaaggcagtgagatagagccagggttcaggatttggggctgggagggtgttaataaagcgtttggctcaggacctcaaagccttttgcttgtgtgtgcatttctcacagcctcacgtgcccaggctgttggtgctggggggtaggcctggggctgccgctccctttcagaatccttgcctggcctcagaggggcttgtgtctaggaacctcagcagaaccctgcaagggctggctgggaccattggtgagatgagccatgcccgggagcatggaagaatatatgttcctcttcagtcctgtaagcacatgggctgtgatgaggaacgcgttggcagtctttagatgaacgctgcttctttggaacttgctgggtgttagcttttggtgtggcctttgggagtggactctggactgcagacactgaactacaggtttcccatctggaaatgagttcataggactggatgatctctatgttctttctaatatttctttactcgtgggatctttatgtttcattcataattttaattataatgtttctatgtttatgttttgactcaagtagtgatcactacaggccgtctttgggaatgcagtagaattttagtttcatagatcctaaatatttgattgtttttatacatttgatgattggacaccctacatagaatacttttttaaggtactagcaaataatatatgaagggaaaagaaagcattcttcctgtagcatctcgaatataaagattttgttatttagtattagattttaaaaattattttgtatcctctgatttcttatagatgaaaatatgcctactaaaaaacaatgaaaatactttttcagaatataagcactatatataatatttgaaaatattatccataaaagttagaagaaaata

SEQ ID NO: 19544 - DNA, 1026 bp, Homo sapiens
aacatgcatcctttcacacatcataagaccagtgcacaaaaagagtgcacttcatgcctgtatattttaaagaatagaatgaacactgggtacccgctagctcacttgaggcatagatcatcaccaggtacctagaggcctcctctgggcttaccctggtctctttgcctcagaggttgtcactgatgtgaaagctgcccatcttgatcctgtagtcagccatgagggcttgtggccttaaatgctgcctttttttcttgtctttgatgtttatgtaaatgatgtctttgtgtactttgggactttcttgctcaacactgttattgaaatttacctgtgtagtggcaggaagttgtacttcattctttttcactgctatgtgttgtgtctttggtataactgctacacaactgattgaggcaatggtactgctttgaacatcctcgtgcctattttctggtgcaaaagtgtgagagtttcaaggtgcctgggagtggggttgttgggtctgaaggtatgcacatttttaactttacaaggtgctgccaaattgtttccaaagtggtcacacccatttcccaagttccatagtgggtgccccacattatccccagtgcttgataattttgtacgcacccttttcaggttagaaaatctctctggggccgggcacggtggctcacttctgtaatcccagcactttgggaggccgagacgggtgtaggtcaggagatcgagaccatcctggctaacacggtgaaaccttgtctctactaaaaatacaaaaaattagccgggcgtagtggtgggctcctgtagtcccagctactcgggaggctgaggcaggagatggcatgagaggcggagcttgcagtgagccgagatcgtgccactgcactccagcccaggcgactgagcaagactctgtctcaaaaaaaaaataagaaaatctctcacgtcaccctccagggtaatagctgtccattacttattccttagttggcaaagtctatagtaacaaggtgc

SEQ ID NO: 19545 - DNA, 1029 bp, Homo sapiens
ctgggtgacagaatgagactcttgtctcaaataataataataataataataataataataatgtgtacaactcattggtttttagaatgttcagagttgtgcagtcattaccatagttggttttagaacattttcttcttcctagaaaggaaccccatacccattagctgtcacttcacattttctctcactgccattagtccctgggaaccactaatctgctttctgtctctctagatttgcctgttctggacatttcatataaatgagattatacaatgtgtggtcttttgtgtctggctgtcttcactcaacataatattttcaaggttcatccatgttggagcatgaatcaatacttcattttatgatcaaataatgctgtgttacatggatagtccacattttgtctctctcttcgtatttcatgttgatagaaaaaattttttttctactttttaacttatgaatggtgctgcagtaaacatttgtgtacaagtttttgtgtggacatgtgttttctcttctcttggatacgtacctaggtttagaactgccaggtcatacagtaacttcatgtttaaactttcaaggagctgccagactgtttttcaaagcagctgcgccattttacattcccacagccgtgagttgggggggggctccagtttctctgcatccctccagtacttgttattatcttttttgccatacctatcctagtgggtgtgaggttatcaaatcttaacctaagaaacacaggctgggcgcggtggctcacgcctgtaatcccagcactttgggaggccgaggccggtggatcatgaggtcaggaggtcgagaccatcctggctaacgcggtgaaaccccgtctctactaaaaatacaaaaaaattacttgagcgtggtggcgggcgcctgtcgtcccagcttacttgggaggctgaagcaggagaatggcatgaacccaggaggcagagcttgcagtgagctgagatggcatcactgcactccaggctgagcgacaga

SEQ ID NO: 19546 - DNA, 1049 bp, Homo sapiens
cccttgctgggtacccttgctgggggacctgggccatcccagtttgtgcagagcggccggaggcagttaggagcccacgttcagtccaaggccgtccactgagccccgtgtgactctgacagagctgggggtgtccatgtcctctctggacctcagttcctgtaaaaaggcccgttggccagatcggccgccgggctgctcacaggtgcacgggctgcacgtaactccgtgggaagaagccaacgcgcccgcaggaccggccccgccaccagtgggggtctgggcgctccaggacctcaatgatgtcgccacggcggaagctgagctgcgaggggtcctgggctgagaagtcaaactgggcctgggcaaagcaggccccaggtgactgcaagaagaggaggtggttagtagggtgccttcagaagccctgcaacccaccctccctcagaggcacccaagagaagtgatttgccacaggtgaggaggggtctcgggcagcaccggagttgaactttaagtccagatcaatggtagtgccaccactgggcctcctgctgcccacacccctgcctgtctgctgtgcagatgctgcatctacatagaacacggctttcccagccgcccagctgggacaatagggctggtgggtcaggggacctgagtcctggtccttagggtgggattttggttaggtccctgcttctcttgggatcttatttacccgactctgcagcagccatggtagcttttgactccaggccacaaagccatgagaatgggccttataaactgtaaagtgacgtgcagctaagagtcgtgtttattgctcttgcccttggtcagccgttgagggagagaattgtcactttgagctctcaggcctgggctccactcctatctatgccccatgtgtgatgttgggtaggtccctgccctttgtggaactcagtttccccacctgtgaatggcagcaggacaggagctctctgcagcacatctgcctggcaccgtgactattgcacccagcaccctggccctgcctgcccacc

SEQ ID NO: 19547 - DNA, 1163 bp, Homo sapiens
gcccagctcattgttgattcccgcccccttggtagagacgggattccgctatattgcctgggctggtgtcgaactcatagaacaaaggatcctccctcctgggcctgggcgtgggctcgcaaaacgctgggattcccggattacaggcgggcgcaccacaccaggagcaaacacttccggttttaaaaattcagtttgtgattggctgtcattcagtattatgctaattaagcatgcccggttttaaacctcttaaaacaacttttaaaattacctttccacctaaaacgttaaaatttgtcaagtgataatattcgacaagctgttattgccaaactattttcctatttgtttcctaatggcatcggaactagcgaaagtttctcgccatcagttaaaagtttgcggcagatgtagacctagcagaggtgtgcaaggaggccgttaagactatactttcagggatcatttctatagtgtgttactagagaagtttctctgaacgtgtagagcaccgaaaaccacgaggaagagaggtagcgttttctcctgagcgtgaagccggctttctggcgttgcttggctgcaactgccgtcagccattgatgatcgttcttctctccgtattggggagtgagagggagagaacgcggtctgagtggtttttccttcttgatggctcaatgacagagactagctcgtaaactccggggcgtttctgggctgttcgctcctgcttggcatgtcgcgagaaaggttttcgcctcctgtttcagcggtgacggctcttgggttttctcggggtggctttttaattttagtcttggcgcgaggcgggggatgctgtgtggcacctcctattgtctctttttgcgttttctcccattctcgctccctcttttgtcgccgtttcccgcccgccactcccacccccagacggggtctccgggtctcttgttctgtctgccggccccggctggattgcagtggcgcgatctcggctcctagcaacatctgcctcccgggctcaagcgagtctcccgcctaagccctcccgagtagccggggcttaaaggcgcacacgccactccaggctttttttttttttttttttttttttttggcagaaacggggtgtcagcatgttagccaggctggtctcc

SEQ ID NO: 19548 - DNA, 1611 bp, Homo sapiens
tgttctgggatggggcctgagcaaaaatgtttccaaaattctccaaaagctgggcgtgatggcttgcacccattatcccagctactcaggaggctgagaggggagaattgcttgagaccagaagtttgaggccagtctgggcaacatagcaggaccctgtctcaaaaaaaaaaaaaaaaaaaaaaagttccttaacaatttggatgtgtggccaggtttgagaactgctgctttaggccatttcatgtctttttagcatcaaggcagggataagtaatcaaaaaggatggagtctgggaggatagagggaccaaaggccagtggtatgagctcagagaagcctcgtaaaggggattatatagcgtccagtggttttcggctggtggcaccccgtgggaaagctctgaggggctcctctccttgtctagaaccacaggagagagactcagctcctggagctgagtgacttaaaatttagctgtgaagtccatgggcctgtctaatggtggcacagctttgtaacagggtcttctgggcctttcaggacccaagtcccacacttggagcctgatttgtgcttaatacctatttgctgtataatgtgattgcagagaagacttgacaaataaagagaacatttaaaacatggtctttgcaactaatctggtccttcctgtgctttaaaaaagaaaaaaattcccactgtccctgctttaaagagaaacaagaaattacaaaagaaaacacagactttcttgatttaaaagaatactggtagaagaaaatagcaagtcgcacaagaaattactatgtaatctgactgcaaagtgttgggtagattttaacatttgaagaaaaatgtttctttaagcaaatgaaaccctaatttctcccttccccctccaaaaaaccccctagattttcatttagctattttgtctttgaacaaaaatcttgctttttcccccttctttgcctttgccctctggtaatcagtagtttccaaagactgtgtaaaagtcaggtctaccaaaacagaatatatgccacatggtgtttgcaggctgtgtttcttttttgtgctaggtcccatggagattgtttggaatgcctgttttaatggtcatcagagaaaattcggaaagtatgcctaagtaggatggaccaaactagcacttgacctatagccttaggacctatacgtcaagtcctagttcggtctgtaatcaatgttaatattttgatttattttctctctctctctctcttttttttttttttgacacggggtcttgctgtcacccaggctggaatgcaatggtgccatcttggctcactgcaactgccgcctcccgggttcaagtgattctcctgcctccacctcccgagtagctgggactacaggcatgtgccaccatgcctggctaatgttttgtatttttagtagagacaggtttttgcatgttgaccaggctggtctcaaattcttgacttcaggtgatccacccgccttggcctcccaaagtgctgggattacaggtgtgagccaccacacccagcccggtttattttctctaggtaaattgtgtttgtttagtcctcaggggtctt

SEQ ID NO: 19549 - DNA, 2658 bp, Homo sapiens
ggatggtctcaatctcctgaccttgtgatctgcccgcctcggcctcccaaagtgctgggtttacaggcatgagccacagcgcccggctgagtattgggtctttaggggtcaaaacttttgatctttgcttgcagtttttgtttttttctcttttacactctccctgttccctgattaaatgaaggccaggcttgcctagttccagggaaaaggccaagggtgcctagagcaaggtggatgggactttgttcgcagatgggccttgagagagcgacccctcgctcctaaatgcccggaggaagggacggacttctttatctttaccatgggtattctgccttactgctttggcctgtggcgtttcttcacttgcttttcctcattttgcttggaatgtgctttgcctgttgcatacccacctcgtctgcccccttgcacactccatggctggcctaaaagcccagtctgctgtcctgtgccctttagacttccactgtaggattatgtttccacactccctgtggactgtgccactggagctctctgcagacagggactgtgtcaggttgacctccatccttcagcaccagcccagtgcctggcaggtagcaggaaagcagaagctgaggaaggacttgctgcacaagtggatgccaggagctctggttcttcccttcttgaatctgctaccttatgatgggagggacacagggctgtgctggatttgtgcacgatgctttggacagcccatgggagagggccaggaggaaggaaacccagactgagtggatagcaggctggatgggggcattgacagtgggggaagcattaaaggccatttatagccttccaaatgtgaagctggaggggcctggaagagagtcacagaaaggaagggacagacgcgggacggtgcagggtccctgccctccagcttcacaggtcttggtaatgggctcttacacgggttggtggcggaaggacacaggtggacctgggctggtggtcactcctgggctgctcttggccctggcatctgagacctgttggccaaaggctttgatgtggctctggtattttttcttttttttgagaatggaactttttttttttttaatgaaatgctcttttgaataggcaatacagtcacgtttctaaaatgaaaatatattaaaatatattttaagaaattttgcccctcactcctgatctcatctctgtcctccctcctccctggtaaccacctgtagcagtttgaatacccttctagtttttcttaatgcaagtacagcaaacacaaattgtgtattattatttctcccttttcagtaaatgaaagatagcattctgtgtgtactgttcttcatcttgtgctttttttaacttattgtagagatttttccatatcagtgcatggagaatggttgtcattctctttcagctgtgttgcactgtgaagttgtccctgtttgaatactcacccctgaggaaaggcacctggctgtttccagcttgtttcatgacatgccggcgacagttgtctcacgtgcacatcgtttcccacattgcagtggtcctgcagggtggcatcccgcaggcacattgctgagtcaaagaggaaacacagttgtaattttgacagattttgcccagttgccctctacagggcttgttccatgttgcactcccactggcggtgttgatgcctgattccccactgactcgtcaacacaaggtgtagtcaaatgcttggagttctgccagcctgacacttgtaaataatatctcagtatagttttaatttgtatttttctgaagaggagctgatcatgttgtcatatgtttaaggaccatttatagttttctgtggacagttcttcgatttttctcttgggttattggttttttctcaatttctgaaggtgttttttatatttttggaaggttagttcattgtcttatgagttataaatttttttcaggctaggaattattctgatctaggcagagtctttaaataattctattcctccccttccctctgccccatctccttatgtttgaagatttggacagtggctttgggacagaaccacacctttggcttccttccaggatttaagttaattggccttagacacattttcggtatgaacttatgatagcgtggatgtgtttgaggtgtatcaggatgggctacatgatgtgagaacagccaaccctctcacctcagtggcctaacagcagaggctcatttctttttcatggggcatgtccagtgtatgtagtcaggagacttcactcatagtcactcatgaacctaggatgatggtggcacaagctttttgttttgtcttattttgttttgttaacagttttattggctgggagtggtggctcacacctgtaatcccaggactttgggaggccaaggtgggtgtatcacttgaggtcaggagttcgagaccagcctggccaacgtggtgaaacccatctctactaaaaatacaaaaatcagccaggcatggtggcgcatccctgtagtcccagctacttgggaggctgaggcaggagaattgcttgaacccaggaggcagaggttgcaatgagctgagattgtgccactgcactccagcctgagcaacagagcaagactcc

SEQ ID NO: 19550 - DNA, 1048 bp, Homo sapiens
tcttaggacattctcaaccatttgagaccattttactgggaaggaggtggccaaagtcctcttttttttctttacttttcttttcttttttttttttttgagacagggtctcactctatcgcccaggctggagtgcagtggcgcaatcttggctcactacaacctccacctctcgggctcaagcagttctcgtgcctcagcctcctgagtaagctgggattacaggtgtgtaccaccacactcaggtaattttttgtatttttagtagagacagggttttgccatgttgcccaggctggtcttgaactcctgagctcaggcagtctacctgcctgggcctcccaaagtgctaggattacaggtgtgagccaccatgcccagccaaagtctttgtcagtggtgaatcctagctctgcccacttctctgagaagctgaagagtcatacctgctctacatcaaatggaacaacaaattgaagggcctggtggtccctggcacattgtaaggctcctgaacattaagtacctctgaacattactattgattttgacacatatttgccctttaagctgggaaatattcattaaaaattaaagtgttctttttctttgtgaggcccatcgtatctttgccagcagtgaatgttgcatcatgaatgaaaaacctaattacatcaaatgtgcaggtcaccgtgcaaaagtttttatccctggtcctttcacagcctttgcagaatatgcctgcttttagctgaagccctgttctgtggcttcagatagagtcagattccttgacatatttgaggatggagagaaggcctccttggccagagcagatgtatgggttattaccagggtgaaattttatgagctgtcccctttttgtgtgtggaaaaatcatacaaagtgctttttcctattttctcacttaacagcaatcaatacagataacttctgtaactttctccccacgtaacaagcaagcagtcagttttgcaggacaccagctaggtgtccttcagttcaactctgatatttacctggagat

SEQ ID NO: 19551 - DNA, 1041 bp, Homo sapiens
caacaggtgtttctccattttcacagtgctattccagccacagtgtggaccccacactcagagagacaggtggccctagtggcctttgggggacagggtgaggatggaggtggggattgtagaaattatatcttctggctgctaaaacaaaagtgcagatccctagtaacactatgtcagcatagcagaaaacttctttttaaaggaagttgtctgtagtttgacagacctcagtcaacccttacttagtcagtgttctgttaccagaccatttactaacatttcctgcttttgcaggtttcgatttgacattgtaccgccaccactagcattttgagaaatgtgttaaatgagagatttgcatattaaagtcagatttcctgcttctaggaattctgaattattaccgagcttggagcaggttaacatattcttgtcccatatgtagttgtcatttttcttcttagtttgaactgttttgcttaagcaaaggttgtgaccttggttaaaccacttgaaaacaatttaaccttaatctccagaagcctcaatgcagggttaaattgcaccaaaacaaatgaagattgccctttaagaagtgaaattgttttatttctctcaaggatcctcttaccaacccccagagaggctctctttggattgagttggtcccaacctgccttgacttcctctgtccctgtgactgtggctgtggctttgatgcaggccaaggggagctgccattctctttatgtgcttttcatggtcattattctcaagaagccagaggatgctaagcaaggagctgaaacagcttcatgttccatgaacaatttgtggaactttgcagatgcaggggttggaacagtggggatgcaggagcctggtttgatccacccctcctcctcataccgagtccagggcctgtagccataggtcctgctgggctaaatgatactgctgcagttccagctgtgatgtttttggttccctcagaccttacgcttgagctgcatgttcagggtcagaatgtggtcagtg

SEQ ID NO: 19552 - DNA, 1079 bp, Homo sapiens
tgcaggcacaagccaccacactcagccaggaatacctaattaaaccattatttaattgggccccagatcttaaggagctcctctgattgtcagaatatgggattgttctcagaattgaaacagtgctatcaaggctgggcgcggtggctcatgcctataatcccagcactttgggaggccgaggctggtggatcacttgaggtcaggagtttgagaccagcctgaccaacatggtgaaacccctgtctctaccaaaaatacaaaaaattagtcgggtgtggtggtggatgcttgtaatcccagctacccaggaagctgaggcaggagattgcttgaagcttgggaggcagaggttgcagtgagctgagatcgcaccactgtactccagcctgggcaacagagcaagactctgtctttaaaaaaaaaaaaaagaaacagtgctatcaaaattgctgattgggaggccggctgcagtggcccatgcctgtaatcctagcacttcgagaggctgaagcaggtgaattgcttgagcttaggagtttgagaccagcctggacaacacaacaaaaccccatcgctacaaaaaaaaaaaaaattaaccaggcatggtggtgtgcacctgtagtcccagctactttgtggggctgaggtgggaggaatcgcctgagctcaggaagtccaggctgcagtgaaccaagattgtgccactgcattctagcctgggtgacaaagcgagaccctttctcaaaagaaaaaaaatattggggattgggttattgattaaatgattgacattggcgtgtgccatagaaaatggatcaatacaatatttacctgttttttaaggatcctttgtagtataggtaaacaaactattgtttataaactgtcaataagtgtagaaggtttctcgatgctttaaggttgagtttagcaacagtatgatacatagttgttagtttttgtttagtgatacaaggcagttcctcattttgacagttgccttttcttttttccctaaatcactagctctcaagcttttaaatctcccaaaatgtcccaaatcctgggccacacct

SEQ ID NO: 19553 - DNA, 2082 bp, Homo sapiens
gactagttgtctcggaggctcaggggagcattccctggtcttctgagattgacacatcactgccaccttctgctgcctttctctaggcctcagagctcagccaggctgtcacaagcttgctgggtgccaccctaatgtctggtgccagggctgaaggtagccctcactccagggagtttacagtgcatgagagactcatagttaaataatagttatggtgctgtatgataagtgatctaaaagtcaagggggggattccagaggagtcagagaaggcaggaagagaaaataagagggccggagaggcccagaagatgccaggcatttgggaagcagttgggaatcagtgtggctgggggtaaacacgggagcagagtgaggacacctaacacatatctgtttggagtttcagaagagctaatatttgaaagctgacagggttttccagaattttggaaagatgctccttctcagatccaggaagcctggtgaatcctaagcaagataaatcaaagaaatccccacctggacatatcatcaggaaactgcagaacaccagaggaagaaaataccttaaataaacctacagagaacaggccattcattacaaagaaatggcaactaaatggatagctaacttattgacagcaacagtagatgtctgagtggcatagagtcttcagtgtgctgcaagaaaaacacagtcaactagaaagccattgctagcaaaatcatctttcttccaagaattgataatttttttaaaaaagatattttaaatttggaaacaacaacagcaacaaaaactgccaacccccagaattctgtattcagtgaaagtgttcttgaagagtaaagttgaaaggatgacatctgttaataaaacactaagagaatttgttgccagcacatctgtaccacagaaatgttaagagaagttcttcaggctgataggagggaaaaccagatggaaactcagatcttcaggacagaatgaagagcatcggaaatgggaaataatttgggagaacatttcagaagtaataaggatataagaaaatttgagcggcacaatccataagcttatgaatttgttgttcccagcaattggagaatacacattctttgcagtcacatgcagaatacttggaaaaaattgatgatgtcctagacagaaaagctagtctcaacaaattgcaaaaaattggtatcacatataacacaatttctgatcacagtacacttatgtaaaaaatcagttaaaaggataagtagaaaaccttcatacacctaaaattttaagaacacttctaaattcttgagtcacagaaaaaattataatgaaaatcagatatatttagaaccaaattaaatatatatttagacggagttttgttcttgttgcccaggctggagtgcgatggcgtgatctcagctcactgtaacctctgcctcccgggttcaagcaattctcctgcctcagtctcccgagtagctgggactacgggcatgtgctaccacgcccagctaattttgtatttttagtagagatgaggtttctcaatgttgatcaggctggtctcaagctcccgacctcaggtgatccacccacctcggcctcccagagagctgggattacaggcatgagccactgcgcctggccaatagtatatttttacataagaatttgtgggacaactgaagcaatagtaaaataaatttatagctctaaatgttcacattagtaaaaaagatataatgaagttagaatagcattacactgacgtaaaataaaaggaaattataaggataaagatagaaattaatgaaaagaacataaacacataatagtatccgtaaagacaagtcagtaattgaaaagagtaatagacaaatttctggcaagaaatttttttaagaggaagggcacaaacagcattaggaatgaaacagcataactgccggcacactcaggatttcatgtcgggtgagaggctgactctttgatcagctctgtgcttacaaatccaaaaacttagataaaatggataaaattaaaaaggaaacagcaaagctaactga

SEQ ID NO: 19554 - DNA, 1032 bp, Homo sapiens
gttattagaattaagaattatttgaattattattagaatcaataattggaatgacttctaattaacagtttggcaagattgctgggtacaaaagagtatacaaaagtttttctgcataacaataaatagatttctatgaaaagtttaaaagatactagttcctagaaataatgcttagttcctaggaataaatcttacaaaagttgtacaaatatctgtgggagataaagggtaaaaattaaaaagattaaatttgaccaaaagatattaaaacttaagcaaatgcagagataccatgtgatcttggtttggaaaactcactattgtaatgataatgcttctccccaaattgatcttggatgcaatgcaattctggccaaaatcccaaaaatatttaatttttgtttcttcacttttgttttttaacttgacaagatgattttgagatgactacagaagagcagagggccaagaatagccaaaacaagattgtgatttgctgtatcagatatcaagaattctcataacactgtttgtgaggataattaagaaggtgcaagtggccaggcgtggtggctcacgcctgtaatcccagcactttgggaggccaaggcgggcagatcacaaggtcaggagatcgagaccatcctggctaacacggtgaaaccccgtctctcctaaaaaatacaaaaaataagctgggtgtggtggtgggtgcctgtagtcccagctactcgggaggctgaggcaggagaatggcatgaatctgggaggtggagcttgcagttagcgatgattgcgccactgcactccagcctgggtgacagagcgagactccgtctcaaaaaaaaaaaaaaaaaaaagtgcaaggacggaaataggtaaatgtagagagcccagtaataagcccacaaagacttgacttacgacagaggaggccctgcataccatgctgcgaggagtggatggactctagtccatgctgctgggatgagtcaagaagaaggtaaccataagggacgatcggtaaaa

SEQ ID NO: 19555 - DNA, 1065 bp, Homo sapiens
taaagtgcagattcatgcagtcagcagatatttgctagtgtctgccatggactcggccggcactgtcacgggctctgagggcacagcagggaccagaacacccgcatgcagtccctgacctgggagctcagaaagccacaccctgacggctcagcctctgcccctccttctgtctccccaggtgctcccgccacctcggcccctgttaaccctttccaggtgaaccagccccagccgctgacactgaaccagcttcgggggagcccagtcctggggaccagcacatcctttgggcctggcccaggagtggagtccatggctgtggcctcgatgacctccgcggccccacagccagctctgggggccactggttcctctctgacaccactgggccctgcaatgatgaacatggtgggcagtgtgggtatacccccatcagcagcccaggccactggcacaaccaaccctttccttctctagtgcctgggcctgggacccacccagagcacctgtgctggaggatgccgagcagggactctcgtctgtgggacgggatccaagagtttggggattaggggtattagggcttttcagctccagcttcctgatgaaagggctgtctttacagccccaaccctcagaccctcgccttccaaggcaggcccctcagcctggcctgctctcaccacctcctccaaagcactgaggtcctggcagggctcctctgaggccttggacgaggacgtggagtcatcagtgttgcccttgcccctaacctcagcccgagggtctccaggatgttgcctggcccaggacttgggacagtggccttgtctttgtcctccccaccccccagccctagggacaccccaggcagtcctgggtgtggacacgatgaagcaccggctccataagacaccttttggggaagtggttgtgcatattttatttttctttgactcgtgtgagttcaaagtaaacaccaccaccgtggacaactcttgaattaaatccactagagcgagctttaaaactaatctgagcataacccccaacgtggctcta

SEQ ID NO: 19556 - DNA, 1035 bp, Homo sapiens
tctttttactccaggtcctccccactggctgaggagaggccaaatggtgagcggactggccagagtgtccacagctcagccacgtccaggctggctcactggggcctgcctcctactgcaggtgttgctctttgctgccccggggaagctcacagggtagggcttctgagtgcagtcttggtggatggatcagggagtccaaccatggctgtgtcctctgctcccgctttaccaggaacactcatgtttgggttcccctgaactcagtctctacctcttaacttgttctgaatggggaggggaaggatatgacaccttcagaaaccccaaaagtcatgaaggcggtaagggaggcccaagagtccagcttaccgctgtgggggcccagtcctggccgtacacaaagcagtacttgcagtagaggtcatcatactctggaaactgaaaaaagcacagacagattctgtcgactggtattcatgctgaggccaatgcatttgctaggcaggtgcagccaaggggaattctgaacgtgagacacctgggagtgggtctaagagacggctggagatgtgttcagaggagaggctgaggaccaagaagcgggagtccacgggagactcccaggtgccacggcccctggcttttgctcaggctctgccttgtctgatttgtccttcctacttcatccggaaaactcctgctcacccttcaaaacttacccttcagggagcctgctctaactctcaagctggtttaaggtctcctcttggctcccttagccccgtgcttccctccataaaagcaatgattgcctgtgtctaagtctgtcagttcctctagaccatgagtagagaagagatttaatgcctttctgtgtccccactgcctggcacagggctgggcacagataaggtctaaggcaggggtcctcaaccagtccgtggcctgttaggaacgggtccacacagcaagaggtgaggagcaggcgagcaagcaaagcttcaactgtatttacagctgctccccattgct

SEQ ID NO: 19557 - DNA, 1031 bp, Homo sapiens
tatggctcgtggcctgtgcacctcgcccgctgaacatcagtacttcatgactgagtatgtggccacgcgctggtaccgtgcgcccgagctcatgctctctttgcatgagtatacacaggctattgacctctggtctgtgggctgcatctttggtgagatgctggcccggcgccagctcttcccaggcaaaaactatgtacaccagctacagctcatcatgatggtgctgggtaccccatcaccagccgtgattcaggctgtgggggctgagagggtgcgggcctatatccagagcttgccaccacgccagcctgtgccctgggagacagtgtacccaggtgccgaccgccaggccctatcactgctgggtcgcatgctgcgttttgagcccagcgctcgcatctcagcagctgctgcccttcgccaccctttcctggccaagtaccatgatcctgatgatgagcctgactgtgccccgccctttgactttgcctttgaccgcgaagccctcactcgggagcgcattaaggaggccattgtggctgaaattgaggacttccatgcaaggcgtgagggcatccgccaacagatccgcttccagccttctctacagcctgtggctagtgagcctggctgtccagatgttgaaatgcccagtccctgggctcccagtggggactgtgccatggagtctccaccaccagccccgccaccatgccccggccctgcacctgacaccattgatctgaccctgcagccacctccaccagtcagtgagcctgccccaccaaagaaagatggtgccatctcagacaatactaaggctgcccttaaagctgccctgctcaagtctttgaggagccggctcagaggtgccttgtgggcaggtcgggtgggcagaggggagacttggacttggacaaggcttcaggcttttaccttctcccctgcccaacttccccgcagatggccccagcgcacccctggaggctcctgagcctcggaagccggtgacagcccaggagcgccag

SEQ ID NO: 19558 - DNA, 1040 bp, Homo sapiens
gagaataacatgagcatgctaaagtgagatatcaaatttatgaaaagaaaagcaaattgaattgcaagagatgaaacaaaaaaatctgaggtggaaatacattggttgacattaacagcagattagacactgtagaagaaaagattagtgaatttaaagatacagcaatggtaaatatcctaaataaaatgtagagagaaaaaagactgaaaaaaatgaaaatgagcaagttgtaagtggcctaaaagcacataatcgtacgtagttcccaaagcggaggagagggaagaggggcaggatactttttttttaaagaaataatggcaaaaaactttccacatttgataaaatcttcagattaaaggtctaaaagggtatttatttgatgtaatcactgatctgaccttgggattcctctagaacatcctggccaagctgtcgtttatacttaattaactcactgatgaggaacttgctacctcccaatgcagcttgattctcagaacacttttcttttgaactgaaacctacctttcctacccataactttcacccactgatactagctgttgggcttatgattctgtaggagagtctgtccatttttcagttactgccctatgggtgtttttatgatggctcatgctccacaggatcttcatggtaaacatttgtaattccttcagtcatttctcatggaatgtggttttgagtctctaccatcttcatcttgaattaacagaagcctgaaggcagtgtccatagtacaaacagcaccatttagagaagaaccatttccattagagcagaacccgttagacttctagggaagtactaagtttttggtggctacaccacatgacctgccaatgtgccactgaccagccacagcatcaccacccttcctttgtgtggttgtcctcctgagcccaagtgcagaatcctacatttggacccattaattgtttttttcttattttctagtcatcttgacatttttggtgtctaatttttccagtgacagtatgtcctatcctttc

SEQ ID NO: 19559 - DNA, 1059 bp, Homo sapiens
acaagaaagttaagctggcttttttgacaggcactgcctgtgaagccacttcatcccaaagggcctctatgccagctcctcagtggaacctccagatagatcgaaacacacaactttaatttttagaggataaggtttttattgcccagtttggcactagtaagccacactaggaatgcaggcagccatccctgcagctgcctgccgcggaactggaagacgggaaaaggtagccactatgtgaaatgcaattcacccatgatcaccaggccctttcttcaggcattccccttgttgctcactgcgagtttctcactagcctccagagtgccaaaatcattgactgtgacatctctcgccatcagtctcacaagagactgattcttgagcttcctactccactgttgttcatgatgtcacctggatagaggcttctcatgctgatttggctctcgttcttttgtagaacaaattttttttttctggaaatctttcagatattatttttgtctctgctgggtgtgcttaggtgtgggtgaatcttttttcttatattctgcttgctattttgtagactttcaatctgaagcattggatttttctttagctctaggaaatttaccctttaaaaaaaattttactccttttccttttttccgttctctccttttggaattctttttggataaaggatagaatgtatggattaatctgacatgtctcttttctcccagtttctatctctgtgtttgggatattttttcaactttatctttcaagttgaaatgtagtttagccatgtctattcattatccagtttctaaaaaaaggtctttagtgttcatatttttcatttccaattacttttctctcaattgctcctcttccttaattgcctgttgttagctgataaatgtctctgataatagtaattataattaaaaaaattttttttctctcatgttccttgcattctttgtttcctgttgtattagcaggcttattttggtctttcctttttttgtgctgttgattttcctcagtgtctggtgaacactg

SEQ ID NO: 19560 - DNA, 1048 bp, Homo sapiens
agaggttggatgaacaatgttcattttgatttgggatgaaattgggaactctcacaaggctttgaagtgatgcagcaattcagtaattttgtttgttttactaagtaaatattgattgtatgattattgacgttcttttaccttggtaatttaccaaagctgtattttgatccttcgggtggtttcaccatcatgtgtaagtggtggaaataccagttcaaagaagaccaaaacaacaaagtggagcaaagattggcaaatggtttctgtaaagggctagatggtaaatatttcaggctttgcagatgttagggtctctgctgtaactaccgaacttactgtagggggaaagcaggcacagccaatgtgctaacaaataggcaactctgatgcagagcaagacttctttccccagcctgctcccactgtcagccccaggaggtgaaggcctgtgggtggactctaagagatccataagaacctttggaactatggacaatgacagatctctgtgtgtgtgcatgctttattttctggtcctcgacctgccaaaaagctgaaacttgctactatcatactactgttaaattacttgaggggtggggtgttagattctgtgaggatataaaaccagattgattttggggcatggctggattttgtacttactgaaattgaattgtgggtctttgtgacatttatatactcctgttgttttaaataggaattttatggagaaaatataaaagagtctcctgattatgaaaggatcatcaatcttcgtcattttaagaggatactaagtttgcttgaaggacaaaagatagcttttggtggggagactgatgaggccacacgctacataggtaatggaaattctccttttcctatgggaagatggcaatttggcagtttttgctgacactacttattaacactagataaactattaaatatatagcatttaattgttaaagtactaaatcctgctttctggtatactgtacctgtagcttttgttataaactatttaaaatgtctgtgtttc

SEQ ID NO: 19561 - DNA, 1048 bp, Homo sapiens
actctgtgatcaaacttaaaagtcattgccattcatcattaataaaagttgccatttcaactacgtcccaacattccctaatagggtattcagggaacctgtcttaaattgtgcttatctaaatcttggaactttgagctaggggaggagaatgtattagactaaatacaaactgcggggttgtaagggagtctcagaacctcactgaatccttcactccagttaatggcactgctcacttcctgcctctgctgccaccatcactgtgtgaagctttcaagagcttggtacttcccagggctaccggcagtcctctgtagtccagagaggtgagattagatcttcttggttccctgtgaggtttcaggcactaaaactctatgtggggaagggaggggttactcctcctccaatgggactcaaggacttgacctccaggagtaggcccctggtcagaagtgccatctcaccagtggtcttcattcttcctcattcattctttatcatcctgtgttctgtttagttgcaacaatctcttgtgactaatgtcactcaaagcatcttgtaaatcctagggcttcctggaagttagttgccaaagtcatgcaagcatcacctgtcattcttgtgttggagttatagaattctacatcttataaaacctaactggcatttaaaaaatactgtggccgggcgtggtggctcatgcctgtaatcccagcactttgggaggccgaggtgggaggattgcttgagtccaggaatttgagaccagcctggacaacacagtgagacctcatctctatcaaaaaataaaaattagctagatgtggtggcatgagcctgtgttcccagctgcttaggaggctgaagcaggaggattgattgagcctgcgaggccaaggctgcagcaggctgtgattgcaccactgcacttcagcttgggcaacagagcaagaccctgtctccgaaacaaataaaaaatactgtaataaaagtacttataaacatactaatcctctttcaggaccctaaagttgcaggttag

SEQ ID NO: 19562 - DNA, 1096 bp, Homo sapiens
gaagaaattaaggaaatttttaaaatttcttgaaacaaatgataatggaaacaacatatcaaaacgtatgtcatacaatgaaagcagtactaagagagtttataggaataaacacctacgtcaaaaagtggaaaaacatctaataaataacctaatgatgcatcttaaagaactagaaaagcaagagaaaaccaaacccaaaattagtagtctgtgtcctgtgaggccagccagaaacatagaaaagcaagagcaaaccaaacccaaaattagtagaagaaaagaaagaataaaggtcagagcagaaataagttaaatggaaacagaccaaaaaaatacaaaagatcaatgaaatgaaaagttgtttttttgaaaaaataaacaaaatagacaaagctttagccagatgaagaaaaaaaagagaaaagatccagataaaatcagaagtgaaaaaggagacataactaataccaagaaatgcaaaggattgttaaacgttactatgagcaactgtataccaataaattggaaaacctagaactggataaattcctagacacatacaacctaccaaaatgcaaccatgaacaaatctgaaacctgaacagactaataacaaataatgagattgaagctgtaataataagtctcctatcacttctcagccttttggctaagatcaagtgtaatcataagtctcctagcaagcaaaagcccaggacccaatgacttcactgcttaattttactaaacacttaaagaaccaataccagtcctattaaatctgttcaaaaaaataaaggagggaggaatatttccaaactcattctataatgaggccagtattatcttgataccaaaaccaaagacacatcaaaaaaaagaaaactacagaccagtatccctgataaacattgatacaaaaattctcaacaaaaatactagcataccaaatttatcatgaccaagtgggatttatctctgggatataaggatggttcatcatatgcaaaccaatcagtatgatacatcatatcaagagaattaaggacaaaaaccatatgatttcaattgatgctgaaaagcatttgatgaa

SEQ ID NO: 19563 - DNA, 1031 bp, Homo sapiens
caaaaatcctggttgacaagatgccatcacctcggtctgaaaagccaaagtatggattatgtggaagactcagaggagaagagcagccctataagggggtttccgtaaaccagaaaaaaatctgtaaccagctaggccccaaaaaggtcatggcactggcctggcagagaggtgggtgtggctgggtctgctgggactgcacactgttgggacaccccaccttcaccctgacctcttccctgcccagctcccttgccccaaacattccccctggtgccatggaggctacactgtcagaaagtgagctgagcctggtagggctgtctagcacacagaactgccagtcgtaacaggcatcactaagctgcaagtcaaacagtgaagcactgggctgcagaagagacatacagatccccgggtcactggacatacaatcactgacctagatagatgtactgttgattaattaacaaattaatgcagaaaggagagaatatgtaataaatggtgttcaaaaaaattttagttggattaatatcttaaatgtaaaaatagaaaccctggaagggtccaaaaaagtataagcaaatgtgtatataatcttgcagtgggttaagtcttttttttttagacagagtttcgctcgtgttgcccaggctgaagtgcagtgacacaatctcggctcactgcaacctccacctcccgggttcaagcaattctcctgactcagcctcccgagtagctgagattgcaggcacccgccatcatgcccagctaatttttgtatttttagtagagacggggtttcaccatgttggccgggctggtctcgaactcctgacctcaggtgatctgcccgcctcagcctcccaaagtgctaggattacaggtgtgagccaccgtgcccggctgggttaagtcttttaagctcgttaaagacataaggaataggacttacatacacattcacaaatctttttttttttttttgagatggagtttcactcttgtgaggctggagtgcaatggtg

SEQ ID NO: 19564 - DNA, 1046 bp, Homo sapiens
cgctcaccgcgagggtccacggcttcattctccaagtcagaccaagaacccaccaattccggacacaaaaggtgttcccaccattcctgtcctcttacttctctcgccttacaagtaggtaaccattgttgttagttacttatgtaccttccaaagtttcttcatgcaaatacaagcaaatatgaatcagattctccatttctccttttttgcacaaatagtagcattattctctatctggtcttcatcctgtgtttttatttcttggtatatcacaaagatcgtcacataccaactgcttgctctttataatgtccccttaggtcttcccaagaatatctaataatttcttctatgtgctctagtaattatctttgcttgggtttgtgttctgttgattcagtgtccctgtttcatcatactgaataaaaacttggtgattctttatgtgttcatcttcgaagtttgagaattccttttttcctgtcttactaggcgtagcgtgcctcctgtgattgttgaagagctgtggtgtgctgctgagtggcgtgtgtattccatgtgaggggaagggtccaacagtcctggtcattcagactgcagttccccaggtaatcaccttgtcaggttctacctctgctgttctatctgctgttacaagtctgttcctggaaacctgttaccatttccttctgcataacagcctcctcccaagcttgtattgggctatggtttgctcaggtaatctggttctgagtactttttacttttcagaaatttcctagacattttagttggccatcggcactcttgttttccaggtttcttttgatttagtgttttaaaaatgtttctaccattccattgaattttaagacacttggaaggcagaagtatgtgtttagtttattgttttggggacagggtcttgctctgtctcccaggttagagtgcattggcgcagtcataggtcactgtaactttgaacttttgggcttaactggtcctcctgcctcggcctcccaaagcgctgagattaccggcat

SEQ ID NO: 19565 - DNA, 1105 bp, Homo sapiens
tcttgaaagggtgaaaagtatttcagtcctggctagagtgactgaggggtgagctcctgctgttgctagggcctgggctgcctacccacctgtcctcactcattctcttgacctcctggccactagtgtcatttgactttatgaccagccactgctgtatgtgaggcaataccttaaggataaacaagcatggtgatgatgttcccaagattgcttggacatggttatggagtgggtggactcggcattgagaacacagtagtagctgctgcatctcatgacactattggatgggtgtcagcatggcagcagaatactgacggactgtgtgcacattctttcagcagtaatgattcattcttttcaaccttttctggatcggctcattcctttttgccaaaaaaaaccaaacaaacccaaaaaactatggtttagtgaaattgcatatgaacaagagttctaaacgagggatctgaaaactttttctgtgaagagctatagagtaaatattttaggctttgcagggccgtgtgttcccttggaactacttagctctgctcctgtagtgtgaaagctgctataggttgtatgtaaatgaacatggtctcttcatttggtctggatttgggctgcagactgtagtttctgatccatgttctaaaccatagtcttaagacttaattttgtcttccttctcttgtttttaaggtgcaaggttatacataacattttgctaatgaatacatggtaagtacctactaggtactaggtgctgagattatagtgatggacaagacacaaatccagtctattcagcttaatgtctgggtggggagacagatgagggagcaggcaattactaaagaggatggcaggccaggacacgggagagcacacaattgggcagcaggggttgggagcagggcatgtcaggtaagacgttctagaagaaggtgatgtctaaatgaagggggaagagggcgaggcaggataatgcaaaggtccttttgaacttcatctgcaaattccatggggtgagagtatagctggaaagctgagattgggttctgtgctgatagcaggaatgacaagaaagactctgaat

SEQ ID NO: 19566 - DNA, 1050 bp, Homo sapiens
ttttagcacccatgtctgagtgagaacatgtactgtttatctttttgtgctttacttatttcattaaatataatgtcctccaggttcatccatgttgctgggatgacaggatttcattcttctttaatggctgaatagtattctattgagtgtatatgccacattttctttatccattcatctgttgatgcacatttagatttattccctgtcttggctgttgtgaacagtgttgcaattaacatgagagtgcatatatttcttcagtatactgacttctttcctttggataaatacccagtagtagggttgctggatcatatggtagttctattttcagttttttgaaaaacctcagtattattttccataatggccattaccaatttgcatccctacccacagtgtataggagttcccctttctccaaatctttgccagcatccattatattttgtctttttgatagtagccattctaactggagtgagaggatatctcatagtggtcttgatttttatttctctgatgattagtgatggtgagcattttttcatacttgttggctattttatacttgcaaggctcccagaatagccaaaacaaacttgaaaaacaagaacaaagtgtaggatgactcacacttcccaatttaaaaatttatacactaacaagtaatcaagacagtgtggtactggcagaatgatagtgacatttgtatgtcttcctttgagaatgtttattcagatcttttgcccatataaaaaccagattatttgcttttttgctgttgagttgttttagtcacttgtgtgttctggatactagtcccttgatggatggatagtttgcaaatattttctcccattctacaggttgtcttttcattctgttgtttcctttgctgtgcaggagctttttagtttaataaagtgctatttttccatttttgtttttgttgcctgtgtttttgaggttttagccataagatctttgcctggaccaatgtcctgaagcgtttttccttatgttttctaccagtagttttat

SEQ ID NO: 19567 - DNA, 1033 bp, Homo sapiens
tttgctacttacttttctatttttcctttttcttacctattatgtttcagatccataaactattttgtctatgtctttatttcaaattattttgtggccgggcacggtggctcacgtctgtaatcccagcagtttgggaggccgaggcgggtggattaggagatcaagaccatcctggctagcacggtgaaaccccgtctctgctaaaaaaatacaaaaaattagccaggcatggcggtgggcacctgtagtcccagctactcgagaggctgaggcaggagaatggcgtgaacctgggaggcagagcttgaggtaagccgagatcacgccactgcactccagcctgggtgacagagcaagactctgtcgtcaaaaaaaaaaaaaaaaaaattttgttctccagtctaaacataccgtaacagtcgtagcattaacctttgtgcattaaaacgcttaacatttccatccaaaaaatttcaggtatttttattttaaaattaaacaggttctccctctttcatccaggctgaagtgcagtggtgtgatcacggctcaccacagccttgaactcctgtgctcacgtgatcctcccacctcagcctcccaagtagttgggactacaggcatgtgccactgtgcctggctaatttttaaaaactttttttagagatggggccttgctatgatgcccaggctagtttcaaactcctgagctcaagtgatcctcctgcctcagcttcccaaagtgcttccccactggcatgagccaccataccaggtcaaaatttcacgtataacacaagaaatacattttttttttttttgagatgtagtctcaatctgtcacccaggctggagtgcactggtgggatctcggctcactgcaacctctgccacctgggttcaagtgagtctcctgcctcagcctcccgagtagcaaggattacaggtgcacgctaccatctcggctaatttttgtatttttagtggagacagggtttcgtcatgttggccaggctggtctcgaactcct

SEQ ID NO: 19568 - DNA, 1051 bp, Homo sapiens
actccaggagaaatcatgtaatcttttggtcgtaataattatattattgtctcagccttgcctagggcgccaacttgccatctgtcatgggtggtattggaactgcttgaatggggaggcatgagcttcctcattcttttcaagactatttccagtttctggtttccaggccttatgctgttctctggggctatgccaaagtttgctccaacaatagcaagaacacagcaaaaatcacaaaaggggcttctatttttgagccctgccacctgcctgcactgtgccggcttctctgagctgctgtctctattcatgctcacaatagccataggaagagcatggttattttatctagaccaggaaccttggctttggaaaggtcaaaccagttttactttttctctcccgtgcccaccacaggtttccatatggaacatccactttttctaattggttttatttcattaatattattcacttatctgaattccaaaaaagaattctgaattcttttttttgttgttgttgttttttctatagacggagttttgctctgttgtccaggctggagtgcagtggtgcaatcatagctcattgcagcctccaacttctgggctcaagcaatcctcctgccccagctctcgagtagctgggactacaggtgcacaccaccggggtctcgccatgttgcccaggctggtcttgaactcctgggctcctcctgccttggcctcccaaagtgctgggattacagacatgagccactgcgcctggcctggattccagttcttattattctttttctccctgaggtgtcctttgtgtgtatctcatgttacacagtggtgtggcttttagagaatgaggaggttccttgtgtgcagggtcctccctgcctgccccagggtcaagtgaaaggttgtggaacccccagaaggctgtcaaggaatccagccactaggtggcagccttgtcaaaagcacccaccttctcctctgctacaagttctggttctgacaaatgtttctgactttagaaacaatgcttgtat

SEQ ID NO: 19569 - DNA, 1472 bp, Homo sapiens
agcacacgtgggatccaaagacatgtcactattttaaactgatatcagtgttttctaaaaggcaaaataaatgtgaagggctagttttactgtggccaaactctgatgcttgcagaatctcagacatctcagatggtgatcagtaagggcaagcagtcgtgattggctcactgccaagaaactgtcagtgtcctcgctgatacctggacccctgcatgctcccagttacctgcatcacaaccaggtaatgcctgaggctccaacctgagacacctgtcctctctgacatgaggagggaataactctgtcctctctgacatgaggaggggaactcgtctaacatggaaggtaagtattcttatccccatctgacatgtgaagaagcgaaagctccaggataggtagtgttcccaaattcaaacccaggtccgactccagagttcttttttctgctactctgtttgtctcaggtagggagacttgttttcttccctcatcatctttacctgttgtagaattactattaccggtgactagcattctttgctcactatgtgctaaccactgttctcagtgtgcgatgaatatggtctcctttagtctttactacagccctatgaaatagtatccttattatcattcccattttatagatcaggagactgaggcataaagagattaagcagactgtccaagtccatgggatataaatattggtaccaggacttgcagattaggaaacaggggctgaaagaaaaccatggatgggttggcttgctggggtgagagtggaggaaggggatgttggaagttttggagttgagaggccggaaggtgggtgggtcagtttcttggatgccacagaaggaggagggccatgagccagggatgtcagggaatggggagaatggggtggggatgtgtagatggcaacagggaggggaagaggatgccaggtcctgctgtgtgaactgcagaaatggaaggtgtctgtttacagtggggaggggaacagacggggggaagcaacagtcataggtatgaggtacagcgagaccttcagtttgggaaatgtgagaaaatgaacagactggccttgggaaggcagtggtgggattcatccagctgtggaagtgaggggacattcagagagctcagcctatgggaaatgttgatttcactgtgagttctgaagggccctgaagaagtgttggggactcaagggaggggcctggggcaggtggggctgaatcgctttggagatgagaacctggaaaatcacagaatgccaggaatgagtttgttcttgttttcataattttagagaggtcatttatcaatgagtatattttgtgataaaaaaaatttcagattcggtatagatgctcctccacttacttcatcggttacttccagataaactcatcataagctgcaaatatgctaagttgaaaacacatttaatgcactta

SEQ ID NO: 19570 - DNA, 1053 bp, Homo sapiens
catggcccactgcagccttgacctcctggtcccaagtgatcctcccgcctcagcctctggaatagtctggatggaccacaggcatgcaccaccatgcctggataatttgttatttttgtagacagagtcttactatgttgctcaggctggtcttgaactcctgggctcaagtgatcctcctgccttgacctcctacagtgctgggactacaggtgtgagccactgtgcctgatcccaacatacatttaataatctacattgcagggaattacattaggaaccatgtgtgggggaccagaagataagacttgcacgtagtcaatgcagtaatgagaagaccataagaaaagtctgtataagagagggcataggcatgactttgttctgtcctcttggccacatcctggctgtgtgaccttaagcaaattaacctaccaactacaaccattccttctgttgggaggagccaaatctgtgggagtggaaaaatcactgagaagaagccaaactctaggatgttgctgtagaaagggcctacacaccctgctgtagaaagggtcctagagtttggcttattttgtgtactggggatcactatgtctccttgcaaaccattgcactgggcgcggtggctcacacttctcacacttgtaatcccagcactttgggaggccaaggcaggcagatcacgaggtcaggagttcaagaccatcctgaccaacatagtgaaaccccgtctctactgaaaatacaaaaattagccaggcatagtggcgcacgtctgttaatcccagctactcaggaggttgaggcaggagaattgcttgaacacgggaggcggaggttgcagttagccaagatcacgccactgcactccagtctgggtggcagagctagactccatctattaaaaaaaaaaaaaaaaatctgtcttttcaaactctagtcttttatcaggtaaacattttctaagttttattcattttttttggaacaagtaagacagtttacttattcaaaatgtaaagggttacagtgaaaagttttgctcct

SEQ ID NO: 19571 - DNA, 1078 bp, Homo sapiens
tgccccaatttggaagataaaatatactgtctcctacttaaccatttcaggtctcagtccagtgtcacctcttcaggtagacctttccctttctctctcagggggcaagtctcctggtttgctgtgactgcagaataaaccccagggcttggttgggctgagccagggtttgccagcagacaaattcaggcttctttctatgtgagggcccatggcaggccagcgtgggaggacgtgagatgggaggggcagccaggtgctgggagggttgggagagacatggggaggaagagtgaggactgaagccagggggaagaaacatggaagtgtgctgtaagctctgtgcccactagcccttgatgagttttaatctgctttacccctcaaggctgtaagagtcagatctgagtgttttgaaaatgagacggtgtgtgcgattaacttgaagagaactgatacaggagagatctttggtgaggcctgattataagtggatgacaagcttcatttttcctaggtgataggttggactgttagacaaaactttggattcagagaaaaggcactctaggtgcattttgcctcctttctttaccttgatggattttcatgttggtcaaatgaagacttgggctacatctatgaaatcccttccaatttttagaagtatataattctgttgtacgctctagtgagtccagactataaagcattttgaattttactatttcttttcccctaattgtgggccagaaaggaaaatttccaaataaggatgcacagtccactctgggaaacacagggaaacaataactagaatacaagtctagcctttgccctggcatgaaaagaatgcagactgttagctgacctaaaggtttctgttttatttcacgtttaggtgaaatggtcagctttgaccattactcccaaagaagtttctctccagactttaagatatttgtgcaacattaagatggttttattatctgtgagacagctgtggtcacttttatttatcaaagtgccatgtttattgtatatgtatcaggagcagtgctggaaagctaaatttaga

SEQ ID NO: 19572 - DNA, 1062 bp, Homo sapiens
tgacttctcaggctcaagcaatcctcccacctcagcctccctagtagctgggactgcaggcatgagccaccactcccgactcctctctattttaaataatactaacacatagatctgtgtttaagtttttgaatgtttcctcagggcaggagtgcttctcctctgtttattctcttgagacgtgagatcaggtagaaatgttcccgtgtctaggtggaggagaccccagtgtgccctttcatttactcctgggctctagagtggaaacttctgtgtttttctctgtgtgatgatttgtgtgggtgccaagggccaaacccacatttagcaaagaaatagtgtgatccacttaaaagggggtttaataacttgagatggagatatcaagctgaacattcacaacaagcataactaaatcagagaggcagaagaaagcattaaccagaaaaataagtactaacttttaaagagtgattactcctgatttaaaacttttactagatgaaatacaaagggtaacagactgtgttgagaactgaattaattttctggaaggagtgtcttgtaaaacaaagatattgtgaggtgaaaaatgtaagatgcttaagggatctatgtaggagacctaataattgaatgataggattcttagaaggggacaaagtaacagatggaaaatacatcgtattataaaagaagaaacccatctgagctgaataaaatgttagacttcagattgaaaggactcatggaattcttttttaaaagacaattgctggactgcagcaataaagatagaaatcctgtcaacttctaggcaggaagataggtctgttttgagggaaattgggatgccataggaattcttacccacttcacaaagaagctagaatagagtctgtatggattattgactctaaggaactaatataaatcttctgtattcagacatatcagcctgggtttttacttgcatgccacagaagctgattttggttggctaataaatttttaaagatgttgagttgctgtgaaattgttagaagggctagagagagatgt

SEQ ID NO: 19573 - DNA, 1027 bp, Homo sapiens
tcctgagtagctgggactacaagtgtaagccaccatgcccagctaatttttgatttttttgatgagacgagtctcactatgcagggagaccccttgagacaggggtctcaaggctgcccagactggtcttgaacccctggacacaggtgatcctcccgccctggcctcccaaagtgtgctgtgctgggattacaggtgtgagccattacaccgagccctcattatcttactgttgagttttgagcattctttgtatattttggataacagtcctttatcggatatgtcttttgcacatattttctcccagcctgtggcttgtgttctcattcttttgatgttgctatttttttccccaattttgttgattcctcttatgatagatgaggatttaacacatggccctgcaaccctctcctagtgtcataatatcactgtttttagtttctttcttggttattgcttttagtaatgtatttcatctttatttcttgtcttgtcaactgtatatagtatctttgacaccctgtttgtaaggtgagggtggatattattgctgccatcctttttgcccactctctctgctttctcttctacctcccagtttctttcatctgtactttacctttttcactagcaaggatgacagtattcatatgttctagaaaatagtcttgcatgttctgtgtgtagtatggatattattgtgactacatatatattgtgccctgcagagtgaagttatgtgctgtgattttgttatctgtcttatacagcttatttttatgaagtttcttgttttgtgactatttttgttacaggaaagggggcccgatccagaccttaagagaggattcttggatctcgcacaagaatgaattcagggcaagtccacagtgcaaagtgaaagcaagtttagtaagaaagtaaaggaataaaagaatggctactccatagagcagccctgagggctgctggttgcccatttttatggttattttttaatgatatgctaaacaaggggtgg

SEQ ID NO: 19574 - DNA, 1141 bp, Homo sapiens
tccagccccacgggaattttcagtaactgtctcaagagagaggtctgtgccacgtggtccctccaaccccaggaaatcagtgtccagtccaacttcttccaacactcccactcctacgaaacacctgaggaccccttccacaaagcccaagcaagagaatgaaggtggagaaaaggctgcgcttgagtcccaagttcgggaacttttggcagaagccaaagcaaaagatagtgaaattaacaggcttcgaagtgaactaaagaaatacaaagagaaaaggactctgaacgctgaggggactgatgctttgggcccaaatgtcgatggaacatcagtctccccaggtgacacggaacctatgataagagctcttgaggagaagaacaagaactttcagaaagagctttccgatctagaggaagaaaaccgggtcctgaaggagaaactgatctatcttgagcactccccaaattcagaaggggcagcaagtcacactggcgacagcagctgcccaacatccataactcaagagtcaagcttcggaagcccaactggaaatcagatgtccagtgacattgatgagtataaaaaaaacatacatggaaatgcattacggacatcaggctcctcaagtagcgatgttaccaaagcttctttgtcgccagatgcttccgactttgagcacattacagcagagacaccctcaaggcccctgtcctccaccagtaacccctttaagagttcaaagtgttctactgctgggagttccccaaacagcgtaagtgaattgtccctggcttccctcacagagaagatacaaaagatggaagaaaaccaccatagcactgcagaagaactacaggctactctacaagaattatcagaccagcaacaaatggtacaggaattgacagctgaaaatgagaagctggtggatgaaaagacgattttagagacatcctttcatcagcatcgagagagggcagagcagctaagtcaagaaaatgagaagctgatgaatcttttacaagagcgagtaaagaatgaagagcccaccactcaggaaggaaaaattattgaactggagcagaagtgcacaggtattcttgaacagggccgctttgaaagagagaagctactc

SEQ ID NO: 19575 - DNA, 1030 bp, Homo sapiens
agcagccctcccactttagcctcccagagtgctgaagagttctttctattctttggatacaaatcctttaccagataaatgatttgcaaatatttcctctcattctgtgggttatcttttcattgtcttgataatgccctttatggcacaaaattgtttaatttttatttttatgaagtcgaatttagttatttttctttggtggtttgtgcttttggtcggaggaattttaagagttatggaatcacatttactgttgagaaagatgacttgggccacagttaggtgagaaagaatgaaggacagaacagggagtgagttgggtgggaagatgagggctggaaagacattcattttatttacttatttatttttgagacggagtcttgctctgttatccaggctgagtgcagtggtgcatctcttcacgcactgcagcctccacctcctgggttcaagcgattctcctgcctcagcctcctgagtagctgggattacaggcacctgccaccacgcccagctaactttcctatttttagtagagacggggtttcaccatgttggccaggctggtctcaaacccctgaccttaagtgatccacccacctcaacctcccaaagtgctgggattacaggcgtgagccactgcacccggcctggaaagacatttagatgttagatgtgtagaagggaggctcagtagggtcaggtgactgatttgatgtcagggacgggcaggaggaaggcatttcagcctattcatagatctccagcttgtaggattgaatgtgcggttgtgctgcttcctgggagaggaaacacagaatgtggggcaggcttgagaagggagcgttatctgctggagctaacaaggatacccaggcctgcaagcccaggctgctgtcagcaactgccgatgcagccacagaggagatccgggagcctctgcccttccaggccaagagtcctccaaggccggggcctcgtgcctgaggtctctctttgcccctccagtacctttagaagctgt

SEQ ID NO: 19576 - DNA, 1026 bp, Homo sapiens
ctgaggactctacaacatgcagccaggtagttatgcagaaggccacagtctgccccaggatgcaagactcaaaagccaccttctattgctgcttttcaaatgatttcagacatcagccttccaggatctaaaatgcattacttcttttctccttaaattcatcttctggccaggcacagcagctcatgcctgtaatcccagcacttgggaggccaagatgggaggatcacttaagcccgggagcctgggcaacatagcaagaccccacctataaaaaaaaaatgaactgggcattgtgatgcacacctatagtcctggctctgagggaggccgaagtggggagaatggcttgagccaggagatagaggctgcaatgacccgtgatcgtgccactgtgctccagcctgggcaacagagcaagaccttgtcccttgactccaaaaaaactaaaaaatagtaaagtcagcttctgtttaataaagtagctattgctaagtatatattggtctttcatgtattgtgatttttcttggtcaaactgacctgtattatattactacctagtgttgtatatataatacatagggcaattgtgagagaaagaatgactttcattgacttttactgttacatgttccaggcactatgataaactctccaagtcattatttcacttaactgcccaccccccaaccctgcattgttagattatgaaacagaggcagagggattaaggaatacaaggcttgattcactagaattggggtttaaaccctggcggtctggctccagaatatatgtccttagtcatcttgatgcatttaagcagctttcaagcttcagagcacaacctgcaatgatctattttgtattacaatccagagtctcacgcctttataattaaaacacaagcttcacagagcagtgctgacccctgagcacaggcagggctctctggctgtttcccaggctgtttctctctctcttctcctgtcctttccctccgtcccttcctcccccctccct

SEQ ID NO: 19577 - DNA, 1019 bp, Homo sapiens
gtacatgtgtcttttttacagtctgcttaataccatgcttttaacatttttgtgcttttgtttttggtgactttgctatttaaaatggccctgagtgcagtgctgtccactgtccccaagcacagtgaggttgagacgcacctacagagaaaacacgtgtattagggaagcttcatgcagacgcaagctcttgtcccgttgtgcgtgagttcggtgttattgaatcaacaaagcgcatcaggctaagtgcagtgacctcatccctgtaatctcagcactttgggagactgaggcaggaggatcgattgagcccaggagttcgagaccagcctgggcaacatagtgagaccctgtcttgacaaaaaaataaaataaaataaaaactagccacgtgtggtggcgcatgcctttagtcccagcttctctggaggctgaggtgggaggatcccttgagcctgaaaggctgagactgcagtgaaccaagattgtgccactgcactccagcctgggcaatagagcaagactgcatctctaaaaaaataaaaaaaccaaaccaaacaaaaaagcccaatacggtgcatcagagaaagggagaagtttgacaatatgtatataaggctgccctgagacatgctaaagcgatgtgctaaagcagccaaattcatggatttgtgagatgacagccagttttaaaaagctgtgggcaatattgttgtgtggctgaaaaccaaagcaatatttgttcacatcacccagggtcaggaaaatgttaaccccttcttggctagtgctggttggctcccaagtttcaaaaggccataaagtgtgagaaaggttaaccttgcaggcaggggaggttctgcagatcaggaggctgaagaagaatttaaaaatacttgctaagtgttattcaggaagaggaaaaaaggaaagagtgggtttccatggttgatgagcctggcttgtttatagagacattggcagatacgtctatataatgcaaatggcattttagttga

SEQ ID NO: 19578 - DNA, 1129 bp, Homo sapiens
tatttttatttcagagtcagaataactgatgttaaggtatgtggggaaggaaggcggtagcctcatctttgcagtcaaccagcaatatctcattcccagtgtcatgtttgcagccaaccagtaacatctcattctcagccctgcctcttgcctctgttaaaagaggtgggaagagggggtcgtttttgaggtctctttaagctctgctgttctctggactggttggttagctgacctttccctggtgggagagtaagaaactccagtgccagccttagagttattctggtgcaatgccttgaacctctttgacacagtggcatctccatatcttagttgtggcttgggagcctgctctttctcttccagaaatgtgaacaagccagtgtgtttttagggacctaaaagtgatctgtttcattggacacatataatgtaatagatgaaaagataataactttttcagctctggctcctcccagttttgaaaactaccaattgagaaaaaggctttgaaatgaaaactctcactgaaatgaacccgtcacatctttttcctgaaaagttgagtcctgggacctggcaaaaacagaaaaaacacaggcagctcaatgtaatgatatattgtgccgcatacaagctttctaatgaaagacatggttcgtgagcagtgcatggcacaggcttctcaagcagcatcagggaaagacctctgtgtttgtggcatttgttcctcttgttctgaaacagcaaatgccattacttttagggtgacttatctgattcttactgtgtctgtcatataacaccaataaacatccatggaaaacgtctttaaaagagataattaaacacacttaatatctgtgcctaattaatgctgttggtttctaaatagaatgtctgtgattcgaatgtgtttcattttgcctataccacaagttcttgcattgtcccctcttggaggtgagcagtgtggcagcgcagcacgtgcagactccactggaattggcttaactccatgtgtgcacatccgtgtcagcctgagtgtcactgtgtgtgcctgtgctgccctctgtgttgctctgatggctctaatgggtcacagccgctcagcatgtgttctcca

SEQ ID NO: 19579 - DNA, 1031 bp, Homo sapiens
gggggaaggatagcattaggagatatacctaatgtaaatgatgagttaatgggtgcagcacaccaacatggcacatatatacatatgtaacaaacctgcacattgtgcagatgtaccatagaacttaaagtataataaaaatatattaaaagaaaataaataaatatcaagaaggagaaagaaaaaaaaagaataagaagtcagagggaggcagctgcctgcaggaggtttagcgtaaagaaaataggaatggtgatgggaaattgaagaaaacatttaaaaagagctgtcattcaagaatgactccactgatgccgcctgtgctgttccccacctgacagtaatggaccaaggcagctgccagagtgcatatgaaaagacaattcacgttttcagaaggagtggccttctatgatgtaaccttgttgtaatgcagggaagagacagacaataagatgtttccagtcaggatcacaagaacactatttcctgctggagtgatttgtgtgtgtgtgtgtgtgtgtgaacattttggattcgttttcaaaacattttacgtttgatgaaacccaaaactcattttgcctgtagtacttttcattcatcatgaaatctctgtaaaattagaaatatgaccatgtgtctgctttatttacccttcacaaaatatgtctagacctgtttgtctgagacacctcatagtcttgttctctcagaattaggaagccaaaaataactggtgaaaactttttgaaaaccgggaaccatgtgtacttgacttaaaataactttccttttatttcatcaaaatacagcgtgaaaggttatgttacatccctccatatatatatatttttatttcagctttagttatagattcagggggtgagtgggcaggtttgttacaagggtatattgcttgatgctgaggcttgagttatgggtcccgtcacccaggtagtaagcatagtactctgtaggtaggttttcaactcaggccttcttcccttcctcccttgtctagtagtccc

SEQ ID NO: 19580 - DNA, 1015 bp, Homo sapiens
ttttctctcacgagccagtgtgctgtggggcacccgctcccactcccactctcagtggtgtgtgcatgcccagaggtatgaaacttcaaggaataaaagtggctttctgaacaaaaatatcaaagtgtgtagagacctgtcagactgttcgcacagcagatggggagggacacgttctcccaccttagtctgcacaaacaccgaagaagcagccctgacaagtctaagctgggcacatccccaattccttgggaattttggaaataaaactgagaaagattactctaaaatataaagcccagatgctattggcagccatgtttttgcctctgtgcaaaaaagacttaacccagtaggcctgggacggctctctttagcaaggctgcttgcaaggctggcccttggctggcgtctgggaactgggattacaggagggttcccattgtttccagaactgatgagaggggctcacggtgctgaaactgtttgtgcaaacacatggtatgtgctgaacagcagctttcctttggggagtctggaatgtagtatgtgctgggcagaaggggctggatgctgagtccctagtgagcttccctggttggcagcattttttcttgagatggggtttcagtcttgttgcccaggctggagtgcaatggcaccatctcggctcaccacaacctccgctcccgggttcaagattctcctgcctcagtctcccgagtagctgggattacaggcatgtgccaccacacccagctggtctcaaactcccgacctcaggtgatctgcctgcttcggcctcccaaagtgctgggattacaggtgtgagcccctgcacccggccggttggcagcatttcacacgtgttgtcatggcttgttgccaggggaattaaacatgtccgtgactgctggagagaattcttggaagcacgtgcctggtttcctcgggacttcctgccctgtgccttttccctttgctgatctggctttgtgtcctttcgcagtaataa

SEQ ID NO: 19581 - DNA, 1912 bp, Homo sapiens
agatgttgtgagacttattcactatcacgagaatagcatgggaaagactggcccccatgattcagttacctccccctgggtccctcccacaacacttgagaattctgggaaatacaattcaagttgagatttgggtggggacacagccagaccatatcagatggagtcttgctctgatgtccaggctagagggcaggggcgccatctaggctcagtgcaacctctgcctcctgggttcaagtgattctcctgcctcagcctcccaagtagctggtactataggtgcacaccaccatgcctggctaattttttgtatttttagtagagatggggtttcaccatgttggccaggctggtctcaaactcctggcctcaagtgatccatccgcctaggcctcccaaaaagtgctgggattaacaagcgtgagctactgtgcctggccaaaaagggaacacttttatactgttggtgggaatgtaaattagttcagccgttgtggatgacagtgcacacggctttgaattgtcccccagctgcactggactgggagttgctggtgctcctgatgctcagctagaattagagataattttagatggcaactaggggactcggttggggttgttccactctgagatgaaagggaacgtctttatttaggagtataatgttcttggagcgagtgttatgtcacaaaccatagttgggtggcctctacctctgccaacgtcagcaataaaaagtctgaggcagggaaactttttagagagaagaagagtgtttcctgatcatgggcttgggcttgtctacctgactagatttggacttttataataattcttttttaagatggtacacattctcctttttcctgtgttgtttctctgtggtctcactgctgcagtgccaggatctgcattcaaatacggccgagcccccagagcaccaccagtgcagtctgtcctgaggcactggactctcagagctctcctgcgggtttcagtcattttgtttggtttttcaaccatggctttgatcttgccagactttagtctcaacctgtgacccatttatagttacagatcaagaactagtggtcactttggcaacatacataccaacatggaaatgatacagagaagactggcagggaccctacacaaggaaaacaaaaaaataacttttttttttttttttaaagagagtctcactctgtcacccaggctggtgtgatcatggctcactgccaccttgaatgccagggctccagtgagtctcccacctcagcttcccaagtagctgcaactacagacatgcaccaccacacttgtctgatttttatttttatgtattttatatttatttttttgagacagggtttcactctgttgccctggctggagtgtagtggcatgatctctgctcactgaaacctctgcctcctgagttcaagcaattctccctcttcagcctcctgaatagctgggattacaggcacacaccaccatgcctggctaatttttaaatttttttggtagacgtgaggtttcaccatgttgcccaggctggtctcgaactcctaacctcaagtgatctgcccaccttggcctcccaaagttctgggccaccactctgagcccaaaaactattcttgacagtgttcaatgaactagcatatgggcgccttcttggttgtgggagatggtggcattgttgagcttccggatccatctgacctctcaaatgcttctgaagattttgcagatgaagaaaaatgctgttttgtatcagaaatgatagaagatgtaagtgtgtatataatgttctcatgtttttggaaaagaaggatttagcaagtgttaaagtgaatttgggaagggagcgaggaagggtgagaaggagaacctggcc

SEQ ID NO: 19582 - DNA, 1059 bp, Homo sapiens
aatcttggctcactgcaacctccgacttccgggttcaagcaattcttctgcctcagcctcctgagtagctgggattataggcacgcaccaccatgcccagctaattttttgtattttttttagtagaaatggggtttcatcatgttagccaggctggtctcaaactcctgacctcaggtgatccacccacctcagcctcccaaagggctgggattacaggcatgagccactgtgcccggccctttatccagtctactgttgatggacacctaggttgatttcatgtctttgctattgtgactagcactgtgatgaacataagtgtgcatgtgtttttgatagaacgatttcttttcttctggatatatacccagtaatgatattgctgagtcaaatggtagttctgttttaagttctttgagaaatctccaaagtgccttccacagtaactgaactaatttacatttccaccaagagtgtattcccttttctccacagccttgtcagcatctgttactttttgacgttctatcaatagccattctgactggtgtgagatgatgagatctttaaaaatgaagctctatagtgttccccagatattagaaagtgttctttctcagccaccgtgtaaggagagcatcttagccagcccaattacagatgcaagcaactccccagaaaaggaattaggcgagggacgatatgtgatgtcactgtcataaaaacggccaaaacatgtgtccccagggctgctgtgtctttaccaggccatgtagtccatgagggctgttgctcactgagtgccagcatgcccaccaggacagctgctgcaggactgggtgctggcatgcccccgtggagggaggtcaccatgcagcaattcctgaggcatggctgggcctactctgcaagtgtaaacttaatgagctgtgcttaaatagctaatttgtgcttgattgtgtgacaagcattttgtttttcatatttactgtatgtatttaccattttgggcatttttcatgcaaggacttgttggaccctcatggaggtcctgca

SEQ ID NO: 19583 - DNA, 1047 bp, Homo sapiens
catagttcactgatgtctcaaatttatgaatcttctctttggtgatgtctaatctgtgttcacctccatccattttagctttcattcctgacattgtaatttgaatctctacaagtgtagtttgctttaaagaaaaatcttccatgcctctgcctgtctgcttgagcttaattttaatatacagttgagttccatatgaacagcttgatctttctgatcttgcttttatgattggtctaatttcctgctcctgaggcaagatctttgtgatgactctattcattgccatgcgaagtctgagttttcccagcatcactcatgggaatggacactctttttggcacatcgtgaacaccagacatgtttctttccagtgttttttagatgtttttttccccttgatctggggcggttttctggcacacatgtgctgtttgttactctgctagatacccaggaggtatttttgcaaatcttcagtgttctttccctgtactttgtctcctttccggtgttctgttttgtgatctctgtgtgccttggctttaccagactctcagcttcatcatctcatctcagggaatctggtggactctatgtcagttttttctctctgtgcggtagcctggaaactccgtgaaggcagggagctggagtgttggatgaatttcctttgtttcctgtcttacggggatcattgtcttcattacctgaagtccactgcctggtaaatcattgtataatatattttgtctgttttctttttggttgtttcaggccagaaggtaaatcagtacttgctgtccattgtggccagaagcagattccagcagagcttcagcacctgctgtcgactggcaagaatgcttttctacccctttgcttaactgcttccttctcacccttcatttctcagtgtagccatctgttcctcaggggaatcttccctgggcccattatagatcaaattcttctgtgtgatcatagaactctgttttcttacaccatatatctgaatttataattgtcatttttgttgtgtttgtt

SEQ ID NO: 19584 - DNA, 1954 bp, Homo sapiens
cactttaaatctccagtcatttacagtgtcattggtttacttttgccctcagaaaaagttccaaattccttaacatgtaatataaacacccacattcatttggttcttgtcaagttactcaggcttatctctcaccacttactttactctgcccctttgctctaggatccagccaaactggactgcacagaattccacagtgctcgtccttctcctccagctctttgcacttgcttctttgctctatctgccaacctttttttctcatccttcaggtatccactaaccatgcctccaccgaaaaacctacagtatcgagacaaaactgggataggtgtccctcttgcattccaatagtgccctgttttatacctgtcagggtatctatgacttggtatggaaattgcctatttgtctgctttttcaggttatagcatgtgattgctgaggggtggactgtatcatcttcatcttgtaactccagggcatagtctagtaccttagcatgcggttgttgaataaatgaatgaagaatgagaaaaccagaagctgtgatacacaaccacaatgatcatttagtgtgcaactatgggcagattcttatctaataataagttagcattgtagtcatacatacttttcattcttgttaacactgaaaaagctctcaactcttttttactgatttgcacttagttaactatgaaatatatagaatataattctttggccaggcatgttggctcacgtttgtagtcccagcactttgggagcctgaggcaggcagatcactggagcccaggagtttgagagcagcctgtgccaacatgacgaaaccctgcccctataaaaaatacaaaagcttgccaggcacagtggctcatgcctgcagttccaagtacttggggctgaggcaggagaattgcttaagcctgggaggacgagactgcagtgacctgtgatcacaccacggcactccagcataggtgaaagagtgagaccctatcttaaaataataacaataataataataataataataataataataataataatataattcttgctttttttttcagctgctactaaatatgaacctggatcctatatagcttctcctctaggatttacacacaaggaaaatctgaatcaagatccagttttggaagtagcaaaagaatatgcacagattttaagaagaaaatacatactctgaaagataaggcaattttatttgggctattcacatgatattttgtttcccattaaatatatgatgtgaacatttttactaaagggaaatattctatgttatacatgtctgatgaaaatttatatagtattttaaataatgtttcttggcctcttcagctaacttttaagtggattttgcaaatgaaaaccagtattactgagttttacatactcgaactgcccaaatgttagctgtttaaacagccaaataatcaagttgccattaataatttagtggagccaattgatggcttgtttgtattttataattttatctttatacatagtgatagatttaagtttagatagacatcattttggtatactggtactgtggtcattgtcaatgtttggatatattacgattgttatagtgcaatcaaacttagataattttaattttaagcactgatttatttagatctttccttgtggaaaaataaggtttgcctaaggctttttgcttttttatttattgtttcatttctttattagattaacttttgggaaacagtcttaaaattggagaaaatttccacattttaggaaaaacagctttccccctgtgggccatttgagagtaaattgctgacattatgccatcacatctggtatgtgggtattcccacaagtcaggacattttatataactacttcataatcagaaagttaacatcaatacacttgatcatttcat

SEQ ID NO: 19585 - DNA, 1163 bp, Homo sapiens
ttgtttattcatttagaccctgcaagttgattctcattaattgtcagattccactacactttcttcctcataggtagtaattaccagtgtaactaagcatttgtgttctgatatctgaggccagtaactattaatatctagttctcagagcatttggaaaggttatcttaaatggctacctaaattgaaatccttttcagaaaaaatataattgcaaataggtaggagtggcctaaattatctaatgtaataaagtcagacaaaatgcatactttatagtttcaagattttcagtatataaaatctgtcctttcctacctggacatgtcccattaaaaagtggaagatcttaaataatttctttacagatgttttatttaagcaggtagcacaatctactaatgttgtttgatctgtgtttgttatactggttgtaattaatttttttaattcatgaactagcggaaaatttattaaattaactattaaccacattcaccttgtaaatgactgtataaaacttgttgacaatgcactgactttagaaagatgttaatgtgcataaatagagtgtaaataaaatagtgttgatgtactgaaatatgaactgtataaaaagtattggtaattgtatatggggtgtacctatttatctgtaactgttatccaaacaaattaaatactgtggatgcctctatgtactgtttttcctcatacaagtaaacacagaaagtcaaattcttcagcctccctctctgtgatcctgttttaattctcctacttgaataatttctttctgacttacagaggggatgcttcatctctgaggttggaaactctgtagagcaggattccccaactcctgggctacagaccagcaccgtccatggcctgttaggaaccgggctgcacagcagcaggtgagtggtgagctgtatttatagccgctcccccttgctcccattaccgcctgagctctgcctcctgttagatcagcagcggcatgccattctcgcaggagaacgaaccctattgtgaactgcgcatgctagcaatctaggttgtgccctccttatgagaatctaatgcctgatgatttgaggtggaacagttttatcctgaaaccattccccccagccccccagtccgtggaaaattgtctt

SEQ ID NO: 19586 - DNA, 1657 bp, Homo sapiens
tcagcctggaagatcgaggctgcagtgagccatgatggcaccacagcactccagcctgggtgacagagtgagaccctgtcttaaaaaacaaacaaacaggggccgggtggtgtggtgtcggtgtcggcagcatccccggcgccctgctgcggtcgccgcgagcctcggcctctgtctcctccccttccagccctcacctccacgcgggaccgctcgcgccagtcaactccgcgcacgttgcccctgcttggcagccaataaaagggggctgaggaaataccggacacggtcacccgttgccagctctagcctttaaattcccggatcgggcacctccacgcaccgcggctagcgccgacacccagctagcgtgcaaggcgccgcggctcagcgcgcaccggcgggcttcgaaatcgcagtcctccggcgaccccgaactccgccccggagcctcagcccctggaaagtgatcctggcatccgagagccaagatgccggcccacttgctgcaggacgatatctctagctcctataccaccaccaccaccaccattacagcgcctccttccagggtcccgcagaatggaggagataagttggagacgacgcccctctacttggaagaagacattcgccctgatataaaagatgatatatataacctcacctacaaggataaggaaggcccaagccccaaggttgaatatgtctggagaaacatcatccttatgtctctgctacacttgggcgccctgtatgggatcactttgattcctacctgcaacttatacacctggctttggggggtattctactattttatcagtgccctgggcataacagcaggagctcatcctctgtggagccactgatcttacaaagctcggctgtccctgtggctctttctgatcattgccaacacaatggcattccagaatgatgtctatgaatgggctcgcgaccaccgtgcccaccacaagttttcagaaacacatgctgatcctcataattcctgacgtggctttttcttctctcacgtgggttggctgcttgtgcgcaaacacccaactgtcaaagagaagggcagtacgctagacttgtctgacctagaagccgagaaactggtgatgttccagaggaggtactacaaacccggcttgctgttgatgtgcttcatcctgcccacgcttgtgccctggtgtttctggggtgaaacttttcaaaacagcgtgttcgttgccactttcttgcgatatgctgtggtgcttaatgccacgtggctggtgaacagtgctgcccacctcttcagatatcgtccttatgacaagaacattagcctccgggagaatatcctggtttcacttggagctgtgggtgagggctttcacaactaccaccactcctttccctatgactactctgccagtgagtaccgctggcacatcaacttcaccacattcttcattgattgcatggccgccttcggtctggcctacgaccagaagaaagtctccaaggccgccatcttggccaggattaaaagaaccggagagggaaactacaagagtggctgagtttggggtccctcaggttccttcttcaaaagccagccaggcagaggttttaatgtctgtttattaactactgaataatgcta

SEQ ID NO: 19587 - DNA, 1102 bp, Homo sapiens
ggaatgcagtttattttgatgggcatcttctatggggcctgaagacaaggctttaattgcagtcagtgtttaagatttagcaagactggccggggatggtgactcatgcctataatcccagcactttgggaggccgaggtgggtggatcacctgaggtcaggagttcgagactagcctggccaacatggtgaaaccccgtctctactaataataccaaaaaaattagctgggtgtggtggtgcacacctgtaatctcagctactcgagaggctgaggcaggaaaatcacttgaacccaggaggtggaggttgcagtgagccgagatcacaccattgcactccagcctgggcaacaagagcaaaactccattaaaaaaaaaaagaaaaagatttagcaagacttggtgtcctgttttagatccaggactcaaagccctgtaactcaatgtcacaaggactttaaaagcacatacaggaagatacatggaggctgaatcacttgaacctgggaggtggaggttgtggtgagccgagatcacacctttgcactccagcctgggcaatgaatgaaactccgtctcaaaagaaaaaaaaaagaaaaggttttgtgggtttttttgtttgtttgtttgtttgttttgagatggagccttgctctgttgcccagactgaagtgcagtggcccgaccttggctcactgcaacctccgcctcccaggttcaagcgattcattctcctgcctcagactcctgagtagctgggattacaggtgtgtgccactatgcccagctaatttttgtatttttagtagagacagggtttcaccatgttagccagactggtcttgaactccctacctcaggtgatctgcccgtttcagcctcccaaagtgctgggattacaggtgtgagccaccgcacccagtcaaaaaaagttttttaatctcagtttttttatttctaagcaaaccaaaacttaataataatatggcaacttggtcatattaaagttttttggcttttaaaattttttttatttttatttcttttttttttttgtgagacagagtctcactctgtcacccaggctggagtgcggtggt

SEQ ID NO: 19588 - DNA, 1051 bp, Homo sapiens
aaaccctgtctctactaaaaataaaaaattaaaaaaaaattagctgggcgtgttggcaggcacctgtaatcccagctatttgggaggctgaggcagagaattgcttgaacctgggaggcggagttggcagtgagccgagatcacaccactgcactccagcctggatgacagtgtgagactctgtctcaaaaaaaaaaaaaaaaagaagttgccacttgttcctaacaagtaaaaagcttaacaaactgaaaaatcaactcttctttgatacatcagagacatgaaatcataccgcacacagttgcccccaaaataaaagacagataggtggatacatggaatcacacttactggagcagaaacctctgtgggaaccagtcctgtggtaggaaaacatgaagtgtaattgacaaattgctggagactcagtgtggacaagtctgagagtgatttagttgaatgttgttcccactaaaatctcatgttcaattgtaatccccaacgttggagatggggtatggtggaaggtgattggatcatgaggaatcttatgaaatggtttaatgccatcctcctggtgctgtcctcgcaacagtgagtgagttttcacaagatctggctgtgtaaaagtttgtggcatctttcccccttgttctctctcgctcccactctcaactactccctgttcaccatccaccatgattgtaagcttcttgaggcctccccaaaagctgagcagatgccagcaccatgtttgctgtgaagcctgcagaaccatcagccaattaaatctcttttctttatgaattacctagcttcgggtgttgtttttttatttttattttttgagaaaggatctcactgtgtcacccaggccagagtgtactgtcctgatctcagctcactgtagcctcagcctcctgggctcaagtgatcctcctgcctcagcctcctgagtacctgagacaacaggcacatgccaccacacctgccttatttttgtattttttgaagagacgggatttcaccacattgcccaggctagtgtcga

SEQ ID NO: 19589 - DNA, 1041 bp, Homo sapiens
aaaatgctcagttaaccacagtgggcagaagaactgtggaagacaaaaagaggagcaaagaacaagggtaacaaatgaaaaaaaattaacgaatatggtagctattaatccagctatgtcaataatcactttaaatgtcagtggttttgtcagttacatcatttaaaaggcagagattgtgagagtttatcaaagaataagacccaaatatatgttgtctaccagaaaccaactttaagtataaagacacatatagattaaacataaagagatgaaaaaagatccaccatactaacactaattaaagaaagtgggagtagctatatttctacacagagtagactacagagcaaggaaagttatcagggttaaagagcattacattatgaccgcagatcaatcctccaataagacaataatctttaatgtatatacacataatagagcatcaaaatatgtgaggcaaaaactgatggaactgcagggagaaagagatgaatccactattgtatttggagacttcaatgctcctttatcagaaagacagatttggcatgcagaaaattagtaagaacatagttcaactcaacagcggtcaattggatatagttaacatgtataaactactttgtccaacaacagcagattatacattcttcccaagtgaatgaaacattcacttagaccacattctaggccacaaaacacaccttaataaatataaaggaacagaaatacattgtctgcttccagaccacgatggaattgaactagaaatcagtaacagaaagataactggaaatcccccaaatagttagtgattaaacaacatacttgtgaataacacatgggttaaagaagaaatctcaagagaaaactgaaaatattttgaagtaaaagaaaatgaaaaccttaccaaatttgtagaatgcagcaaaagcagtgcttagagggaaatttatagcattgaatgtatgtattagaaaagaagaaagatctaaaatcaacaatctaagtttatactttaggcaactagaaaaa

SEQ ID NO: 19590 - DNA, 1093 bp, Homo sapiens
attttgggaggctgaggtgggcagatcacaaggtcaggagttcgagaccagcctggccagtatggtgaaaccccgtctctactaaaaatacaaaaattagccaggtgtggtggcgtgcgcctgtagtcgcagctacgcgggaggctgaggcagaagaattacttgaacccaggaggtggaggttgcagtgagcaaagatcgcggcactgctctccagcctgggcaacagagcaagactccgtctccaaaaaaaaaaaaaaaaaaccacattaaaaaccaaaattgtgtgtgtccaagttcctaggtagccatagtaagtgctataattgataaggagggctttaggccataatgaacagacagacttggcgcgggctctgcctcctgttcattgtcaccgcactcctgtgccatcatattacagggcccggggctgggctttggcacctttctccgccccccctcacaggattgccgggaagcatgtgcttggcatcttactggagagcagagctcacttcaatgtggctgctcttcccaggattgaacactcaggagcctggtctgaaatctccagccttccttcaggttttatttttactaaagccagcctgtactcttttaaaccagggagctgaaggctggcttctgaaaatacaccccacaggccactctgccgtggcttgttcaggcattccagggagggcttgctgacctgaaggtgtcctctggcccaggtcaaaagaccagagaagacactggcgccaggaaccgccactggcaaggtagctgccatctgaggtaggatattgttcttttttttttccagtcgaaggcggccttaatgtggcttctcagacatttgagaccaaaaaaaaaaaaaggcagtttgaccctgcctttactttctgaaaatgacagaagctttcagatatatttcaagatatgggtcataagcatgacccatagtttatgtcaccttaaatagagcagctgattagaactggccattggttataaaataaaagagtacgtgtaggtttgtgggagcaggatcctaactgctttagcaatactaagccactccttgccg

SEQ ID NO: 19591 - DNA, 1101 bp, Homo sapiens
tttcttcttgagtcagtttaggtaatttgtgtttttcaaggaatgtatccatttattctagtttttctaacttgttggcaaataattgttcatagtattcttttataatcatttttataatctttataattttttttatcatctcatcatttctgtaaagtcagtggtcccactttcatttctgattttagttatttgtgtcttctgttttttccttgtcattctagttaatgctttctcaattttgttgatcttttcaaagaaccaacttttggcttcattgatttttattgtttttctgtattctgtttgtttatctctgttctaatctttattataatgtttccttcctctgctggttttgggtttagtttgctattctttttctagttccttaaaatataaagttacattattgttttgaggctaagtgatccgtgggacacatagctcagatggcctgccactcagaaagtgaatttgtatctgttgtatttgaccaggtgcagacacacaagccttacttggtgaccttcgacctcacagactctggggccatagttgcagcagcagctgagatcctgcagtgctttggctatgtcgacatacttgtcaacaatgctgggatcagctaccgtggtaccatcatggacaccacagtggatgtggacaagagggtcatggagacaaactactttggcccagttgctctaacgaaaggtaacagtcttgagaaaagagcagtgataagtgatatgttggcattctttttacttcacttggatccttttcagctaaacgttccccatctccatcctctctgttgccctggagtgggtgttaggtgttattgttacagtttgggtatttgctttatagcttccaatcaagatgttctctttagtgacagccacatttgtgcagcattacctacatgtctttttcatggtgcctgcaaacccctacaaggtggggatatttttatgtcccaccatggatttcagtccaggggagaggctccagcaggaaaagggaactgagctaaccatttgcagtgacctctgtccctgtttccttgcctctctcctctctcctgctggc

SEQ ID NO: 19592 - DNA, 1755 bp, Homo sapiens
acgcacccactcctgccctggccgctgcgacggcataatctcgggatctttgaaggcagatgcggggctaaaccatcccacctgacgggaaccctgccacaggacccgacatatccctgtctggacactgctgtaacgagtcaaagtcaggaaggactaactggagcccagagattcccaggtgctgctgcctcagacctgtggactctttggaggatctcttacagtttgtgaacttctcagttcctctactgctcccacagacaacgttgctaaacatattaattggtcccataaatacttgagcaaaacaaatgcgaaaatctgtcccgaattcagcctagaagaagcccagccctgcgcgtcacacttctgtgtagtggaaccccccttcccaccccgccgcaggccacagcaggagggccagcagacggaaaggcgaccctctccttgttgaggattcctttcgatttccttccagctgacattctaccacagttttagctgcttgcaatcctctcaccgtccctcatcacctacagtgtgtgattcaaattccttagcacaatcaagaagcccctccttagtttggaagttgcctagctctccaaattcaactgcctacctttcccgtctggaacttgccaggctagtaaattcagagggtttgcagatacgtagatgttctatgctttacctaaaatgcttttacctcccagccaacttttttttttttttttgagacagagtcttgctctgtcgcccaggcttgagtgcagtggtgcgatcttggctcactgcaacctccgcctcccaggttcaagcaattctcctacctcagcctcctgagtacctgggattacaggtggtgccaccacacccagctaatttttgtatttttagtagagacggggtttcaccatgttggtcaggctggtgtccaactcctgacctcatgatccatccccctcagcctcccaaagtgctgggatttacaggcatgagccacggtgcccagctctcccagccaacttttgtccttcaagaccttgtacctgtctggtctctaaaaagtacctggccttcctgttgagtcatacagccctgcctccaagtgtcagcgtagttcatgctggagacctcttaacagttccatggtatgacactgcggatatggctgtcttttctttgtatcagtgtggtgattcagagggtatactagggattctagaacgcacttctggctcaggggctgcttgtgtaacttctgtttctcagctgcctggtttgtatcatgggatgatagtatctcccctcagaggattgcggtatttcatgaggtgatacgtgtatggaggccaagtgctgttttatattttaagtgatctacatcttgattttcacaacaactgtataaaagtgatactgttggccaggtgcgttagctcacgcctgtaatcccagcactttgggaggccaaggcgggtggatcacctgaggtcaggagttcaagaccggcctggccagcatggtgacacctcgtctgtactaaaaatacaaaaattagccgggcatcgtggcacacgcctgtaatcccagctactcgggaggctgaggcatgagaatcatttgaacccgggaggtggaggttacagtgagctgagatcgcacgactgcactccagaatggatgacagagcaagactctgtcttaataatagtatcacttttttttttaatcaacaatctcattttg

SEQ ID NO: 19593 - DNA, 1026 bp, Homo sapiens
gaatttaccattaaaagcatcaaaatgagcattttaaaagtagaattttaagtctgaatgggcagtatattcacatggtataaaattcaaattacaaaacaatatacagtgaaaaataagggggtttttttgctcatcttcttgtgacctggctctttccatctctgtccacaaccctctgcaggcaataactggtacctttgttatggatcctctgcagatataaagtagacatatattaacaaatgttttctttggcccagaggatgcatattatgcacattcctccatttcttgtttgtttttgttttttccacttaattgtatcttggagatcactctgtatcagtatatatctgatttgttttagcagtacatgataatccattgtttggatatgccataattgtatcagccagtctctggacagtcttttactatttcaaggagtgctgcagtaaacatgtttgcgccacttcctggtacccattgcaaataaaactgggataatttcctgacgagaacttgctgggtcagagtgtaggcacttgttgttttgataaatattgccagactacaccccactccctccagcagtacatgacactgcctatttccccacagctgtgccagcatggtctgttagcaagtgttttctttttgcaaatttaaaagtggtatctcgctaaatgcaatatggtagcagaggacatttgtggaaaaacaggtgaaatctgggctgggtgtggtggctcatgcctataatcccagcactttgggaggccgaggcaggcggatcacaaggtcaggagttcgagaccagcctggccaatatagtgaaaccccgtctctactaaaaataccaaaaaaagttagctgggcatggtggtgcaagcctgtaatctcagctactcgggaagctgagtcaggagaatcgcttgaacctgggaggcggaggttgcagtgagccaagatcatgccactgcactccagcctgggtgatggagtgagactctgtctcaagaa

SEQ ID NO: 19594 - DNA, 1048 bp, Homo sapiens
tttggggttggagttgggagagaatgcctgagaaaaggtcaggtgtggtggctcacacctgtaatcccagcactttgggagcccgaggcgggcagatcacgaggtcaggagttcaagaccagtgtggccaatatggtgaaactctgtctctactaaaaatacaaaaaatagccaggcgtggtggcgcatgcctgtagtcccagctactcgggaggctgaagcagaagaatcgcttgaactcaggagactgaggttgcagtgacccaagatcatgccactgcactccagcctgggtgacaaagcaagattccgtctcaaaaaaaaaagaaaaaagaaaatgcctgagaagataggaattggtggagatgaggggacacaggtccccaggcctcctggacttacatagcctgggaaggcggagtcagaagaaggaggatggtatgcgggaagagaggcaagaaagatgccagcgagggagaacagcagggggcatgggaataatttgggatttgcttccacggattgggggggcgacaggtcttagcttcctgtggccactgtagcaaatgaccagaaatggggtggcttcaaacagcaagcatttgttcagaagaatgaaatcagggtgctgggagggccgtgttccctgagaggctctggagagatgctccctccctctcccacttctggtggctgtggcctgcctggactcgtggccttgtcacgccagcctctgcctcatggttgcacgtcagccttcttggtctcaactctccctccgcctccctcgtataaagacacttggttgggtttagggcccacccagataatccaggatgatctcctcatctcaagatccttaatctcactgggtgtggaggctcacgcctgtaatcccagcactttgcgaggctgaggtgggaggatctcttgagcccaggaggtcgaggctgcagtgagctgagattacaccactgcactccagcctgggcgacagagcgatatcctgtctcaaaataatcatcatcgtaatgaaagatccttaacc

SEQ ID NO: 19595 - DNA, 1047 bp, Homo sapiens
ggccagggcaggagcatctgccacaggtcaaggggcagggatgtcgggggtactcaggatggtgacccctcctggtccatgctgtgacccacagcaggggtttcgaggagactccggggctcggggacccccatcggcaggctgccaggcctccctgcacatgcaggtctccgtggtcctgcgtccaggcaggaaggcccctgggctgctgttgctggagaaggaatgtggggggtctcggtgccaagactggggatagcaaggaggtgagtgggaaatgcaaccacaggccagccagcgcccgtgcatggagtcaaagggaggagtcagcatggtgaccactgcccctgcaccgggggaggaaggcatgggggtcctggtgaacctctccctgtactgcccagagcccagcctgactccccccgaagccgggtagggatgcatcactccgactaacaaatgtctcagccctaaagggcccctggctccaggtcaccctccagctctacagaagggcagggacgaatctgatccttgttagcactgacacaagagggcgggacctgagtcagccccaggggaagccagcatgccctggaaaggctggtcccaccaaagcatgctagtgtgtctcccaggctgcacccaggaaggctgggttggggaggagcccagggccagatgggcagcaaagtgtatccggctgtagccagccacaaaagaggacactgatgtctggcagcagcacagaaacccctgtggctgatgtttcttcctcttggatgctgagggtggtttttggagaatagtcagcttcactcccaccccagccccaaggcatctcctcggagaaggctcaggcaggtggccaaggccagcaaggggcgggcctgcagctgctcaggcccccttggatctcctcctggcagacaggggtataggggatagcagcccatggggatggggccttggtttcctgcagaacctacacgagaggccaaaaaaaagatgggggtaccaaggagaggaaaacacccccggcaccca

SEQ ID NO: 19596 - DNA, 1021 bp, Homo sapiens
cagacctgcctttatggccactcctcaccagacgcccaccgtgtggcctctctaagtcacctcttctcccgcatgcttgatacaacagataagtgaacctcccctactcccttgtggagtcactgagagggtggacaggggtggtctggggctgagggtggtgttctcttgggagctgtgcacttccagatggccccatctaatctccacgcgccaggcactgctatggcatgacgctgataacccggggaggtttgtctgtaatctccactttacatatgtccagagaggtgaagccacttgcctgagggcacacagctaggaaggggcagagttgcagttgagcccaggccttggctccagagtgagtgctcacaggtgacctgctgactggctctctgagatggtaactgcagaacggccacctgtgggactccacagcagagaagccatcaggccacagggagagccggtcactggggcctgcgcagtcaggcagcctctctgaactggtgaaaggcaagacgacgtagtagctaggacagtcacagggaagagcatttcaggcagagggaagggcatgtgtgaaggccctgcggtgggaaagcaggtgtctcattcagagaagggctcactcaagggtcgggggctctagttgggggtgagtgggaggagatagggcagagctgccacggccagtgagagttgtgttctagtctgggggtgcctctctttacctgtggtgtagcctcaggtcagtggctgaattctggtcagtttcagtttccttgcccctgcctgggggctgctatgaggctggagtatgtggaggacaccccaggacaccccgtgctgagagccgggacaggcgggcttatcgtgggttgccagtggccgccgagagcctctgtttgttgtggtgatggttgccacaacggctgcacctgggcagccctgggctgcctggccatctgggcccagctctgacgtctgcagcagcctgaggcctgtttctaggctg

SEQ ID NO: 19597 - DNA, 1079 bp, Homo sapiens
caggattttggcctcattcctgagctcagcaggtggctggggatgtggcctgcacaagacccctgccctggggggctgacatctcagtgggtggggcaggatgaaatagacaaaaaacacatgagccatcacgggcattgtcatattttgttgaatataacagtttttaattataagagtgttatgtgctcacagtaaagtgataaacagttgtaaggggaaaagtgaatttctcctcctcaccccctgcctcccccacccccagagtttcttgtccttggggtgaccatcattagagaggcttctgggtttctcagtgcttatgcagacgtgaataagtaaatggaggcatagaaacgtgctaatatctaagttgcctttttttaaattcgtatgggaccattgcatacatgtcatggcgtcccctgcactatgcgcactgctgtgtggtgcccgtgcccactggacccagggggtctcatcctgtcgtcctgggcatggattgagggctgagtcttgggactgtaggatctttgtggcatctgaatgcacagagccaccgaagtccgtgagtcatgggttcttttcgttgtcattttagctgcgttgagacagagatcctggattgcaggatttggtttaagtaccaggagaggtaccgagtcctcgcctgggtgcctccttcgtcacatccctctgggagttgggataatccagatcccctgcctccatccccagagctcagagggtctggggggcttcagagtcgcagcctggggctttgggacctctgggtgaacctggctcccactcagggcagagtagacacgctggagctcggaggggaggcgctcattgctgctcccactggggtccttcttcctttagcctctcttcttcccttagccctgacctcctagaaacaggatcacttgttccctcactgtcttcaggctggggcaggcctctgtgtggggaatgtcactttgtttttttttttgttgttgtttgtttgtttttttttttttttgttttgagacggagtctcactctgtcgcccaggctggagtgcaatggcg

SEQ ID NO: 19598 - DNA, 1025 bp, Homo sapiens
cccagaaaattctacaataacccttatgaaacctgagggtccaaggaggatttagtagtaaattaagaacagagtgcttaattgaatagggccataaagcacgcacacaccacccatcaccctcctcaagtatatttcaaggactatctaactaaaacccctatgcatttatatagaggagataagttggataaaccaaggtgtagcttaacataaagcaccctgcttacacctgggagatttcaatttaatttgaccaccctgagctaattctagccccaaacccaactaattctactaccaaataacctcaactaaaacatttacccaaataaagtataggcgatagaaatgatatctcggcacaatagacataataccgcgatggaaagatgaaaaaacataaccaagcataaagtagcaaggacaaacccctataccttctgcataatgaattaactagaaataactttacaaagagaaccaaagccaagacccccgaaaccagacgagctacctaagaacagctgaaagagcacacccatctatgtagcaaaatagtgggaagattcataggtagaggtgacaagcctaccgagcctggtgatagctggttgtccaagatagaatcttagttcaactttaaatttatctacagaaccagctaatgcctttgtaaatttaactgttagtctaaagagggacagctctttagacactaggaaaaaaccttgtagagagagtaaaaaatataacttccaaagttggcctagaagaagcgatcaattaagaaggcgttcaagctcaacacccaaccacccaaaaaattccaaacacataactgaactcctcacatcacattggaccaatctatcatttcatagaagaaataatgttagtataagtgacatgcaaacattctcctccgcataagcctacatcagaccaaaatacttcactgacaattaacagcccaatatctataaataatcaatgaaaccattattacccacactgttaaccca

SEQ ID NO: 19599 - DNA, 1048 bp, Homo sapiens
acagggaagggccactcagggactttaggtttacaatggggaaaagtaaacttgtgggttgtaagcggtaatgaaaggagggggtcctcgtgtgtaccaaccactcttagatagaaatgagatggaagaggtcccaacagcctggcaaaagcaatacagtatttttaaaatggtgtggccttaagaaacgcagcggttcgggggaggagacttttagaattatctttcaaacacttaagggaggagctgggtggttgggtggagtgacagaaggaaagcttttgtgcggaagaggaaactctggaaaaggcttttctggcttagtgtctagccctggtcggcttagtaaagggcaattagtgttgaaggttgtgcgtccacacctacttagtggctcagtggaaagcacgtcgcattatttaaatcctcttttaaagtaaaataactggaacaacgtttgacggtgttggggggtgctgtacattggctgataacacttagcaaacactgatcttactgtgtgaagtaataattagctgcggccgctgagcagagagcatttacattttcctactcttgaagtgaatgtgtgcctttactaagtacaaggaggagttatttctagagaagggaagaggctgaagtagccaaaacgcgcactattttgtatgtgggtgaatttttatatctagaaacagctgttttagaattctggacttttgttgtcttagggatgattgattaggaagggactttaaccctggttttaataaccatttttaaagatacaaacacagaaaaaaaagggaaaaaattgtagcagagttcacacagaaaaaagaaaaaaaaagatgcaaagaacacagaatttgtgtccagttattattttaactgtattttaagactagaaagtatgtcgcgaagtgggacaaagaactcaaaagttcttatcagtccagtgggtttttcttttactttagtacaccataatgttatagacgagtgatctgccttttttttaaatctgtattttacttcatcctgataa

SEQ ID NO: 19600 - DNA, 1021 bp, Homo sapiens
ttctccatgttggtcaggctggtctcgaactcccgacctcaggtgatcgcccacctctgcctcccaaagtgctaggattacgggcgtgagccaccccgcccagatttccggttttgttttctaagagatggatagagatggatagcatacctacataaagtagaaccatccactaagtgttcccccactagccccctgatttctcttttcttttctttctttttttttttcatatttaggtctcagtgttatttcctggatacgttataaaaacttactagctaagtgccagatatctagaagaacttttgctttttctgagctttttttaaccccagtttttttctttgtttctttttttgaattatcatttggatacaaggttgaacatttctctgcgtagctttttaaatctatgaataaggatttactttttttcttttcttgggtgttaattaaaagccaagccaagtttagtttctcaaggacatacggagagtagaggcaagatttccatgaatgattaaataattctgtgatactactgccttgagctactgccctttttcacaaggcactgccacagatcatccctttctggttatgaaattttggggaggaatgtaaagaaggagctaaatctggtttgcttggttcagcagtgactcagatggtatgttactgttttacagatattaataatgtagtgttgtatcttacggctgatttcccatggcagcctttcccttaataaggtcattaaatcatacatttctgttgctaacattaaacagttacagataatgtaataaaggtttaacttaaaaattttttttcaaagcactttattacaaactttgtgctaggtttataaaattgtaccagtatttaatctgagcacttaaatcattttattaaagtgccaaaggcaatttgatatacctgttatccagcaaagaaacacaaggcaattattagtaaattttaacagattaatgcatttatttggtaggttttataa

SEQ ID NO: 19601 - DNA, 1049 bp, Homo sapiens
cgtggtggtgggcatcatgatggtgcatacctgtaatctaagctactcgggaggctgaggcagggagaattgcttgaacccgggaggcagaggttgtagtgagcggagatcatgccactgcactccagcctgggcaacagagcaagcctccgtctcagaaaaaaaaaaaaaaaaaaaaaaagtcacgtatgaaaaatttaagtcttgcttatgcttgctaagggagagcttaattttagtctcatttactagatgttcttgaaattgaatgcaagggctgttcctcgtatacaagttacataaatattctccatagagacttttaagttgaattttaaaacttgcttcccttatttgtgaacttagcatttttttcctcctaaaaatgcttgtaaaatgtttttaaaatgctttaaaaatgttttcaaagatagatgtggttaaacaggaatccaagttaaaaaaaaagtgtgcctgatgcagtgggtcatgccttaatctcaccgctttgggaaaccaaggtgggaggatcgtttgaggccaggagctggagaccagcctgggtaacatagcaagaccctgtctataaaaaattgtttttttgccgggtgcggtggctcacacctctaatctgagcactttgggaggccgaggcgggcgggtcacaaggtcagtagttcgagaccagcctggccaacatggtgaaaccccgtctctactaaaaatacaaaaaataataataataattagccaggcatggtggtgcacgcctgtaatcccagctactcgggaggctgaggcaggagaattgcttgaacccaggaggcggaggttacagtgagccaagatcaagccactgcactccagcctgggcgacagagcaagactgtcttaaaaggaaaaaaaaaagtttgttttttgtttttgtttttttcagttagccaagtgtgggggcatgtgcccgtagtccctgctacagctactcaggaggttgaggcaggaggatcatttaagcctacgagtttgcctctgcactccagccttggcaa

SEQ ID NO: 19602 - DNA, 1048 bp, Homo sapiens
gaagattttgagtcattaaaaacggtctcagttgcaccaaaatagtgtaagccttattatgaatatcatagaaaagtaggtctcaggctttttgtttttgctttctaaaccacacctatttgttaaggtgtcaagaattgggcagataacatatttaaatcactttagaatgggagcataaatgtgtgctttcatattcattccgtaaatatttactgagcacctgtcatatgccaggtgctatactagctgttgatggagcatacattcaggctgaagaagtacattttgggggtgggtgtgtccatgtccaggttctctagctatatcagtgtaaggggttcttatgtgaacagcaataacatagaatatattaaagcttaggtgttggaaagtttaaaccagaaatacataaaaatatattattatacagtgtacaattgaccagacaactgaccacaaaataggtaatagggaaaattaagaccaacccaaaataggtgatacactgataaagaggctcctttccccaaattgaggaaattgtagctgagtttgcatgcatgcattgcagtatgagcttgttgatcatgctttttgttaaatatggaagtaatattctccatatactctggtaatatgccaatttttgttaggaatacaaaatttgagtaatctgaatttaaaatatatgacattgtccattttttgtccttaaaaaccaaaataattccatttttgagtcagtttgaggcctattaggaagactcttaaggaccagtatttgagaatcacaaatataatgcattttggttttttttgtttttttttttttatgacagtcttgctctgtcacccaggctggagtgcagtgatgcagtcttggctcactgcagtctccacctccaagattcaaacagttcttatgcttcagccttccaagaagctgggattacagacacactccagcataccaccatgcccggctataatgcattttcttttattttagcttattttttttttgagatggagtctcactctgtcg

SEQ ID NO: 19603 - DNA, 1057 bp, Homo sapiens
tttggatagtgtattttgtagtgctttcctttgagtaatggtgtaatattgtattttatggtgaggtatggtttttgaaagctaagaaacttaatttggaagatacttttcctgccaactaagtttaatttcttgcattttaaatgttaataatttgatgagaacgtaatacaatgcaaaagttaggacttttgtaattgttaggtctaattggtcattacattattattgaccagttttttttacggaaactttcttaaaaactcttgcattgggaaattttagggaaatcactttatcaaaacttggagatagtcattatcgttaaggggtcttcatatactgcataccccccgttagaggatggaatgcagaactcactataccctgtctgcatagaagagggaagaaactcaatcccaaagtaatatggaagcagtctcacatgtattgttggttatatatgatatccagtatttttatttttccttttagtgagattacgtactataggtgaacttttagctcctgcagctccttttgacaagaaatgtggtcgtgaaaattggactgttgcttttgctccagatggttcatactttgcttggtcacaaggacatcgcacagtaaagcttgttccgtggtcccagtgccttcagaacttgtaagactgttacttttctgtattttgtatctgtttgtggaatttaccattttctctcagtgtagggtaataaaaacattttgatatttaagttttactttatagatgatgtcgtgagttttaatcatgggctgaatatatttattggaaattttgtgtaaagaattctttgggccgggcgcggcggctcaggcctataatcccagcactttgggaggccaaggcaggcagatcacttgaggtcaggagtttgatacccgcctggccaacatggtgaaaccccatctctactgaaaatacaagaactagctgggcgtggtgtggcacacctgtagtcccagctactcgggaggctgaggcagaagaattgcttgaacccaggagccggaggtt

SEQ ID NO: 19604 - DNA, 1054 bp, Homo sapiens
tttgttcaggaaacatgatgaaagtattgagggggcatcagaattgggtgtacagctgtgcattctctcctgactcttctatgctgtgttcagtcggagccagtaaagcagtacgtgtcaaagttcttgtacattcattatgaattggattatgataatgtgtgcataatcattttaaatctaagtaacctatgaagtctgtgctcggtgtcatgaatattttaaatgttttatttcatgatgggggagaatttgcatgaaggaaattaaatatagttattgattgccaagtgagaagttggattgtttttagagataatagataataatgggcatatcagggttttttttttttgtaagtctagaaaagtttatgtgctgtagaagagatctagtctatatgttaagacattcccttgctaattattttcttctctgttgttctatttttttggtccagtttgctgtttttaaagttttgagtcccagctggtcctgtacatttaactgaaaaaaaagtaacttaaaataatataaaaatagcactcatgtatgtcctacagttataggtgaaatttgatattgtttgtcttacatagcatacctatagacagcttaagtaaagtgactgttaagagggttatgcttattgatgaactcttgtagttgtttaccagctctgttagtatagttaaattgatctcagtagcttcaagtatttataaaatggttgaagtccaaatacatgtgataattacaatacactttgaattaatggagggtgggaggctagttgaaatgcattttatttacccaaggagtatgttaaaatgatagttataaatgttggaagtttaaagcaagatactcagtttagttctttacaaatcataagaagaacaaaattagatgttgacattgctattttaggctgtgtgttttccatatgcttcttgctttccctgtcacaggtggtggcagcaatattggtgtgattgaggttatgctggcaccactcgcacacaggcgcacaatggtgttagctgggcagaaa

SEQ ID NO: 19605 - DNA, 1023 bp, Homo sapiens
acatgtatatattgcttcagtagagccacaatatgtatctttgctgtaaagtgcaaggaaattttaaattctgggacactgagttagatggtaaatactgacttacgaaagttgaattgggtgaggcgggcaaatcacctgaggtcagcagtttgagactagcctggcaaacatgatgaaaccctgtctctactaaaaatacaaaaaaaaaaaaaattagccaggcgtggtggtgcacacctgtagtcctagctacttgggaggctgaggcaggagaattgcttgaacccaggaggtggaggttgcagtaagccaagatcacaccactgcactccaacctggacaacagagcgagactccatctcaaaaaaaaaaaaaaattgtgttgcctcatacgaaatgtatttggttttgttggagagtgtcagactgatctggaagtgaaacacagtttatgtacagggaaaaggattttattatccttaggaatgtcatccaagacgtagagcttgaatgtgacgttatttaaaaacaacaacaaagaaggcagagccaggatataactagaaaaaggatgtctttttttttttttttactccccctctaaacactgctgctgccttaattttagaaagcagcttactagtttacccttgtggtataaagtattataaattgttgtgaatttgaagaatccgtctactgtattattgctaaatattttgtttatactaagggacaattattttaagaccatggatttaaaaaaaaaaaaaaaaactctgtttctgcaggggatgatattggtgagttgccaaagaagcaatacagcatatctgcttttgccttctgttgtttatcttacctgcagatattaagaatgtatgcattatgtaaaatgctcaattatatatttttgttgagttttttaattaaagacttgtaaaaaaaaaaaacagtatattgcaaatgtttcttaaataggttaggtggagtactttctctctgtctccattgtaaggt

SEQ ID NO: 19606 - DNA, 1044 bp, Homo sapiens
tgtttgctcagcaaagttcagtttttaagctgacaacaatagggggcctgtgaggctcagttccgggaggaggggtcgctgtctggcagagtgtgcgtggttggacttcggtgttgctgggcttggagaatgctctctgtgttggcctctgtgggattgtccccacgttgctctgaagtgctcctggcttccagagtgtgtatataggagaaccacttgctgtgcattctctggaatggccttttgtcctaccctaacttccggagtccctcattttgatggcagtgtggcgttcatgacaccccagagcatccagctatttaagtgttggagctggtttattcagtggcttccctcctgagtgtttgtttagacgatcatccctggcagcagagaacccatccaaaggcccacaggggatctgcagctccctgttcttcccaccgtgatgtggattcgggttcactccacttcctgaaaaggcagggcctgggttgttttgggggatgggaatttagacccctggagtgagttccatggggctgccaccagctagtttagatgagtcacttcatcccggaggcctcagcctcctcacctgcaaaacaaggaggctggagtggatctctgagggctctggaagctcgaaattctctaggttagagaaggagacttggttgggtgaaatcaaatgtttgtgattgtttttatactaccctggtttaagaataaccctctttaagaatggttctaaaatccagatttactgaacccataacataggggttaagtttattagaagaatctttgccataggagcagcgtggtgaataggaagccccatggctttcatactgggcctgggttctgtctgtgtgaccttaggcaagtcccatgacttctgaatctcaagctctcctgtctgtaaaataggaacgagactgctcacacctgcagcattttgtctgtcagtccgtgctgatactacgaaaagagtctgcctggcagctgcccctagtgagggtccagtagcatttatggcac

SEQ ID NO: 19607 - DNA, 1027 bp, Homo sapiens
atgccaaacagacagacgtgctctcagaagaaaactggaagtgggttagagagaggtgggggtatggaagaggtgacttctttagatggggtgatcgggaaaggccttcccagagagggtgacttttgagctgagtcttgaaagatgagaaggccactgtagcctggaggagtgttcccggcagagggactggcttgtgcaagagccctgaggcagaatcgagcttggtgtggtcaagggccaggaggaggctggtgtgcctggaacacagtgtcaggggaggatggttggccttggggtcaaggaggtaagcaggggcatggggctgttttttcagtgctgggccgcaggagagaattaatgcaccaactcagcaaacaggtgtcctcctacttccccctccgccctcctggccgggtttcgtgccaggcactgttctggaatataagagtgaatgagagatgtattgtgctccagaaagccagcttagtgggggagtttgtggatgagtaaactcatagaaggtgctggtgaggtgtgaatgaaggctcatcaggccgcgcagctgactcatctctgtactgaggtgtgtagggacttgggaaatgtgtcttgatttgcacggaactgtgctctgtgctgtcagccttcaccgtggtaactgaaactcagttctctgatgtaaagcctggcagtcccggcctgcttgggggcacctggacccctgccagggaaggggtcctcagacttgaggttgccagctcagatgtggggctgctgatactaggtatgagtgtctaggctcccagttatgggaaacaagaccaagagacagccatgggaaacccccttcttactgagctgcctgccctgaccctttctcccctgactgcggactctgatttgtggctctggttgggaatgtagatttggggacattgtgctcctcatgggtttcttcccgtaggatggggcaaagaaggggttatgagattgagcagatgcttctgggagtctagagtgtact

SEQ ID NO: 19608 - DNA, 1025 bp, Homo sapiens
acggggacagcgatgcccttccgtccaccccatccttacaggggtgttcctcctgaggcaagaatgcaatagaaaagcaaaacagaatgtatgaggctatttgcattatccataatacagaaaaaaatgaaaataaggtagctgtccagtggtaaggggaggtttggcagaccatggcacagcatgcgatgggtgggtcatcacacacacagatgtcagtgacagaggctgggtaagaacatgagcatattcatactgttacatcgaggaaaaatacacagtatttaagattgcatgtatgtggcatttgtagtcctgtaaatatgtgatgatatgtatgcatatggggaaaactagaggtgaaattgaaatgagttatttgtggtgggactgtttttcttttgcaaaaattcctttattattgctataattgcattccttcatttattaaagtaatgaatatttgagcacctcctagctatcaggctctgagaaggtgcttgggtagagcagtggactggactgcacggctcctgccccggggggaccatgctcagtgagcgattcttgagcccccaccccttctcagcgctcaaggattgaaggctaatgaagtggtgcaaaattcaaactttctggaataaaacggagagttggtcctccaggttctctgcagggcgcttgttgagccagtcccagattctgctgagaaacagggaagtttccagagttgccaccccctcctgagggtagagaactcaggggtagagctggcttggcaccaaaagggctccctgagtcttggctgctgggacttgagcagtgctggggcgctgccggtgagctgtgatcccatcttctcagggagcgcccctgcctgtttgactgtggtgccgttggtatgagaggttgccccaggaaggagaccgcagctgtgggctcatctcctgggtgcccaacactcacagggtccacattgcccgtgatgtgccctgggaagcccatggttgactcagaaggactga

SEQ ID NO: 19609 - DNA, 1131 bp, Homo sapiens
atgtaaggggagcttccccgaggcatggacagaatgggtcaatagtggaggaggagcagcagcttcagggaccactggaatgaaggctggagtaagttgccagggctttggtggcatcctgaagttcgggatggtatagtcagggacttggcaggagcaaagactgctgtgggcaccacgtaagagtctggtgctgcctactgaggagaaaggagtcagggtcttgtgggtgctggtgagctggaagctggtccacaactgcacctgccacaggaggactaaataaaacaagaggcaagtgatggacgaatggagtggctgtccagttacttcgtgtcactctgtaaagcatactaggatcttcttaaaagggatggcctcaggttataggcagcatgatggctagttttaatgaatttaatgctggcttagagccaggggtggggtacagcccagagggtaggttattgcaagtcaggaccagaggtggtggcccagttgggtggctggatacatttagagggtgtgggcaagcctgtggctcttattcacaggattcactgcctggaacagtctaggcgtggctggattttgggctttggatcgcaaaagaggtagaccctgcccactgccatcctgcttgtaccagtcaagacagcttagggtgtgggttgcaggagtcattattttgagaggtgcatagagagcattagattgaggttggaatcccttctttaaccacaggattcaagaaagttacaaaggctggtgccttggtttcttcattgtaagatgggaatgatgaagtacacctttaagtcttgtgggtttcacatgagaggtttcatgatttgtgagtgacggcaaaggatgagcagtgacttgtcatttggctgaggctggactcgatggcaggcatgcaggtgagcatccctgagccagtgagtgagcccagtgtgctgtccagcacccacatcccgatgtagctttgtttttctttactcaatgttgaatacacagtacatcccatcagaagtctggaagggtctgtagtattttcagttacacatgattgtattttgtggagggaatgatgtgctttagggacattgccagctttgggtttgtgtg

SEQ ID NO: 19610 - DNA, 1032 bp, Homo sapiens
ctgatgtggtagcagtggtttcattattatgggtctcatttcatgctcacatctctctagccacaggagttcttgacctggcgtctgtggatagaattcagggggtccatcgatgaacgtagatggggaagaaaattgcacttttattttcattaaccttaactggaatttagcatgtcattccacttgattgtaggcaatgaggcacagttatcttaacaaacacctgtgactcggtcaccagtaggaatcacagttgtggagctatctgaaaaagcagtttccacttgtcacaactttaaagttatggcagttattagatgcactgttggatgtttaatactttaataaagaagcttttatgactctatcacaggttttttttgttttgttttgttttgtttttgagacagagtcttgctctgtcacccaggctgaagtgcagtcagacaagggatactcagcctgtatctcaatatatttttcttttttttctttttatttgagacgatcactaaggctggcaggctggggtgcagtggcatgatcttggcttcctgcaacctctgcctcctgggttcaagtgattctcctgcctcagcctcccgagtagctgggattaccggcgtgtgccaccatgcctggctaatttttgtatttttagtagaggcagcatttcaccatattgaccaggctggtctcgaacctctgattttaagtgatccacctgccttggcgtcccaaagtgctgggattacaggcgtgagccaccatgactggctgtctatcacagttttcagtaatttgataaatgtgtttaaatagaattgatttcctttataattcgaagtgtgtcgttttatacatttcaaagtattgttctgtccaggtgcgatggctcacgcctgtaatcccaggactttgagaggctgaggtgggaggattgcttgagcccaggagttcaagaccagcctaggcaacatagtgagaccccatctcaaaaaaaaaaaaaaaagataaagataaaaaaag

SEQ ID NO: 19611 - DNA, 1072 bp, Homo sapiens
tattttctcaatgacactgaccactttctggagtgacctaaccgatttgttgtctgtggtctgtctgctccccctgggatgcgagcaccatgagacacggccttgctgtttgggtttgtttgccacaaaatccccattgagtgtcgggcccaatatggcagttgcttggttgcgacagatataaaaataaatacctatttatttactgaataagtagatttcatcatgacatggtggatgtctccaatagcccagggtttggccccaagtgggtggtgacacaggttactcttagctctggctttcagttaagtcctgcaagagaggccagtgtagggatcatagccccaaagaacccccttcccagctatgcctgctgccatgagtcacctccatgagtcacctgccatgagccctgggagagttggtgcccccaggggagatggccctctccaggaaggctagggcaagtgacccaaagatttcttagatgcagtagcactcccctcttcccatgccaacgtccttttcattcatgaagggtttgtgctgccaggagcctgagcagccctttcctgggaggcctctgctatctggttattgagctgcactggtggccacagtggggtcctggggcccctgagagcctctgggttcttttgcctcaaagttgacacatagcacatctggcgtgtcatgatgggtacactgatgtgttgtttaattatcccaacaccctacttaatagagaccattttccccacctcacagttgaggaagctagcactcagtgggtatagaaactcaccagggtcctagagccacagaggagtagagccgggtgcccctccacacctgactgtgagtcctccgtctcaaccacttctctctccttcttcttggaatgcctggattcaggcacctggccaagccctttcaccttccaaagcttcagtctcctcctcttgtgaaatgggaataacccatgtgctgcttgctggcacaggcagttgtgaaagtcaagtgcgggggtggaggaggaaaaattaacaatttcccacctctctcttac

SEQ ID NO: 19612 - DNA, 1050 bp, Homo sapiens
tctgctcttctgcagagccccctgtcctggcacagagcatacatagtgtgttatgtgcctgtcatgcccattcgactctacaagcacaaggatgggtctttttaggcctttccacccagcatccagcatgtgcttgaatggctgtagctcaaacactacagagccacacaagcctcgggggcctcaggcacaggatcatggtaggggcagcccacagtcactcgaaggctggtgtagaaggaagtggctgttgatccctttcttcctggatcttttttcacaagccccagagcactttgctgttggatgctcagaatagcccctcgtcccaatgtttgaattttcttaaagtggagtttttccttccttcacacacccagcttccctttcctaactcttaaagattggtcaccccttcggtttctgaggtcaccccacttttggggtgggtttcctggattgctcccccaagacctgcccataagagccctgcacgagccagttcctctctgggctgtgcttcctcctctgtaaaacagagatccaggttgagtatcccctatttgaaatgcttagaacaagaagtgttttagagtctgggtttttttagattttggagcatttgcagtatgcctacctgttcagcattccccatccccaaatccagagtgctcccatgagcatttcctgtgagtgtcatgtcggtgctcagaaattcccaagttttggagcgttttggattttggattttcagattagggatgctcaacctgtggtagtatctgcgccgagggcctcatggttggctagataatgtgtgcgcatgagtgagcggcctttataaaccaggtaaaggttggtagttgaagccttcccttaagaaacagtgcagcctcacaccaggtgttgaacatctctggcccctagccatctcccctgtgaattccttccagccctgaccatctgtgactccacgtcttggtccacaggaggggagcacaaggaggactccagttggagttcattggatgcgcggcgggaaagtggctc

SEQ ID NO: 19613 - DNA, 1044 bp, Homo sapiens
tggcctgctgggctgccacggtaaagcagcacccctgggaaggcggtgccatctgcctgatttcgctagactttagccatctccagaaccccacctgatgtcctgggatcccactcttcaggaaagggacattcctggaggcagaaatgtagcgcagctctgaatgaggccccaaaagatgggagatgcagaagcccctttgggaggagaggacacctgggcaacccttgaccccctttcccacccccacctccaggttgggagcacgttcctgcacgtggctatgctgtggggcctctctcatgagtcagagcggagggagacagctgtgcctctggagtctgcttttaattgtctggaaatgcagagatgtctggtttttgcctgagcaaaataggagtttatttttgtactatcccgagctggctaaggagagtcacgtagctgtgggcggggtcttggggatgaggaggggtacagcaggcagggactatgctgaagtggagctggctgtaggaaccccagggaggcacagggggagcatgaagaggagctacacttccctcccttagtgcccgggcagaaactcccagggcccttcacagaaccttggaggaacattcaacacccccatctctaggacagccccagccttgtcatcctccaattgctgtggtaacacggggactggagcagtgagattattaggccttcagggccagtgtctccatgcagatcagatggaggcggtgcttggcacatacaccacctcactgcccatgcccccagaagttggtgcagatcataaggtggcttttggggctaattgattgaagttccaacatagtctgtttctcctaggctggtagctggcacctttggccccatgtgttttttaattattttttcttttgagacgaaatctcgctctatcacccaggctgaagtgcagtagtgcaatctcagctcactgcagcctctgcctcccgggttcaagcaattctcctgcctcagcctcccgagtagccaggattaaaggtgcct

SEQ ID NO: 19614 - DNA, 1047 bp, Homo sapiens
cccgctgtgggaatgcctctctgttcccccaccttgagcccttgtcctgcctgagagcacagaccagctgtgcatatcctgacagaaaaccccagctcatttaggccctttatgactgtacactgataaatctcactgtccctgaccccccggctccctgcccatcaccctgttcacacctcctaccttagccaaggttaacatggttgtttagaagcatggtaacattaaaagagcatagaccggtctgggatcagatctcagctctgcttcttcactgctgtgtggcttggagcaagtgactttccctctctgaacctcgatttcttcttctgtaaaatggggacaatatactgcatggaattgtgaagatcaaatatggggatttaggtaaatcatccagcccagggtggcacctccgtcatcgttgcacatcttcactcctcctgatgtgtcctccagggcatgggatatcttcatgccaagggcatcgtacacaaagatctcaaatctaagaacgtcttctatgacaacggcaaggtggtcatcacagacttcgggctgtttgggatctcaggcgtggtccgagagggacggtgagttggtcttgagtgtctgggtgggttgtgggtgctggatggggaagagcagggctgaggtctgggcactttcactgtttgttgctgagctgcagccctccctgcagggaagcccaggtcgctttggtcctgccctcgtagttctggttcagaatcagatttgggtcgcgtttggattctcaggccgacttccacggaaaccaggtccccacactcacatttgccctggctgttcacccgcttggccaaggaaccaggtcatttccccacgatgaggaagagtgtcaaattttatttccccaaatcttgaagggattggcatagggagaaaggcccctcccctcacatctaggggaacccaaaagggagcatggcagcaaggctgcaaggccagccccagccaagtttgagatccacaggcagatcagggttcctggttagagaggcg

SEQ ID NO: 19615 - DNA, 1034 bp, Homo sapiens
caccacacctggctaatttttgtgttttttggtagagatggggtttcatcatgttggccagggtggtctcaaactccaaacgccttggcctcccacagtgctgggattacaggcatgagccaccgcgcccggccttcgggccctgtcttgataaagaaccaaagtgggccccaagctgcagttgaggagaaactcagcatgagttttctctcctgcagaagtcactaaagaaatgcttggttcttcactgattcaggccaggtagagggatggtctggaggaacgactgtgtggggttagggaataccatgtctcatgcaatactgggttcagtattttgctcttaggatgggtcggagtccagtacaactgtggggtaatggatcgtagccatagaggtatacattttaggcagccattgctgcacacctgccgcatgcctgcacacctgccgcattgctacacagatggccgaggccagggttccaccagcaaggagattgcagtgtcctaaagacaaacagacacactgtaatgaaacctgcacacatcaggactctttcttgtcacctttgtattcctggctcctagtacagtcccaggaacattatagttgggcactaaatatttaatgtgcatgaatgaatgtgagcaaagggtgataccatgccaagtgctgtgataaagcccagatgggggcctctgcatccacctgggggacaggaggaagagtctctggaagaaggtcgtcagggctgggttttgagccagaactatcccagcagagaccaggagcatggggctcttagcagttcaaggagggtgatgtgaggcagcgaggccaagctctaatcagaccgtgggcaacttgcttaacaagctgggccctggttttctccgtgacgaaagaaaaggctccactaggtggacactggcattcagaacatcattccagattccccaaaaaccatatagtcccaccttctcatttcacaggcaggaaactgagtcacagatggggctgttccctgccc

SEQ ID NO: 19616 - DNA, 1046 bp, Homo sapiens
ttgtttttattgtagttattgttggtagaaaaatcaagctgttgtgttaatgtgcatggaagtgtcttcatagattgtcagatttatcaggtgaaatcagcatgcagactatttttggaggcatgactctaaataacgtagcgtgtcccctcagttgtactgtatgtcagggagatttgaaaatggttgaatttaaagccaaggggaaaatactctgtgctgtcctgtcaactaattaaaaacaaataaaaataatacacatttgtatggactttgtaggtgttttagtcagatcatctgcactgttttagaaagtattatggatttatatactgggaaattaattttttcttttcagaatgtaacaaatgaaagacatccttattgtcgaagtagagattcactttgcttatgtttggatgaaaaagtgtgaattgctaaagatcccagtgaggtgggagaaatatagtgatttaacaaaaaaattactcagtataagcccttgtgcatggtagagattgtctagcttgctcatcttgtgaacatgagaggcatctttttttcttatgttttgtctggtcctcttactccacataacaaactaatttggaaaaatgcagaatgcttttgggatatgtttggggaaaatcctggagtaagttgcatcagaaagagtagtatactaaagggtattttgttattaactgtgttttacaggttgagaatctgtagtactgagaagtttctccactatcagccgagattaacagccacagctggattctttgggggctctgctttgtgaaaagagctttgaagaagcagagcctgcaccataaaaaggaaacggttgctcttctagacataacaaagcatccgtatgaaactagaaatgtggaaatctgtattgttaattttaactacaaacgaacttacttttggaaattacaggttcatgatcataaagtagataaagagtagagaataaaagtaacaatctgatgattctgcacccacttcttggtggttgaaactccatagcctat

SEQ ID NO: 19617 - DNA, 1030 bp, Homo sapiens
tttttgtatttttagtagagacggggtttcaccatgttggccaggatggtctcgatctcttgacctcgtgatcggcctgcctcggcctcccaaagtgctgggattacagttgtgagccactgcgcccggctttttttttttttttaaacaatggggtaatagattactaaactaaacttgttaggagacaaggttctggtcctagccttgctgccaacaaccctgtgaccttggtaaagttatttaaactttctgagccttggttttctcatttataaaatcctgtgtttcctaagattctattataaaatgatattaatatttgttggagtttgctggtgaccacaagacaactttctctcttcaggactacagtgttgaatagcttctaaaattgtttaaaggaggaatgagataaatgtcaccctgttccagagtggtgacttttatagagttttctaatttgggattagattttaaatgttcatttttttttcatcaagagacttgttttcttctattactgagttattggtaaggattatacatgtagttcagctgtggagaagagcaggcctgtttgcaaatgagcaatttcttctacatgtccatttgatactactattttcctgataatatttacctttttagtgttttagactttaaaaacttgcttagtttcttataagtcttacaatagttttcttacaatattttgagtgatttttaaatttttaaataaaatttaatgttcagtattttgtcatcttttgtgtgtgagtaatcaggtaagatgatttgggagccagtgcttacattaatttgcaagtttctttaaaacaaatttctttccaggagtctcttttaaattctgaatttggataagagagttactagtttgcatgtgggcctcccagaaaatgagctttgacacagctttcaggctgtagtagtttagggcttacagtgcccaaagagggagagtgacttcctaaagctcttgtccaagaggaagggagcatttttgcag

SEQ ID NO: 19618 - DNA, 1067 bp, Homo sapiens
cctttgttgggccttcagtgttctctagcaagtcttagacttgtctcaagtcagctcatttctccactgctcacacagctatttctaaccactaccactttcctcaagttcctactccacctcttcctcagtttctacagatgacttcattcccctatttcacagagaagataaagccaagggatgcaggaactgggtaacttcctgttacacccacagacgaagttatgtcaacgtagctttcctttacttttcagtctccagatcctgttctcttccagtttttccagaggctttactccactattatcttctttcaggtgttcaacctctgcccctctccctttcctcttaccctgtaaacttactgaaacctcatccctaaattcaaccctcatcctctagattaccagtctaacctctttctttcccttcgcagccaaggtccttgaaaatgtagttgtccatcactgtctctgcctcttcatctttcatttattcacagtccactgtgcagtcatttctacatataccatataccatacagcccaaactgctctgacaaatacatgacctgttattaactagcagttaagtaccaaatccagtgggcacatttcagtccttacgatttatgttgcatgtactaatagtttgttcttgttcattgtattaatatatcacaactttaaaaccctcttcacctgttgatggacatttaggttgtttgcagtttttggttattacaaataaaattggaatgaatattcatttacaatatttctgtggacataggctttcatttctcttgggtaaatacctaggagtggaatgactggttcaaattatatgttcaagcttaaaagaaactaccaaactgttttccaaagcaatcgcaatttgcattcccaccaacaaggtataaaagttccagttgcttgtgagcatttggtgatatccaattttttcttcctaattttagccattttaataggtatgtaatactgtttatagtggttttgcatttccctaataactcaagatgttgagcatcttttcaagtgctt

SEQ ID NO: 19619 - DNA, 1082 bp, Homo sapiens
catttttgttgttttgttttttaaaatactaattttaaagtaaaatattaattttaaagtaaaatactaattttaaagtaaaacactattctaaaatactaattttacctattctcacaacatccttctttaagaagattttttcacccttattgaatagccttgctccactgtggaaaatcaattgactatataaatatagtgaaattctaagcttttctgtttcattagtcttttggtctagtcttatgttaatgccacactgtctttatatactgtagctttagagcaggatttttccatctcagcactattgacattttgggcctgatagttctttgctgtgggagggtctcctatgtattataggatgttcagcatcatcccttgcctccaccactaaatgctagtagccactcagtaggtgtgataatcaaaaaatgtctacagacagtaccaaatgtcccctagggaacaaagtcaccctcagttgagaaacactattttaaagtaactcttgaagtcagatagcgtaagtcttccaacttacttgttttaattcaagattattttggctactctagaagctttgtgttttcatatcattacagaattagcttgtcagtttctttaaaaatctgttgggatatttattggaagatgtcaactctgtagatcaaatagaagagaatttttaagaaagttgagtgttccattccatgaacatggtatagctctccacttttttttttttttttttaacagcctttgtcaaccactctgatctccatttattatagtctttaatttctcttggcagtgtttgggagcttgcattttagaggccttgcacatgtttagtttatcactaagtatttaatatttttcgatgccattggaaatggtatttttattttcagtttcactgtccaatgtcattgactagttgtaggcactcctgtcctgccttcaaccttacattcacttaaggcaccatgttacttgagggcgatccctctcagcaatcctgctgtatcctacgtgaaggcttcatcagaaagaattggcagaacaggtctgga

SEQ ID NO: 19620 - DNA, 1021 bp, Homo sapiens
cactcacttcagatgttcttctctttaggtattctccccatctggctcaactcctacccctatatatacccccggtagaatgaattactcttttacgtttgtttctatacttctttatatatatatctttcttaaaggagaggtatccctgtagacacaaagatagagactgaattctatttatttctatgttcctagcatgtaatatgcattcactaaagtttgttgaattgagttttcaaagtctttataaccaactcttgaaattttaagcttctagctaggactgttataacttaatttgctagttttagaaaataacttttaaagcaattaaagcttattcaacacgttgaagataaaataattttatttggtatttggtaaattccttgggctagtcctatttaaggatggattaaaatatgatagaagtgttatcttacaatctccagatgggctggggtgatgtaattttggagcaaatgaacattcacatcccaattctaaatctgagctcattttaaaattatacacttgcgggatgatctgtgccacaaaccatgacacacatttgcctatgtaacaaacctgcacatcctgcacatgtacccctgaacttaaaagttggagaaaaaaattacgcactttgtatctgtaacatcaaggggaatttttgcctttgggttactatttttaaaaaatttttttaaatggatacagtgatagattttagagcataacagttacaaatggagaggtttcctaaatgaccttgattactttgtgtgtgttggggtagggggttgaggaggttgtttttctcctgttgcctgaatttaaatgttttttctatggtgaattacataattatttcgtggccattatatatttgtcctgcagttttttattatttttttacgaaaagagatctaagggcctttaggtgtccattggcaaagctgattttataaatatgtgtttcttttgcctagcatcttttcacatatttgaagatata

SEQ ID NO: 19621 - DNA, 1052 bp, Homo sapiens
gtcccttttgtatctgtgacagtgcctaacatagcaccttgtaggtgattgataaatatttgttgaatgaataaacatgtatcatccttctttgaaaaatacatgaatttgtggagactttgattactttttaaccaagtatgtttttggaacagagaagagtattatttacattatactgataagatgttgctgttatatcacattcagaaaggcaaagcttcctgtactagattacatagatttaaaatatagtgtctgagcctttgtagtgaatgctacccaggagtttatatcagatgtctaagttcccagcccagaactcctaaacccaagtcacagcagatagagacatccatttttaaaaagttctaacagtaactctaatggattgagggtacattttatgatttttgttgttgttgttggtttatatgtttgtttttagtgtcaaagaaaccattctttgacatggatttataaatatttgacattttgaacataagtcttgtgaacattgttttaaatctctggccattcaatagatgctgctttatttttctttcagaggtgggattttcgtagtcccagctaaccatgaaaattctttgtatgacccttaaataatatataggtatgaagacactatacagaagtagccacagaggagtggtttaagttatgttgagtagtcctcaaaatctcaccccactcccactagatagcagacttccatgagaactgcttgtgcctaccacaaaacaattatgaaaggaatgagccatatcatgatacagctgtgagggctgtgtggaagacccattagcccagtattcaagaagactaaggcccacttgagttaagtatagtgggtttaacgctggactcagaggtagcaacctagcttgcctcctaaattctgcatttaatagttgcgtgactatgaacaccttcttttaactacctatgagtattgtttcctcatctgcaaagtgaaagtaaaagaccctacgttacatggttattgtaaagattaaatgagatagcctttg

SEQ ID NO: 19622 - DNA, 1027 bp, Homo sapiens
gagaaagcaagttatatataaaagcttaggccagtgtgagccatttatgtaaattttaaaaacataaaacaaccatatttttatggctacagtcatatgtatcaaaagttaaagtgtgagtatcaaggattcataccagagccagaataatggtaaactgggacagattcagttaaagatgcagtctttggatgcatctgtagtagcattatgtcttaataaaatgtatctgaagcagatgtggtaaacacttttatctgggcaatgagtacacagcgtttaatttctacatttacacacatgtctaaaatatataattatatttatatatatatatatacacacacacatatataaaatcattgatatgaaaaaggtcaatacagttcttatagcttctgttgcttcactttattagatataaaataacccccttccacatagttaacatttcagtaatctaccaaataaaagttattcccagagatgtaagacctgtttctttagaatgtcatgaccagaatttccatagtaatctctaaaacgacactccagtgagacagtctgatctgtgggtcatttcctttcctgttaagagacctttgttaattccattttgcagtatcccagaagaaacattgcaggtgtgcaaccaatccaactgaaacagataatactgggtaatgttcccttcttactcttcctttttattaatgcacttattacccatcttccaaaataaaaagtctttgtcatactggcatctgatttttttttcttttgacaaccagcctgtcttctgtctcctgaattttattttaacatcttttaatatgttgccaggtaggcacccctagttgaacaagaaagacctggaaatcattagagctaacaatatacaggtttttcttaaatgtgctgccaaagggcataacctctttggattggtgacatgtagcacttgcacagcagcttttcttcccatttctaatggtaagaagtaaaatagccttctgtcaggaccaac

SEQ ID NO: 19623 - DNA, 1052 bp, Homo sapiens
accttgggaggccaaggtgggtggatcacgaggtcaggagttcgataccagcctggccaacatggtgaaaccccgtctctactaaaaatacaaaagttagccgggcatggtggcgcatgcccgtagtcccagctacttgggaggctgaggcaggagaatcgcttgaatccaggaggcagaggttgcagtgagccaaggtcatgtcactgccctccagcctgggagacagagcaaggctcccgtctcaaaaaaaagcaaaggggctaaaatgtctaatttcttaacctgggtggtatttacatagaaatatgtgtgtatataaaaatggatcaagttatactcaggatttgtataccttatgctacaactctataaaaaaaaataataatgatatagtctctaccgtaaagaacttagaatctattatggggagagagtgggaaaagagtagctcctttgctaaatgggatttagctgtgttccttatattcttattcttattcttattcttgtctttgagtccttggcagagtagaaactcagtaaatgttgattctatgaattaacagataaatttcttgtctttatagttaggattgagattattcacaggaattattttattgataaagggctgactgagactaagctattttcttatgtaaccagtttatagtgaatcttctaacatcatggaggttaaaatcctaaaaagcagctaacataatgagcttttgtgtttcttaaaagatttgtgacatatgcagagacactgttaagaaatgtgtttggtaatgactatcatttaaagacataactttaattcattttttaattagacaagtctgcttgtatttttttgtatttgaaatcctttgaagagtgtggtatttgaggatacttcaactctttataagccaaagtctttacaagcacgtatttatatcttaaggctaatctcacatactttattccctcaaataatagtggggcttatagagaatctctagctatttaaatggggtgtcaggcatgaagtctggagtttcgaa

SEQ ID NO: 19624 - DNA, 1046 bp, Homo sapiens
gattacttcaggcagaaaaaaacgataaggaaactgtgtggagaaaagacatttcagttgagcattgatggatgagaaggatttggacaggtagcattgaagaggatagatattccagatggtgagagtaagtatcaggagcataattagggaatggtaaatcatctagttggccagagtttgatatgcagaaataatgagaaattaagctaggtggggccaagtcatgggggattttgaatgttgaactaaggaaattggtctttattcagttgacattgggccccaatgaaagatttttatgatgaagaataacagaatcagaaatgtactttaaaatcttaacaaggagtttgtatttgataatgaaaaggttctggaaatggatagtgctgatggttgcacaacattgtgaatgtgcttaataccactgaattgcacactgaagcgtgattaaatgataaattttgtgtgtattttaccacaatttttaaaaaacaccataacaaggacctgactgttggagctgagaggcagtgactgtcgtgaaagaagaacagaatgatgcttggcattttcccagatggtttttcatgatgctcaatgtttgttttatgccctttctaactttaccctcagcaaagatgtaccagcaggtaatacaaaatatggttgttgccattacctttaaggagttcatggtttaatagagatgatagacagttttcaaataattatagtaccagaataatcaattttacaatagagacattaaccaaattgtcttatggataaaaaaaaaaaacctgccctggactccttctctactcccctaccccaccccccaaaaaagagctgggaagacttacctgcaacttaataattttcatagaataaaacatgttcagtagtccttcctgtatcaattcgtgtaagaacagttacatattagtaggataagtatattttcaatatctctagtaacactttcatttttccacaaaattttaatccatgtctaattcctgttcatgggtccgtgtaac

SEQ ID NO: 19625 - DNA, 1047 bp, Homo sapiens
tttttatattttttagtagagacagtgtttcactgtgttggccaggctggtcttgactcccgatctcaggtgatccacccacctcagcctcccaaagtgctgggattacaggcatgagccaccgcacccagccaaaaggagcttttttgagtggttgccagtttctttgttccttatattcttttgcttttttccctggggagaatgttggaaagaaataggggcacattcatacattttgaaaaaggccatggactttgatatcaggcagctctgagttcaaatcctgattttttttcctccacttactagctttttgaccttcaaaaagttacttgatactcttccctaagcctcagtttcctcaatgataatggagatgatattcttactcacagttattttaaaggaataaatgaattaatgtacgttgaacatttggcataccacctagcatgtattgatgttttaaaaaaaactcatttcccctcctccctcatataacgatgttgatgatgatgatgatgatgatgacgatgatgatgatgatgatagcagctaccacctaaatcgttttctgtgtgccaggcatttatatgtgattctaaatcctagcagtaactctgtgtagtaggtgttcctgtacctgttttataaatgcaggaacagactcagagaagttatttaacttgcctaatgttatcaagctactaagtggcagagtcaagattctaaccttggtcattttgattccaaagcctacaacaaacacaccgcctcccactgctgaacctgttaactccttattttaaaaatcaatttccaggccttctccctcctgaagtagaattgttttgttcttacctctttttttagttttctatttttgaagtttactttatcttttgaaggacagagtacaagaacgagggctgtgatctagtgccacgtccgctgcacactaagacctttgactaatttctttacctctctaaacctctttgctctgtataatgggaacccataatgggacttacttcttacagt

SEQ ID NO: 19626 - DNA, 1050 bp, Homo sapiens
ccagcactttgggaggccaaggcagatggatcacctgaggtcaggagtttgagaccagcctggccaatatggtgaaaccccttctctactaaataatacaaaaaaaaaaaaaaattagccaggcgtggtggtaggcacctgtagtcccagctattcgggaggctgaggcagaagaatcccttgaacccaggaagcagaggttgcagtgagctgagattgtgccactgcactccagcctgggtgacagagtgagactccatctcaaaaaaaaaaaaaaaagtttcaaagttcagtgccctatcaaaattttgatgttttgttttactctttcatttgtatttgcttgataatgttttgattgccttttctgtctagatttgtgattttggattggccagagtggaagaattagatgaatcccgtcatatgactcaggaagttgttactcagtattatcgggctccagaaatcctgatgggcagccgtcattacagcaatgctattgacatctggtctgtgggatgtatctttgcagaactactaggacgaagaatattgtttcaggcacagagtcccattcagcaggtatgatttcaatttaaggctttagttgcaattctattgcagatttgaaggaaaatccatcttgcacatgtgtcttgggcttattcattatactgtctaatttgcttttaggaaattcaggttcacttaaaattcagaaagttataaagttgaagattacaaagagattcattttgtaacttatgagcctttagagggagtattgagtttatttatgtatttatttattattattattattttttgagacggagttttgctcttgttgcccaggctggagtgcaatggtgccattttggctcactgcaacctccacctgccaggttcaagcgattctcctgcctcagcctcccaagtagctgggattacaggcacgctccaccacacctggctagtttttgtatttttagtagagacagggttttgctgtattggccaggctggtctcgaactcctgacctcagg

SEQ ID NO: 19627 - DNA, 1050 bp, Homo sapiens
aatatataggataatcctatatataataaataatatgttaaataggaataggatagataggaacttttaaataataaataggaataataacaggaatttatttaaattcctttacatgaggaatttatttaaattcctttacatgaggaatttatttaaattcctttacatgaggaatttatttaaattcctttacatgaggaatttatttaaattcctttacatgaggaatttatttattttaaattcctttacatgaggaatttatttattttaaattcctttacatgaggaatttatttattataaattcctagaaatcttttttaataggccagaaagtgaaagtaggggctcctgtcagttaatctagagcttgtcttaaggttttttcccccagatttggtccacttctctaaggctatgatttaagagtaatgaaaagttatttccatgagattactatctatctgtattttatttccttgtagttggatttgatcacggatctgttgggcacaccatcactggaagcaatgaggacagcttgtgaaggcgctaaggcacatatactcaggggtcctcataaacaggtgagaggaggggggaatctttttctggtaaccatctgtttgggcaagatttcccttccaatagagtaatctattaaggatttttaagcaaatgtattatctgtaggatttttttttttaacatcaaggtcctaagtaagaaaatgttcaatatttgtcaaactgaataaaatctcattcctaatgccgtaggagaaagtgcgtgtttgtgtagctcctttgctaatagatgacccttggctttgtgtctcctgatttattggtgtctatgggaaaaattactggagatggagctttgacctcaatgccataacctactacatgtatatcaagatgtcctttccaaatactgagccaaaatacctcgtatttcttattccagccaggactgtgaagctgttgctattgcactcttgccactaacacagaatcagatgtgaacgttgttagaaaagaa

SEQ ID NO: 19628 - DNA, 3657 bp, Homo sapiens
gtcaggatggttttcatgtgtatttgtttttttaaacaaagaatgatattgttgacagaaatgtcacatttgttcattcagcgaacaccctgagtgcctaccaagtgccagatacttattgttgctcctgacagtggccaacacacctggatgtgttatcttggaattatgaacagattctgggtaacacaaagaaggggctggaagagttgagaaaatttcagagaagggaacatttgagttagggatagtaagtttttattaaatgaccacctaggctgtgtcacaaaagccagctggacatgccatctgctgccggggtagtggggggtggctaattaatgacaggctcctccagtgtattttcaaatgagctagcgccgagcctgttgagggcaagtggctgtaattcatcatgatcgttttctttttcagtttagaaacctgctgaagtggtatgctaaggagttcaaagacccactgctacaggagcccccagcctggtttaagtcctttctgttttgcgagcttgtgtttcagctgcctttctttcccattgcaacgtatgccttcctcaaaggttggtaaatggtgggaaaatcccatttttactcagaaatcaggtcccagaaatcttttgggaaagtatctccaaagggaaggggatggtccccatagtttgtgggagaatgctacaggatctggggtaaatagccagggtagatcttgtaaagggacattagtgtggctcaggctcatgtctgtggtcagcaggcctgcacggctgcctcagtcgtctggaaatcccttgcatacacatgaagcctgagaccacttaaacaatgagcttgttcccttttgttttgttccccaacagaattaatttctctttttgttggcttttatttctctgcgttggatagtatcatactgacttataagctgtagcatcaggctaatccctaatgtgcttctcattttaaaattattcttagtgttctcatataatcaatgcttttttaaaaaggtgaccatacacgtgtacttgataagctaaaaccactgaaaatgctcgtttcccattggcaccccctggggtcactgaatctgccttctgatcctctcacctatatataattactgaacaaacagatgccatggggcagggatttccctccccttggattttgtaccacacaggtttaaccggtaatggcagttttattgccctagagcttttccgagttatgttctgacccccattcttggttctttggcgagctgtcggtgagctgtcacgtaagtctgcatgttgggcagtgtggcacatccaggtttccagttccgagtttccacttggagaagggagtagaagaaagcaggcaggcagagacagtgggaaggtcatggacacctttgagtcatgaacagacctaaccatttttcttttcccctgactacctcaggaagctgcaagtggattcgaactcctgcaatcatctactctgttcacaccatgacaaccttaattccgatactctccacatttctgtttgaggatttctccaaagccagtggtttcaagggacaaagacctgagactttgcatgaacggttaacccttgtgtctgtctatgccccctacttactcatcccattcatacttttaattttcatgttgcggagcccctactacaagtatgaagagaaaagaaaaaaaaaatgaaggaaacaaccactggcccagggtagagatgcctacagggtggttgcttgttggatacaatacaaggaacactgctcagaacccacgtcttcagcagcatttgaaacactggcagcaatgcacaagagcaagatggtgtcaggaaccatgtcaaaccctcaccttcttccattttttttttttttttaagacagtctcactctgttgcccaggctggagtaaagggcagtggcatgatctcggctcactgcaacctccgcctcctgggctcaagccatcttccttagcctcccaagtagctagaactacaggtgtgtaccaacacgtatggctaatttgttttgttttttttgtgtgtgtggagacagggttttgccatgttgcccaggttggtctcgaacgcctaggctcaagtgatctgcccacctcagtctccctaagtgctgggattacagacgtgaaccactgggcccagcccaaaccttcaccttctaagggcactgggatgaacagaccgatcggcttgagggtgggcaaaggggtgtgggctaggttataaggaagtggtaccaaataactgtgtgcctgagttccaccgcaagattactaaaagcaggaccagaccagaaactgctaaagaacatggcctgtttgacatgttcatgagtcacctgacccacagcatatatgcttatgactaaaccctccactcctgattctcaagagtgtatcacctgtcagcaaaatgaatagtgggatattttgggccattttaaatgtgaaattttgcctctttaatgttaattcaaaactatatcaatgttttcttgttcccacctctaacccaaggaaaaaagagaaaacatactatgcaaaggaagtttaaacttaagttttccttaagggtcagcccaacaatgactttcagtcaaatggattaaactggaaaatgtttttgtttctgttgtaaacagatcatcctaggcgaaagttttttttgtttgtttgcttttaaattagtttatttctaaatcttagtcttccacatttctagaggccacctgacacaagtccctgtatctgaagtctagcatctcaaggctgatctggaagtgtgctagtatgctccctagtggataacttaatcttttaatacagttccgtcattcccatcttgttttcagaagagaaggtggctacagccaggcataacatatccactgtgtgcatagagggtctcttcacgttgatgcttggcattccatcagctttctctaagtctttgctcaagttcaaccttaaaatgatgttagacaacaggtcccagtcagttccctctattttcacccattttgctcacaagccatattggcccgattagtggtactgtctgactcacgtgtgtgatccaaataaaggtagctgctgaccactgcctggtttgttttgtggactaggggatagagaatccagggttctctcatgaggagttaaacatatttcaagagcaacaggaaaaaaggtacatcaagccatttgaaaacaaaaatttattgcttctccttccaaagctttgtgaatttacaaaaaaaaggatgaaagtttacaaactgcttagttccaactaagcataagaggtgagaacgtacactgcagggccaccagcagcagctgtgcactgatgttaaaactggctcccccagacttgtagtgctgtcttcagggggctgcattccttacacgccacctcttgtgacataggtcattggtcaagccgctggaatgctacagaggtttttttggttttgagaggcttttttttgttttgccttcctactataaaagcgaaattttcagttcatttctgaaaaataaattggtcaataaattcattttgttctgcttctactttacacaaagcttcatattca

SEQ ID NO: 19629 - DNA, 2045 bp, Homo sapiens
tcagccaggcatggtggctcatgcctgtaatctcagaactttaggaggctgagacagaaggattacttgagcccaggagtttgattgagaccagcctgggcagcatagtgagagccctgtctcaattttttaaaattaaattaaaaattttttaaaagttcttctcaaccagaccccctctctggagataaaccactataacaagtttcttgtatatccttccagagagagtctctgcatatacaggcatttgcatgtatattatatagacatgtttgcaatatatatacaatcttcccctcctttggagctgggatttgaatccagacctgtgtaattctaaaatatctgcccatttcaccagacccacagcctctcagaccacagaagaactgggagctgggtgagtagttatcacaagagtgcagcacagttccactctgtaaaggtgccaggtgcatagggaaaagtgagggctggggcatcaggagactcaaaataaagtcctaggtctgaattgatatgttcctgagcaagtccttcccttcgctgggcctcaggtaagtcctctgaaaatgagagtgttggctggccaggggcggtggctcacgcctgtaatctcagcactttgggaggccaaggcaggcgaatcgtttgaggtcaggagttcaagaccgcctggccaacatggtaaaactctgtctctactaaaaatacaaaaaaaaaaaaaaaaaaaaagagccaggtgtggttgtacatgtctgtaatcccagctacttgggaggctgagacatgagaatcagttgaacccaggaggtggaggttgcagcgagctgagattgcgccactgcactccagcctgggtgacagagtgagatcctgtcaagaaaaaaaagaaaagaaaaagtaagggtgttggattagataatttccttcttatcttttgtttttgtttttgtttttggtagagacagggtctttctatgttgcccaggctggtctcaaactcctggactcaagcaatcctactgccttggcctcccaaagtactggaattacagacatgagccactgcattcagccagattaaataattttcttattttatttttcattttttgagatggagtctccctctatcacccaggctggagtgcagtggcacgatcttgggctcactgcaacctctgcctcccaggctcaagtgattctcatgcctcagcctcccaagtagctgggattacaggcacctgctaccacgcccagttagtttttgcatttttaatagagatggagtttcaccatgttggccaggctggtctcgaactcctgacctcaagtgatctgcccacctcagcctcccaaagtgttgggattacaggcgtgagctaccgcacctggccacattagatatttcttaaacatatcctggctcttacattctaggcatttatgcagtcagatgtctagaaacgcaaaatgaaggtgaaggatcttgaactctggagacaggcagatctgggttcaaatctcagctgtgcctctcagaaactgtgtgactctgggcatgtcatgtaccctctctgagttttggttttctcattggtaaaaggaataactgggccaggtgaggtggttcatgcctgtattcccagcgctttgggaggccgaagtgggaggattgtttgagcccaggagtttgagaccagcctgggcaatataatgggatcctgtctctacaaagtaaaagaaaacaaaacaaaaaaaatcagccagacatggtggtacatgcctgtagtcccagctactcaggtggctgagttgggaggatgaatttaacctaggtggccaaggctgcagtgagctgtgagcttatggcatgttccggactcaggtaggttctgcagtggacacaaaatcacatgcactatggtcactgtggtgccctttgggcaaggactccattgctggctaggcctctacctctttggcagtaatgtcacctgtggaggacatcactttttttttttagacggagtctcact

SEQ ID NO: 19630 - DNA, 1022 bp, Homo sapiens
cctgacgcattgtaggaacttattgaatactaacagaatgcattgatggatagctccatattgcatcttcaggttattaatcattaatcggtcagtaggaattggagttggggctgagggatgcagtagtcatctaagagacaggatgagacaagcagtcagctcagagacaagaatatgcccagagggctgggcacagtggttcacacctgtaatcccagcactttgggaggctgaggcaggaggatcacttgaggtcaggagttcgagaccagcctgggcaacatggtgaaaccttgtctctactaaaaaaatacaaaaattagccaggcatggtggcgcacacctgtaatcccagctactcaggagactgaggcaggggaatcgcttgggcccagaagacggagatcacaccactgcactccagcttgggcaacagagtgggaccctgtctcaaaatgactagatcgcatacaagttggtgtaaatgctgagccaggtaagcaaacatcttgcttgccacaggggtttggagaagggagagagcatcaaggtgtcaacgaaaagagtcagactctatgagcgaccatggcctgtgacacagccctcaggagaccctgagaacacgtgcccaaggtgatcagggcacagtttggttttatacatttttgggagacacgagacatcaatcaatacatttaagatgtacattggtttggttcagaaaggcaggacagctcaaagcaggggcttccaggctataggtaaattttaaatttttccagttgataattaattgagtttatctgaagacctgggatcaatagaaagggaatgtttaggttaagataaagggttgtggagaccaagttttattgtgcagaggaagttctcagggcagacttcagagggagtaggttataaaatgtttcttatcagacttataagggtgcctggctctttgttgattatctcctgagtccggaaagaaaaagaaaaaaatggggggaaggggattctct

SEQ ID NO: 19631 - DNA, 1013 bp, Homo sapiens
cagagcacgtggcaggcagccttttgagagaaagaaaagagtgtctgtgagctccatgagacttcagaccttgcctcattcatctgtgtccctggtgcctaaaaccatgcatggtacaaaggaggctctatgcaattgcaccaaaaaaaaaaaaaaaaaaaaagagagagagagagaggctgaggctgtagaggagtttatagaacaattgaatcaatgattaagcagacaagtgatactgatgaagctgagatgccatgcctgggagagccatacatatctagtagatttaccaggttagaggacttgactccgtttttttttttttttttccagtagagatagggtttcgctatgtcacccaggctggtcccgaactcctgagctcaagcctggagttcagtgcctgcctcggctccccaaagttctgggattagaggcatgagccaccgtgcccagccagaggacttgactctaattgttttcgttctcaaccagctaggtgatcctgaacaaaccattatccctttcttttatttatttaattatttttttttttttgaggcacagtcttgctctatcaccaggttggagtgcagtggtgagatcttggtcggctcactgcaacctccgcctcccgggttcaagtgattcccctgcctcagcctcctgagtagctgggactacaggcacacgccaccatatccagctaatttatatatatatatttttagtagagacggggtttcaccatcttggccaagatggtctcgatctcctgacctcgtgatccgcccgccttggcctcccaaagtgctgggattacagacatgagccaccacacacggccgccattatccctttcttggccagcctctgaatctgtgcgatgaataatttgtactgtctttggttttgtataattctggatgaaacaaatttctaaaaatttccaaataaattgctgcaggctcaggattcattccaatgctcagcagaaaggcagcagggct

SEQ ID NO: 19632 - DNA, 1960 bp, Homo sapiens
cttaatggaacccgattactagcaaataattcctcagaacaacgctttgaggtaggttttattatccccactttacagaagaggaaataataacacctattacgtattaagcatacactgcatgcaaagcactgttctaattacttgccatggaatgttgcgcttattccatggaacaatcctgaagacagggactatcattaatcctgctttatatattagaaaacagaggaacgagtgtggtagtgcaggcctgtgatcccaacactttgggatgctaaggtgggaggatcacttgaggccaggagtttgagaccagcctgggcaacatggtgaaaccccatctctactaaaaaatacaaaaaattagccggacatggtggcacacgcctgtggtcccagctacttgggaggctgaggtgggaggatggcttgagcccaggaggttgaggctgcagtgagccttgatggtgccactgccctccagcctgggcaaaaagtgagatcctgttcccctgccccccgccaaaaaaaaaaaagaaagaaagaaaagagaaaacagagactttgagaacctattatttttgcctcaggtcgtagagcctgtgtcagagactcagtgcaaaccccgatttgatgattccagagtgcagccctaactgctgtgctatgttttctcattcattcattcatccatctattaaatatttagcaagggctaactataagggctttgtgaaagatgctgagatataaggtcagtgaaaaatagatatgatccctcctcatgtctggcagagaagacaaatactgagtaatttacccattaattaattaaaatttgcaactataatatgttctgcagagcctataataggggaactgacttggtcagggcagtgggagacaactgccctgtgtaagagttgattgagctcagatcagaaaaatgaatgggcattatcaagggggaaggacaaggaagcttattttgtgtgtctgggaggacagggcaggggtagagtttgagaagtggactgtggccaaccacatagggtctcacaggccacatgaaggagtttggactttattctaagaccatgcaaagtcttgaagaattttaagtagggggtgacaggacctaatttgtcagatgtgcattttgcaaatattagctacatgaaagggcaatgtggagagtgaattagagaagacaagcgtggatgaggaaagacctggtgggggcttaaagataatggggattggaagagggtggtagtggggtggaggtagggaaaaatagtggatttgagaaataagtaaggagtacaattggcagggcgcatgatggatcaacctgtacgcaggagtgtgatgtttttcttctgacaccaaattgtttggggtttttcccacactaaccactaattctccagcttgccaacaccaactgggtatcccgcaattcaattcaattctgaaatgtcagtcacgaggcccaggcccccaggctgccacatttctgtttgatttggctacaaattcgggggtgcccatgacaccccgagattcaatttgccagaatgactcacagaactcaggaaagcactttacttactattagttgtttattatgtcaaccttaaataatgagattcagaaaataagactaagtatagagtttctttgagtgcaaagtttgagaatagccacccagtaagcattgactccaaaggcatggggtgagcattccaaactggagaagttaaggtttcacttccacaggcaaagagagaggaattttagcaggattacaacattttccatacaagaccagtgcgtatgttacagtgctttgattggttatagattgctacattccaaggaagatgactttattaccccctgagaaagggtggtgatctaagtggggatctaagggagtcttatctctggtgcc

SEQ ID NO: 19633 - DNA, 1034 bp, Homo sapiens
ggcctgggtctgggcatggggaggccgtgcctcaaagcccaccctaccccatgccttggtgctgtgcctcaggctccttcctggtctggcccagctggcttccccagcccctcagccatccagggctacccactgcttactcagggaccaggcagcccccatggcagtaaaagcagcctagacagaacctgcagctctgtggaaagaggcaaagtcctgaaaaggcaaagggttgtcacttagggcagcttctccaactttaacatgcatccaagtcacctgggaatgttgttaaaatcaggagatctggggtggggcctaggactctgcatttcttacagattcccaggtgagctgatgctggtggttaagggtagcaaatctctaaagcacgaagccctcacaaatctttgccatttcccaaacactccgctccatggtctccagtcatcagagcaactctacctggtattatcatccccattttacagataatgacactgaggctcagaaaggttgaggataagcccactttcctgtcattagtggcagccccagatccagacctaggcctcctggcacccagtccactggcagtggaattgctttcctgagaatcattctgaggctgggctattgcttctcccttgcttcaaagaatctagcagcgggggataggattttgcaacaaaaagctgacccagaggccatacagagcaggaatatcccattgccccctcctccactgggttcagagggtaagaaagcaccctccaataaacccaggctccaggccgtgggggctgctgaaggctctttccccgcaagggccaggtgttgacaccttaaagctggcgcccccagccccactcttggctgtgctggccaggtgactcctagttcttggccacatcatcagaaagtcaaaggtctcactccaggtttggggctccttccttccactcccctccctgccagagtctgtcttggccagtgccagcctcgatgctttggttttgaccccacctgatcct

SEQ ID NO: 19634 - DNA, 2119 bp, Homo sapiens
ttagcgcactggaggagcggcgggcttcagacaggtaaagttccgactggagagcgtgtttctcgcaggagtcaggtggggaaccgggctcctagggcctggtcacgtaagggaagaggcagtggggagccgtatgcgggaagaagggggagcctggccttccctgctctatggggggaagggggaggaaagcgctgtagttgctcagagtccgaaagcttttcccagcccagtgacacccggaacccgtgaatcgggtggcacgttgaatcaacaggcttcctggcatcccgtccttctctccgcaggtttttaaaactgggccacgcaaaaggattggggatggaagggacctggggcttctgagccaggatcaggtgatcgagttgtttgttctggggatatgaatcctgtggagctttcagcagctcggccatcaggctagagggcgatgccaaattccagctctttacatattgctgaataatacaaatagaactttttgtagatggttgcatccttcatccctttctaaagatcgaaggtcttgtagaagtcctaaagcccgtccattctctatagattcatttcctcaaacgtttgccagaggcctatcatgaacatcaaaattagttattaagtcaaaactccatcttctagtttctacctttctcctcaggcactcctttgaaccagctggagaagttaattttcctgggttgttgcaagaactgatacttatttcagagggctaagatctctgaaaatacttccgtggaaattcactgtaatatcaaaagtaacaagggtgtatgaagctacatcattaatgagcattagggagtgtaaacaatattgaatttgattaatttcttcggaaaaatgtctggttccactgtttatctggaagttaccagtttgtaagtcttcagtgttttgattacagaaacataactgctcttccatcagctgtgaatttagagcccttttttacgagtaatgtccctttcaccagtacaagtacatttttattcacttggcttgtgtggctgctagattggattagcatagccttgcaactctaggaggttttaacttcatcaggagattaattacatcagaaagtggtaccgtctggagaggcttagtcaaattttacagttcttcctctgaaagcctacctagtgtggtggaaacatgatctttgtaggcaaatacgtttgccctgattctatattcttgaccttaataaatggcactaccatcagtcctgcctgtaatccttgtcttccttcctgtccactatttcccaataaaatcagtcaccaaatcctgtctctccctgaaactgttcccatcagcatacaaattatgttctggtatccttcacatccctctccaattaccatgccaattttttaaatttccattcatagatttctacctgtaccaactcagctttctcaactttcattcactcttcattttataccaatctggcttctcttctgcccactccatttttttttttttttttgtggagacagggtcttgctctgttgcccaggttggagtgcagtggccccatcatagctcactgccacctggaactcctgagctcaagcagtcctcctgaggcagcttctagtaatcaagtgccaccacatctactttgcccactccattgaagttgctcttatcaaggtcaccagtgacttctatgttgccaaatccaatggatactttgttctcatattcctctgtctctgcaatattcaacatagttactcctgcctccaaactttcatcttggctttattgacatttcactcttggattttctccatttctccggctgttccttctgagtctcatttgctagcaacttttgctctctatctaatgtctaaatgctggggctggtcgcagtggctcatgcctataatcccagcactttgggaggtcgaggtgggcagatcacttgaggtcaggagttcacaaccagcctggccagcatggtgaaaccccatctctactaaaaatacaaaaactagccgggcgtggcgacacgcctgtaatcccagctacttgggaggctgaggcaggagaatcacttgaa

SEQ ID NO: 19635 - DNA, 1084 bp, Homo sapiens
aagagagacccatattattttgattgggttttgtgtgtgtgttgtgagtttattgtccagttctcttcctgtgcctgttctgtgtgtctattgtaatatataaaacgattttatggtccttattttcatatttctatctctaggagacattcaactccttgaaaatgaacaatccggccaggcgcggtggctcacgcctgtaaatcccagcactttgggaggccgaggcgggcagatcacctgaggtcaggagttcaagaccagcctgaccaacatggagaaaccccctctctactaaaaatgcaaaattagccagcatggtggtgcatgcctgtaatcccagctactcgggaggctgaggcaggagaatcgcttgaacccaggaggtggaggttgcggtgagccgagatcacgccattgcactccagcctgggcaacaagagcgaaactccatctcaaaaaaaaaaaagaaagaaaatgaacaattctcttcaaatccccagctcttagcagagtatatgtacattgtaggcattcagttaggtttgtggaaagaatggcatctgaaacctcaaccgaaaattgaacattccccctccctcctataccttcagttttgttttcttgagtttagttaatctcaagttcattggttatagtattgattgagctccgtaagggcaattttgaggagaattagagccacagaacttaaggcaccttcaggtagccattagccacccttctcttctctcccctcccactgccatctttaactgggaagatggcagcaatatgaaaacgtaagtagtttatttaacagacacttaacagttgctaatttgttagcagctaatttgttgctaatgtgttgcagcacacctgaagggatatagcttttctggtgcagaatcacagagtgccttgtaatgcctcttgtattgccatttatgttttcatgatttttattagtctctctattggatatgttctttatcttccagaagcttgtagtctaagtgagagaaaggtacatgggatatatcccatagaccattttactggatggggtgaggagtgatgc

SEQ ID NO: 19636 - DNA, 1227 bp, Homo sapiens
gcaaggattcacataagaagggcgctttccttaacaccgtgagaaaggagttcccttcacctcctctccctcccacagagtgacaggagtcaccagacactcttcacctgattgcagaaactgggggccagtacactggtctctcctgtccaccacctgcctcaccctcaccagggcttgcacacagtggctcactgttgctgtaatgtgctcactccgcccgcactgaagcggtggtcaggagagcctgtctcctgttctgctctgtctcctgctctgcctgctgctctgcctgcttctgtgtgactaacaggctggccttcctgaggtattcctttatctgagtccctctagcgcttaccctgaacctagaggacaaagtccagtttccttagactggcgtctttgtgtctgtgatacagactggtaatcacacttgcttctctgcctaagccctgcccccatccttccattggcctttggccatgtgcacttctgcttttatccctgtactggctttacctgatgcacagctcaggctgcattagtaggggctcagtggccagatgacaggaagccctagactctgtaccgtgtgccatcttgggcacatctggaatattgtgctcatttcttgagaagcctgttgactcaccagtgtgcttccagaggccagcagccagggctaagtggggctggaaactgtgtcctgtgtggaacagttgagcaaactggtggcgggggtgggggctctaaccaggaccaggtgcagcatgatagcttctggggaaaggagctgactctccttgtgtggcagaattaacacttacggaagagttaggaggcaggtgtcagcctaatagaaatgagaactgtgtactatgtagcattatctggttgccattgatagctggccttcattgagcacaacccagctttaggcattgtggaacgtgctctgtgcattctcatttatcctcacacccaccccataggcttcagtgctgtggtcctcactggacaaatgaagcagagattcaagtttggtaacttggtgcagcgtgtcatatgtggtgaatggcagagctaaaactagaactagaactggaactaacccagagcccctcttaacaactatctgctactctcagaagtgttgaacaagggcagactaccaccttccacagccactgcagaaagatgcctgctttaggggagttgcgattt

SEQ ID NO: 19637 - DNA, 1065 bp, Homo sapiens
cgcagctggtttaccggggattgccgcgccgcagagcgaacgaattgggaacacggctgctgggctaagccctgagggctctgctccggggctgctccctgcgtttcggacacgctgcagtatacgtgggccgcgtgggcccagcctcgtgggctgagttccggtagagggagttgggggggggcaacgcggcaggcatcatccgccagggagggccagacattcggttctgggaagctacatgcatccactggttggagctccatgtccccgggcctgtaaggaattagtgccctcagctttaaccattttccttctggttcatgttcaaccgggctacattacccgcccctctctccgcagcgtggttttgcgatggggtatgtgtaaaattcgtaggacattttctggaaagtatcaagcgttcattcagtgctactttgtttcatagtcgtatccctggagttacttagagttggtcgctttcgcctctggtatcgtgcatatgatggaaaagttttaatctcctgacacttgtgatgtcttcaaaggaaccactgatgcacctgtggccagggtggcccactgcagttcttggggccggaagtgaccgatttctaaatcccgcacccacgttttctttccttttctcccagctcctgcccctcctaaagctgaagccaaagcgaaggctttaaaggccaagaaggcagtgttgaaaggtgtccacagccacaaaaagaagaagatccgcacgtcacccaccttccggcggccgaagacactgcgactccggagacagcccaaatatcctcggaagagcgctcccaggagaaacaagtcagtactgccccctgtacccatgaaaagatttgggtattctccattggtaatttggaaattcactcactctgcgtgatggtttctcaaacgcaaattgtgtccagtgtgcttctctaattggaagtatgaggagattgtttctgctgcatttacaaaactggcaggatcagcccagaggccgggcgcggtggctcacgtctgtaatcccagcactttgggagg

SEQ ID NO: 19638 - DNA, 2549 bp, Homo sapiens
tacaaaaaaaattagccgggcgtggtggcaggcgccgctagtcccactactgagtcccaggctgaagcaggagaatggtgtgaacccaggaggcggagcttgcagcgagccgagatcctgtcactgcactccagcctgggcgaagcgagactctgtctcaaaaaaaaaaaaaaaaaaggaatttgcccctggcccgattctcctgcctcagcctcttgagtagctcggactacaggcgtgcaccaccatgaccagctaatttttgtatttttagttgagagggagtttcaccatgttggccaggatggtcacgatctcttgacctcgtgatcagcctgcctcagcctcccaaagtgctgggaatacagccatgagccagcacacctggcccagagatgattctttaatcacttgaggttgtaagagcccttcaagagaaagaaaatgcacaacgttctgcccctgggattggggcttcaggcccttagatttcagggtgcagatgatgacactgtaaagcgaccaaagtctgaacaaagtgattggtacctcgttgtctgatgcacctaggctctcctggctctgggctccaaaagaatgggcccaggccaggtgaccccattttgcctctcccaggcttgaccactatgctatcatcaagtttccgctgaccactgagtctgccatgaagaagatagaagacaacaacacacttgtgttcattgtggatgttaaagccaacaagcaccagattaaacaggctgtgaagaagctgtatgacattgatgtggccaaggtcaacaccctgattcggtgagttgggcctcaagggatggggagcaggctggaccagcagtctggagccaaaaaaacctgcattccatgaagctttttgatgtttaggtagtcctggtaatgcaggactacacgtgtagtccgagctatgcaggaggatctcttgaggccaggaatcacccatgattgccccattgtactccagcctgagcaaccaagcaaggccctttttaaaaaaaaaaaaaaaaaaaatcccctggacctttcagcaggggaaaaaggttccttgacttaaacttggtgtaggtttagcagtgtgtgtgagccttgaggcaggaattacaggctgctttagttacagacctttgtgtggacctgaggctttctaggacttgattgggggttggtcctcattttctgggtccctacttctattgggaaaggcaactagagtgcgacacgtggcagattaccttggtttaagtcttaatgtggcctgtggtgtttcccataagagaattggctttgtggcttcatggtgtcctctgggctaatgatggaaaaatcattattggaaaagaatgacatgaacaaaggaaccactgaagtgccggaggactggaggaggaagggggagggtgtgggggcagtgagggtggcagggactaaggcttccttctctaccctaggcctgatggagagaagaaggcatatgttcgactggctcctgattacgatgctttggatgttgccaacaaagtaagtttccttcctacaaaccccttaatgctcaccccttgggtgcaaatgatgcatatgttagcgaccaaagcctgatctttgctgattagtcataattaactgactgcacccctatccttgacaaaccttatcctcacattcctcattttgctttctaaaaataacattccagcttaatcttcatatttcaactccagtaacgaggctcccttttgtttttcagattgggatcatctaaactgagtccagctgcctaattctgaatatatatatatatatatcttttcaccatatacatgcctgtctgtcaatttctggttgggctgggaggccacacacacacactgacatgacagggcttgggcaagactcctgttctacttatccttttgaaatacctcaccctgccactccaccatgtatgatcattccagagatctttgtgactagagttagtgtcctaggaaaaccagaactcagaacttgcctccatggttgagtaacaagctgtacaagaaccccttttatccctggaagaggctgtgtatgaaaccaatgcccagggtttgaagggtgttagcatccatttcaggggagtgtggattggctggctctctggtagcattttgtcctcacacacccatctactatgtccaaccggtctgtctgcttccctcaccccttgcccaataaaggacaaggacttcagaggagtactttcattagtgttttcaatagtgtgggcgcaggctcagaaggtggagaggctggcctcagaggacacccaggcttggggctaagtcccagtgtccatatgaagctgtttctggccttgtccgtttttgttgtcccaggctctgtgcccctcactcagtcaagaacttgtctttgtgttgcttcttggggacatgctcagggcagaagtcagagcggaggaggcgggaaaagtagattatgatcatcacgtccagcatgagcaggatacccagcag

SEQ ID NO: 19639 - DNA, 1040 bp, Homo sapiens
acttccgtgtcctgttgccatggaaacaccctcctggctgttcgatgtgagttgtaacttttcccacttcaccacacagcccagctggcccctgtccacactcccatccccagtgttcacagatggccacatcaccaaaagcatctttagcccccagataaaaaaagcagaagctgcggttgaaaagcttcaagcttcctgcctggggtggccaaggctggtgcttcttgggcctcatggaagggctgcctccactgctccccagggctcacatgcattctttctcctactgctgagtcccgttgatgctgaaactctctttctggcctaacagggtccagaatccagggcccagtgggagtgggaggtgggtgatgatttctggaggcactgccctcagaagctgcaagggtttctcttcggtaccctccagcggtcacagatgagccggtccccccctgaggcacccggattcacctctggaccaccctgatattgcttctcctctgaatgctctgaaaagtgcaggtgcccaaggcatgacttgcagctgtctcctggattgtgtcatcatggggtatcagggctggcaaaacccctgctctgcttttggccttggatatggaaacctcaaccactttgttctcctaccacctctttgcccttcctaccccttcctcccttcagtcagtgtccccagggtccagcctggctagagttagaaggcagacctagcctttggaagcagggtggcctccagagccttgccataaaaaggctgaaggcagccgggcgcagtggctcacgcctgtaatcccagcactttgggaggctgaggcgggcggatcacgaggtcaggagatcgagaccatcctggctaacgtggtgaaaccccatctctactaaaaatacaaaaaaattagctgggcgtggtggcacgcgcctgtagtcccagctgctcaggaggctgaggcaggagaatggcgtaaacccctccagcctgggcgacagaaccagactccgtctcaaaaaaaaaaaaa

SEQ ID NO: 19640 - DNA, 1032 bp, Homo sapiens
gcgcgggctgtggggccgccgcgtgcctggccccgctcgcccgtgccggccgctcgcccgccatgcctggcttcgactacaagttcctggagaagcccaagcgacggctgctgtgcccactgtgcgggaagcccatgcgcgagcctgtgcaggtttccacctgcggccaccgtttctgcgatacctgcctgcaggagttcctcaggtgctggccggggagcaggggacagcgggggcggggcggggcggggggcgccgcctggggagggtctcgggcccggggcaaggcgggcctttgtctgcgctgcgaccctgtgacctcaggggcgccccgtgacgtcacggggagggatgacgtcaagccccgagggaggccccccccgcaggaatccgaggggtccgggcgggtcccaactgcccggcccggggcggaagacctcggcgccttctcgtggggtcaggaggggaagaggcccttccccgtcacctgagagccggcgcggcctcagccttgaactttgaatcctgggggaagaggacaaaacccgctcccgcgtggcagtttgagcctccggagctttcccccatctaacctcttctgattcttcgaacgttcagagaacggtagctattgttctcccatttcacagatcatgaaacgagattcaaagaaaggctgcgacttgcccagggtcacatagttacttaaaggcttaactaggatttaaacccggactgcttatgatcacacaatggaggaaggactgaatcctcccccgaagaaggacccctctaggcggctcccctctctcccgggggctggagtaaggcgggtggtccataagtcatgaagaagggggtcgcactcgtgttgttactgaactcccgctgccctctcaggacgcaggttagcccttggctcttgggcatccatcaagtttctgggcgccctgtatgtcttgaatctcctgctcacgcagggaacccctcaggcccgggtgtgggaagcagggtgaaggagccccgactctt

SEQ ID NO: 19641 - DNA, 1032 bp, Homo sapiens
gggagggggtgtagaaccgagttgtgcaggaatgggatattccacacttcagggcaaacttattcgcaggatcagtggcgggctttggaggtgggaagcaggaaggaaggggaatgcagataaactcttcttcttcagatctccggggtgaaatgaatgcacctgacgcccgcgtggcattagaagctccgcgaactcagtgaggccatgctggacagaggctggaactccgggccaccgggacaactctgcccgtagcaagccttgcgcgctcctgtgagggcgcgcgcgcgcgcatgtagtcgtgtctcgcgcagggtccggcctgtcaggcggaaaatctcgcgagatcggagacgggggatgacggtctggaggaggggagtggtgtcgggtaaagggggggaagctgggcagcggccgggctctgtggcttcagggctcggggagagagagggagggtggcaaagagactgagtcggtgccgccgcctgcctgaggagagaggaggggtcccgctcgccctgcgcccttcgcgggccgaaagcactaggcactcgcgaacatctgaggcctcccggccccgggggaccccgccccgccgtccgccggccggcccgcggcctctcttccctttgtgagcgcctccttaccaggggtggtgttggtggcggagggctgcgcgtgggcccgcccgccgaggggccgcggcgggggaccgagagggcctcggctgtgtgaggactagaggcggccgaggcccgggccggttcccccgaggcggcgacggagacggctcccggcacttccccgcgccatcttaactgagcccaagcgctgagggcgcctcctcgaccccggtcgtcccctcgcccccccccccaccccccgccgccgccgccccttgttgcagagcttgggctgggcggcttgctggggctcgggggtggggggcggcgatctgtcgccgggccccctcctcctcctcactcctcaccctccagggtagcggctaccggagcgctgcagggg

SEQ ID NO: 19642 - DNA, 1050 bp, Homo sapiens
gattacagacatgagccactgcacccggcccgatttccgtacttactattaatggttggattttaaaaattattcttcaggttttcctattataaaatatgagaggatacaacctgtattagttcattccattcttaaagtattttagtttttagtaataaaaattgatgtttaatttcattaaagatgtctcataccttctaaaaatctacatgaattaaaaagttgtgtggagggactagcagcaattattttcagctgggacgtttctgtcatcatatggtaacagttatttctgtatcagtctatttgtgccagaagcagactttttgttctaaaatacagtctaaggctatacctttttgatgacaaaattaagtatcctataaaagttggaagagtttttaaaatgttaagtacctggcatgtaaataaagtaagtaaaagtataaattattaagtgccttgcataatagatatactgcagcctcctaaaaatgccagtgaccgttatgctgtaggttgttatttaaatataatggcacttaattaccgtctaatttatctttaaagctgagaaggggctaatttttccttttgataaaattatttgatcaaatagttttatgcaggtttagaagtagatgaattactgtaacatttagaaagacattcaaagtttagtttctgagaaatattatcaaataataggatggaacaaaactttctggtttgcagctaccaataataaaattggcacttactatatattaatgttggctgggcgtggtggctcacgcctgtaatcctagcactttgggagaccgtagatcactttaggtcaggagttcaagaccagcctggccaatgtggaggaaacccgtctctactaaaaatacaaaaaattagctgggcgtggtggcgtgtgcctgtaatcccagctacttgggaggctgaggcaggagaatcgctggaacttgggaggtagtggttgcagtgagctgagattgtgccactgcactctagctgggcaacagagtacaactctgt

SEQ ID NO: 19643 - DNA, 1035 bp, Homo sapiens
tgcaagtaaatacatacaatagtgtagtgcagggtttcccaaccgtggtagtattgacattttgggtaggataattcattgttggggggatctgtgctatgcattatagcatattttgcagcatcactggcttttacccattagatgccagtagcgtcacccctggttgtgatgatcaaaaaatgtttcaggtattaccaaatgtcccctagggagcaaaatcacctgattgagaaccatttatttaactgttatacaggtagagttaaggggtgtttaggagtagtgactcctgagggagtgagattttatatgggtcttgaaaaaaaaataaaagtacaaagggtattatatacctgagagcatgaatgatcaatattgaagagggtgattactgatcatatgtggctataggttatttatgtgatttgggatgggtatttggtaaaatgaagctgaaaaggtacttttgggccatatcttttttcttttcttttttcttttttgagactggatctcactgttttgcccagactgaagtgcaatggcacaatcacggctcactgtagccttgcttgacctccctggcccaagcagtcctcccacctcaggttcccaagcagctgagaccacaggagtgcactacccacccccccaactaagcagctgggagactactggcatacaccaccatggccagctaatttttgtagtgacagggtttctccatgttgcctaggctggtcttgaactcccgggctaaagtgatcctcacacctcggcctcccaaagtactggcattacaggtgtgagctaccatgcttagccatttttctttttttaaaactgtttgaggtataattaatgcagcaaagtgcataaatatgaagtgtaagcctgttgaatttttacagatgtgtatgttcatgtaaccatcacaaagaacaagatagagaacattcctagtacctcttacagttctttctttttttagatacagggtcttgctcttttgcccaggcaggagggtagtgg

SEQ ID NO: 19644 - DNA, 1053 bp, Homo sapiens
agtgcagtcacgcgatctcagcttactgcagcctctgcctcctgggttcaagcaattctcctgcctcagcctcctgagtagctgggattacaggcatgtgccacctcaccctgctaatttttgaatttttagtagagatgaggtttcaccatgttggtcaggctggtcttgaactcctgacctcaggtgatctggccaccttggcctcctacagtgctgggattacaggcatgagccaccggcccagcctgttgagtgtttttattatgaaagtgtgttgcattttatcaaatgcgttttccatatttattgagatgattgtgggttttttcccttcattttgataaagtgatatattacattgatttcttttcatatgttgaatcacccttgcattcctagaataagtgccacttaatcataatgtataatccttttaacatgctgctggattcaggtattttcgttgaggatttttgagtctatattcataaggggtattggtctgtaattttttcttcttgtgatatctttgtctggctttggtatcaaggcactactggcccataaaatgagttaattcttatttaaatatttggtagaagtctggcttggtggtgcatgcctgtagtcccagactttggagaccgagactacaggatcacttgagcccatgagttcgagtccactctgggcaatatagcgagaccctgctctttaaaaaaattgtagaagtcatgagtgaagccatctagttccaggttgtttcctctgacagttttctgattactgttttatcaatgtctttacttgttgaaattagatctaggtcaatttagtctgttgaaatgttctgttttcttgagttagttttggtagtttgtgtgattttaggaatttgaccatttcatctagattacctaatttattggttgttcatattattctcatatcctttttatttctgtaagtttagtagtaacatctttgctttggccagacacggtggctcacacctgtaatcccagcactttgggaggctaaggcaggtgg

SEQ ID NO: 19645 - DNA, 1033 bp, Homo sapiens
ttttttgtttgtttttttttgagacagggtcatccaggttggaatgcagtggtacaatcatggttcactacagcctcaacctccctggctcaagcaatcctcccacctcaacctcctcccaagtagctgggacaacaggcatatgacaccacacgcagctaattttcacattttttgtagagatggggtctccctagtttgcttaggctggtcttgaactcctaggctcaagttgttttcccacctaggcctcccaaagtgctgggattacagacctcaccacttactgagccactgcacccagccactttttctctttttatggtttatttttttctgttttttttttttttaacattttctatttcacttatcacagttctgctagcatatttttgtaagtttagtggccatttgtaaccttattctttgaattgcctatttatggaacctattttttgttattgttttttgtagaatgctttatgtattgtggcatatgttaacagcaccaggacctctgaacagtgttgaataataaaggtttcttcttgactgtaatgtaaatgtatttcaccattaaataggatagtatggttaagaaagtttcttcatctttctagtttactaggagtaggtaattgtgatgtataagtttcctacaaaaatctagtggtatatccatacaataggatactgcttagcaataaaaatgctcacaacaggcctggcatggtggctcatgcctgtaatcacagcacttagggaggctgaggcgggcagatcacttgagcccaggagtttgagaccagcctggccaacatggtgaaaccccatctctactaaaaatacaaatgtgtaggtaagcctgattcgtcctataatgtcaaatttcttgctggtatttctcagttgtattatcatttcatttattgttataattacatatgtgtgtgtgtttgtgtgtgtctatcgagggaggatatagtagatagtataatctctaccagttcagtgtaaagaagcaattttc

SEQ ID NO: 19646 - DNA, 1024 bp, Homo sapiens
aattttacttcaaactatgttcttgatctactgtgtgaacttattttatcttaaatttatattaaatctttataataatatattttaatgcttttataacttttccatgtagcttgtaatggaatattgtttaggatctgcttcggatttactagaaggtaagttccctttgattattttttaaaaagtattcacagaataaaatgataatttagacattatttaaatgatattaataccaaataatgtaaaactttccagaaagagcagaactcttagtcttgttcaaattctcagcatggtatatgctgtccttattaaatattatatgttatacagtagcttaaaatagtcatgttttctcattgtgactttacaagtatttttctgaattctctgtcattctgctcctcttgttcaaaccaaagataagtgagaataaagagagaactctgttactattgtttttacatcaccaaataattatttaatatcgttagctaagagaagaattggctatgaactgtactttaacaactgacacaactgcatacaagttataaagtttaataatctttatcatcttggaaaataaatctcttcttgctaagtatcagtttttaaaaattgccccatgtattagatatgtatttttttaacaaaaatgttctgtgtattaattattttgaaataaattttaagttcacaaaaagccattacaagaagtggaaatagcagcaattacacatggtgctcttcagggattagcctacttacattctcatactatgattcataggtaagtgctttggaaattatatattgataagtaaatggcttgttgcatataccaactttagaatttattaactctaaagtttttattggttaaagccaaataaaataatataagctcatatttttttagatttttcatgtcctaaaatgaacatagttgtatactttatctcactaggataatttttatctttgcctatatgtgctgctggaccttgtaaaaata

SEQ ID NO: 19647 - DNA, 1080 bp, Homo sapiens
tatgacataagtgatatagggagtcaaggtttatttgttttttcctatgtaaagaaccacttgtttcagcaggatttgctaaaaacactatcctctgaattaacttgactttcttggtagaaaaatcaattgaacatatgtggatctctttctagtttttattctatttccttgatctacttagcctatcttaaagccagtatcacattgtcttgattactatagtgctgcatatcctccaaatattttttttcctcaagattgttttggatattctaggttcttttatatccccatataaattttagaaccagtcaatttctttaaaagacttgttggaaatttccttggaatctgctaacattgggatattttacactaattccctacttagttaatatagaattgtctaaaatgcttttcgaagaagaatgttttattttcttcttttccttacattatttgtatgtctaggttacgaggcaaatgcaagaacatgagcaggactctgagcttagagaacaaatgtctggctataagcgaatgaggcgacaacatcaaaagcaactgatgactctggaaaacaagctaaaggctgagatggatgaacatcgcctcagattagacaaagatcttgaaactcagcgtaacaattttgctgcagaaatggagaaacttatcaagaaacaccaggctgccatggagaaagaggtggcttattcagtattattactttgcttattttaggttttgaatgtctcagaattaaccaacatggcagtttgatgttagcgtatctgttcccgtgaaccaagcaaattggggaaaaggagaagcatttatgtgacttatataaaggtttctgtaaattgatattacaagaaagggtggcacctgtgtgttttatctctcactaattttgtgtgtgggtcatttaaaacaaatcagtcttaaaactgttcattggagtagtccactttatagtttttgtaatagccaacaaaattttgagtctgaaaaattgatgtgttttaatatcaagtactaggtctgggaactaataagacatgggaccatttc

SEQ ID NO: 19648 - DNA, 1027 bp, Homo sapiens
caaaaaaaaaaaaaaaaaaaaggtaaacatggccaagccaataaaaaaatcttattcagccatttaaatgatgtctgcaaaaccagtattaatatggaaaaatgtttatggtgtgttgaacaaaattttaaaagacaaatcctacttgaagtaatgttagtagtggctatgttaatgtgataggttgatttttttctctgtttcttttttaaaatatggttttattcatttcataatggaaaaatgcatacaattatttagtatttaaaagagtaaaagaacaataggatggtacatctatagtgcttcaagatgttacttggtttttatggctaatattttgcctttcaagcaaagtatgtgactacaaggcaggctggggtcaattagcaatcactaagaccctgtacctctctacaaaaactttgtaaaatcctaaaagctgtgatttctgcactttatgcttgccggttgtacatacatataagaaggagacatctgaaaataaatagaaatggaactggagtgaatgttagttgattctagatgaaaaatcattctgtttgaagattgttgtaagtctccaagtgaaccaaaaattgttcatttagtttgagacaaaatgagcctcacatgtacatgaagtcttgtttcaatgtttctcatccttcatttacattaaatttttagataacaacacaactataaatgttaaattatatgtgaaatatatatatatgaaaagtagtagcatttccagagtataaatgacctttttttaatcatctcatttaattttctctcaagatttcacttagtattaacatcatggttagtagtgtttttaagtaagaattaaaatttgggggtgggtgcagtggcttacactgtaatcccagcacttcggaaggccgagtggggcggatcacttggtgctcaggagtttgagaccagccttggcaacatgatgaaaccccgtctctacaaaaaaaaaatacaaaaattagttggatatagtggtgtgcgc

SEQ ID NO: 19649 - DNA, 1009 bp, Homo sapiens
agcttaacggtagtctttagatcataagaaatatataaattagtatgcaccttatctgcctgttgtgggtttcttaaacttgcacttcctacccacccaaagatagatatcctttaaagaaaataaaggcagagaattaaaactggggagccatttactatgtcaccatcactgttaactgtttcccagcaatctaaactttttgaagtttcagaggtgtattttttttttgtatatatgtctgtgtgattgtattgttttgtttctaaatatacaaggaattctttaaatagagaaaaaggttaatcctcactgaaacaccaggatgcccactggatatactaatctgaacatctgtaggtagtttgtcatgaaaaagtggagagaagatgagacttttgaatgaatgaaaaagggtatcttgatacccagaattccccccaaagtacgggtaattcaacctgcacagttttctttcactcaaagtgttcagcacttgtgagtgaaaaatcatgtaattatctgtaaatatgtagctaacaaattgacctagtttctgtatttttttgtttttgtactaaagtttataggtctgtgccagctagagagaagttgctgtcattaccagttgtggtcctagcatctaaccctgaaaccatcctaggtgacatttttagaattaatacttaaatgttaaacagggggaaatgaagcttaatcatggtcaggtttgagatcttttgcagtgaaataattttatttaatataaatgatcacatgtcctcaatcatgaatgaggtagggagcctctctcccccagtggccatgtttacaaaagtgtgttttgtctataaagtgcaagtgttttaatgtttatgtaaattatgcaggtgataacatggtttggaactgtttattgggctctttaactgaattttcaaatgaaatgaactatgcttattgctggcacattgatcccatttctggaacatttttcctatttccagag

SEQ ID NO: 19650 - DNA, 1251 bp, Homo sapiens
cacatggtcatggactgaattatgtgactttaaaggatgtaactgcccaacatttgcagattctgggtggtctatgtgaccatttgtctcgtatccaaaaaccccggggctattggaacccttccaacactttttcctttgtcatagacaagtttatatataacttaccaagatgttggctgtcctggtgtattgccagacagctctcttttggttcccattccaaatgtgctgctgtccttctttgcatttcacaatatcaaagaaaccaccacccttcttcctaacagcattttatgccttttattccacattaaatgggaattgtgcctacttaggagtgcccctccaattaattacatgtgtccaagaataatccaagctagagacacaaggtgggaaaacatttcaaaaaaaaaaagtcctcttaaggccagtaatttatctgaaaaggtattttatcacaccttgacaccttatatatgagcctattaggagctgcaggtggtttcatagggtaaaatccaagaaaagagaaggatgtgtggggtttctattagaagataattttgttctcattttaccttttcttttatgatccttctctgctagaacaggttaattctccaaatttgttttgttttgttttgttattttttagggaactcttttgcaaaagcaatggtcggatgtaaataacatttaaagtatagtgcacataacttccccggactgttccaatctgataatttgtaaatgctttagagtttttttaattaacacttgtgttgctaaattctatttatgtaagtctgctaaagttttttagcccacttaaaacttaagacaaccatttaaaataatggatgggttactatgagcaatttcgctttcagaacccccttgttttagtatatgaaaaagcctaatgcgcattaatgaggttgaagagactatgagaaatatgtatagtgtatattttaaaacagctttgcttgtattgtgaagatttaaaaacaaacttgagatttttaacgtaactattaacacagttttaacataagttatcccactgggtttaagagcatcttgaatgtataatcctttttgtaacccaggttggtttctacttttaccagtcacccaaacatatttatgtttttagttttatgtactcatttccctttgttttcctcaaacagcatgatttttttgcacatgtagaaattttttaaaagaaagaaattagta

SEQ ID NO: 19651 - DNA, 1066 bp, Homo sapiens
gctggagtgcagtggcactcactgcaacctctgcctccaggttcaagcaattcttatgccacagcctcccgagcagctgggattacaggcgtgtgccacctagcttagctaattttgtatttttagtagagacgaggtttcaccatgttgcccacgctggtcttgagctcctgacctcaagtgatctgcctgcctcagcctcccaagtgctgggattacaggtgtgagccaccatgcctggcctgaaatacctaacttaaattggccaggcatggtggctcacacctgtaatcccagtactttaggaggctgaggcgggtggaacacctgaggtcaggagttcaagaccagcttggccaacatggtgaaaccctgtctctactaaaaatacaaaaattagctgggcgtggtggcacacccctgtaatcccagctacttgggaggctgaggcaggagaattgcttgagcccaggaggcagaggttgcagtgagccgagaccatgccactgcactccagcctggcgacagagcgagactgtctcaaaaaaaaaaaaaaattctctgtaatagctccaggccaagagttgttgcctcacgccacctatcagattcctttcctcaaacagccctttcatgaagtcattcctctgttcacaaactgtcaatggctccttatttcccaccttatcgtggccatattctccggcctggcttttcaggccttacttaagtaagcttcgtctgacctctccacatccttggttcctctccagttgtgtcgggctgtttgccacacaaatgagtgccagcctcgcccttaccacagcccctttgctcctgtttattctcctccacacctggcctatcctgactcggagagtgcagctccctgccctcctgccatactcccccagccatcttcccagtcccagctggcatcagctccccctgagacactgcccgatggcatcagcctttattcctcccctcctcctctgaatctatctctgataatttaacaactaatcactaagttttattagtttgctgttttatttgcattagt

SEQ ID NO: 19652 - DNA, 1032 bp, Homo sapiens
aaccgcagctttgtcttcaggggccaaggtcaggcaggcaggaagtggggcagggtggggacgatgggaggcagccccaggccacccctgatccccctgtgctgttccgtgtctggcagacacaagcgccgtggtcatggagattgaccacgaccgccgggtggtgtacacagagactctggcactggctgggcaggaccgggagctgctgctggctgctgctcagcccactgaggaacaggtgctgagccggcttaccgcgcccgtcgtcaccactcagcttgacaccaagaatatctcctttgagaggtgggtggacatggccttggtcacccttgagccagcccggtggggtgcctgcctcacctggaccactctgcttccccaggaacaagactggcatcctgggctggcgcagtgaaaagacggagatggtgaatgggtatgaagctaaggtgaggctgcagctcccagctgccagcccagctgcactcttgcctacagcaagctgtacaggggattctgacctcccttccccagccctggaggtacagaagcaatgcagcgtggtcaagcacttatatttgggttcaaggcacttctctggtgttttatatggatgtatggatgtatacacagggcacgtgcacacgcacacacacacacacatttattcctcacagcaaccctttctggtaggtgctgttctgttagtattcccattttacgcatgtttattgagtcctttccttggcatcccatttactcttcacaacaaccccaggaagtagggatgatcggtccattttatgatgaggaaatagaggcttagagtggttctgtgacctgtacaaggtcacacagctgttaagtggcagagttggggttcagatcctggctggcctgaccctagagccaggcctttatccctaaaaatgactgcctggctgggcatggtggctcatgcctgtaatcccagcgctttgggaggccgaggtgagcggatcacctgaggtcagttcgagaccagcc

SEQ ID NO: 19653 - DNA, 1074 bp, Homo sapiens
tataggaaaaaatgttgcagatacggttgtaacaggattgggccagattgtggagtaccttaaatttttcgtataaaatttcaactttatattttcaagtagtttttgagtaattcggtgatatcatcacacttttgggaagataactcttgaattgtaaaacaaagaaagggagaaatgagagatgagtttaaaaatgcttgttagaaggcttttttagtagttcaggtgagagatctcaacctaggttgaggtcattgggaattaatggggaaaaatgtgagcgataccacagaaataagtaggacctggcagccacattgaatatatgggaaagagatggagtcctgatgcaagatcttttttttttttttttggtcatcattttccctcattaaaaaaatatataattcacacactgtatactttacccttttaaagtgtacaattcactgtgtgtgtgcgtgtgtgtgtgtgtttttttttttttttgagacggagtctctgtcactcaggctggagtgcggtggcgtgatctcggctcactgcaactgcaacctccacctcccgggttcaagcaattctcctgcctcagcctcctgagtagctgggattacaggcacctgccaccatacccagctaatttttgtatttttagtagagacggagtttcaccatgttgatcaggctggtctcgaacccctgaccttgtgatccacctcgcccggcctcccaaagtgctgggattacaggcgtgagccgccgcgcccggccaattcactggtttttaagagttgtgccggcatcaccactgtttagaacattttcctcacccagaaagaaactgtgtacccattaccatcactccccattctccccacccctaaaccctggcaaccactaatttactttctgtttctatgggtttccctattctgcacatttcatataaatagaatcatgcaataggctttcttttgtgtctgacttctttcacttagcatgatgttctcaagattgtaacgtgtcagtactctttatttctttttttattactgaataatattccattgt

SEQ ID NO: 19654 - DNA, 1024 bp, Homo sapiens
cagttcctcctttcttttttgagacagagtctagctctgtcatccaggctggagtgcagtggcggcatctcgggtcactgcagcctccacctcccaagttaaagcagttcttgtgcctcagcctcccaagtagctgggatcacaggcgttcgccaccaggcccagctaatttttgtattttttgtagagatggggttttgccatgttggccaggctggtcttgaactcctggcctcaagggatctgcctgcctcagcctcccaaagtgctgtgattgcaggcgtgagccaccatgcgtggcctagtagatcctctttttcaaattgtcagaataagttagaaataattatcattttgttcaaggtgggagagatggttgggggggtggtgaaagtttttacaccatatgagtaagaaagcatattctgatgctgctatcaattcataagtgagtggttttgctgtcataattttccggtctcactgtcaccatgttcattcttttctgttggattattttaattgtttcataactagtttccttattatctgtcttctcaaattatttatgatattgtcagattgatcttcctaaagcacagttataatcactgatcctcagtcctgaacgtaattatatttaaaatctaaagtgctaatcttgactttgaaaaccttctctatgctttgcccctagaatgcttactagcattttctcctaactgttcctccataaaaagtacactgtcgtgcttgcagtttttcacagctctgcttttctttacactggaagtcttctccccatttttttaatgtccaaattatagccatccttcaaaacccagcgcaaaagctacttctttcaagataccttctttgattttcctcactggaaagaatctcttcctttttcttacactctttacctttcttattgcacttagcttttaaaagcttgcattataagttgtttacatacatgtcttgtcactgtactagataaagtatgagctctatgagttag

SEQ ID NO: 19655 - DNA, 1065 bp, Homo sapiens
catgcatttattaatgcattcaacagatatttattgatcacttgccctgtgccagtgaaacataacaaaagccactgcctttatggcacttatattctcaaggtggtggtggtggggggtgataagtaattaacataacagataagtaagttacatgtgaatttagaagattacagagctgtgaaaaagtagagcaggataaggaaaattaaacaggtatttagggaaattactcagtctatgtctttttctctctactaagattaaacttttgtcagtgtttcagttatagcttttctgtttcttactgtttctaatttattagctctattggtgttattttagtcttcaatatattttctttagctctacagtttctctgtcttttattgtcctctcatctgaatagtaacttttaaaatttaattagtaatcttattttgaagagtttgacagggaagagagagaggaagagatggaaatgatagttcaaagatacacaggtatacctcactgatattgtgggtatggttccagaccactgcaataaagtaaatatctcagtaaagcaagtcatgtaagttttttgtttcctagtgtatataaaagttatgtttatgctatgctgtagtttttaaagtgtgtaatagcattatagctaaaaaaatgcctataccataattttaaaatactttatgctaaaaaatgctaatgatcatgtgagcctttagccagcaataatctttttgctggtggagggttttgtctcaatgttaatggctgctgactgatcaggtgatgtttgctgaaggctgggtggccgtagcaatttcttaagacaaaaatgaagtttgctgcattgatcgactcttcctttaatgaattatttctcggtaacatgtgatgctgtttgatagcatttacccacagtagaactttaaaaattggagtcagtcctctcaaatcctgctgctgttttatcaactaagtttatgtaataatctaaattctttgttgtcatttcaacaatgctcacgtcgtcaccatgagtagattctatataaa

SEQ ID NO: 19656 - DNA, 1151 bp, Homo sapiens
tacaaaaaattagccgggcatggtggcgggcgcctgtagtcccagctactccggaggctgaggcaggagaatggcatgaaccagggaggcagagcttgcagtgagctgagatcataccactgcactccagcctgggcgacagagcgagactgtctcaaaaaaaaaaaaaagaaaagaaaagaaaccagtgcagtggctcatgcctataatcccagcactttgggagactgaagtaggcgaatcacctgaggtcaggagttcaagaccagcctggccaacatggtgaaaccccgtctctactaaaaaataaaaaagttagccagttgtggtggcgtgcgcctgtaatcccagctactcagaagactgaggcaggagaatcatatgagcccaggaggtggaggttgcagtgagccaagatcatgccactgcactccagcttgggcgacagagcgagactgtctcaaaaagaaaagaaaccattttctttgctcatccagtagaagaaatttgtcatcaattcaagttttatcatgagattgtcatcaattcaagttttatcatgagcagttcagtcacatcttcagactccatttgtaattctagttctcttgccatttctaccccatctgtagccacttcatctactgaagtcttgaagccctcaaagtcattcatgagagttggaatcagcttcttccaaactcatgttaatgatgtttggcctccacccatgaatcacaagtgttcttaatggcttctagactgttgaatttcttccagaaggttttcagtttacttgcccacatctgtcagaggaatcactgtctgtggaagctgtagagtttatgaaatgtatttttgttttttcgagacaaggtctcgctttgtcactctggctggagtgcagtggtgcgatcttggttcactgcaacctctgtcgcctgggctcaaacgatcctcccacctcagtcagcctcctgagtagcatgggccacaggcactcaccaccacacccagctattttttttttttttttttttttggtagagacaggggtctcaccatgttgcccagtatggtctcaaactcctgagctcaagcaatctacctgccttggcttcccaaagtgctggggttacaggtatgagcca

SEQ ID NO: 19657 - DNA, 1017 bp, Homo sapiens
gtccataattacatttttgagttattgttttatttggtttgtgtacaatctcattgcactctttttactcaacctgtttgacaatttctaattggaagataatgtaagctttacttccaaatttatgaagttaaataacaaaattagctttctgtttctccaaaatcatacacatctgcttccatatactgacaggctttgatattacccattccaactttaccataaaagtcattaaaaagaagtttttcctttattttcatgttgtgtttcagtgtatgttgtcagacagaaagcaataatccctcatctcactcctgaatttatcaaaagctggaaataaaatagatcaaatcactttctgaaacaaaattactttattagtttagtaataatttgaggttactttaaagataagaagcagcatttggaaggagattcatttcctgcctttgggctttatctgcaagaagtacatctttagtgtcaagagattgtgtatttataactgaactctaataaaatctgtactggggaccctgcacacctgacttggtcattgtggttatatattaggtgccaaactattgcttgtctcttgaaaaaaaaatacattgccaagtgtttttcattaaaatttgccctgtgtagaaaaggttataagacctttgactgttcattataagtgtgctagttgttaccaacatagttaatgatgttccttttgaaaataagtttgtgtttctaactgaaacaaacttacggagtttttcttttattggttaattaagcaataattggaaaacatgtcattaattctagtatatatgttttcactaaagcttattaaatatttgcatttccgatagcacagtagggtgactagtcaataataatttgtatattttaaaataaagaatgtaattgaattgtttgcaactaagtataaaagcttgaggggatggataacccattctccatgatgtgcttatttcacatggcatgcctgtatcaaaa

SEQ ID NO: 19658 - DNA, 1063 bp, Homo sapiens
agtggcgcaatcttggctcactgccacctctgcctcccgagtagctgggatttagaggcgtgcagcaccatgcccagctaatttttgtatttttagtagagatggagttttgccctgttggccaggctggcctcaagcagtctgcccacctgggcctcacaaggtgttgggattacaggcgcaagccaccacacctgagcctaatcagatttactgtaatagtttgtttaaaccatctgcttcatctcttctagtccttatacctctttttcctgttttactttattagacaagttttcagtagtatgttgaaaaatgtccttagtgggcattctgacctgtctatcctaagtgatatcctaagcttctgaagtttttccattaagtttgatttttgttattggcttttggtatatagactttttctttttcttttcttttctttttttttttttgagacggaattttgctcttattgcccaggatggaatgcaatggtgcgatctcggctcactgcagcctccacctcctgggttcaagtgattatgctgcctcagcctcccaagtagctgggattacaggcctccgccaccatgccccagctaatttttgtatttttagtagacacggggtttcaccatgttggctaggctggtcttgaactcctgacctcaggagatctgcccaccttggcctcctaaagtgctgggattacaggtgtgagccactgcactcggccagacttttgtttgtttggttggttggttttgtttgttttgttttgttttgtttgagatggagtctcgctctgttgcccaggctggagcgcagtggccaatctcggctcactgcaagccccgcctcccaggttcacgccattctcctgcctcagcctcctgagtagctgggactacaggcgcccgccaccacgcccggctaattttttatatttttagtagagacggggtttcaccatgttagccatgatggtctcaatctcctgatgtcgtgatctgcccgcctcagcctcctaaagtgctgggattacaggtgtgagccagtg

SEQ ID NO: 19659 - DNA, 2003 bp, Homo sapiens
atggcgcaacctcagctccctgcaacctctgcttcccgggttcaagcaattctcctgtcccagcctcccgagtagctgggattgcaggcatgtgctaccatgcccagctaattttttgtatttttggtagagttggggtttccccatgttggccaggctcatcttgcgaactcctgacctcaagtaatcagcccgcctcagcctcccaaagtgttaggattacaggcgtgagtcactgtgcctagcctgacaattttttataaatcacaaataggtactaaatgccttcctgaatttattgagctagttaagtcatttttctcctgtggttcattaatatggtttattagattgatacatttttaaatgttaaaccattcttgaatttctggcttaaatccttttgagcaggatgtattatttttaatatgctagtaaactcaattcactaaaacttgatttagggttttcaaacatctatgtctataagtgggaaaggctttgtttattgtctaaaaatgtctgtaggattttaatttatggaggtgacaaatgacatattgagactaatgccctttaaaagaagattattgttatgtacatttactgacaggagaagacatgccatttcattcagggctacatagggaagaaccagtttggatcaggaaaagcctggttcagagtctttattgtatttttcatgggaaaggaagggaaacagtttaggattggctagtttgaatcttgtcagttgcctctgggctgtagcggtgatcaccagtttttttgtatctggccctgggcaatgaaggcagaggactattgcttcctggcttgtaggggccagaggagatggttctaagtttgggctgtggattggctgatttacagtttttggaatatgtatctgttctgcccaggttttcagatttaattgttcacgatagtgttttttaaatctttcatctactgttacttgcatctctttacttttcttgattaatcttgccaaaagtttgtctatcttataaaatcttttgaaataactagcctttgattttgttcatctatattttgttgatttattctctaatttctgcccatatgtttattgcttccctgggttattttgtcaatcttcctaagtttctttttgagtactattttagctgtatctcacaagttttggcatgtagtgttttcagtgttatacatttataaatattttgtaatttcctttatgatttgtttaacctgaagacttacaggtatagcttttagttttgacatacaggtttggttttctcaaggatatttttattgccgtttctattcttttatttaatttttacttaaaaaaatagagatggggtcttgctgtgttgtccgggcttgtcttgaactcttggtctcgagtgatcctccaaccttggcctcccagagtgttgggattacaggtttgagctactgcacctggctgctgtttttattcttatgttttattgtgttatgaccaaagaacataagattatctgatgtttatttttattcttgatctatttgttatcatagaggagtaagattgccatctaaaatggttgctgtccttatatttctgagagttgatgctttttatttattcatttatttaaacaactttattgagataaagttcacatagcaaagccaggtgcagtggcctgtaatcccagccctttgggaggctgaggcaggaggattgcttgagcccaggagttcaagactagcgggggaaacatggtgagaccctgtctctgcaaaaaattttaaaaattagttaggcatgcttgtggcacatgcctgtggtcctagccacacaggaggctgaggcaggagcatcacttgagcccaggaggtcaaggctgcagtgagccatggtcaagccactatactccagcctgagtgacagagcaagaccctgtctcaaaaaaaaaaaaaaaaaaaataccaaaagctctgtg

SEQ ID NO: 19660 - DNA, 1041 bp, Homo sapiens
gctctgtcacccaggctggagttcaatggcgcgatctcggttcactgcaatctccgccttctggattcaagcgattctcctgcctcagcctctggagtagctgggattataggtgcccgccaccatgcccggctaatttttgtatttttagtagagatggggttttgctgtgttggccatgctggtcttgaactcctgaccttaggtgatctgctcacctcggcctcccaaaatgctgggattacaggtgtgagccaccacacttggctgtttccacatctttatgagcatttgtgactcttttattttagtcatcctgttgggtacgaagtggtatttcaatgtggttttgatttgcatttccccagtggctaatgatgttgagcaccttttcatgtgctttttggccatttgtatatcttctttgaaataaatttgtatttcttctttgaaaaaagtgttcaactcctttgtccattttttagtttgtctttttattgttgaattgtaggaattctttatgggctgcaagttccataacagatacatgattgcaaatacagttgattcttgaacgataggggggttagagctaccaacacccgtgcagctgaaaacttttgactaccccaaaacttaaccaccagtagcctattgttgaccagaagcctcgttgataaacagctaacacactttttatatgtattatatactgtattcttacagttaagctagagaaaagaaaatgttattaggaaaatcataaggaagatatataataaaatatatttcctatttattaagtagaagtggatcatcataaaggtcttcctgttcatcatcatcttcacattgagctagccgaggagaaggagggattggtcttactgtttctgagtgccagagacagaagaggtggaggaggtgaaaggtgaggcaggcacattgggtgtaacttttacttaaaatctacatataggtgtgcccatgcagttcaaacttgtattgttcaagagtcagctgtatttttttcccattctg

SEQ ID NO: 19661 - DNA, 1420 bp, Homo sapiens
tttttcagatttgggaatatttgtattatacttaacagctgaacattcctaatccgaaaatccaaaatgcttctttgagcatactgttgacactggaaaagttttagatttgggattgttggattagggatattcagcctgtacttcctttattttcaaagagggcttttatgaggcagacctgagattttatgtgcttaaaacatctttagttttgatgatagtttttctggatatatactttttagttcaaagtgctttccatcagcactttaaagttactccatctgggtaatgttaattaagatttactacctttttttttctttttaatttttgtgagtatgaagtaaatgtatatatttatggaatatgtgagatattttggtacgggcatgtggtgcataatatggattacttgttcttaaatcccaagttgctgatgaggtatttgatgacattccgattgtacccctttataggtgacctactcttccttgttggaaactcttagaattttctttttgtctttcatttccttaaatttcattataatgtatctagttgttgtatatgcaggcgtgtgtgttttatttatcctctgtcctcttttgcattcaaaacctgttcaatatgatatttttctccaattctagaaaattaccagtcattcaaatatttctttgaatctgtttagtttatatgtcttcctctgggtcttctgttacataaatatctttcatatcactatacctttttttgctttgtttttaagagatggggtctcactatattgcccaggctgaaatgcagtggcatttcatgatcatagtgcactatgcctcaaactgctgggctcaagtgatcctcttgcctcagcctcctggctgtagctaggactacagacgtacaccatcgtgtggcttttttctttttttaagcattttaccctttccatgtgtgttctaggagtttctagcctaatattctaacttattaaaacattttttcagctatatccattcattcatttacccatctcttaattttattttatttatttatttattttttgagatggagtctcagtctgtcacccaggctggagtgcagtggcacgatcttggctcactgcaccctccacctcccaggttcaagcagttctcgtgcctcagcctccctagtagctgggattacaggcacctaccaccaaacccggctaatttttatacttttagtagagacagggtttcaccatgttgcccaggctggtctcaaactgctaacctcaagcgatctgcccgcctcggcctcccaaagtgctgggattacaggcgtgagccaccacgcccggcccatctcttaatatttttattttgactatattttccatgtacattatttcaaatagtttctgttg

SEQ ID NO: 19662 - DNA, 1660 bp, Homo sapiens
tgcccaggctggaatgcagtggcacgacctcaactctttgcaacctctgcctgctgggttcaagtgactctcctgcctcagcctcccaagtagctgggactacaggcatgcaccaccatgtctggctaatgttttttgtatttttagtagagatggcgtttcaccatgttggccaggctggtctcagactcctgacctcaagtgatctgctcgccttggcctcccaaagtgctgggattatatgtgtaagccatcgtgcccggccaaggtatgttttttctgtgcctagtttgttgaacatttttatcatgaagggatgttgagttttattgaatgctttttctgccccaattgagatgatcatatggtttttgtcttttattatgttgatgtgatatatcatatttattgatttgcatatggtaaattatctttacaactcagggataaatcccacttgattgtggtatattgtccttttgatgtactgttggatttggtttggtagtattttgttgaagacttttgcatctgtgttcaactatggcctgtagtttttttgttttgttttgttttgttttttaatgttgtgcctttgtctggttttggtttcagggcttcacagaatgagttaggaagaattcccttctcttttattttttggaatagtttgaggagaattggtattctttgtaagtttggtagactttggcagtgaagccatcagattctgagcttttcttttttaggagactttttattactgattcaatctcattactcgttgtttgttcaggttttctgtttcttcctgattcaatcttggtaggttttatgtgtccaagaatttgtccatgtcctttaggttttccagtttgttggtgtatagttgtttgtagtagtatctgatgatcttttgtatttctgtagtgtcagttgtaatgtctcctttttcatttctgcttttgtttgagttcttggttggtctagaaacataattttgtaaaatggttttcttgttaaacacttgaaccatcattcttgatcatctggtgtgtagaagacactgtactggatactactggtagtaagtagaaggctgcataagacagatctgtgctctcaaggagatttgttatacattatgaaaatgaatttataggtaattcaagttaaaactaaaatatcttcacttctgagagaagctaaaatttcagaagctgctaaggggctttgttaggattaggggcttttctcattgcgtaaccaggaataaaagacagccttactttgagaagaccataaacgggtgaatggataaacaatttgtgccatgtttatacaatggaaacactacttggcaagaaagaacagacttgatacatgatgtgaattaatctcaaactaattatgctgaaagaagtagataacccccccatacaaagtatatatgtttctgggttttggctattacaactaaactggctataaacatttgtatacaattctttatgtgtacataggctttcatttctcttaggtaaatacctgtgcatggaatggctgggtcgcttagggtatctgtttaaatagtcatttttctaattattgtaaatgtcacttctttcttatactaggtttctatatatgcttgtgttca

SEQ ID NO: 19663 - DNA, 1027 bp, Homo sapiens
tgagtaataccatttttaaaatatttaccaacatgatagatgataaaagttaatatttttattttcacctctttagttattgctaagattgaacatttttaatatagttaagagtcatgtatattttctcttttctaaattttctcttcatagccatgtctttttttttttttttgagatggagtcttgctctgtcacccaggctggagtgcagtggcgcagtctcagctcactacaacctcctccatctcccaggttcaggtgattctcctgcctcagcctcccaagtagctgggactacaggcgcgtgccaccatgcccggctaattttttatttttttacttttagtagagatggggtttcgctgttttagccaggattgtcttgatctcccaacctcatgatccacccgccttggcctcccaaagtgctgggattacaggcgtgagccactgcgcccagccagccatgtctatttttttctgttgtagttagtgtttgtcttaggtctgagcttatattacataatgaaaatgttagggtactcatcacagcccttaaactttgtacttacaagagttgtgagaatgtggacaaatagagattgctgagttgtaagacttttaataaatgatctgttgctaagtttaaaaaagtaaaaaagaacaggaagttctcagcacgacagaaaattttagctgtgagccatttgaaagaaggattggttcttgaactgtttttgtttagctaagagccattttggataattgggtaggtgcaacttttatttaagaaagaagctcatatgtcccattgtgctttattagttatggaataattatttctacaaaaagaaaaaattcagaaccctttactaaatttttgtgttaaaataaatttattattgaaggaaggtaatttaataatataaataatggtctagtacctatacttttttcaatgtcattagactatattttgtttcctggtgaaggagtaccaataatacagacctaattccctttt

SEQ ID NO: 19664 - DNA, 1104 bp, Homo sapiens
cactatcagttctagaaaacccatttctagttacgctatagctcccatggctaattaaggattcaaatgtatgcatcctccattttcctgtttatggacatactgaatataaaaccttaaagaatcaacacaaaagaaaacatatacagccttttaaatattcagcagaatagatttttctaattcagtggatggaaatatattaatgtcacttcaaataaataccaaccttacattttattaagcacactgataaatatactataaagaggaatattgtttgcatgcttttctggtgaataatccaagaaaaaaaaaagtacagctactgtgttctcataacttagttttgatttgtttaaatataagcatttcttcagccatatatttttaaacaggaacatgataataacaaaaatggtagctaacctttgtgaggtaggtactaatatatagaggaggaaactgaaacaggaagaaattaacatacctagaataacaagctagcaagagagagaacagttgtagactgtttctgagtctacacttgtgaacgttattttgtaagttctcctcatgctgtacagtataggaacactgaagttagagattaataatctttgcagttattatataagttttgttttattcacagggcacttatgaaatctattttttctcttgctgagttcaataagatcaacccttccctgatttatggcaagaggatctgcttttgtgatatttaccttcttgagtatcctttctttttatgaaaaccagactaaattaaaagttctcttaaaatttgtgttagtatttgaaaaaattttatacaagtttatgggatacctgtgagattttgttatatgaatgcaatgcttagtgatcaagtcagtcagcaattagtgtctgttacccaagtacaatacgtttttgttaagggtagtcaccctggccaggtgcagtggctcatgcctataatcctagcactttgggaggccgaggtaggcagatcacttgaggccaggagttcgagaccagcctagccatcatggcagaaccccatctctactaaaaatacaaaaaaaattagccacgcat

SEQ ID NO: 19665 - DNA, 1255 bp, Homo sapiens
gtaccctaaaacttaaagtataataataataataatagtaataataataataataaataaaataaaataagtatctgctcttttatgaggaaattgtttttaattgtagtagttatttttcagtctgatctgaatctagatgagttttttatgttatatagaagatcattttatatatttttatatagggttactattacagaaaaaagtaaaagttttactgctactcttttaagctttttgtatttgtttaaacaggtttttggcatttaatcgtcatccttagtggtaattgttaaagtacctttatttagaaaattgagaatcaaatgaccttcaaaagatcatcagtttttcctgactttttcaggttaggttcagagttatccactgatgctgttgaattctagggatataagtttgtgaatagaatatgtaaaactattgcactccttccattatgttaccttcctgtgtaagtagtaacagcttgttttttcaacggtcatacttcattcttctaaacagctatgaacatagaaacaaaatcttttgaggtgtctcaaaatagatatagtctacattggaaaggcctttctcagtctgcttattctatattttataaaagtctggaaaggtatagccttgtgtttttctttcccaagttttctttttaaaagttattttatttctctgagaatcttccataacaaccaagttacatagtttagattgaagcatccagtttgaaaggcagcaggtaaactctgacagattaaaggtgacagactgaaggaggagataggaaaaaataaaagcaagtaaaagaggaaaacatccagcatttggagatgtaatcttctcagtcagtcctgaagacatcattaactcagtggtcaagaaaaatatttttcattcatactaatcagaaatacagacatgaaaatacattggaaatattaactattactttcagttttggtatttaaaattgatattctagtgaatgaaagtttcatattacatgtaacagaaatttggattaaatcagtaatacatgtaatacacaactagtatacttagcatagcacctagctcaataaatgttagcagctattactgtttttgttatcaacatctttcccccagttagtcagtttaccatcacctaaaatgtctttagttctttgcatacttatttaattttttaaatatgtattatatgacctttgtgtattaaattgatttgtctgtg

SEQ ID NO: 19666 - DNA, 1055 bp, Homo sapiens
ttatttcctgaagtttagggaaaaaaccctgaaaatgttagtttaatttgtattattatctttttacttttaactataagtaaggcaccattgccaaccagaaaacaggttgagcatcccaaatctgaaaatcaaaaatcctaaatgttctaaaatctaaaacttttttgagcactaatgtgaagctcaaatgaaatgctcattggagcatcagatatcagatcttcagatttggggtgctgaaccagtaagtattttaaaaatctgaaatacaaaacacttctggtcccatgtattttagataggggacgctcgtactggaaaagaaattttaaatttgtttaaaaagtgacaatatatttctgttttacagacctctgtgagtgaaagccttcagagggaagctgctaagaagcaggccatgaaacaggtaaggtagaagactgggataagtgcattcagtgaagcattccggctcatttttaagcatcagttttggtatctaggtgctgagactaaaacagaatagatttaaggaaaaacacaatgaagaattagctccttattgctgtgctatagattaaaccagttctgcttgtagatgactcattagtctaataatggattgtttggcctgttgttattattaaattcttgctagtgagcttacttgcagggaaaaaaaaaaccttttcacaaccaaaatggtttcacaaacttataattatttgaaactcatctgcccagaaagaagaatatcagagatagatacaaatatatagatatatagatatatagattttttttttttttgagattgagtcttgctctgttgcccaggctggagtgccgtggtgcactctcggctcactgcagtctccatctcctgggttcaggcaattctcctgcttcagcctcccgagtagctgggactaaaggcgcatgccaccatgcccagctaatttttatatttttagtagagacggggtttcaccgtgttggtcaggctggtctggaacccgtgacctcaggtgatccgccaacctcagcctcct

SEQ ID NO: 19667 - DNA, 1034 bp, Homo sapiens
ataattctatgagatagatgcttttataatccttattttatagttaaggaaatgaaggcaagaagaatttatgtgacttgcatgagaccacatagttaataaatggtagggctgtgttcaaaactagacagtgaaacctcagaacctaggcttttaaccactgtgtttcacaccctcccggacgaattggcacagaaggatatatttagtcattttaagataatgtcagagtttcacagtgaaatataatgtgtaactcagcagcctcagaatgatttaatatacacataaaacataaaaaacagtgattatttaacataaatactggagtgctttgagtcagaattttggagataccattaagttcaacttcctcactatataaatgggagacttagttctggagagttgggtaacttatccaaggtaatacaggtatcttgttttccaggattattttaacatttttgtgctgcctttttttcttcacttaaagcatgaatcccaaatctgattttattcttaactctgtcttgttcaagccactttatctgtttagtgggactttttgtagtttgcttggaaattaggaatgctgctacaactcttacacctttcacctgctttctgctgattttttctcgcacctatattacatacttttccctttgttccccacttgattgattcagctcatcgaatgtctttatccatacgaattgaaattatttttcattttactatgaagaatactagcttgattgcatttactaaatcttagagaaaatgctttttaaaatggggtactttaaactatttttttcttctatgtggacctcaagtttacagaactgatgatggcaacattattgtcatattccgtttcattgggaaaactttcagtatgtcatcagtaaataaaacatttgctgtaggtctctgatagatatttgttgctaatctaaggaaattattttcttagttggagggttttgttgtttgtttatttgtttaaatggtgaactacatacaaa

SEQ ID NO: 19668 - DNA, 2279 bp, Homo sapiens
acattagccaatctagcaattgaggaaaaaatcaaagtgtgtagactctgtacctcaggaatttacaaccgggggcaaaaggctaagatttgtaaaacaggaagtaaaaacgcccatgcctggcatggtggctcacgcatgtaattccagcactttggggggcgctgaggtgggtggatcatttgagcccaggagttcaagaccagcctgagcaacatggtgaaactctgtctctacaaaacatataaaaattagccaggcatggtggcacacgcctgtagtcccagctacttgggtggctgaagtgagaggatcacttgaagcctgggaggcagaggttgcagtgagccaagatcacaccactggcactccagccagtgcgacagagcgagaccccatcgctttaaaaaaaaaaaaaatctagtgtaaatattgcagaatagaatgttcctcagagtttagaagaaagatcattgggggttagaggcctcagaaatgggctcatagaagaagtagggctggccctgaaacactgggtaagattttgatcgcttgaaagaggagaaaaaaacatcatttgagatggaaggaacatgataaaggcagagactttatgtttaacaactctaaaaatgataatgaaagtttaatatataatacaggcctctcaaaaccaaggttaggtgtttccatcgtaccttttgaccttttgatgggtataattatatacaaatgaataaatgataataatagttgatgtttattgaatacttattctctatcaggctctgttttaagtttagtcatttaattataacagcttagaatgtaaatatagtcattattctttctcttctagatgaggaaattaaggtaccaaaagattacaaacaaacttgcccggagtaattagtaagtgtagagccagcattcatacccaggcagcctggctccagagtttatttgtatttcctatctaaaaatgtgattgtaatttttatgatatattttcaatttatgaaccattctcaaaaagcatagactttgttgtatctattggctggctcatatttttgaaacatgtttaatttttttttaagaccaaactggaaatccagaaggcccttgcagaagatgctactgtgtatgaatatgacagtatttatgatgaaatgcagaaaaaaaaggaggaaaataatcccaaattgcttttggggaaagacagaaaggtttgtaagctgaaataacaaactttctttgaccttgacctacattttgtgtcttaatcttattttaacatgagaatgatctgagaaaaagcttttaggtatgtgaggtgtgaagagtccctaattccagatattacaaatttgattgtagaactcaagcagcactacatattatcctaataggccaggtgaattatctaacaattttgctttttgctttgaaacctttgcaaatagttttttgaaaacttttccttggaattctaatgtaccaaatttgtactgttcctgccctgtgtatgtttatttgtgttttattaccctctcattttttcatttcttcctagctggtaactgaatcatctgcctgcacctatcatgattttattttcagtgagaaaaaaatttgggaggggtaaaaactgaaataagttcagattttctttctatcaactcttgttctttcacaagcacaggctgatttttaagggcatttgcatctgacagttatctactagtagagtgatggtataaaattatattaagctactattttaaatagtcatatttctactaaatgtgaaaaactagcaggaacttttctgatttttttttaattaagataataccagaaaaaagaaaaaaattatatttagtttgatgttttattaaagttaaatcgcattataaacaatttctatctctgctacacctaaatttttatggaaaacagtttcaatattaatcttgctagtaagtttatattgaatgtagggaagacaatcttatttgggccaatcatttctatcttaatgaattcattataaaaattataatattaacaattactatttttttactcttttcctaaatcttttttatttccttagcccaagtatattcacaacttgctaaaagcagttgagatcagaaaaaaggaacaggaaaaaagaatggaaaagaaaatacagagagaacgagaaatggaaaagggggagtttgatgataaagaagcatttgtgacatctgcatataagaaaaaactgcaag

SEQ ID NO: 19669 - DNA, 1072 bp, Homo sapiens
ggcatgaacaggaagataaaccaagggcgagggaccaaagagaaagaagtgacagagtatggaaaagggagaaagatagggagaaatattcccaaagagaacaagaaagagatagacaacaaaatgatcagaaccgacccagtgagaaaggagagaaggaagagaaaagcaaagcaaaggaagagcatatgaaagtaaggaaggaaagatatgaaaataatgataaatacagagatagagaaaaacgagaggtaggtgttcagtcttcagaaagaaatcaagacagaaaggaaagcagcccaaattctagggcaaaggataaatttcttgaccaagaaagatccaacaaaatgagaaacatggcaaaggacaaagaaagaaaccaagagaaaccctctaattctgaatcatcactgggagcaaaacacagactcacagaggaagggcaagagaagggtaaagaacaagagagaccacctgaggcagtgagcaagtttgcaaagcggaacaatgaagaaactgtaatgtcagctagagacaggtacttggccaggcagatggcgcgggttaatgcaaagacctatattgagaaagaagatgattgatggctaccccaagagaaagatttaaggaagcacagaaaactgtaattcctggaacctgctgcgtaaaaccataaaggagtgtgttaccagtagtttggagggcatttttaaatttattttcaaaattttaagttaaaagtcagtcttacagcttggatgtttggatgtggatgtttggctgaatttatatatagtgtgtactcatcaataccacattctttgttgtattcaagaaccgttaagagtgtgctaattccctgtaggtacataatgaggaaaatttgctccactacaaccattaaaaaataattttggccagatacggtagctcgtgcctgtaataccaacattttgggaggccaaggcagaaggatattgaggctaggcattcaagaccagcctaggcaggataataagaccttgtctctatttaaaaaacaaaaagcctagcatggtagtccatgcct

SEQ ID NO: 19670 - DNA, 1022 bp, Homo sapiens
aagctggaactacaggtgcccgccaccacacccggctaatttttgcatttttagtagagacgggggtttcaccatgttggctaggctagtctcgaactcctgacctcaggtgacccatccacctcggcgtgccaaagtgctgggattacaggtgtgacccactgtgcccggccaagaaacctgtttaacttgccttagtccagcagtctccaaaaattacctgactacataaactttttctccagcagtaatacctgtgacagcccctggaacacactttgggaaatgttaacatggtcaaatgagcacatttgaaagaggaggaaaccgaggcccagataagatgagtacctgccagagccgactagggccttttccatggtcctcaccgacaggggtgtatcacactgcttccgggtaacccgctgctccccatctggtggcccctcgtgaagacgccctacctacaattagtcttacctctattgctaacagacctgagctctgttagtgacacacttttgggtggcattcccttgtggccaactgggggaatttgtgagaaagatggccaggatctgaggtgtagcctgtgactaaagaatgacatttattaacctaacacagttcccacctccaaccttggcctctggatttgaagcaacagagctcatggatcatcacaactgccaagacagatgaccggaaggaatgcgttcaatgactctgggtaggagagtgtgcgggaagcagcacgggacccaaggctctttagggggagtgcggtcatgagagggctggtttggctgtaggaaattagtaactacggagctcagagttctgttcacccagaatacagttttcctgtttcaaaaaagaaatgaacgcagttgttctcagaaagggctgatatttggccgggtgcagtggctcatgccggcaatcccagcactttgggaagctgaggcaggaggattgagctcaggagtttgagaccagcctgggcaacatagtgagatctt

SEQ ID NO: 19671 - DNA, 1035 bp, Homo sapiens
ggatgaaatagtagtatctgcctcatataattgctgtaaagattaaatgctaatacacataaagctcttagaacaggtctggtgtatagtaaacacacaaagctgctattattattgttactggtattaactgatatattcatactttttataactgctcatcctattaattaaatgtattttttcactatatattctttttcaatgtatattccttttaatcttccttcttagcctccactatagttcagatgccttctccaatttcaaacaatttaatgaaaagaaaagaaaatttatacatccagagatggctgatttaatttcttcagtcttttggagggtagaattattttccttctgagagtaaacttattttttctatgttacaggtggtatgcaagattacaattatgtgtgggccaactgttttgagatcacattagaactgtcttgttgcaagtacccacctgcttcacagcttcgacaggaatgggagaacaatcgtgagtctttgatcacattgattgaaaaggtaaaagtagatgactggaatgttggggtatagaaacaggattaaataagggagaaatttggatgcatgtgaatgataatctatacagtattagatgtcatttatctctttttattacttaagattataaattatctttaaagattattagattataatctattaaaacatattctagctctgcttcccctgccccttacccccagctctctgctccatagggcttccttttcctatcttggaacacttacttatacaaactgaaataattagccaaatttgtactctcaggttcttacaatgtcatgtgatcatatttgctagtgagcctttaccactatatgaaccatagacatcagtttaatttaaacatcacccagactaatacagcaattgaatacaccagcagttacaccttgttgagaaaattagaaatctggctttgaggagagggaattttaaaagcaccttactagtgtcgagttcagacatatgactta

SEQ ID NO: 19672 - DNA, 1130 bp, Homo sapiens
taaatttctcccaaagttagcttggccgatgcccaggaatgaccaaggacagcttggaggttagaagtaaggtggagtctggctgggcgtggtggctcactcctgtaatcctagcactttgggaggctgaggggggtgggtcacctgatgtcaggagttcaagaccagcctggccaacatggtgaaaccccatctctactaataaatacaaaaattagctgggcatgatggcaggtgcctgtaattccagctacttgggaggctgagatgggagaatcgcttgaacccgggagatggtggttgcagtgagctgagattgcgccactgcactccagcctgggtgactgagtgagactccatctcaaaaaaaaaaaaaaaggcggagtcaaccatgtcagatttcttttactgttataattttgcaaagacagtttcataatcataggtgattgataatagcgaagcctgatgtgttcacatttgccttgagttaaggtatctaaagtagtacgtgttggaataaaatataagtgaacatggcttatattcaaatcctttatcatatcatacaggagattcaataagtgtaattggcagaaacaacagcaacaactttgacctgaaccgaaatttcccagaccagtttgttcagatcacagatcctacgcaaccagaaactattgctgtaatgagctggatgaagtcctatccatttgtactttcagcaaacctgcatggaggtatggcaactttatattctactaatcagttcttgttgagagcatttggaaatcctggtggaattttatctgtttgtagtgttatgctttcttaaaatgagtatcctgttactgctcttatggcagacaacagtaaaggtcttttctcattactttttcagccagtgtcctggctgtttctttcctccttctttctctctttttttcctcctcttctcttctccttttacccccatctcttctctccacccctttctcctctcttttctcacctactacttctctttcccttctcttacctcctctcccctttcttctctgtcttgtcttttttctcctctcctctccttctcccccgcctgtccccctactctgttcttcctcctcctc

SEQ ID NO: 19673 - DNA, 1027 bp, Homo sapiens
cgcagctggagcttgtgaattaagctgataaaagacagattaaaagaaaaaagcatacaaattttatttgatgtttgtatgtggcacaggcaacaggcagtgggggagttcataggaaagacgtgaaaccctcaaaaaagcagtgttaaggacttagtgctcttataacaaagggtaataccttgtggaaaagtgactacacaaaggaaggggtttagacttctaggggtaaaaaattgtgggaaagtgactaggaaatatgcgggggaaactaatgaaagatgagggttattttactaaggtttgtttgtgtcaactcatcttggtgttgactatcccatctctgatggtaccaggaaggtgcctttctcacgggaaatttatgccctaattttaggcagaaagagggagggtagatagcctttcctgcatctgctgtttctcagttgccttcagctctaaataattaacatgctaaagagttatattctggggcagaatgttctgattcctttccctgccatctttataatttagaaggatcttgaaagaagataggggaaagcaatattctttttcataaaatttcaaaaattttgatactaatttttttattgaggtgaagtttacataattccagtggcgtttagtgcattcatagtgttttgcaaccaccccctctatcttgttccaaaacatttttatctccgcaaaaggataccccacacccatttaacagtgactcccctttcccttctcccctcaacctctggtaaccaccaatctttgttctgtctctagggatttacctattctggatatttcatagaaatggaatcctataacatgtgacctttcgtgtctggcttctttcatttagcatagtgttttcaaggttcactcatgttgtggcatatatcagtacttcattcctttctatggttgaataatagtacattgtatatacatatgtatatatcaatatcacatttgctttatccatttacgtactgatggacatttgggt

SEQ ID NO: 19674 - DNA, 1035 bp, Homo sapiens
tttgctatagtccatatgtgtgctctccaacttcagctgaaccctcagtcctacatggcaacatttcctgtttagctacttgactccctggctcagttcccactatggtgattcagagcctttatcctctatctgagcctcctgttccagctctatccctcttattcatagtagatcactttgcattgaactcaagtagaactttgagtaatctgatgtgagttcactaagattctgtcttctcaattgtttctcatgtgtgtcttaacaatattctcctccatttcttgatcccactgcattctgcctcctcgaatcttgtgtcttcatatcttattttataaatgaggaaggtgataattaaactccccagtcttcactcacagccttttttctcttggtcaataagcagctcctctaaaaatattgtcttctgctaaccttagtaagcccccatgaagctaccattcaaagtttctttatttttactcttcaaaacttctcaaaagtagatagtcttgggagacatctgagcagccaaagacaatgatggctatgtgataacctatctcccagggtttttctttaaacaatataaaacgacttaaaaactaccaaattttacacaaaaccacactgttggcatcacaaaagatcctgaaactgcaaaataactgtaaattttttaaaaatcaagaagtctcagcatgatctatcatgcacctaccccaccttcgccccaccacaaggctttgtggtgaggtaaaacagaccaagaaaacttacggagaagacagaagtgggtgccagtgaagggcagctgtgaaggtaatttggaatgaccaccatacatcacatatgcactaaatccaaaaatactaaaagagtaactgggcagattagagctctggaatacagggaagagatttcaaaatgcacacaacttaaaggatctggtgtgatttaatgggataagtacaatttaaaaggagaggatggttacagggagatcttccaaactcatagcttctggag

SEQ ID NO: 19675 - DNA, 1069 bp, Homo sapiens
agactccatcttaaaaaaaatcatgaaaaaaaatccattcatattttgtaatatacccatgtctattctttattaatgtattaaaaataataaattactcaacgttaaaattttgtctctttaggaaactgcaccacatttatcccaaggattcttacgttctctgcacacctgccttcccagggtttgggtactccagctgcaggagtgtggttctgatctgtctcctttatcataggtataatccagttaccaagaatgtgactgtcaagagtgaaggcgctattcaggtcaacttcacacttgttcgatcctcaacagattcaaacaatgaatcaaagaaaggaaaaggggctagcagcagcaccaatgatgccagtgatccaactactaaagagtttgaaactttaattaaagacctttcagcggagaatggtttggaaagcctcatgttacgctcctcctcaaatctggctctggctctttatcgataccattcctacaaagacttatcagagtttctgagaggacttgtaatgaactatccacatattacaaatcttaccaagtaagtgtcactttctattgtctttttttttttttcaagacagtaaaatcagcattagccatgttgaatagttgtaatttatatagaaatatttgggaacagaatgtacagagagttggagtttacttattttgcaacatgtatttgcttggagatcttttttttttaattatgctttaagttttagggtacatgtgcacaacgtgcaggtttgttacatatgtatacatgtgccatgttggtgtgctgcacccattaactcgtcatttacattaggtatatctcctaatgctatccctcccccctacccctaccccacaacagaccccagggtgtgatgttccccttcctgtgtccaagtgttctcattgttcagttcccacctatgagtgagaacatgcagtgtttggttttttgtccttgcgatagtttgctgagaatgatggtttccagcttcatccatgtccctacaaaggacatgaactcataattttttatggt

SEQ ID NO: 19676 - DNA, 1037 bp, Homo sapiens
aagactttcccagcttgtattacctagaagcgtgaatgtataggatacctgactactaagactatattctcagccctgccctgtcttttatttgcgggtctaatctaatattagaatatattaaccgcttaaggcattgaagccatatgggatggggaatgcatttcttcagtgtttctccgagagactttccatttccttggagttatggcggcaagtaagtatcatagtattaagaaatttgcctaaatctgagttgtgcctttctttactcacaaggcatgggctttgtcctggtgatcagtttgtaagccttcttccttcccagctccttaataaaagcaaagtgattgagtaggtaatgttcaaagtgtctgcctgtgtacatgtacttgtattgattatgtagttcagtaagatgtgcccaagtcatttcagaaagaaagacccttcagttttgatgcattttgctgaacacttgggtagtgagtgggatcctatccagttgaggaatgcttgcaatgctcattgaagggatttgctttgggactttgtcatcttccagaaaggaaacatattgtatatttggcccagtgtgattgattgctttatctttggtaacttttacttgaatgggatttgctgaattaatgactattgaatttaaaactaattatgagttgacaaataaataaaaggtagtgtttatgtctgagcttattgtgtttgagctaacaccaggttactcagtaaccatgacctgctcctccatttccatttattctcaacattaaatagttttatcttgttgttgccagaaatgcacttgtgccaggtattgtccctgctgtatgaaaagcttcttggcaatgaattctgtaatagtgccctacattatggttttctggtggaattgttttaacagtgacaacccaggatttccaatatatttttgttttattgttattaccaaaaattccactatgattgatgttcagtgattttctatagcaacttttttggtaactctttgggtt

SEQ ID NO: 19677 - DNA, 1035 bp, Homo sapiens
tatgcagtgagccaaggtcatgccactgcactccagcctgggtgacagaacgagactccatctcaaaaaaaaaaagaaaaaaaaaggtaagtcattttgctattatgaaaagaagttcataagcctaataaagctttggaacataaaaagcaaaatccctttcaaaagaataatggcttctttcttataacattaactggtaagttgataatgctggtcataaaccatatttttagttcctttgtgatttgtattatcttcttgtttttctctgaattgcagaattttagttattgctatacaaatagtttcaggaaggatagaacaacatttgttttctagccatctttggagtaaagctgcgaagttgcatctaccattactatttcccttcttgccccctctgaagtttataagtgactaatctgctttgctgggcaagtccttggtttccttcttttaagacttttattttcctttttttgagacatagttttgttcttgttacccaggctggagtacgatggcgcaatcttggctcaccgcaacctctgcctcctgcgttcaagcgattctcctgcctcagccttccgagtagctgggattacaggcgtgcgccaccacacctggctaattttctatttttagtagagatagggtttctccatgttgatcaggctggtctcaaactcccgacctcaggtgatccgcccaccttggcctcccaaagtggtgggattacaggcgtgcaccaccgtgcccagccaacacttttctttatgggggtaacaagatcagtatatgatcattttcatagtttgttttctttagaatggtgctgtgatttttgtgtctactttttatgtctaattatttgttgttataattttgttaaagatctcaggaaacaggctcgacagctggaaaatgaacttgacctgaaactagtttccttcagcaaactatgtacaagttacagtcatagcagtacccgagatggaagacgcgacaggtataggtactaccagattctgt

SEQ ID NO: 19678 - DNA, 1076 bp, Homo sapiens
cctcagcctcccaagtagctggaactacaggcgcatgccaccacgcccagctaattttttgtatttttagtagagacggggtttcacggtgttagccaggatggtcttgatctcctgacctcgtgatccacccgccttggcctcccaaagtgctgggattacaggcgtgagccactgtaccctgccgttctcatttctcttgagtaaatacttggagttgtattgttgagttgtatggtaaggatgtgttccaatttataagaaagtgtcaaacttttccaaagtggttataccatttttgcattcctgtcagtggtgtgtgggagttcaaattgctttaagcccttgccaacacgcctttctattgtaaccattttagtagaagtgtaatggtttttattgtggttttgatttgtatttctctaaggactggtgatgttaagccttccttcaagtgcttattaaccattcacgtatcttcttttttattattcacaactcacaggttattgtgacatttgtatatcttctttagtaagggggtctgttcaagtctttttgccttttgttgtgggcttttttctattgtgttataagggttctttgtgtactctggatgtaagtcctttgtcagataaaggttttgcaagtattttctctgagcctgtgacttccttttcttttcatctggtgactttcaaaagagccgaggtttttaattttgatgaaatctggttgatcagttttttctttctgattcatgtattttggtcctatttaagaaatcttggctatcctaaggttacagatttttttcttttgttttctttcaggagttttagttttagcttttttgtttgtttgtttgtttttaaacctgcagccaacatcatacagttttagctttaacattaggtttataatccactttggcttcacttttgtgtgtggtgtaagttaagggtcaggattcatttttttttaaacacatgtatattccattgtttcagtaccatttgttgaaaagactcttttcctctgtttaatcttttcaaagatgttgacatctttctaga

SEQ ID NO: 19679 - DNA, 1052 bp, Homo sapiens
gttttgggtctgatttggtttggaacctgcctgtgctgtttattagatcttagatttctgttctttagataattaacttcttggaactttcattttcttatctgtttaaaaatatagtattgatgataatacttatctgtaagactgttaaggataatgtgaggaaaatgcctgatctaatactaggtaatctgtaaatggtagctatattattaataccaatcctttcttttttagctttttatttggatatcatttcagatttcagaaaaatttcagtagtgaaaagaagtcctatataccctttacccaacttctacaaagtttaacatacattgatgctctttactcctaaatatttcagtgttcgtttcctaaatatctgtttcttttgtatggcttcatggattctttattcagtggattggaatattttccatcattaatcatcttaatacattttagtcttttataacagtaagccatgattgtgtcttgaatttttgtttaaattgtatgtgctgagccttccacctgaagaaagttttcacagaatttccttatgttgactgaagtttcttccttgtaactttttccttttcatcagcacatgagatctgatcacattttgccaggaattctttacttaaagtttcccaatcatcctttttcttttttcctttatttccctttctttctgcctgctcttctagggccaggctgccttaattaagctttcacttcagaactggcctatttaagggctggtaatatgagtataaaaacttggggtacctcatagggcaaaaaagaaattaaaaggaacaattgagaaccattgaattgttactattattttgctagttagaaaacatgttattaggtcttttatttcagtattttcccttgtttcaaaatatgataggcattacaagaaaagtttcactgagtataaagctagttatgatttcttatgaagaatataaagtttgtgtcaaatagtatttttgcatattccatatggaaaaatttaccttttccttttagagata

SEQ ID NO: 19680 - DNA, 1389 bp, Homo sapiens
ttaaaaattatccaccaatttcttctacattttagaaagcttttaaattcatgttagaactccacactatacattattcttacctaaacatgataaattatatgcctttgttgtttttcccatttagagataagtcagtggcagatgcttggaagggggaaggaaggagacagccacccgtgcagatgagctatagctactgatggagtttgtaactctatgcacaggctgaattctaggatacattctccacttgtttgttgtaacctctactttaaaatgtttcagttttctgttttaaattaggattattaatacttcccagaaacccactagggaaccagaaaagcctggcactctgagtcatttcattcagcgaacctctgaaaagacaagccttctaggcaaaaagctttcctccccaactgccaaagggggaggaacctagaattttcaaaagctgagtatcttgtagtcctagataatttgagttcacttttagtttgatatgtctttgcctaaggaaaagactctcctgatgtgtgctgttattctccagtccactgtgaattttgttcttgccttgtcaccctaagtataaaaccacatgtctaaaatcacattttagatagggctataaaatttacagagtgctgttatatacattatctcattttactaaactatgaactcaattgccagccagaaaagctgatcagtgaatttaagagtttgtatttagtgaaacttttgaaactttgaaatagaagtgtgagtcagatagctgatgatttaaaacactaaagcctttctcaattgttcattagaatttaccaccactcttctttgtgacctcttctctactgctctgtaagcatctctcccataagttctctctctctttttttttttttttttttttttttttttaagacagagtctcaccctgttaccatccaggctggagtacagtggcacgatctcagctcactgcaacctccagcctctcaggttcatgcagtcctcccgcctcagccttctgagtagctgggactacagacacgtgccaccatgcccggctaatttttgtatgttttgtagagatggggtttcaccatgttgcccaggcgagtctcaaactcctaggctcaagcagtccttcagccttggcctcccaaagtgctgggattataggtgtgagccaccctgcccagcccaacactaagttcccttaaggcaaagtagtatactggaacctagcatagcgcctcatacaaataagtcacatgggaattttacaattactccaaaagaatgtgttcaaaaaaaaaaaaaatcaaaaaaaatgggtgtgggtcagggctaaagtttagtccactttcctcctgt

SEQ ID NO: 19681 - DNA, 1027 bp, Homo sapiens
aaaatgaggaaagggagggaaatgggtggtggtggcgatgggagctggctatgcctgtgcctccctgccagagttcctccattcctggccacgctggctcccaccctgacctgaagcctggcagtaagccctcagtgcttgggaactgtcatcgtccttttcttctccctctctctctattactattcttatttgtgttacacacaagactgggagatgtgtattggttaggggccttgagccgcagcgcgttcccggtttgggcaactgcatctgctaaagattcccttggtgtgagtttcttccccatgcctttcatcactgtttctagacaccactgatctctatttttgtgattcctacgacttttcgccagagaggcttcttccaaatatgaccttaataaagatttcccaaagatcgttttcctgctgtaaacagcctgatccagaggatcaacctgaggaagcggcgggactcgctcatcctagggggtgttattgggatctgtaccatcctgttgctgctgtatgcgttccattgatgggacatcttcagggactcttgacagccaccgctttcacaccctggtctggaataaggaaacatcggagggagaagttgactgtcttgataattagcctgaccagcaggatgaatgcaagactgacagtgatggactctgtgacatggtcaggttgagctgaagccacagtttctctgtgctgtgttttctaacacatttttctgtttttaattaaaaaaaaaaaaaaaaggttttcagttgcttttgtctccctaggaggcaggtaaaccaatcaaaaacagagttttctgtgtttccatgatagtgttgaagcctaatgacaagccaggtcttacagctgggctcttcagaaaaccaggtttctacatccaaagactgcttttcttttagctgccagattggattgtgaataaaaataattcttccctctccctctccctctccccacggtctccctctttccacggtctccctctgatg

SEQ ID NO: 19682 - DNA, 1074 bp, Homo sapiens
tgagaggccaggcaggtggatcacttgaggccacaagtttgagaccaacctggccaacatggcaaaacctcgtctctactaaaaatacaaaaattagtcagtcgtggtggcgggtgtctgtaatcccacctactcgggaggccgaggcaggagaatcgcttgaacccgggagggaggcagaggttgcagtgagccaagattgcaccactgcattccagcctgggccacaaagtgagactgagacaaaaaaaaaaaaaaaaaaaaaaaaaaagctgcctaacaacgcccaaatccagcagcttaggacaatcagcattaattttggcttcgcaggctacagggcagtttttctgctcctggctgggctcacccaccagcgtctatgggtccaagagtcacactgtatttattcaggctgggtcttttcgtatatttgggcccggctggctataggctggtctaggacaacaggattcttccctcatcctccagcaggctagctcgggcttggtcacctgacaggggcagggtttccagacgtcgaccagaaagatgcaccacctcttcaggcctagattgggaagtgacttcacttctgctgcaatccattgattggccaaaggagatcacgagaccaacccagattcaaggggtgtggaagtaggctccacctcccagtgggaggagctacctaggcaaagagtatagatggtgggcggtagaattgggtccgtgaagccaacttgaccagccccatgattcctttggggcttttgataatcattccctgcccctccctgggtaccccaaggcattctatggtcctcgaccctagctttggcccctgtagaagttctttttttttgagacggagtctcgctttgtcacccaggctggagtgcagtggcgcgatctcggctcactgcaagctcctcctcccgggttcacgccattctcctgcctcagtctcccgaacacctgggactacaggcgcccgccaccaagcccggctaattttttgtatttttagtagagacggggtttcactgcgttagccaggatggtctcgatctc

SEQ ID NO: 19683 - DNA, 1030 bp, Homo sapiens
tggtctttctgggccacctcctccctcctcgttgctcctccagtgtgctaagtgtgatcctaccccggggcgtttgcactgctgttctgccatctaggacccttccccagatatttgcgaggctttttctcccccaccctcttgaaatatcacctccccagtaaggtttactcccaggcaccttctgcagagtctcagcttcccacacccctcctgatgttcagtacagcagacggcttttcacataggctgtaatttcctgatgttctgcgcttgtttgtttactgtctgtgtctgtgaggaggatccaagtgcgcgaggatgttgtgatttgctttgctttgggaatcccaggtgtcagcagtcatcactggcccacagtgtgcgttcaagaagtcttacctgacccaggtgtggtgactcacacctgtaaacccagaatgttgggaagccgaggtgggaagattgctcgaggacaagaatttgagatcagcctgggcaacatagcaagactcgtttctaaaaaatttttttaatagttgggcatcgtgaatatgcacctgtagtctcagctgctcaggaggctgaggtggaaggatcgcttgagcccagaagtttgaggctgcagtgagctatgattgcacgagtgcactccagcctgggcgacaaagcaggatcctgactcttaaaaaaaaaaaaaaaaaaaaaaggcccctgccttcactgtctcctgttccaaaatttggggggagataaaaattcaataaatagatgcccaggccaaaaatagccttgcccccccgccaaaaaaaaaaaaaaaagcctcagaatagtcagtgcccctccctcagaggctaaaaataccctgcaggtcacaaatgatcaggtcaggaagccaggtggattctccttcctgtccttgaggaggtgaggggtccggggctggctttctcagacaggatttcccagatgatttccattactcctgactttggcactgcatcattctctgtgggaggctgtcctttgt

SEQ ID NO: 19684 - DNA, 1029 bp, Homo sapiens
cctgtctcaaaaaaatatatacataaataaaatagagtagaggttggctgactttcctgtagaaagcccgatggtaaatcctgcaagctttgcgggccgcagacgggttctgtggcctgttctcttttctcttctcttcagtcctttaaaaatgtaaacaccattcttagctcaccagctgtacaaaagcaggctggggcctggccatggttggccgaccctgccccagaacgccccctagtggcttctgggagtgaaggctgggcagaggggcggccccatttggggagcagttgtgtgcttaaagtacaaggcgagtcccgcgcagtctgttcccggcacctccctgctctcacctcctcccactctcctcaccagctcacgacccgcttcctcgatgcagctgccaccgttattcaaacatacaggcacagtccagccccagggcctttgcacgggctgtgaccctgcctaggacgctcttctaactctcctgaactgatcacctgcgtgctcctccctcaaattcacagaggtttgctaaaatgtcatcttctccaggggagatgacctttcttgatcatcctgttgaaaattgcaacagccgggcacagtggctcatgcctgtaatcccagcactttggaaggccgaggtgggtggatcacctgagatcaggagttcgagaccagcctgaccaacatggtgaaaccctgtctctactaaaaatacaaaaattagctgggcgtggtggtgggtgcctgtagtcccagctaatcaggaggctgagtcaggagaatcgcttgaacctgggaggcagaggttgcagtgagccaagatcatgccattgcactccagcctggatgacagagcaagactctgtctcaaataaataaataaataaaagaaaataaaattgcaacagccgggcatagtagctcatgcctgtaatcccagcactttgggaggatgaggtgggaggattgcttgagttcgagaccagcctgggaaacataacgaggcccccattt

SEQ ID NO: 19685 - DNA, 1164 bp, Homo sapiens
gttttggttttcagcagggaaatggtaatgggggctctgatgagaaattccaggctggacataagagatttgaaagtgctggctcaatgatggtactgagagcccaggacagcctgagatgggacaggctgggatgacagctggatgtgacagagcaggggttcccatgctggagggcccgcctcagagaatgtgtgtttctggccagcacagtggctcacgcctgtaatcccagcactttgggaagccgaggcaggcggatcacgaggtcaggagatcgagaccagcctggccaacatggtgaaaccctgtctctaataaaaacacaaaaaaattagccaggcgtggtggcgagcgcctgtaatcccagctactctggaggctgaggcaggagaatcgcttgaacccgggaggcgcaggttgtagggagacgaaatcgcgccactggcactccagcctgggcgacagagggaggctccgtctcaaaaaaaaaaaaaaaaaaaaaaaaaagcaaggctcgcaaaacaccggattccttctcagctttctgagctgaaaaggtatagatcctcaagaagagaagagtgtatgtaagtacttctcaaccagtttacctctctgaccgctcttacggtgtttgggggcaaaaaactaaggatctagactctctaaaccgctcgctgggtccttctctccccacaatgcaccggggccagcaggaaggccgctccgacccctaattttcccgcgaattcagttcaaagaggcggccgggcccgcgatcggcagcgcgcaccggccaaccaagccgcgcctccgcgagaagcgcctccgcgtgactgacgggggaatccgcgggccaacgggctgggcggcccggcggtgcgcgctcccgccggccaatcagagcgccgggcgggggaagtgggcggagcgaggcctgggtagggtgagcggcctccgaagcggagcggggctctgaggagacactttttcttcctccctccttccctcctctcctcctgccttcccttcccctttcctcccctctctcctccttctcccctcggtcagccggagcctgctggggcgagcggttggtattgcaggcgcttactctccggggccgcccggcgagtagctggccggggaaggaggcaggaa

SEQ ID NO: 19686 - DNA, 1361 bp, Homo sapiens
tttctactcggcttacaggacattttcttgggtcaatttctgtttctaaggtctgtctggtaggtgaaactgacttatttggaaaggagagcaaggtgtctggaaataaacaatagaatttattaaaaacatcgtgactatgaataatcctgattgttctttaaggaatgttatatcctgattggtttccttttttgcttttgtgtgttataatttgggtgatctttaatagctaagtaatcttacagaaacttgaataaacttggctctaccgcccagtgtccttatttacagtttcactgtggcatatattaagggcatggtatcagctgtgcttagaaagaccgtattatgttgtttaatacccttccttcattctctctcattagtgcttcatgaaattctaattggaacttaatagaaggagtttcagtttttatcgaaacgaatattgaccttgcttcagagagattcacattattcacatatttcttaatatactttgaaatatctagagaggctttaattggaaataggatggagaactgaagggcagtggtgacaataatgatacttgtttgtaccccttctaaagtatctcatctccctttagttaatttaagataaaactaaccaattgaagatttaggtggaaattttaaaagttctttctgaatgttaagagaagacacattctccaagaaagttttaactatttgcgttctgatgagtcgacctcagggaagtcaagtgtcattaagagctagatctggtcataaaacaacttgaagttgtttactggaaagtttaaatacttgaatgtaattattcacagttatttctatttggtttattctgatactgctgtataatgacaacgtgatactaataggtcattaatgtaactaatataatagtatatgtatttttcatccacttaagtcctgtataacaaattacattttaactaatttgaaatttaattcaactcattttaagcgttagacggttttgtgaatctgtcaattgtgtaaaaaatgtattgaggtaatatttatattgaacaaaatagataaaactttaaattataattaggaatatttattgagaattttttctgcagtttgtgtccgagatttatttcaacattgactgacttttgagtgcagtggatcccacctgtaatcctagctactctggaggctgaggcaggaggatctgttgagcccacgagtttgagaccagcctgggcaacatatcaagaccccttttcaaaaaaagaaaaaaaaaatcttgactgactttcatcatacctgtattaggaatgtctggatctgtattaggatgtcatcatatctgta

SEQ ID NO: 19687 - DNA, 1033 bp, Homo sapiens
tatcagtttacattaagtgatatactttaggaaagaggaaaaattacagtgatcattttcctagtgatcaccttgatataaggagttagaaggaatcttagaggtcagtttggtccaaactcacacacaagtcagaaattaatttctgtagcattcctggcagagaatacttaagctgtggcttgaatacctccagtgtagttgtatttattattctttatctttattaccagtttcttccattttgagtgaaacctctgacttctgccgttggtcttaactctaccacctcatttaaagagggatactcacatttatagtatatgtgctaggtactgtggcagggacttcacaatatcacgtatcttgtaagttattctcaaatatgagaggggttctctttttttccatctttttcttctcatttaaatctgtcaggcaacatattcataacttttatttcatatttgaaatatgtttctcacatagtttcagaaacttgaacatttggacagaatctacttattgtacattagcaaatatatacctagaacgaatccctaaatgttctgactagtctgatatctgtctactctagatagtatgcttctatttattttttgatatgtaaactttattttttgatatttttgatagaaaattgaatattctaaggagaaacagcagcttgggtggtgtttgttcattcattaactacctttagagagaatgcagaactaaaaatattagattcttaaaaaaatagagttggaaaatttgtcacagtgcatttttcttttccttctagttttaaatcacagcttacgaatttagataggatacacacttaatgatgcatcatttatgcatctcattgttttcccattgttctgttaactggtaaaagacttcctttttttcagtttggcttccttctactttaagtttggctttggaattaagtgatttttttacttggattgtaaaatgatattttttattttatatcctgcaatcttgtggggttgaagta

SEQ ID NO: 19688 - DNA, 1047 bp, Homo sapiens
tatttttattttttgagacaaggtctcgctttgtcaccgaggctggagtgtagtggcataatgataggtcactgatggattgaactcgtggactaaagggatcctcctgcctcagcctcctgagtagctgggactacaggcatgtactgtcacaccacactaattttttgaatttttgtagagtcagggtctcaccatgttgcccaggccagttttgaactcctatcctcaagtgatcctcctacctcgacatcttgaagtgctgagattacaggaatgagcccccatgcccagcctgaatttttatttatttatttatttatttatttatttatttatttgagactgagtctcgccctgtcgccaggctggagtgcagtggcgcgaactcggctcactgcaacctctaactccttggttcaagcaattctcctgcctcagcctccggagtagctggggattataggcacgtggtaccacgcccagctaatctttgtatttttagtagagaaggggtttcaccatgttggccaggatggtctcggtctcctgaccttgtgatccacctgcctcagcctcccaaagtgctgggattacaggtgtgagccaccgtgcccggctcatttttatttttagtaggttgataagtcaatgtgccttttttgactatttatttatttatttatttatttttgagacggggtcttgctttattgcccaggcaagaatgcagtggtgccatctcggctcactgcaacctccgcctccagggttcaagctgttctcctgcctcagcctcctgagtagttgggattacaggcacacaccaccacgcctggttaatttttgtatttttagtagagtcagggtttcaccatgttggtcaggctggtctcgaactcctgacctcgtgtcctgcccatctcggcctcccaaagtgctgggattacaggcgtgacccaccgtgcccagccgactttttgtttttgatgcaacctaagcttttgaattagtaaccttccttttctaaacctccccgtttttaag

SEQ ID NO: 19689 - DNA, 1077 bp, Homo sapiens
gggagtgcattgatacgttcatagcttactgcatcctcgaacttccaggctccgttgtcttactttattttttattttactttttagagatgaggatttgccctgtcgctgaggcggcagtacagtggtgtgatcatggctcaactacagccatgagctcctgggctcaagtaaccctcctgccttagcctcctgagtagctgggactacaggcacatgctaccatgtcccacttattttattttattaaaaaaagtttttttaggagacagggtctcacttcatcacccaggctggattgcaattgtgcgatcatgactcactttacccttgacctcctggcctcaaatgatcctcctgcctcagcctaccgaatagcctaggaccacaggcgcaagataccatgcctggatgattttgtaaaattttgtagccgggcacggtgactcatgcctgtagtcccagcactttggaggccgaggtgggcggatcacgaggtcaggagattgagaacagcctgaccaacatggtaaaaaccccatctctactaaaaatacgaaaattagctgggcagagtgtcgtgcacctgtaatcccagctattcaggaggctgaggcaggagaatcgcttaaacctgggagatggaggttgcagggaggagagatcgcgccattgcactccagcgtgggcaacagagcgagactacatctcagaaaaactttagtagagatccattatcttgtcatgttgcccaagatggtctcaaacttctggcctcaaacagtcctcctgtctcagcctctccaagcattgagattacaagtgtgaaccattaacacccagcctgttgttttaaaagttgtatattattattattattatttttttttttttgagacggagtctcgctctgtcacccaggctggagtgcagtggtgcgatctcggcccactgcaagctctgccttcccaggttcaccccattcttctgcctcagcctcctgagtagctaggactataggcgcctgccaccacgcccggataattttttgtattttttagtagagatggggtttca

SEQ ID NO: 19690 - DNA, 1127 bp, Homo sapiens
catggtgactcacgcctgtatcccagcactttgggaggtcgaggcaggcggttcacttgaggtgaagagttcgagagcagcttgaccaacatgggaaaaccccatctctactaaaaatgcaaaaaattaggccaggtgcggtggctcatgcctgtaatcccagcactttgggaggtcaaggcaggcggatcatgaagtcaagagattgagactatcctggccaacatggtgaaaccccgtctctagtaaaaatacaaaaattagctgggcgtggtggcacgtgcctgtatttctagctactcgggaggctgaggcaggagaattgcttaaacctgggaggcggaggttgcagtgagccgagattacaccgctgcactccagcctggctacagagtgaaactctgtctcaaaaataaataaataaataaataaaaaattagctgggcatggtggcgtgcacctgtaatttcatctactcgggaggctgaggcaggagaattgcttgaacccaggaggcggaggttgcagtgagtagataccgcaccactgcactccagcctgggtgacagagggagactccgtctcaaaataaataaataaataaaatctgtagactacatcttaggttggttgtgtgtctttcccaccattaataagatctgatgttttccctttcttttttttaatacactttgccttgactataagctttgaagttgttttcaaattgtcatcttttcagtcttgagtttttgttcttttttcagaacctggctatacatttctttttgcatacttactcttgaaggtgcctcatcagttgccatttgagcatatctgattcttaaaaatttgaatattcaagaacaaattgtaaaaatattccttgtataatttttttggttttgtagtaattcctttgttttcttcacagtacttctgcagagtgatccatttgtaattaatagacacacacacatcatccaccattcagctttatcttctcattagaaagtgcgtctaacccctatattttgagatcctggatttcagaatattggacttgatgtagacacgagtttctcagctttacatatcataggatcaaatgtatataacaaaagttg

SEQ ID NO: 19691 - DNA, 1048 bp, Homo sapiens
tttgttcttactttttgtgagttgtgagggattttttgttgtttattttttgttaggtgtatagacaaacttttggatgtcatatttaacagggaaagcatagagtcatgggcctgaataacaattgagtacaaatatttataaattagttgaagtaactttgatttcaatgttatattttaaagtctaggttattttactacagagcattaaaatgataaaatatttccttttttttttttagcttgtcagctcatttgcagcttacatttttggtttcttccacaaaaatggtatgtacttaaaagtaaataaagtggcattttaatagcaagatacctttgtgaatgtaaaaaaaaagtggggcttctgagtgtaaatttataaaattaagtttaatggaaaagatgttgattctgatgtttttgagctttaaggtatgaaggctaatgatgaaatttgtttttggtgggtgggtggtgggggaggcagactcttgctctgtcgtccaggctgtagtgcaatgttgtgatcttggctcactgcagcctccgtctcccgggttcaagcaattctcctgcctcagcctcctgagtagctggtattacaggcacgcgccccatgcctggctaattttttgtatttttagtagagacagggtctcaccatgctggccaggctggtcttgaactcctgacctcgtgatctacccgccttggcctcccaagggggcgtgagccaccacgcctggctaatgatgaacattttaacaaattgtcttagaacttcaataggtaaagaatctcctcagtagaaccttttatgcataaacattttgaattactgataatgtatcatgtttttaaaaaacacagtaaaacaactgaaataaccactattaccaatggcatatattaatattttaaatattattcaaaggaaattatatagtatattactcccgtaaaagctcaaagcatgctggaaagaattagagttgttttaaaaatggaaaaatacggccaggtgcagtggctcatgcctgtaa

SEQ ID NO: 19692 - DNA, 1049 bp, Homo sapiens
tctactgaaaataacaaaattagctgggaatggtgtttcatccccgtaatcccagctactctggagattgaatcatgagaagtgcttgaacctgggaggtgcaggctgcagtgagccgagatcgtgccactgcattccagcctggacaaccgagtgagactgactcaagaaaaaaaaaaaaaattacccgggcttggtggcgtgtgcctgtagtcccagctactcgggaggctgaggcagggagaactgctttaacccaggaggcggaggttgcagtgagtcaagaacattccattgcactctagcctgggcaacagagcaagactctatctctcaaaaaaaaaaaaaaaaaaaaagtaaagaaagaaaaaatgtgttgcccaatgccttagaacaaaaatttttttttgtatgttcatggattcatctattataatagttctggatgttattgaagctatttgatgaattatttattaaatattcagttatgaactgttaatacctttgggactttaaaaaaaagttatggaggactactctagaaccttaatttgtaaagcctttgttagttaatttacatagagaatatagactatggtattcaaaattaacacccctaaattttttgtaagccaagatattcttctagatagtaaataatatcttgatttttgttatcccatttaaactgtagagaaattctggggaaagcgtctaaaaatagctctgtctctacgttttataatgtttaatgttttttgaaatccattttttatccttttggccacaagtcttggtcagatcaagaactttttagtttagttgtctctatgcattcataatgaaacatgtataatagtaactgatttaattcaaatgttatcttaataatttttctagtagattttaggagaagaaaaaaattgaagatgcttattttgaatgtggttgtctcctgcaacttttttttttggagatggagtttcgctcttgttgcccaggctggagtgcaatggtgtgatctcggctcactgcaacctctgccc

SEQ ID NO: 19693 - DNA, 1022 bp, Homo sapiens
tgaggaaaaaagaatgagtgaacttttgagaagtcttattatgggaaatctctgtttgaagttccctgacttgttagcaaaatgaataccgtgttcatatatttttaaaatatattttaaaatactgattttctatttagataagccatcaccaaactcagaaaatgaacaaaattctgttaccctggaagtcctgcttgtgaaagtttgccacaaaaaaagaaaggtaatgtcaacaaaatgatattggtagattaaatggaataatttgcttaattggacatctttatgcatatatattgtattttaaagctgagttttaaattttgaaagcttaagaaatgtgttgatggcctaattataaaactgataacctcttttgccaactcgcatatctgtgtagtttttctagtcttttaataagtgtctgtacaaaacttttctcataggagtctggaaatggagaagctgtgttttagcatctggcataaattcagttgcttttctaccatttcaatctgttagcgtatttcttagctatttgtacccattgacattttagataagagctaagagagagttttttccacaagattatcctttgtaacactgctctcaggcaaagaaattttgttgtcagcgttattagccattcacttattagtacattgcttcaaatttttataaggtgaagttatttcaccatagaaacaagtgttaagatgtttcctggtcaaccgatcaaagccaacatatgtacctttagttgcctcaagtcctcgagtgtttcaagaggagtaggaactggtctgggtccagggtcccagtgctgatattcttccaagaccataggccataagggcctcagtcacagggagggagtagactaaggcaccatggaggcagcagtggaactttatttttgaaagtttatgtaaaggccggttgccgtagctcacacctataatcccagcactttgggaggcagaagtgggcagattgcttgaacccaggagttaagc

SEQ ID NO: 19694 - DNA, 1076 bp, Homo sapiens
gtcatgttaaaatagaacatttaagagatttgataaaagtacatgagtttaacattttagcctggtttttttgttgttgctaaaaagccttaccagagagatttagcatgcttttaattctaaatttctaatatacaactgtttcagatcactgttagctaaatattagatgtactgtatcataatttcattatgttggagaaaacctcaattgctttaatatttggaatataggtatttcaaatgtttatttttgcttcacagttttcagaactatggttagaattttaacattccatttggtgatcatggcctatctcctgtgtttcctatagctgtgattagaatttttattataattcttattgcttatatacaaataaatataaattaataatctttacctttgcaggatgtatgttgtccaataaggcaagttcccacaggtaaaaagcaggtgcctttgaatcctgacctcaatcaaacaaaacctggaaatttcccgtcccttgcagtttccagtaatgaatttgaacctagtaacagccacatggtgaagtcttactcgttgctatttagagtgactcgtccaagaagaagagagtttaatggaatgattaatggagaaaccatgaaaatattggtaatttttttttttactagattttatcactggagattaagatggtcattgaaaatgattgtaccagtgttccttcatgatagtcatggtgctgagtcttaaagcaaacagtgaattcacctccacctcaacattttgttgtgcaaattttcaaacataaaggacaatgagaagtattttatagtgaacacttatctacttacctcttagattcaacaatgaatattttattatacttgttgcatatttatccccctacccatccctcttttcttccaacaattgtgaattcatctttgaggtattcattcaacaaacacataggtgctggggatgatttaatttaatcgaagatgattaaagcattcagtcctgtcctccaaagtctcacaacctagtgtagggaaatagacatgaaatatatcattgctgc

SEQ ID NO: 19695 - DNA, 1028 bp, Homo sapiens
gtctcctgggttcaagcgattcacctgcctcagcctcctgaatagctgggattacaggcacccgctaccatgcccagctaatttttgtgtttttagagagatgaggtttcaccatgttggccaggctggtctggagctcctgacctcacatcatccacctgcctaagcctcccaaagtgctgggattacaggtgagccaccgtgcccggccagtgtctttttaaagtcagaaattttattgtggatcgaagatttaaatggaaaacaatagaaccataaatgtactagaaaatagtggtcatgtctgtgggggaaacaattagaatgaggcgcattggacttcatcgatgctgttaattgttctattttaggcagcatggggtatgttctgttttcttttttaatcactgtacctgacacatatgtttacacatttcttgtaagaaaaagataatgcttttattttaaagaaaaagtgccaagaagaaactgggagaatttccccacagcagcttattttgaaaatactcatccgggcatggtggctcacgcctgtaatcccagcactttgggaggctgaggcgggcggatcacgaggtcaagagatcgagaccgtcctggccaacatggtgaatccccatctctactaaaaatacaaaaattagctgggtgtggtggtgcgtgcctgtagtcccagctactcgggaggctgaggcaggagaatcgcttgaacccaggaggcggaggttacagtgagttgagatcgtgccactgcagtccagcctggtgacagcgagactctgtctcaaaaaaaaaaaaaaaaaattcaaaactataggaaagttgaaagaatactaaagtcatttaatatccacatacccttcatctagattgtatctgttgttaacattttgccacatttgatttatttatgagtatatattttatttttgtgctgaacaatttgaaagtttgctttattcctcatttataaactctcttgcatgtatctcctaagaacgaagaca

SEQ ID NO: 19696 - DNA, 1007 bp, Homo sapiens
tttgtatttttagtagagacggggtttcaccgtgttagccaggatggtctccatctcctgacctcgtaatctgccggcctcggcctcccaaagtgctgggattacatgcgtgagccactgtgcctggccatttatttttacagcgaactacatttgccactgtactccagctcgctgtagcctcaagctcctgaactcaagtgatcctcccaccttagcctcctgagtagctggctaatgcctgactatgcctggctaattaaaaaaaatttattttggtagagatgggggtctcatcatgttgcccaggttggtcttcaactcctggcttcaagcaatcctcccaccttggcctcccaaagtactgggattacaggtgtgagccagcagtcccggccaaacttgctaattttaatttgtgtctttttgctttactaaatagtaaccatgagtgttctgagcttttctgagttctgtgagtcctggcaaataattgaaagtgaaagtgatcttaagcacccctgaacacatttaccacgcatggcccacttgcattcatctggtattggagggaaacaaatttctagagtttcagttgctacttttcagttgttccatggtgctttccaggagttccagtcgatgatatggggtttcgcctgtcatcacatctgtcaggctttgcgccttcttcatcctgcacagacactgagatcatgcaggtcttgtatctgtttgtagttcgtcttcactagcttgtattttgggatttgagggggtaagtggtcacctagtcttactgtagatattatccaggggattttgcttttgttatctatctagttgctctatttctttgttttgtttgtgtttatttattaagagatggggtctaccaatgttgcctaggctcactgcaacctcgaattcccaggctcaagcaattctcccacctcagtctcctgagtagctttggaactactggtgggcaccacaacacctggcta

SEQ ID NO: 19697 - DNA, 1032 bp, Homo sapiens
ggacttaaagattactgaagaggggataaaagtcaacactgcttacaaatacctgaacatggagagcacagtcaacacattcatgtggacagcacatgaacggatgtattaatacattacacagcttcttctatctgacctattcctcttgttctaaagagttacatggacttggatcctttaagatgattttaaaaataatattacattaagttttcctggtctaataaccaactttgagaagtacagtggaagggtatagaacttcctatatcttctatacttttaatgccaatttgatttttattgtgatgtgatatttaacagtatgctaaaaataaaattgactgaattgtatgattttgtccacaacattgaagtctctttttgctaaaatattacaaaatgaatccagtaaacactttccaatggcctaagttagagatgaattcaactttttttttaaagcaattacaactacgctgggctgaggacagctacgttagaccctgaaaaccaaagccaagcacccaaacatctaaaacactaacactttccatccaggatagaaaaatgagcatccaaagtaaagagaaccacaagactgatcaagtaaccagtcaaaaaccacttctctattatttgaacttatagttactcgaagcttgaagtgtccaccttcattattactggtggttcctagagtcacggcttcaatgtcaaacgtgacagtggacccagaagtaactgcgggtaactgatttgtcatttcttttccattgacaaaaactgcacctaaaatgttaaggtaaagagtcatttacatgtgagcaataactaagagatctgaaatagtttctagattactggtaacacagctcatttcctaattcagattttaaaaaatctggaatgccaactggacatagattttagagttctgtccagggttgtactcttccagcagagactatgagtttcccatatcagtgtcatcaaaagaaacttgacagtgttacaaaattacctcct

SEQ ID NO: 19698 - DNA, 1079 bp, Homo sapiens
ctaaaattttttttttttttgaaacggagtcttgctgtgtcgcccaggctggagtgcagtggcgtgatctcggctcactgcaagctccgcctcccgggttcacgccattctcctgcctcagcctcccgagtagctgggaccacagacacccaccaccatgtccggctaatttttttatttatagtagagatggggtttcaccatgttagccaggatgttctcaatctcctgacctcgtgatccgcccgcctcagcctcccaaagtgctgggattacaagtgtgagccaccgtgcctggccaggcctctaaatttttaagatttactttttaattttgtgtgtgtgtttgagacacagtttcgctcttgttgcccaggctggagtgcaatggcatgatctcagctcactgcaacctctgcctcttgggttcaagcaattctcctgcctcagcctcccaagtagctgggattgcaggcatatgtgccaccatgcccggctgattttgtatttttagtagagatggggtttctccatgttgctcaggttggtctcgaactcccgacctcaggtgatccacctgcctcggcctaccaaagtgctggggttacaggtgtgaaccactatgcccagcctaagattgacttttgagagatactctacttacctctacttaccaagaggaaaagagatataaacatattaaataacaagcattttatatacatttcccagttaatctacgtaataaccctgtgaatacagatgagaaaactacagctacaggaaataaagaagccttcccacagtaacactgcctataaatgacggaataaactcaggatgttttgaattcaaagcttatgtatgctctatgcacttcactctgcttcctgaggcaggtgagatgttttaatatctacttgcctgaatgttaatgtctgcccacagaaataagtcggagctctggagtagagaacacccgatgattcagaatcgttccgaagtgctatatttcttcgactgctcagactgtacccctcaaaaccagctgtccactctttttcaaagcaaagatattg

SEQ ID NO: 19699 - DNA, 1011 bp, Homo sapiens
cagccaggcggagtggctcacacctgtaatcccagcactttgggaggccaaggtgggcagatcacctgaggtcggaggttgcatcgctgcactccagcctgggcgacacagcaaggcttcatttaaaaaaaaaaggccaggcacggcggctcacacctataatcccagcactttgggtggccgaggcgagtgggtcacctgaggtcaggagttcaagaacagcctggccaacatggtgaaacctcgtctctacaaaaaatacaaaaattaggcaggtgtgatggcaggtgcctataatcccagctactcaggaggccgaagcaggagaatggcttgaacccgggggaagcggcaggcgggggagggcatggaggttgcagtaagccgagatcacgccacttcactccagcctcggtgaaagagcaaaactctgtctcaaaaaataaataaataaaataaaaataaaactggaagagctacctcagtgttccatgtgacttcattttaactgtaaagtaaaagagatttttgtttgagaagaaaagaatgtatttaaaagtagtcaacgaaaaaatctgaaaggcctccaaatcgcaaacccataatgtggaagtcatttctagaattctgaattacataccttacaccatcgtacaatgatgcctccaggtttctctattagttcttctatctgtactggtgggcgagatgctactgttccatgcttaaaaatgtggtctttcactatgttaagaattgagtcatccaactgagcagataaacaaggcacatcaaccagtaaaggtacttctggtaagctgaggaaacaaagctcatgtgttatgagacctctaactgagagttaaaaaatacaagaaatattttagagcagtcacatgcttgaaagatcctgaagcccccagtaattaattctcatggcagtaggggatttgcaagatgttacacaaagattctcttttcaaataaatataagtaagacagaaaattggt

SEQ ID NO: 19700 - DNA, 1035 bp, Homo sapiens
tcacgtttttcacctaaaggaggcttcctttttttaatcctattatgtaaactattagatccatgtttaaaatttatattttgtattatattgcttgaaataagtgcctttttctcttttaaattgccagccatgcaaaaagcgaaagaaagatgatgacacatctacctgcaaaacaattacaaaatatttatcaccactagggaagactagagacagggtttttgctccaccaaaacctagtaatattctggattattttagaaagacttcacccacaaatgagaagacacaattagggaaagagtgcaagataaagtcacctgaatcagtacctgttgacagcaacaaagactgtacgacacctttggaaatgttctcaaatgtagagtttaagaagaaaagaaagagggttaatttatctcatcaactaaataatattaaaactgaaaatgaagctccaattgaaattagtagcgacgatagcaaagaagactatagtttaaataatgattttgtggaaagtagtacttctgttttacgttacaagaaacaagtagaggtacttgcagaaaacattcaagatacaaaaagtcaaccaaatactatgacctccctgcaaaattctaaaaaagtaaatcctaaacaagggaccacaaaaaatgacttcaaaaagttgagaaaaaggaaatgcagagatgtagtagatctatctgaaagcttacccttggcagaggaactaaatttgcttaaaaaagatggtaaagatactaaacagatggagaatactacaagccatgcaaactctagagataacgtaactgaagcagcccagttaaatgatagtataataactgtctcatatgaggaatttttaaaaagtcacaaggaaaataaagtggaagagataccagactctacaatgtcaatttgtgttccttctgaaactgtcgacgaaatagtcaaaagtggttatataagtgaatcagaaaactccgaaatttcccagcaggtacgctttaagacagttactgt

SEQ ID NO: 19701 - DNA, 1084 bp, Homo sapiens
aactaagatttaggatctcgccagtgctcacaaggttagtaagtggcagaggttgggtttgaatccaggtctaacttgaaagtttagactttagaccaggttgctaactgcctcttaaaaggtttttgtttgtttgtttgtttgttttgacagagtcttgctttgttgcccaggctggagtgcagtgatgagatctcagctcactgcaacctctgtctcctgggttcaagcaattctcttgcctcagcctcctgagtagctgggattgctggtctcgaactcctgacctcaagtgatccacctgccttggcctcccaaagtgctggaattacaggcgtgagccaccacgcctggccctcctaaaagttttaacctgagtatcaaggttgatttgaaaagaaaggaaagtttgttaatatttgtttgttttaaacaactggaagggaagtctaggtgatttttattaattctatttgttggagggtaggattttgttccctttatagtcatgtggtttttggtatgtttgtgttaattatgtagttgtcaacttttcatgtttacgtatttgacattcagtaaatggatagtgtataaataaggtttattaagatatttgtctatttttctttagggtgttgtttgtggcatttgaaaccaccctcttgtcctctcttaactaaatttaaagaactgaacactaaagtaatagatctctcaaaatgtggtattgctcttggtgaattttcaacattgaattcaaagttgaaaagcggtaactctgctgctgtggtaagtattaaatagttcatccattgtagagtgtttcccttacatcttgcagaggaaaaacatttttggatatctactcttatagcctcgagtgttgtcctagagtttaattttttttttttttgagacagagtctccctctgttgcccaggctggagtgcagtggtgcaatcttggctcactgcaacctctgcttcccgagttcaagcaattctgcctcagcctcccgagtagctgggactacaggcacacaccaccatgcccggctaatttttgtatttttagtagagac

SEQ ID NO: 19702 - DNA, 1030 bp, Homo sapiens
ttgtagtacacatttcttttaaatacccatagagctttaaaaacattttaagaattaatgattgccagttctcaaagaatgttagattacatagcacatttagatactttataagtaggtcatataatctaatagatataattagttcaaagggagaaaaataaattaattcttcataagctttatatttagtgactaaagctattttttttttttttttgagttggagtctcaccctgttgcccaggctggagtacagtggcacgatctcggctcactgcaacctctgcctcccgggttcaagcgatcctcctgcctcagctccccctagtagctggaattacaggcacacgccaccatgcccagcaaatttttgtatttttagtagacacggggttttgccatgttggctaggctggtctcaaactcctaacttcagatgatccacctgtctcttggcctcccaaagtgctgggaatataggcgtgagccaccacgcccggcctaaagctaatcttacgttgatactgatttatgatggacagaaagtggttggtagtattgtaattaacatgaatagatgatgttggtctgttattgtgcattttattctttattgcagttcatgaggacaaggaaggaatttactgaagaagtaagaaatcttttgcttgaggaaattaggtggtcaaatcctgaattttcattgaaaaaatattttcccttactcctaaaaaaacaaattgagcaccaagtactttcttccgagtgtcatagtaaacaaggttagtgataattattatcatttatgttaacataccagttttgggtttttatattatttattattttatttttatttctgagacggagttttgctcttgtcgccctggctggagtgcagtggcacaaacctggctcactgcaacctctgcttcctgggttcaagtgattctcctgcctcagcctcctgagtagctgggattacaggcacccaccatgacgccctgctaatttttgtatttttagt

SEQ ID NO: 19703 - DNA, 1034 bp, Homo sapiens
ctagagtgcagtggcgcgatctccgctcattgcaagctccgcctcccgggttcacaccattctcctgcctcagcctcccgagtagctgggactacaggcccccgccaccacgcccggctaattttttgtacttttagtagagacggggtttcaccgtgttagccaggatggtatcgatctcctgacctcgtgatccgcccacctcagcctcccaaagtgctgggattacaggcgtgaaccaccgcgcctggctaacactttaatattttaataagattatggtggttatttttttttagggggaagggtttggtgtgaagaattttaaatgtaatgttgttttaaaagtacctctggcattttgtaaatataaatatttctgcaaatacctactgtgacattgtaacaataatgtaaatgactaataattcatatatgtttatgtcaaggaatgaataccttaattttttttttttttgctttagattctggaactgaagacatgctttggacagaaaagtatcaacctcagactgccagtgaacttataggaaatgagttagctataaaaaagttacataggttggtaaaatgtgtaaggaattgagaaatagtttacaaacttagttttactgtttttgtttcgaaattgtagttacaaagtaatatatctcatgataaaatcttcaaaaaactggtagaagtttaagtgaaaagtagccctcttttcttacatttctacttctcagagataatcattgaaaattttttgtaaaagcttccagaaaaatatttttatgcatatgttagttccttcctttctaacaaatgggatcacattactactaattcaggtccccagtccttcatcttcaattctcacatccaaaaaattctgaataatgaaagtttattgactttattacatgaaatttgttacacctttacacttagtagaatttacaaatttttttttttttttttttttttttttttcaagacagagtctcactctgttgcctaggctggagtgt

SEQ ID NO: 19704 - DNA, 1072 bp, Homo sapiens
aaaaatattaagtgatggcccagtgcagtggctcacacctgtaatcccagcactttgggaagctgaggcgggcagatcacttgaggctgggagttcgagaccagcctggccaacatggtgaaaccccatctctactaaaaatacaaaaattagctgggtgtggtgatgcacgcctgtaatcctggctactggagaggctgaggcatgagaatcgcctgaacccgggaggtgaggattgcagcgagccgaggtcgtgccagtgcactccagcctgggcaacagagtaagactctgtcccaaaacaaagcaaaaaaacaaaccaaaccaacttaaatgattatgggtgtactgcctagaccccattaggggtattatgtaatatgcagtatatgtaccaaataaccttttaagtatctgaaaaattaattctaaaacaatctggtccaaaggatttcatataaggatttacggacccataattacagttaatagcgtgaacttggtactactgttctaagtacttgtattgttccttctttcttttttttttttttacttgtactgttcttaattcattttatccttagaatggtactgtgagcagtgggtacagtggctcaagcctgtaatcccagtgctttcgtaagctgaggcagaaggactgcttgtggccaggagtttgagagcagcctgggtgaaatagggagaccccatctctacaaaaaataaaaaaaatagctgggaatgatggcgcccacttggattctgagccactcaggagcctgaggtgggagggtcacatgagtccaaggattcgaggctgcagtgagctatgatcgcacccctacactccagtgacaaagcaagactgtctcaaaaaaagaaaaatactatgagcataaatactgttgtcctcatctcatagatgaagaaaccaaggcctagagaggctgagttatttgtccaaagtcacacagctagaaagtgatggaactgggatttaaactcaggcattctagctctagactagaacttaatctttctgttgtacattgtatattaggcatctttc

SEQ ID NO: 19705 - DNA, 1044 bp, Homo sapiens
ctgtaatcccagctacttgggagactgaggcaggagaattgcttgaacttgggaggtggaggttacagtgagctgagattgtgccactgcactccagcctgggcgacagtgtgagactccgtctcagaaaaaataaataaataaaaccagtctttggactggtattcatacatgatcaagcagtccttggtctatatcaaaataagaaaaataaggacaaaggccaggcacggtggctcatgcctgtaatcccagcactttgggaggctgaggtgggcggatcacgaggtcaggagattgagaccatcctggccaatatgttgaaatcccgtctctactaaaaatacaaaaattagctgggcatggtggcgtgtgcttgtaatcccagctactcgggaggctgaggcaggagaattacttgaacccggaaggcagaggttgcagtgagctgagattgtgtcactgcactccagcctggtgacagagtgagactccatctcaaaagaaacaaaaaaaaaaaaaaaaagaggaaaaaatggtgttttttataaattgatatctgttcaactatttatttatttatttatttatttatttatttatttatttgagatggagtcttggtctgtcgcccaggcagcagtgcagtggagcgatctcagctcactgcaacctccacctcccaggttcaagtgattctcctgcctcagcctcccgagtagctgggattacaggcacctgccaccatccccagctaatttttgtatttttagtagagacacggtttcaccatgttggccaggctggtctcaaacttctgaccttgtgatctgcctgccttggccccccaaagtgctgagattacaggcgtgagccactgtgccctgccaaatatttttatattttaagatattgcatctcttacctgtggtgttgaaatgttctatatttttgaaatgatggtcatgtctgtgacagcttttttaacctcgagattttcagtaagcttattgaacacctctaatatacaagggctatgataag

SEQ ID NO: 19706 - DNA, 1034 bp, Homo sapiens
tagcatcccaaagtgctgggattacagatatgagccaccacgcccagcttgtttcagtttttgtttgtttgagacagtctcactctttcatccaggctggaatgcagtggcgcaatcttggctcactgcaacctccgcctcctgggttcaagtgatgctcctgcctcagcctcccgtgtagctgagattacaggtgtgtgccaccacacccagctaatttttgtatttttagtagagttgggatttcgccatgttggtctcgaaaccctgacctcaggtgatccacttgcctcggcctcccaaagtgctgggattacaggcatgagccaccgcgcccgtcctgtttcagttttgataatggatttcagtttgagcttattctgtggacatatccaatgtcttagcaaaagttgattttacctaaaatattaatattgtatttatgcaggaataaaaaattcttttgaacagaaacaaattactcagactaaatctacaaatgcaactaattcaaatgtcaaagacgttggagctgaagaacccagcagaaaaaatgcaacatctcttattctttttgaggaggtaggcttatagaagtatacatttgtgagagctcatgataaagacttactttaaagaatactgtatgttttcttataaagaattgtaaaatagctaaggaggtcaggaatacgtgtatctatttgaaattaaagcaaattaaactgtccactctagaataatttttcaggaagatgattaatgtaattcacggctgctaattattgttaaatgattgtataaattattctgatccatatctgtctagttataggtggctgcgtttgtttttaacatttgatagttgataattttaaaattcattatagtgtatgacataaactttcaacatgagctgaattcacacttcataaattcataaattttgtctctaacagacatagaatatttactatgtatacataactgatattagtaagtgtattaatatattaatattctaataaactgta

SEQ ID NO: 19707 - DNA, 1023 bp, Homo sapiens
aacattggcgaaatcctgtctctacaaaaagcacaaaaattagctggatgtaaaaagaaaaaaaattaactgggtgcagtggcatgtgcctgtagtcccagctacttgggaggctaaggcaagaggattgcttgagcctgggaggcagaggttgcaggaagccaagattgtgccacagcactccagcttgggcaacagagtgagactctggaagaaaaagaaaaaaaaaacaatttgtctagacaattcttcattcttccttttctgcagtcttttggattaaccaagtatattatttcatttcaccttcactgttggctttcagctatatgctaatatggtctccactacccaaatgaagctattgagcttttaaaatgtggctagtctacagttaataaaagatcacattttgtatgataataattgtatgaaatgtccagaataggcacatttatagagacagaaagtggattcatagctgcctaaggctagaggagctaggtagaaatagggagtgactgctgattggtctggggtttcttttggggatgatgaaaatgctctgtaattagatagtggtaatgggtgcaaaactctataaatatactaaaaccattgaattttacatgttaagtgggtgaattgtatagtatatgaattatatctaaatacggcttattatctatttttaaaatgtggctagaccccatctctactttgtgctaaagtgtaatataaacaccagattttttttttttttttttgagatacggtctcactctatctcctaggctggagtgtagtggctcagtctcagctcactgcaacctctacctcctgggctcaagcagtcctcccctctcagcctcctgagtagctaggaccataggcatgtgccaccacgcccagctaattaaaaaaatttttttgtagagatgaggtctcactatattgcccagactggtcctgaattcctgagctcaagtaatactcctgcctcagcctcccgaagtgctggta

SEQ ID NO: 19708 - DNA, 1172 bp, Homo sapiens
tgtattttcgagtcgatctcttctctatgtgggtaatagacaagctagtataattgaatacctgccaacccttcgaaacatctgtaagactgagaagctaaaagaacaaggaaaaagtaaaagaaggtaaaggctttattaaaaacaacattttagatagctttttcaagattaatacatattttcataagatgaaaatgttaatattaaattgtatttttctttgtaattttgacagattcctgcactattttgaaggaattcatcttgacattccaaaagagactgtgaatactttggcagctgacttcccttaatgttccatactaacaatgctttgtatagattatcatgtggtccttaagatacatttttatattatgtggatcttcatggaaaagtatatttctcgatgtacattttaaacaaacaatttgtatatttttttattggcgggtaaatatttaaaatatttgagttacaaattttatatatgattgtaattttttttctgaattttttgtattatctgatttagctttgttggagtattttttgtatgtgagtgaactgtttctggaaggtagagttcattaagatgaactccctatttcaagtgtttatattatatattagcttaatattcagatacattatcttggctgctaacattagtgtcactaaagttggtatacaatctcccactgctaaatttgactggctttacaaaaacaaaaacattatctggtgaattatatttttaacctaaaagttaaggatcctcatattgtacagttttttttgtgtgctttttttttttttttttgagacggaatcttgctctgtcacccaggctggagtgcagtggcctggtatcggctcagtgcaacttttgcctcccgggttcaagcgattatcctgcctcagcctcctgaatagctgggattacaggcatgtgccaccttgcccagctaatttttgtatttttagaagagacagggttttaccatgttggttaggctggtctcttaactcctgacctcaagtgatccatctgcctcggcctcccaaagtgctgggatcacaggcgtgagccacctcacctggcctatattgtacagttttgaacagtatagatgcatacctgtttacaaatgtgtatgaagatagat

SEQ ID NO: 19709 - DNA, 1049 bp, Homo sapiens
tcggcctcccaaagtgctgggataacaggtgtgagccacagtgcccggcccaaacttaatacgggtacactttattgtttctaaactacacctcaataaatgttgattaagtgaaaattaacaatgagatacaattccatacccatcatattggcaaaaattttgtaatctggtagtgtcaagtgttggtgagtatatggggaaaggggaactattctatttcattgatggaagtaaatattggtacaatcactgttgagccattcagcagaataatttggcagtctctagtaagtgaagatgtatataactgtgatccagcaattccatttctaagcatacgctgtgacctacagatgcactcacatatgtgtaccagatgcacaaactgactgcaacattacttatgatagcaaaaaatcaggaacaatctcaatatatatatcggaacaatctattaacagaaaatagattgataacttttggtatagtcatttacaagagcaaactagactggtgtatctcagcatgggtagacctcaaaaatataatgttgaaagcaaaaagaacctcattaaaatgggcaaaagatgtgtacagacacttctcaaagaagacatacacgtggccaacaagcaaatgaaaaaatgctcaacatcactaatcagagaaatgtaagtcaaaaccacaatgagataccatctataccagtcagaatgactgttatcaaaaagtaaaaaagtaacagatactggtgaggttgtggagaaaagggaatgtttacacacttgtggcaggaatgtaaattagttcagccacggtagaaagcagtttggagatttctcaaagaacttaaaacagaactaacatttgacccagcaatcccattactgggtatatacccaaagcaatagaaataattctactataggccggatgcagtggctcacgcctgtaatcccagcactttggaaggcagaggccggcggatcacctgaggtcgggagttcgagatcagcctgaccaacatggagaaaccctgtctctac

SEQ ID NO: 19710 - DNA, 1025 bp, Homo sapiens
aatcttgtttcactacatattttattaattcaaggccttaaaaatgatagctttattctattacacaggtttttatgtatgcctatacaccataatgacatttatttatttatttgagatggagtttcgctcttggctggagtgcaatggggcgatctcagctcactgcaacctgtgcctcctgggttctagcgattctcctgcctcagcctcccgagttgctggtactacaggtgcatggcgccacgcccggctaattttttgtattttcagtagagatggggtttcaccgtgttagccaggatggcctctatctcctgatctcgtgatccgccagcctcggcctcccaaaatgctgggattacaggcgtgagccaccacacccagccaagaaattttttaaatgcaaagttctctagccactttgtatttaccactagatgtctcactaacttcaggaaacctgatagcttttggccacattagagtaacttggttctcaattaaatttttgtagaataatatgatcaggttaagttgaaacctattttttaaattaagatattgaacttgtatttttgtttattgtgttatttaacagaaaggaaacataaaaggctgtgactttcctacttaattaaggatctggaagccacattttgtatggaaaaaggttttcttttatttttttatttcagtagattttgagggaacagatggtgtttgattacgtgaataagtactttagtggtgatttctgagattttggtggacccatcacccaagcagtgtacacagtacccagtgtgtagtcttttatccctcactacccctaccctttcccacagtccctatagtccagtgtatcattcttatgcctttgcatcctcatagcttagctcccccatgtgactgagaacatacaatgttaggtttttcattcttgagttacttcacttagaataatagtctccgattttatccaggttgctgtgaatgctattatttctttttatggctgaata

SEQ ID NO: 19711 - DNA, 1029 bp, Homo sapiens
gccctctaacaaataattgtaagtaggtatatatactttttggaaaatggagaaaagaacactagaggactaactttaaaaactatattcccctctagtgtctttatatacataaatatgtatataaaatgtatatatttatgtctttaattccagtgaagattaaatttctactttgctttctttcacttaccataatcgtttttagtatttataatctttgtaattaatgatatatatatatatatatatatatatatatatttttttttttttttttttttttttttttgagacggagtttcactcttgttgcccaggctggagtacaatggtgcgatcttggctcactgcaacctccacctcccaggttccagagattctcctgcctcagcctctcaagtagatgggattagaggcatgcgccccgacgcctggctaatttttttttgtatttttagtagagacaaggtttctccatgttggtcaggctggtctccaactcccgaactcaggtgatttgcccacctcagcctcccaaagtgctgggattacaggtgtaagccaccatgtccagccatatttaatgatttttaaaggatgaagtatatagatatatcacaacttaataattaaaaattttttttgctattataacattgaaacttgcaaacatttttgtacactttgcttttttcttttttagaatcattgctgtatgaaaaaaaaatctcccaagttgagataattgattcaaggagtacaaacttttttccttgtttaaaactgtgatgtcccagctacattgggaggctgaggtgggaggatcatttgagcacgggaaatctactgtattggcatcgttatcacttggatgtgtactttttctatgtatttttttaaaaaatgagattatactgaatttttaaaaactggtttaaatttatcataaacatctttgtttttttggcccataaatacatttctatagcattgttcctttttttttcctactttgcattaaggctt

SEQ ID NO: 19712 - DNA, 1024 bp, Homo sapiens
ccacaggaaagagtgacttgcgtttgctaagtgtccagtccgtactctccgttcccatttctctgcctctttctcccattatcggcttctaacagaaaataagaagagcaagcttccctttggtcccatcaaagataacatgtagacattcattcatgcgttcattcctttaactagcatttattgggttcctactatgttcccagcattgttattggtactggtgaccctagtataaaagacacaatccctgctgtcaagaggtcacagttctggaaggaacccagcggtactggcagcagcgctagtggggaatgggagcacatagaagaggcatttgactcagctttggaaagaattggaaaaggctttaaagtagagtaaaagtttgccagaaagaataatcattattacagcttttttaaagcgtcttctacatgccaagcactgtgctaaaatctccctatatatattgttttattttaatcctcacaactctaagaggtcactactgtaattattccaacttcacaaatgaagaaagtgagatttagcaaggtcgccttggtggggcatggctgctcacacctataatcccaggatttgggaagccgaggcaggaggatcacttgagtttaggggtttgaggccagcttgggcaacatagtgagtcctctgtctctacaaaaagaaaaaaaaatagctggatatggtagcatgcacttgtggacctagctacttgggaggctgaggtgggaggatggcttgagcccgggaggttgaggctgcagtgagctgtgatcatgccattacactctagtctgggtgacagagcgagaccctgtctcaaataaataaataaataggctgggcacgtgactcaggcctgtaatcccagcactttgggaggccaaggcaggtgtatcgcttgaggtcaggcattcaagaccatcctgaccaaaatggtgaaaccccatctctactaaaaatacaaaaattagctgggcatggtggcacatgcctg

SEQ ID NO: 19713 - DNA, 1012 bp, Homo sapiens
tgcttttctggaattgatttgactccaagggtctttgtgttaaaataatttcctatatcaaatagggttcttggttgtgcctgactctgactaacttaaggggggtagggagtggaacttattggaaagatacagagcgagaaagagtctttttaaaaaaatgctgtaataatagggacgagaaccagggtagctctggggaaggaagtcacagaagttaaaggttggttcttcaggatgtcattatcaggatgtttcagctctgactcctttctgcccttattcacacacccagctagagttcgagttacccgccataccatggcacacagagaacaagacatcatgcctgacaattcccctaaagcttcaagcaaaaagtaaggggcaatctctaaagcaaaatcaaggtaatgctacatggagaaagggaaatagatctggcactctgacagcatttgtttttgcttgaccaggttctactgaggcaggtaatacaagctgggcatgtgaataagggcagaaaaaagcaggagctgatataacctgagagcagtctttctccaagaatgttcaactaaattatttcttttctttcttcttcttcttctttttttttttgtttttgagacagagtcttgctctgtcacccaggctggattgtaatggcatgatcttagctcactgcaacctctgcctcccaggttcaagcaattctcctgcctcagcctctcaagtagctgggattacaggcatgtgccaccacatccacctaagttttgtattttagtagtgacggggttttactatgttggccaggctagtctcgaactcctggcctgaagtgatccacccatctcagcctcccaaagtgctggaattataggcatgagccaccaagccaggcccaggctaaattatttcaatttaatgtactggaggtttgaaaattaatacttaaaaagaaacttgtctaatgtttcagagtttcagtttggaacgataaaaacgt

SEQ ID NO: 19714 - DNA, 1067 bp, Homo sapiens
cacccagctaatttttttgtatttttagtagaggcagggttttaccatgttggctaggctggtcttgaactcctgacctgaggtgatccgcccgcttcagcctcccaaagtgctgggatcacaggcttgaaccaccgtgcctggccctatttttgtatttttactatagacggggttttgccatgttggccaggctggcctcaaacacctgcctcagcctcccaaagtgctgggattacagatgcaagccactgcacctggccttaagtctgcttttaaaaaatgttttggctgggtgcggtggctcatgcctataattcaagctttttggggggctgaggtgggaggatcacttgggcctcagagtttgagaccagcctgggcaacagagtgagaccccatctctacaaaaagtaaaaaaaacaaataaaaaaaaaatcagccagtgtgcattggttgaaagtaaagaaaagaaaaaaaacagacaaattagccaagtgtggtagtatatgctacttgggaggctgagtcaggattgcttgagcccaggaaattaaggctgcagtgaggcatgattgcaccactgcactctggcctgggtgagaccctgtctcaaaaaaaatttttttttttaatatggagaaagtatttttgtttttcgttttttatttgggtaccggccactgcacccaaccaaacattttgtccttaaacaaaagtttaagtcatataatacagtagtaagaatgccttattttttacatctttgttctttaaattactcagattgctatggggcatttttgttgtagctttcaaatttggtattctggggttctatgtagactctatattgttgcattctaacgacatacttttaaggataagcagcgtattaattaaaaatgtgttttccacttgtgttccttaggtctgcgtatattttggaggtgtgtgtgtatataagtcaagggacaggaggtatcggaaggctctaaaggaagtttaaggaggagaatattctatagaagtggaaggggagatttgtggtcagcttaaactgttaa

SEQ ID NO: 19715 - DNA, 1069 bp, Homo sapiens
aacaagttagaaaaccacaattggatgaactttaaaaatcaatactaaaaaaaatattggagagctatggatgtaatgaggactagatgaattagaattccagaaatagaagagatctttataggtgagcagaggattgctgacatttgctgattctggacacacactgaaggaaaaggaaactagagaggaagtgcattttactaaaactgcaacatatccctggcccagttcaattcctgattggactgaggtgatcagcctatcttatcccttttgcctaatagaggaaatagacagctcttactgaggagatatattctggggtttctatggttctttcgtttataatactatcatactattaactattctagagatgtgaaagggtggaaaaattcaagagaaaaataaaacttatagaagcagactcagaaaattgaagttcatcagacaaagacttattttaaaataactataatatacttaagaaaataaaggaaaatacggagaaaatggatgaaaattttcatagagaattggaatccacagaaagaaaccaaatgaacattctaggaatcaaaaacacaacgttggttgcttaaggtctttatttgtagtttaattagaaactttggcgcaggactctaggacactccacctccccctcattctttactgttcttaaaaaacaaaaacaaaaacaaaaaaaacccaggtaaatttaatgtatactatttaagttccacgagagcagggcctatgtctgttttgttcgttgttgtactcccagggcttagtatagtgcatgccacattaaaaaacaaaacaagacagaacaaaatcttccttaacaccaccatcacaaacccccccattaataattaattgacattaatctgaaattaattattcattgtaccggttcagtagcagactatacacagcagaaggcaagactagagagcttgtggacagatcaatagaaaatatctagataaaagcacagaaaaaaaaaaaagaatggaaagagtagaacagagcctctgagacatgtggaacattagta

SEQ ID NO: 19716 - DNA, 1049 bp, Homo sapiens
ttctagctatggggaaaacaatattgtatattgctcattgatccactgtaactgagtgagtcttcagtagtccattctgttagaccagctgcttctgggtgatggagtatgtggtaagaccagtgatttccaagttccataacccattcctgcataaccctttttctgtgaaatgagtaccttgatcaaagtcttgttgagtagtataccttgatgatgaacaaggtgtcgcccatgtccttgatggtgatgctggcagaagcactgtaggcagggaatgcatattcatattcagaatatgttggtgccagtgaggacaaattcttgtcccctccatgtatgtagagtttttgttttgttttctttttttaaggtatggtattatccactgtcattaatattttggagcattttacttccacattaaaaaagatcaaaataggtaataattatctgaccaagaaatgttttaaataaattgtagacttatgacagctatatcatctatctaaaaaccttggagtaactgtaaaatagtgacttttgaactgtagactttactcatgcagatatctcactaattttgttgaaatctaccagatagaaatccattgttatgggttgtatggttgaaaactttttaggctgtcatttgtttcaagatacagattgactcggtatactttaacatttctcatagttggccaaatttaggtaaaactatttaatttcattgaacgttttagggaaaatgcctgaatattaatagagataggatgaattaaattaaagaacttaccctttgaaaaattgccagggttagcaatttttatgctaaccctgcataaaaattgtgcgtggtggtgtgtggagtggtgtatatgtttcagagaaataatataaatgttcagataagagtatctgcgtaatctaactaggacctgtctaacctacctgcttaaggatagaggaaatcttgagagacttgaaattgaagaacttaaaattttaagtcttccctttcaaggccctatcaaaacatcatgacc

SEQ ID NO: 19717 - DNA, 1035 bp, Homo sapiens
gagacagggtctcactcttgtcgcccaggctggagtgcagtggtgcgaactcggctcactgcaagctccgcctcccaggtttatgccattctcctgccttagcctcctgagtagctgggactacaggtgcctgccaccatgcgggctaatttttttttgtatttttagtacaggcggtgtttcactgtgttagccaggatggtctcgatctcctggcctcatgatctgtccgccttggcctcccaaagtgctgggattatatgcgtgagccaccgtgcctggccttgaatttttatttgacttaaaacatactgtgaaacttgtaagattatgtgaatcatgtttgtacagtttatacttaaaaaaaaaaaaacatggtgaactcttatcaattcacagagtaaaaaacaacattcccaatgctgtggaaacacctctatggcccaaatcacagttcttttcttaccattccccctaccactatcttgaattgtattttaaaatttcctttcttttctttatgtctccatgaacaatgtattgctttgtttacttattttgattttcatgtaatggaataatactgtaagtattctgatttcttttgtaagcatcatttttcttttgagcgttaatctatggtattgtatgcagttcattcagttttactgctatacattagttcattatttgtatatattgtatatatatatatatctgggctattgatgcacatttggattgtttctagttttttgctattactaagaatgctgcttacgaacattgttattcatgtcttttgtgcacatgcaggaatttgaagtatatgtctgggagcagaatttttcattttatggggtatgggtttgtttagctttactaagtaatgccaaatttttctaatttttaaaaatttttaattaattttttttttgagatggagtttctctcttctcccccaggctggagtgtaatggcacgatctggactcactgcaacctctgcctcctgggttcaagcgattctcctgcc

SEQ ID NO: 19718 - DNA, 1910 bp, Homo sapiens
ggtgacaagagtgagactccgtctcaaaaaaaaaaaaaggaatgttgaatatagacctccaatctcttctgacttgtatagtttctactgagaggtccattgttagtctgatgggctttcctttataggtgacatgtcctttctctctagccacctttaacatttttttctttcatttctgccttgaagaatctgatgattctgttttttggagattatctttttgtgaaatattttgtgggagttctctttatttcctgaatttgaatgttgacttctctagctaggttggggaagttctcatgaatgatatcctgaaatatgttttccaagttgctgcctttctccccatatctttcagggataccagtgaatcatatatttagtctctttatataatttcatatttcttgggggttttgtttgttccttttcattcttttgtctttattcttgtctgtcttcttatttcagaaagccaatcttcaagcgctgagattcttttctcagcttggtctgttctactgttaatacttgcgattgcattatgaaattttttttttttttttttttgagacagagtagtgacacgatctcagctcactgcaacctctgcttcctgggttcaagcgattctcctgcctcagcctcctgagttgctgggattgcaggtgcctgccactacacccatctgattttttgtatttttcgtagagacggggtttcaccatgttgaccaggctggtcttgaacccctgacctcatgattcgcctgtcttggcctcccaaaatgttgagattacaggtgtgagccactgcgcccggccatgaaattcttatagagtgttttttagctgtatgaggtcgtttatattcttttctatactggctattttgtctgtcagctctgtatcgttttattgtgggtagcttccttacattgggtttcaacattctcctgaatctcaatgattttcattcctatccatattctgaattctgtttctgtcatttcaaccatctcagtccagttcagaacccttgccggagagctagtgcagtcgtttgttttagaggaaagaagatgctctggctttttgagtcatcagagttcttgtgttggtgctttgtcatctttgtgggctgatgttccttcagtctttgaagtcgctgtttttttttgtttttttttttttatcctatatgatgaccttggatgtttgtggtacaaggtaggttcagttaactggcttcattactggaggggccagggctcatctcaggactcccggagtacatgggtcctccaactctgggggactggcattgggccccagctttgttctctggttctttaaggttaggaacctgctgcactggaggggccgaggtgctcctggacctctggtcacaatactcccgtgggttgtgccagccaaagtgtagggggtggcagtggaatcaattcttgttcgcatgtgccagtagcagtggcagcaaggccacagggtgctggcctccatgtgggcattggcagcaacagtggcagtaaggccagggcggggggctgctggtacacatgcactggtggtggtgttagcacaggggcagggtgctggtgggtgcaggactgggtgtgccctctgtgcacgttcatgctggcttcagtggccggtaaggggtgggggtgggtcctctgttttctctgcctagtttcatgttggtgcaggggctcagtgctggtggggatggcactggtgggctctgtacctgccagtgctcccttgacaatggccatggagggataggcagggtgtactcacgctggctgcagtggcatgggagggtgcttgcacgcatgtgtgctggcggggaagggaaaacaaggtacacctgtgcacacgtgtggg

SEQ ID NO: 19719 - DNA, 1048 bp, Homo sapiens
tgtaatcccagcactttgggaggccgaggtgggtggattacctgaggtcaggagttcaagaccagcctgaccaacatggtgaaaccccgtctctactaaaaatacaaaaaaattagccaggcaatggtggtgcatgcctttaatcccagctactagggaggctgaggcaggggaatcgcttcaaccttggaagcagaggttatggtgagctgagattacgccactgcactccagcctgggtgacagagcaaggctctgtctcaaaaaaaaaataaataaataaataaaaatacagtgatgctccacataatgacattttggtcagtgatggactgcatatgtaatgggagtccctcagtattataatatggtatcattaccttttctatgtttagatacacaaacaccatgtgttcaagttgccaagagtattcagtacaataacatgctgtacagttttgtaccctgtataccatatagcctagaggtgtggcaggctatactatctaggattgtataagtacactctgtgatgttcacatgacagtggaatcatgtaaggacacatttctcagaacataccccatcactaaatatatttaatgattcctattaatgtggatgtctttccaattattctggtcatctgaagcatattctctagtatatcctccaggaaaaggaaaagggaacaaaatttccagggttcttgccgtttagcacagtttgtcattgctataaaattgtctctcagtatctgggacattggttccaggaacctccatggacggtgaaatctgtagatgctcaagtccctgatatgaaatggtgtggtatttgcatatagcctacacacatcctcctgtgtactttaaatcatcccttgattactgataatacttaatacaatgtaatactatataaatagttgttatacactattatttagggaataatgacgaaaagtctgtacctgttcagtacagacatactaaaatttattttttgatctgcagtttgttgaatgcatagatggagaactcatgga

SEQ ID NO: 19720 - DNA, 1067 bp, Homo sapiens
tcccccctccccctaccccacgacaggccccggtgtgtgatgttccccttcctgtgtggtttatgttttctttaaatatcttaaatttattttactttattgttttctgacataaaattttgtcaaagtctgatgagagtctaatttttgggttttttttgtataaataatgtcctctttctgcctgtaagttcaaaagattttttttttcttgttcacggaagttcaaaatatgttaaggtattggtcattctgggtcacttttccaggtgtgtggtatgcacattaaagatacagtttcaagtttttaaaaatttcaataataatttcagcaaagttttcttgaattctagtttctaatatccactttattccattggtttggtttctttctttggtgactcctgttatatgtatgttgaatcttctttttctatctttttttgtcactttattgtaaatttttattatctcgtatgtaatttcttttttatattacaactttcctccttagtccccccttttttttcaacatttgtttactcttaaagcattatcttctgtgttaatttactcttatgtatcttctggttagttttcatttctgaaatgatttatcttctaattctttcttgagttctgtcaacttatttctatctgtaattcttatttgtgttattccacatcttttgtcattttcttaatttctcttggctcactttgaaataataatttacagttttcatctgttggtggatatgtctttttggaaactttgattttctgttgtttagacccttatttttatgtttttctgtttcttactcctttttcttaataataactttacatattatttgaccatagaacttttctgttggcttatttttatgtgaaattaatttttctgaattggtaggagggatttgtaggccaggatagctttgtagctttatgtctctagagcttattctttttttactttcatgaaataaaaaaaaaatggtctcattctttcagagatctcttgttcatctctctctttttcatttttatttggacctttt

SEQ ID NO: 19721 - DNA, 1019 bp, Homo sapiens
agtctactactccatagcggaggtaaagaagagtatgcatggagatccattagggcgtcttttagtattaccatgtattgccatgccctgtgattaaggtaaatgggaaactacaacagccccatccaggcaggactacaaatgacccagacccttcaggaatgaaggtttgggtcactctaccaggaaaaaaaccaccacctgctgaggtgcttgctgaaggcaaagggaatacagaatggctagtagaagaaggtagtcatcaataccagctacgactgcatgaccagctgcagaaacaactgtaattgtcatgagtatttcctcctccttttgttaaaaacatgtttgtgcatgtatacacctgtactaagaaaatatcttcattttatttcctttttcttttatcatatgacttaagatttattgacttcacatcagcattttaagtattgttaacttttagtatttgggttgggataggtgtgtttctggttgtacgaaggataattgtattatgttaggcataattatgactttattgtctttatttaaagattatgtatgatctcaggagatatgtatgggttcaagttgacaaggggtggacttgtgatggttaatactaagtgtcaacttgattggattgaaggatacaaagtattgatcctgggtgtgcctgtgagggtgttgccaaaggagattgacatttgagtcagtgggctgggaaaggcagacccacccttaatctggctggctaccatctaatcagctgccagtgtggctagaatataagcaggcagaaaaatgtgaaaaagagagatgggcctagcctcccagcctccatcttcctcctgtgctggttgcttcctgccctccagcgtcggtcttcaagttcttcagttttggaacttggactggctctccttgctcctcaccctgcagacagcctattgtgggacctcgtgatcgtgtaagttaatgcttaataaactcccctttgtataagtatctattcc

SEQ ID NO: 19722 - DNA, 1031 bp, Homo sapiens
caaagtgctgggattacaggcatgagccactgcatctggccgtgtcaccactttcatatctgactttagtaatttggtgttctttctctctgtctctcttttatttatttatttttttgttaacctatctagctagagttttgttgactttttcaaagaatcagcttctggttttgtaatttttctccattgtttttctgttctctcttttcactctaatttttattattttctttcttctgctagctttggtgtagtttactctttttctagttccttgaggtatatggttaggttattgaatgagaactttcttattttttgatgtcagtgtttacaggtttacatttttcttttagctctgcattcactgcatcctataagttttagtatgttgtgttttcgttttcatttatctcacgttggtttctaatttcctttgtgattttttcctttgatctattagttaacattcacaaattttcacatatttgtgaattttttagtttttttatctgctgttggtttttcatttccattatgatcacaaaacatactttgtatgatttcagtttctttaaatgtattaagacttattttgtagcctaacataggtctgttttggagaatgttccatgtacacttgagaagaatatattgtgctggtgttgggtgagtttagtttttgacatgttacatttgagcattcatttaggagaaaagccaaaggaagacatttgttaatgaactgtaaagaggggttgacatcacaagaataggtaattttttttgagaaacaaatttagagcaacagaacagccttgaatatattcttatttagaaggctgaaggttgaatataacctggagtgttagaaaagggtggaacagtttatcatagaccagagccaagaaagtataatatttagactttaaatatcaaaaagaagatatggtcagctgaattcaaagttgaaggctaggtgtggtggctcatgcctgtaattctagcactttgggaggctgaggcag

SEQ ID NO: 19723 - DNA, 1029 bp, Homo sapiens
aagcatgcctggagtggtgcttcatgcatgcctcagtgtacttggtgaaagtggctgtgcatcctcttctactctaatgagcactgcatgtgtggagggtggagtgtgtctgtatcagagatcaagttatatgaaaatctgtttttataaagaaaaaaactacattgaataatttttaaacattaagtatcagtaacttttcaatgaaatagcttgaaaaggaacataaatattagttcaaagtatctttttaaattatgctttgggtagtgatactttattattatagatagtgtgggaaattgtttctcgttaggatattttcccccttggtttgaggctaatcgctattgaatctgaagtactcttttggttgaaaaggactatttataaagtgaatatagaaatttatgagattgactattttagagtttcatttgaagacatttattatggcaatatttttgtcttgaaaaatcacatgaaattattcttagatatttggacttctgatcttaaattcattcgtagtgtaaattttttttctaatgattcttggttcaatgtacctcataagttctcttctcccatggttctttagccagtccacacattttttttaaagcatcacattctcaaataagataaaagttttagtgatgtgtattgagggtttgtgtagaagtagtaaggtgtttggagttctacttttgtgaaacatactcatactcagttcataagtactgagtttagatctaaaatattctagtgtttcttcttagaaaatctaaaatatatccactatttgattcttattataatgcaggttcctagcagttactaaaatagtagttgtactgtcatcttttttattatgatgtgccataagagatgaattaatagttgtaagatctatgttatatgcataatcttcatagacttcctttaggttaaattagatatgtaattgggaaatttaaaaagtaatatacacacttatgaaccaattatcttagccatcactggtac

SEQ ID NO: 19724 - DNA, 1029 bp, Homo sapiens
ctaatcatcgagaaaagatgtctcacatgcacatgctcataaagtgggcaatttgtctcatgctcactattatgttttataatataatatgtatgagttagtgtttgaattaaagacgttgtttgaagactttggaaatcatggtgtgtgtttgcatggtcttagaaagttcccgacaaaaggataaaacttaaaactacagtgataaacagagcatacaactcacgtaattttgtactttttcttcctattggtctttgtttttctctagtccgcattggattggtggcctaagattgatgctgtgtattgtcactcggttgaacttcgaaatatgtttggtgaaacacttcataaagcagtgcaaggttgtggagcacacccagcaatacgaatggcaccggtaagataaatcacgaattttgaatctcacctcctttctattgcattttttttagtgtctttatcctattcctgctgctttggttattttagagaattgaatgggtccttcatttcctctaaatgttgtggtatgttgtatctagaatattgttgaatactagattatgtttgttttccactgtttccatgagttgaacttaacttttcttagataaattttctcacaaaacactgaaagtcttaatgaatgtcaccttttttttctgtttttaaagttttttttctccttaaaacttttgaacaaaaatattttgattagcctctcacgttttggggatgagtaagggaagctgactcctgggttagagtgaatgttgctgccaatgcacattttagctaattgaatggtgactattaaacataggaaatgaataaaatttagagtttttgtatttaaaataaaaatattttgtatttcaacaaatatgccttgaggttttacaactgataggaactttgatactgacatttgactctaaacttaataaaaagcagacttaaaattgggtattctcacagattattactcttaatatggaattttaaaactcctatggaatcaat

SEQ ID NO: 19725 - DNA, 1050 bp, Homo sapiens
gtctaatgaagaactcaacaccggacacggtggctaacgtctgtaatcccagcactttgggaggccaaggtgtgcggatcacctgaggtcaggaggtcgagaccagcctggccaacatggtgataccctatatctactaaaaatacaaaaattagccaggcgtggtggtgcatccctgtaattccagctactcaggaggctgaggcagaagaatcgcttgaacctgggaggcagaggttgcagtgaactgagatggcgccattgcaccccagtgtggacaacaagagcgagaatcggtctcaaaaaaaaaatcaaacaaaaaaactcactacaggtggcatggagtctggcaacacaggcaaatatatataataaatggtttacagataatacctaacatcagagtttcctactgttggcactattaacattttggactggataactctgttatagggggctgtactgcgcattgtgggatattcagcagcatctctggcctctacccactagatgccaatattccctttaccccccagccctccaagtcatgaaaaccaaacatgtctccaaacatttccagatgccccttgggggacaaaatcacccccagttgagaactactgtattacagagtatgttcagtgggttgtccctcatttgtattgcctcaaatgatttgggactgataaacctgagccattagcttgcttcagaagtagcaatctaggagttctgttgcaaaacagtaaaagtaaaataatatctgcttcaaggctttactaacactttgtattttggagagacaagttacttgttggaaggagctaattatttgaaaattttctcttcgaccaagatagaatcatgtctctgtcacttacagccatcactgatcctctttctgttggagctctatagaatacttctgattcttccacaaggtggccctgcagatatttgaataaggttattctgtactcctagaattcgttttatttttatatcgttttggcattggaagggattttattcttttagctctctctc

SEQ ID NO: 19726 - DNA, 1032 bp, Homo sapiens
ataaaaaatctgagtcttagtaatttaggaggaatgtaggaataattattaaatggtctcaatcatggtatttttaaagtaatatgattttgtcttccattttagtactctcaatttctcaagcctcctaattactcagcttgcatcgtttcttagatccccctgatcatttctccacactgaagttatggcagtctctttaaaaagcaaatcttattatgccccctctcagcttgaacccttttagttgaaattgctcttgcttatgaagaccaaactccaaatagatctacagggtcgtgcaaaatctttctcccatctaccatttcttccacatgtagcattacattttttgtcttcctttactctattcatgatggtcttcctttcagtctttctaaccacatgccttcatacctcccttgcagttgcttttccctctgcctagaatctgcttactcttaacatagtaattcctactcattctaagctattgtcactgcactaaggaagcctccctgagtcggacacttttccatgttataggctgtcatagcagcatgtaccttaataatagctcttatgtgatttgcatttttatacttgttgatctgattatttcattgatgatatcttcccccatgagactacatgctcatggaggatgggaaacacatcttctctttttcattgttgtgtctttggcattcaataaaaatgatttggttttggatgaatttatatgaatgtcagaaaataagctaacggttttgaattacagatatattgcagtgagggcttaccttagtcattataatggggaaaaatctatagttagcaaaataaaatatgggacacaagttgcattggcttcatatattcttcttttttttttttctgagacagagtctcactatattgcccaggctagagtgcagtggtgtgatctcagctctctgcaacctccgcctcctgggttgaagtgattctcctgcctcagcctcccaggtagctgagattacaagcacccgc

SEQ ID NO: 19727 - DNA, 1027 bp, Homo sapiens
gttccgaattcatcatttagctttatatgtacatgccagttagagtcagaatgatgggaataaaatgatttcattctgtctgtattattccctagaggtttgtgttcaccagagtttctctctttttaccttttactatatattgaaactacaaatgaaagagctcaatttcttagcatttataaaataagtactccagtgttatgtttaccaaaaatgtttgagtgagtcttctctttgtctttctcttttttaaaaaattcaggctctgctggttcttcatcagttagatagcattgatttgtggaatcctgatgctcctgtagaaacattttgggagattaggtatatgtacttttattttttaaattcaacttttaaattttattttgtatttttgtcttgaaatattaactctgtagtacttagtacattgtaaaacttacacttccaaaggttttatggttttgtattttatttgacttcaaattattagaatttcttgttttaactgtaagaaaagtatcacagcaatttagaaaataaattttaagaatagtgctaaattttgtcaccctaacataagtactgttgtttggtatattacttttttcagatttcaatgtggttactactgtatttttaatagattttcatagttataagcctagaatgataaaattttgtaacaatactgttttttcagttttttgaactatgatctttcataaactttctgtaataccaatgctttcgatgaatgaattaataatggacacctgcttagaagaaaaaaatgtatgcagaattttgtggtctgcttcctagattatacaaatcattacattttaatgagcatgaagtcaccacacggaggaaaatgtaaatgtgtaaacctcaagtttgccattatcttataagaatgggtgtgctaagttacttggcagctgaattaaaccttactctagagtagtgctgtccactagtaatataatgagaaccccatatgttaaaaacttttttactt

SEQ ID NO: 19728 - DNA, 1035 bp, Homo sapiens
ttttctctaaaaggccagatagtaaatattttagggcttgtgggtcatatagtttctgtcataaccattcagttctgcctttggagcatgaaagtggccacagacatgtgaatgaacgggcatggctgtgtttaactaaaactgtatatttacaatagcaagtgataggctaggtttggcctgtggatggtagcttgcagacccccactgtggagcactgggtttataggcagtctctgctgtgcatgtggtttattgtttcttcttatgtctactacaaggatgagatacatggatagaaacactgggagtttaatgaaacatagggggcttatagataaatacttgctttttttctataacctgtagacttatttcctttgattataatgctattgacactttgataactgtttctctaaaaccttacaagaaaaactaagcttctctaaacttgtattcattatgggagaatgccattcttatgtctggttatatctgcattaggttattgatgatgctagtaacaatgaactttatgttactgcagctcacaaatgcttttttacatctgcaagaaattaactagtcatcaaatgcttagtagcacagaaattctcaagtggttgcgggaaatattgatctgcaggaataaatttcttcttaaaaataaggtaagcaaaatgacatatttaaaaaatggaagaatatttggaatggtaatggtgagagattactaaagtgttttatagccaaattaggttctatttcagcttctccttcctcccaatgttctcaaaaggaaatatgtatgcagaggacaatgactggcaaatcagcattttaaaaattattctgaggctttggccttagaaccacactgttgatgaattctagttctagttgagttaaataggtctctatggggcaggcctaggaaaagtgggggctgctataaccagagtagcttgaggagcatattgtatctttactcttaagttcatacataagacataattcatacataaaatttat

SEQ ID NO: 19729 - DNA, 1061 bp, Homo sapiens
gcccaccaccatgcctggctaatttttgtatttttagtagagacagggtttcacaatattggccaggctagtcttgacctcctgacttcaggcgagccgcctgtcttggcctcccaaagtgctgtgattacaggcgtcagccaccgtgcccggcctatcgtttctttatgttacatacaatccaattatactcttttagtgatttttaaatgtacaataagttcttgttgactgtagtcaccttgtgctatcagataaccagatctcatttatattcttttgtacacattaaccatccccggtctccccttccccaccccccactacacttcccagcctctgggtaactatcattctactctctatctccatgagttcaattgttttaatttttttagcttccacaaataagagagcgcacgatgttgtatttctttgcctggcttatttcacttaacatcataaccttcagttccatccgtgttgttgcaaatgacaggaatctcatgttttgtgtctgaatagtactccgttgtgtatatgtaccacagtttctttatccattcttctgtggacagacacttaggttgcttccaaatgtaggctattgtgaatagtgctgcaacaaacatgggagtgccgatatgtcttcaatatactgatttccttttgtttcagtatatacctagtagtgagatttctggatcatatagtagttttatttttagttttttgaggaacctccaaatggtcctccatagtattatactaatttacattcctgccaatagtgtatgagggttcccttttctcacttttctccttgtcaccatttgttattgcccgtcttttggataaaagcaactttagggtgatgtgatatctcattgtagttttgatttgcatttctctgataatcagtgatgttgagcaccttttcatgtacctgtttgccatgtgtattttgtttgtgtgtttgtttgttttgagacacagtcttgctctgtcacacaggttggagtgtagtggcgtgatcttggctcactgcaacctctgcctcc

SEQ ID NO: 19730 - DNA, 1081 bp, Homo sapiens
cctcagcttttgtttgtctaggaaagtctttatttctccatatatgaaggatattttcactggatactgttctaaggtaaaagttttttttttttctttatcacttgaaatatgtcatgccactctctcctggcctctaaggtttccactgagaagtctggggccagacatattggagctccattgtatgttatttgtttctttcctcttgctgcttttaggatcctttctttatccttgacctttgggagtctgattattaaataccttgagttaatcttctttggtttaaatctgtttggtgttctgtaaccttcctggacttgaatattgataaatatctttccctaggtttcataagttctctttttttttttttttttttttttttttgagatggaggttcactcttgtcgcccaggctgcagtgcaatggtgcaacctctgctcactgcaccctccgcctctacctcctctttaaggccagtaactcttaaatttgctcttttgaggctgttttctagatcttgtaagcatgcttcattctttattcttgtctcctctgtgtattttcatataggctgccttcaagcttgctaattcttctgcttcatcaattttgcttttaagagactcttgatgcatatttcagtatgtcagctgcatttttcgtctccagaatttctctctggttctttgtaattgtttcaatctcttcgttaaatttatctgataggattccgaattccttctccacattatcatggatttccttgagcttcctcaaaacagctattttgactcctcggtctgagaggtcacatatcgctgtctctccaggattgatcactggtgccttctttaattccttcggtgggtcatgtttttctggatggtcttgatgcttatggatgttcattagtgcctgggcattgaagagttaggtatttttgtagtctttgtagtctgggcttgtttgtacccacccttctggggaaggctttccaagtatttgaaggcacttgggtgttgttatcttaagtctttggtcactgcagctatatctgctttaggggacact

SEQ ID NO: 19731 - DNA, 1029 bp, Homo sapiens
tgagtcagtttggatgaataatacattgagaattgttggaattgtctttgaaaaaaacttaaatattacttaggcaacagtttgaagtaagagaatactttaaaatactaaattttacttgcattgggagcaagtttaaaatgcagtgaatccattgggtatgatggatgtggctgaaatgaacatattatggatttttgttgttgtcatctattaacctaaattatttacagggtgtttcacagttgaggcgggtctcctccttgctttttgcattgtgaattgcttgatcatctgtgattttggtttcttcattaatgtataattagtttgtgtcaggttttcccaggatagactgattgttctgtttactttatgtagcatatttcttaaaagagatactgcatcatcattcagaccaaattattagaccttctaacactagcactgcaagtaatgcgtctgaactcagaaaatagccatagtcatggccttcttttttagggaattcggtctatgttcttttatgtcttctactgtgtttttgaattgcacattgcagttttaggaattatttattccaagggaggtcctgcaaatgcatattagccttttggaaactgtgattctggaagaaacattagtgggtctggaatttgggataggggtggatataagggaaatacacagttatcaaaacccatgtctttgtgtctctctctttgcagagtcatcgcagccatttgcttttttagcacacggcttcagttgcttagagacgttaacagcatcattgaaatcaccattttaaaagctgtttgaggctgctctatgtgaattttttcaccattgctatttttaaagatgtatctgttctatctgtaaaaaagcttttcacggtatacatagatgataaaacatacttaaccttgtctctcttaatttatcatgacttttctgcctttacaaaaaggctcaaggaaacttaggaaaatcctgtatagttttttcaactagttaagtctgagt

SEQ ID NO: 19732 - DNA, 1072 bp, Homo sapiens
ataccctatggttttcagttatgtgcttttgttttatttgtttatattacaaaggaattcattagttaggtacctgatggaccttattttcatgataaaacattttattatagcagatgtcttgtgttatgaagatcattttttgcgtaatcattctagacattctgaaacagactagaatgtagactataggattttttattttaaaagtcattaaacatttttaatatgtatttttacatgtaaatataataattatatttgggaaggttagaaacactacctaaaataatttatagaatgaggaatgtttgatttttaagtactagcagaaattatatcaatgagaaaattcatgtttttaaagaatgtcttaatgtatagacttcatacaataaataatctgattatttataaccctgttttattgtgtagatacttcagagtattgccaatcatgttctcttcacaaaagaagaacatatgcggcctttcaatgattttgtgaaaagcaactttgatgcagcacgcaggtaattttcttgccacttactcagttgctctgtttgaatcaaatattttcggtttcacataaatccatgtacctgttttacatgaagttcctgtgtaagtttttttcttttcctgctctaggtcaagacatagcttgtcttattttattttactataaaagacagtcatgaaataaattaatattttttataatttggtagtgattttcatatttgaaaaccaagagggatttttgacatgtctaattaaataaaggatttgaggatggtacaatatgtggacaaggaagaagtaggattctttttatttaaaactaaaaccaaattggtatcaataatacataacaatgtttaataaggtttttttgatgttagagtatttgtgatacttaaatttggaagtgtatctaaactaaaatgttattctttaaaccaagtcaaacaaacacataagattttgtttatgaggaactgaactttatgattttagaaaacttttctgctagatttctataactagttatttcactttatttctc

SEQ ID NO: 19733 - DNA, 1001 bp, Homo sapiens
ttaaacagtatcatctgcagaacatctgtcttctctggctcttaactctactttctttgtgtcggttttattcccaagcagctgctccctagctgtggctggtaatggtttgtgttctcccagcttaacaatcccagaggaaaaacacctctttcccagttttgtggtttcagcaaaagtggttggtcttactggcctggtgtgagtcacatgccattcctaaggcagtcactatggcaagggggatggaatttcttggttatctaggcctggatcatgtgccccttcctggaatgcagtggtaaagccagccctatccaaattgcatgaactaaaaggagggcatgggggcagggttttcacaaaggaaaattgaattgctgttactagaatgaggcaaaatggatactgggcaggcagaagtagcagaagtcctctacatccagctttaaaaaggcccagaaagatgactctgacacttaccttacaaggtacacgacagtgtgtgtgtgcacctgcacatgtgtatgtgtagactgagaaatgtatgaaagtatacatattaactgttcacattgcttatctcagaagtgtgattggaggagatagaggaccaatttaatatttctgttatctatctctatgttgtttggcttgccaggagcatatattgtttttgtaagaataattaaaaatataaaaccccaaagtggccgggcaaggtggctcacacctgtaatcccagcactttgggaggccaaggcggggaaatcacttgggctcaggagtttgagatcagcttgggcagcatggtgaaaccctgtcaccacggaagaatacaaaaatcagccgtacattgtggcatacacctgtagccccagctactcaggaggctgaggtgggaggatcacttgatcctgggaggtcaagactgcattgagccgagatcacaccactgtactccagcctgggcaacagagtgaggccttctctgaaagaat

SEQ ID NO: 19734 - DNA, 1025 bp, Homo sapiens
ctgatctactttctgtctctatggatttgcacagtttagatgtttcatataagtggaatcatacaatatgtgctcttttgtgactgccttcttttactttaatattttcaagattcatccatgttgtagcatgtatcagaactttatccctttttatagctgaataatattctattgtattcatacaatatataagcgtttgtgtggacgtatgcattcagtttttttagatacatatctaggagtggaattgagtcatatggtacctcagtgtttaactttagaggaactgccaaatgattttccaaagtagctgcattattttacattgctaccagcagtgaatgagagtttgaatttctgtacatcttcacccaacacttgatattgtctgtctttctagacaaattttgataaatccctccttttctaaaccatagccaagtctattactgtttaacaatgaccatcttggagtataaattttctgttcacactttgaactttaacttccgggtcttagatgtctttatctggatatacagagaatctaggttttgtatgtaattattcaatgatagtattaaaactaagtccggacgcagtggatcacgcctgtaatcccagcactttgggaggccgaggcgggcggatcacgaggtcaggagatcgagaccatcctggctaacacagtgaaatcccgtctctactaaaaatacaaaaacttagctggtcgtggtggcgggcacctgtagtcccagctactcgggaggctgaggcaggagaatggcgtgaacctgggaggcggagcttgcagtgagctgagatggcgccactgcactccagcctgggcgacagagtgagactccatctcaaaaaaacaaacaaaaaaaaacactaattaccagtttttttgtttttgtttttttgggacagggtctcactctgtcgcccaggctgaagtgcagtgacgcagtcacagctcactacagcctcagcctccctgggctcaagtgatccttcca

SEQ ID NO: 19735 - DNA, 1106 bp, Homo sapiens
ttccagacattactaaattcctctccattgattataccattttgcagtcccaccaacagtgtatcatggtgtcgagttctatacagcctcactgtatactttgttgttgaactttgggatttattgtccatctgataggcaagtatctccatctaattttaaatgcatctctgtaattatgagggggagtatatgtctttacatatgtttaaagaccatttaaatgttttctcctgtaactgtctttttaatgttttgcactattaaaagttgtgttttgggtcttccccttcctgccccatattaggagcattttaaattttagaggtattagcactttgtcttgatttaagttttaatttttttttccagtttgccatttgtcttttggctttattatggtgaggtgtgtgtgtctgtgtgtaatgcgcacttgcatgtgtgtgatatttaaaagtttcatataatttgatttccctttttattgcctctggattttgagtctcagctaggaaggttttttcccgcttccagattataaaggaatttactcatattttcttctattacttgtataatttcatggtttatatttagaactctggtccttggtgttccaatatagtgtgaagtatggatcaaattttttcttttttccagatgtctatccaattgttccaatgcttgtttccactgatttgatatttatttctggactttttcttctgttccattgatctgtttgtttagtcatataccggtaccacagtgttttagttataggttcccaaaggtgctactttactttttgatcagaattcagtaagaacaacagttaaagatcaccctcatctaattcatttgtgtccctcaccactgacaccaaatagaagacttatgtgatatatgtatgtttcagtgcatgatgtaggtgctctttggtcctatattagtgaaaagagtgttgaaccaatagtcagggagcaaactcagcttttaataccacttctaagcacatcacttactttctctggtcctgttttctcagtagttaacaaacaaaaggagttgaaccaaatggtcttcagggttgtgtctgactctgg

SEQ ID NO: 19736 - DNA, 1048 bp, Homo sapiens
tatatgtttaatagccaagatagtgagtggtgaattttaaatattcttttaaatatccttgtggtagaagctctctggtgagaaaatgtttgaccagtatgttgaatatgaaagtaatttcctatttttatgatgatattaatttcttttaattttctctgacacgtgtttatttatgacccttgattcaaggagtgctttgtgttactcctggatgtactggtgcacaatctcaaattttcaatttttgcacagaatgggaagtctgcccagtttcatttctaatctgggttatttttcccctcaaaagataacctgatttcagtcaccatgactggcatgaatattctcatgctttcctttttactttgttaacacttaactttatctggaataatattgttatgatttctcgtttagagaatagatttgttttttacaaattgctaataaattgataataaaaatgatgctttatttttttcctctcattttaataatagctagacgtttgaatttgatgaccaagagcagttatcaccttgagagttacgtaaaaattaccaatgcttagagttcaccccattccagttgcatcagaaggaagacatgggaattaggcattggtgttttttaaaaactcttcaggtgattctgacatgcagccagggtaagaatcactagcttagaagggagagtaagattgtagtcatacttgggaaaaaacatataaaaaatatttttaaaatggttactatattgcccgaaataaatgcccagtaagggatgagatttttgaaatgtggcctgatcttagccctgtgttaatttcagtagatatttggaaagtctctcaaaccaatttttgtaatatatttaattgaagatgggggggttctcaacttaaatgtaagtcattattttacttgaagccagtttctttaaaggttaaattataacctgaagtatgcagttttccagatttgaacacacacacacacacacacacacacacacacacacccctaataaatcattaggctacttg

SEQ ID NO: 19737 - DNA, 1040 bp, Homo sapiens
tctctatctatgcattaggaatttgacttccatttgatgttaaagcatatacttggctttaaggacacactaaaactattcaaagtttaattacattcagacaaagatcatctaaccactgttgctacatagggaatatttatttaattatcccttgctatctctattaatcagtttcctcaatttatccttaaaattttcctcaaatgcttagttattttattatttgctttttaaaatattcagtgtcaaaacaaaagtacacagtttaaataattaagcaggcatacttctccctgtctcacctgcttgattctaaattgcaaggtctaccatgtcaaattttagataatcagaacaacactttgggattaaataccaactgacttcatttttactccataagccttctcattgctactttgcatttttcttcactaacctatctgtttgttagtaagtttttcagttccttcttcatcttttctttcccttgtagctgtgagcactccagtagattgcatcactaggttgggtcctgtgagctgttttgttcttttccaagtgtctgattcagcgggccatagaccgcttgccagaaaatcgccattgcttctaggctgacgcttgcctacttgttttgatcgtctgagagaagagactttgtttgccaaaaccacagttgatagaaatagaaaggtacagataagaaaaagcactgcaattataattaagcaaattagcatagccatgttgttgttgttttccgcacagacatcctttttgaaaatttcaccatgacttttgcttgtgttttcaatgctctgtactgttgaaggactgttgctgacgacagaaggtatataaagctcctgttcagatttagaagttaaagctacgatgtgagatgtttcaggcatgtttgtagaattacctttataatctacttcaggagttatagggtttgtgttaatgttttcattttggtttctgcctgtcttgttttgaataactgaatcccaggaagaagtactgttagc

SEQ ID NO: 19738 - DNA, 1035 bp, Homo sapiens
aaataaacaaactgtatgacaaaatgagactttctcttgcccttacaaatgcctgagaattgaggactgtttttactccagtttatgccttggaggccaggttgtgttatcagaagttttcttatatctgatcattttcagtagaatttattttcagtagaatttgtaatgtccaagcattagtaatgagaaatttattttttaacttttgaaaaataacaaaacatttccagtttacttgaggaaaccaaacttagatccttcgtaatcctaatttaaaactccatggcgatggcaaattttttcatttctaacttaaaatttatgtaacaggacagaaaaaaaaagtatacattttcagtcacaattctagtttgttagtgagattcttacacactttgatagcatttcctcgaacactaatctgtcagacgttagaagtgaaaaggcataagaaaagccgtatatatatgacctaccttacaaaatgcttggtcaaaatctgattataacgtgattttgataaaccacttcttttcttgtcttctttttaaagcagaatagacttggagaatatgagccttaaagtaaatctgcagtaaaaaaggatatgtgcagctagttttccacttttaaaaccaaaccacagatgacacatttcctttccactgcaactaaagcacatgtcacaggagggaaaaaaaaaaaaacaacgaaaaagctccaacttctctagttggccactggcatgacaggaggctttgtagaaccaatccccgcctccagagcagggagggttttccacttaatgccttttgacagtatgctcattctataggcctgctacatgctttagtgtcattcaaaagaggttttgaaatggtatcttccatttcaaatcttctctaaaagacttatttgaaatctacagactgatttgaaaatgtgagtttggagtccatgggatactgatcagataatgtaacaattgtggaactgcagcaattatttgagaaaatatctagtaaacttaga

SEQ ID NO: 19739 - DNA, 1007 bp, Homo sapiens
aattgtatgttatgaaaaaattttggaactataaggaaaaatacgttttaaaacaacttcatttgtgttttctcctaggtcagctgcctataatcttctgtgtgccttaacttgtacctttaatttaaaaatcgagggccagttactagagacatcaggtttatgtatccctgccaacaacaccctctttattgtctctattagtaagacactggcagccaatgagccacacctcacgttagaatttttggaagagtgtatttctggatttagcaaatctagtaagtaatgataattttctttaatactaacaattattctaagagaattcaaagaaaaccctttcatttcagaattttccagtgaagactttcacttacatttttactttttttcctcttctgattttatatctgtggtatcctgtaactgaaggaactctgaaggaactttttggtaggccacattgagaaatccaccaaaattctgataataaaagcaaagcggcaagagtttggtactttacacacctctggaccacttacaaagtattttcttcactgttgcagtttaattagcttcagcatttctcttcatagcagaaaagtccacataagtatccatgttgcctccttaattttagagaactagtcattttctcttttctttaggttgactttgaacaatgaatttattgtaaatgtacagttcacggagagcacagtggcacataatacagggcccagagtcagttctgactttgttttaactaagtcttataaatttaatatccactctttatatttgtccatctttatatcctatagttttataaatgttgatcttctcccagcatatttcctgaccttttcttccctttcctttccctgtaatatataaaacttttttttctgcattcaaacacatttcttgacttttatatattagataattaaaagcttcagcaattcactaagactctttgtcaggtaagagatgtaggacta

SEQ ID NO: 19740 - DNA, 1046 bp, Homo sapiens
tctaaaagacgtttaaatttgaggtcaatgaaatatcttatatgttacttattaagcctttaaaatgtattttgattatttattgtaattctttgaagaagtcttctctaaagaagctgtctttatatgtaaactctgattacttcattaaggaagatgtctttaaaataaaatatgttgcctcttttgctaagcaggtacacttagtattttaccagttttcaaagcatttaattatatggtaagactatagccttgcataaaattatttaatttgtaattactataataatgtctgactcttataatgtagaaatgtcaaaaaataagaaaacaaatgtacattaagctagctaccaagatcaccatagcatgagaaatcattctagcatttattaaataagtaaatgttcctgaattcattccgagattcagtttaggagttaatgttttatttcaatgaaagtaaaataaaaaattctgttttcctaaaaggcacttgagagttgcttaaaaggacctgacacttacaacagtcaagttctgatagaagctacagtaatagcactaaccaaattacagccacttcttaataaggtaattactgtatagaaaatgagtgcattcattttgggtatcagtgttgaatgttactttctttcaaagagtttagaaaataagatgaattgagaataagttataaagaaaaaactatagttaaagtagaacctcttaaagtttagttgtttgaagtagtcatattagaagaagagtaagtatggatagtatgttctcaagcgcttgtaagtttttggtctcatcagtgctaaaggaaagataggtatatattcttaattattttatcttataactattaattatctgctattgccaagtactgttttaggcgctagagatagagtactaacaaagcccataaaactcactgccttcatggagcttactttctggggtgggtgtggaggttggggagtgaatggataatgaagtaaacaaaatacgtagtatgttagtgattattacta

SEQ ID NO: 19741 - DNA, 1034 bp, Homo sapiens
atacatatattacatacacacatatatatgtaatgtatgtgtatatatatatataaagtgtgtgtgtgtgtgtgtgtgtgtgtacacacataaaatatgtaaaatccaactccaattaaggttaataaatgttaggaggggtgctaatggggtgtgtgtgtgtgtgtgcacgtgtgcatgtgtgtgtgtatatatatatgaacatgggcaaattacttcttagttcctttctaatttgtaaaatggagatctaattggggttggattttagttcatagagaatagaggagagaataaaatagtatgaaattacgtcccttttgtctttggataaaaatgggaagggtctaggagaaaagaggggaatgtttttaaaagaatgtgtatatacagtgagatttgcttgaagtgaaattaactgaactgtgggtacaaagaacaggattatggttttaagtgtaaaaagatacttggtctaaacattattagttcagtctaccagatgtagtgtgaacctggaacagatatgggtctgaaaaatatagaagcaaaattttagaggtaagaggtcttatggagtttattaatcagacctccattttgcaaattagaaaggaactaagaagttaagtaacttgcccatgcttgtacatctgttttgggactagaacccctctgtcctaattctcattgccgtttttctaaaactgttttgggacagtggtggtcagcgatatctagttgttggctatttatatgttaagaatatttgcaaattggccgggtgcaatggcgcatgtttgtaattccagcactctgggaggccgagttgggaggatcacttgaggttaggagttcgagaccagcctggccaacatggtgacaccctgtctctactaaaaatacaaaaattagccagggtggcacatgtttgtaactccagcgacctgggaggctgaggtgggaagatctcttgaacccaggaggttgcagtgagccaaggtggtgccactgcactccagcctgggcgacag

SEQ ID NO: 19742 - DNA, 1575 bp, Homo sapiens
ccaggactatattagccccaagacctcacacatatgcacacagcttagggtggggctgcctctgaatggggcactgcactctgcttatattaagtttctggccaccgaaacctccagggatctgttttagaaacctctgccaagccagggattctccacccttcggggagggtcagtgatttttttcttttaaaagcatactctgagattactacagaagcggtggatatgcattgcagaaaactggaaatagggacaagcaaaataaaaagtattgtgtcctatctctcaggcagcgcctcaatgacacttctgtcagacctttccagagctgtttccatgcttatatgtcaattttctccagaaaatgagatcatactgtgcatactgttttgtaacctgattttttttgccggtaaatgatcatgacttttctgcttcaataaattttcatctggtttaatatgcagacctttttcagatttccctatttgaccccaaaatgtccatttttgctgtttcctctccaggactgtgcagtgtatgtggttgttgtcaccttttagtctctcttactgtacacaattcctttttcttttcttttcttttcttttttcttttaacaatcctggcttgtggaagcattcgggcctgttgtctgtcagtaatttctggaatctaagcctgtttcttggcccttattcccatttaatttcgtcttgttcatttcatcacattgtatctgtcaagaaagagaatctagcatcctacctctatcactctcagctgtgctgctgcctgcgggctggagaagcagtgcttggtgtgtctgaatccacaaggctggttaaacattgcagggcaggaccatggacagggccccgaggcacttgtaggggtggttttcggcttatgctgtattgaccgagacccgtggaaatatattttgcatctctactcactacccatcttatcccctgatgcattaaaaaatcggagtgttgttttccagcggtggggtggcggggggcggggggggggggctcccttacgaaatgcagtgtactctgactgtttctattttatttgttttaaaatcaggcagtgacattgatttcccagccacttgtgctctgggatggataatgatcattcattagatatgtagttcagtgaacttagagctgattgtccacagtttaccacctacccccagaataccagggataccaggatcaaatgctttgcaaaaaccaaaatatactaggtcataaagtatgaaataaatatccatgaggccataatgaaatatatatatgtataaattattgaacagatgataataaataaataggaaaatctctcgtatagaagaaatctgaataacgtatgttgataattgccccattgaggaagtgaagcataacgtcccaccgtgtaagcatgagatgtgcgtagtggcttccttataaagggtagagtttggaaagtggggggaacagcaactgtatagtggagaaacccaacaaacactgtctcagaaggtgatcaaggacaacatcgatagtgacagat

SEQ ID NO: 19743 - DNA, 1026 bp, Homo sapiens
ccagttcctccaaggatgcaggtggagccaccttgtagtggtggcagattatatgaggggaccctgatgtggttcaaggggacaaccttggattgggcttagattccagctttatggctcgccagctgtgtggccttggcaaagtagagcgacctctctgagcctcgggattttcctcccaccacatatgaatcgtggctccacagttgtcatggctgtgtgcaaggcaacattccctgtttctcttgctgggtatcatctaaggtctgccccgttccatctgggttaagagggaaaatgagggctgggagtgggtcactggccttcccaagggagcagagggaaactggtgttccaagggcttcttgactcagtttataatccttggacattactcttcttccctcgtccttctccccctttgcctgagttttcattttcacatgtgtttccttttagcaattttctttcaaatctctcctctccctttctgtaaagtcttcccacatgtagcctctttgaagctccctggggtgggaaaggggaggagggctctgcctgatggcctggatggcacagacctcagaagcccagtgtgctgtggtccctgcaagcttcagctcaagtccaagttctggtaccatcagcgttgctaactgccattcctgtggctgcagggtcagcctgagtccactccagtgcacagtgttgtccatggggtgctggatgtcgcatcgctgagagcatttggtattctctgtaccctccttgctgcgttaaaatcagacctggttcaaatcccagccctgcgacctttcacgaattacttaacctccttgaacctgtgtattctcatctaaatagtggctgatgcacagaaatacctggcacacaataggtgcttagcagatgcgtgctttccttgttctcaaatgtttaagacccctttgtggacaggcacgatggttcatgcctgtaatcccagcactttgggaggccaacgcgggcggatcacctgaggtcaag

SEQ ID NO: 19744 - DNA, 1093 bp, Homo sapiens
tatataagggtgaacaaaatggatgaaggccctgcctttatggagcttagtgttaggggagaaagacataatcatttaataaatatgaaataagtgctgggaaagaaaagcataagaaaactgtgagtgtataaaacaggagaaccagctttcatttgaggtgttagatttgggaataatgacgatcagggaaggcatctctgaagaaataagctgagatttgaaagaagtgtacagaagtaaaatggggtgggaggatgaacaaataggtggttctagttaaagggaatattacatataaagcatttgatgccagagtagctgtgtagaaagagcaagtctccttgagagtggtatgagaagaagctggagcagatggccagggccagacagtgcattgtcttcaaggtaatttaaggatgttggtcttaagaaagtcgtttgttcgttctttttgttgttgttgttctctaagaggtggggtcttgttctgtcacccacacgggagtgcagtgataggttcatagcttactgcatcctcgaacttccaggctctgttgtcttactttattttttattttactttttagagatgaggatttgccctgtcgctgaggtggcagtacagtggtgtgatcatggctcaactacagccatgaactcctgggctcaagtaaccctcctgccttagcctcctgagtagctgggactacaggcacatgctaccatgtcccacttattttattttattaaaaaaaggtttttttaggagacagggtctcacttcatcagccaggctggattgcaattgtgcgatcatgactcactttacccttgacctcctggcctcaaatgatcctcctgcctcagcctaccgaatagcctaggaccacaggcgcaagataccatgcctggatgattttgtaaaattttgtagccggggcacggtgactcatgcctgtagtcccagcacttttggaggccgaggcgggcggatcacgaggtcaggagattgagaacagcctgaccaacatggtaaaaaccccatctctactaaaaatataaaaattagctgggcagagtgtcgtgcacc

SEQ ID NO: 19745 - DNA, 1049 bp, Homo sapiens
tggaaatgttttcattctgaagcagaatataattatttatattgattatttcattgcctttgtttctttttattcttacggatgaaaaaacaaatttgcaaacactgaatttttgtctgttttatagaaaacaataattaaggaactattcggatagatagctcagttaaacttacttatttggcgaatattttctgagtgtctactctttgccagacactgttctagacattaagaaggcaacaaaatccctgccttcaccatggagcttaacttttagtggaggaaacagaccaccacccaaaaaatcaactaatgtcacttagtgatgagtgttgtgaagaaaaatagagaataaatggttactgttttagagagatatcctctgggaggaggtagtatttgagaagagacttaaatggactgggccctacgtaaatcttggggttatgtgtttattaaaaattaaggaagaggagctggtcatggtggtatgtacctgtagttccagctacataggaggctaaggtgggaggattgtttgagcccaggagttcaaggcagcaatgagctatgatcatgccactgtactctggcctgagtgacaaagtgagatcccatcttttttttttttttttttttttagaatagtgtctcactctatcacccaggcaggagtgcagtggcgcaatctctgctcactgcaacccctctgccacctgggtttgagcaagtctcctgcttcagcctctggagtagctgggactacaggtgcgtgccaccacgcccagctaattttttgtattttcagtagagacgggtttcaccgtgttagccagaatggtgtcggtctcctcatctcgtgatccgcctgccttggcctcccaaagtgctgggattacaggcgtgagccaccatgcctaggcgagaccccatcttttttaaaaaaagaaagaaggccgggcgcagtggctcacgcctgtaatcccagctctttgggaggctgcagtgggtggatcacgaggtcaggagttcgagaccagcctggc

SEQ ID NO: 19746 - DNA, 1042 bp, Homo sapiens
gcctcagcctccggagccgctgggaccacaggcacccgccaccacacccagctgattttttgcatttttagtagagacggggtttcacagtgttagccaggatggtcttgatctcctgatcttgcgatccacccacctcggcctcccaaagtgctagaattacaggcgtaattacctggcccaaatattttatgcttttaagactgcttatgtaattgaagaacagaaattatatctgctgttctaatggtacctgtttaagcttaagttagattaaatctcttgaaatttttaaaatggtaagctcattcagatgattgaatttcagtttctctatagttttactgcttctttaatcatcttttattttactggaattggatatagtcttattataatggttatcactgttgcatttgacaaaaatgctttgtattgctattcatattctgtttttattaaataggtttattgctgacaatcaaatgaatcatgcctgtatgctgtttgtagaaaattatggacagaaaataattaagaagaatttatgtcgaaacttcatgcttcatctagtcagcatgcatgactttaatcttattagcataatgtcaatagataaagctgttaccaagctccgtgaaatgcagcaaaaattagaaaagggggaatctgcttcccctgcaaacgaagaaataactgaagaacaaaatgggacagcaaatggatttagtgaaattaactcaaaagagaaagctttggaaacagatagtgtctcaggggtttcaaaacagagcaaaaaacaaaaactctgaaaagctctaaccccatgttatggacaaacactgaaattacattttagggaattcatcctctaagaattatgtttttgtttttaatcatatgttccaaacaggcactgttagatgaagtaaatgatttcaacaaggatatttgtatcagggttctacttcacttcattatgcagcattacatgtatatcacttttattgatgtcattaaaacattctgtactttaagcatg

SEQ ID NO: 19747 - DNA, 1028 bp, Homo sapiens
gaggttgcagtgagccaagatggagccattgctgtccaccgcctgggtgacagagcaagactccatctccaaaaaaaaaaaaaaaaaaaacaacttgaattatagatgaacaacttgtattatggaggacactagaaatagtgtttcctacagagtcagggcttcctaccaacattgtcatttctagggtttttgacctgaaaagttctgtggcatattttttctttcctatccatttcttgtgtgttttttttttctatttcttccctgctttctctcctctactttatcttctagagacctaggtagttcccaaaggaatagtgctttatggagtctaatggtgatttattatgtaaaagcagaaaattattttttttacctaaaagttccataccaaaaaatgaatatagactttttatgcagtttcacacattgaaaatgcaggtaattttaatttcattgcatttttcagaattctcaatcgcaatcctctgactactgtcgaagatccatatctctttgaactgccggcattaaaatatctgtaagtactatagtactctcatgagtcatgagatgatttatgctttttaaatttgtcatcaaagataaagtattttgcatttaggctaaaaagtcataatttaaattttaactgagttattgaaaaaagttattggcaaagaaaaggattaagaaaggatgtataatggtcaagacagccagcgggggaagagattagtgttgaagaagccgtatagatttggaacatgtagacacatggaggaatattacttaaccaagaaagcaaagagaaataggtgttcattattctaaaaagaaagaaaagagtaaatcaagatgggtgaatgcaatatgaaatgagaagtaagataatggtaaaaaaaaaagtgtaagttctcttaaatatcattaatttgatgacgtagatcaacttaaatttctttaataagatctctctggaattttacggcaaataaactattgaagtggcttgttttata

SEQ ID NO: 19748 - DNA, 1103 bp, Homo sapiens
ctgcaattataggcatgaggcatcatgcctggccttctttgtagatataggtatagatatatatccgtctatatctatatatatcttcaccaggtgtgatggcacactcctgtagtccccgctactggggaggctgaggcgggggtatcgcttgaacccaggaggtagaggttgcagtgagccaagatgacaccactgcactccagcctgggtgacagagcaagaacctgcctaaaaatatatatatatatatatatatatatatatatatatatatatatgtatgtatttttatatatatttctatatatatattctatatatatatttctatatatattttatatatttatatatattatatatatatatatatttctgcaaggccctattgtgagtttgttacacaacttactgcaacttaaattgtgccaccaccaccccccacaatatggcaagctaaatagaaactcagttatgctaaggctggttgagggcattatgcaagattagcatggaaagggcccttcatttggcactctgctccgttcatttttgtcaggtcactttcttatcttcaccgggctgtcagatctgttttactgctctagcctcactttcctcagcctcctacagcatcttccctgtaagctacatcccttcctctctggatgaagtcctcttcattgaccaactttctcacttagttctctaagatagtgaggatctgtctgctttcttcttgaccattagtggataggaaaaaaatgctctgattttctgtaaccatttgtcaccaaggccataaagacattgaactaatttccttattggagttcattattggaagtcttgaggagtttacacatttatctacaaagtaagtaggccagctcatttgtcttggctcatgtgtaatctttaaagcatattgaaaaattactattctcaagtaaggataatgtatatctcaggtcacttacagtctcaaagttttgtcagtatactttaaaacaatcctgcgaacagatctagattgaaggagactaaagaatcatgaactcgaggtggccccggggcaggcgcagagctggcaagcacgt

SEQ ID NO: 19749 - DNA, 1042 bp, Homo sapiens
gaggagagtgggagccttgtgctctctctgcatatgaggcaggacagcacagggtatggagcagtctgcagagaggccagttcatcagctcatcagggaagcacttgtcttccaccttgggctttgactgagcactgggcaattggcccctggggatcaacggaataatcctaagcagagttactctatgtcacactatggaatgttccaagtaggtggccatgtcttttcctcctttcgttgttgccatttcataggtttaggtttgggtgtatgtttctcctctctgaatggcactcgaatgtttgctgactcttactctgtgtgactggggcatatagctatggactgagtatgaaagatgatcaaagatatttcatgatcaaagcagtctcttcttttctgacagctgaagaagcatctgtagggaatccagaaggagcgttcatgaagatgttacaagcccggaagcagcacatgagcactcagctgactattgagtcggaggcgccctcagacagcagtggcatcaacttgtcaggctttgggggtgagcagctagacaccaatgacgagagtgatgttagcagtgcactaagttacatcttgccttatctctcactgggaaatctaggtgcagaatcaatattgttaccgttcactgaacagctattttcaaatgtacaagatggagataggctcctgagtattttgaaaaacaatagaaagagcccctcacagtccagccttctaggtaacaaatttaaaaaccaaatatttgaaaaaaaaattagaaactgtgcaaccacaggaaaacagcctggcagattcaaagtgtaggcaaaaacctgcagagagtgaacagagtcctcatgggcccaaggagcatccaggaaaggcacttcaaaaaggtgggaaagcacagcactaggaaagaacaggatgcccaggcatttgtggacaatgctgccaaaggaaaaaggcttgagggtccagccccaagggagctggaacagcctcacatagtgcaggggcctgagaa

SEQ ID NO: 19750 - DNA, 1042 bp, Homo sapiens
gagtggccatcagctgcagcagggaggcgcaagcggtggcagcaggagtggctgctggagcagcagtggtggtggtgggacccctgtgccctgcatccctgaggcagctgagtgcatcactcctacctcacatggctgggcaggacctgcttccaggcctggagcctccactatggcctcaacctctccccacaccgtgtctcaggagcccatgagcacccggctgaaggcgcagctgggactcgtggggccagcctcaagatcatcgggtttgtttgtgcggggttggccggggctgccacgccacctgtacctctcctgctcctgctgcagggaaaatgtggagaggaggcatgtagtccccagagcccacacctgggagccccctggagcctgatatccccagagccaccatgatggggccgggccgagttacccgttggcaggggagcagtgtgatcaggcatggaggggtggacagagaggagccccgaggtggagctgggccctgagcggtgccgcgctccatggagctggcaggagctggaagctggcaagagccccacctcccagtcgcagctgcagctgcccagccgtggctgtggacccaggcatctctgcagtctaaggggcccaggaagcctgtgggcttggagatgtctgctcctgctgcctggcctctccctgctcctggtgcccgttctgatctcagagcgaggttggggccaagcctgggtgctgttgcagcctgaccgggtgtgcgcatgcttgggacagtggtgacatgccaggcccctgccactttggcctcctctagacttcaggcactggcgagcatgggagggaggctgagatggggactgagggcagcttggtgtaggcctgcaggtaccctttggcatggccttggcagcttgaatgccagcaggaggcagacaggctcctgggcagaagggggcagatgccccgtgaagccccaccttcaggctgggagggcctgaagcccgggggctgggttgctgatcccgcagaccagtgtggg

SEQ ID NO: 19751 - DNA, 1796 bp, Homo sapiens
acaggtgtgagccacagtgcccacccctgaattttactcttgttggagatcattatagcatagatggaatatttaagaaattttataataagcaccgaagagtggcagtgaaacagaacaaaaatgaccttactgtaaagagtcatttgctttttgtttttgattagtggggagaaaaggtgtggtagaaagaaaatagatttgagaatcatatctgagtttaaattttgatttgataacttcttagatgtgtaccatgggcagctgacttaatctttctagcccgtctccttatctgcagaatgtaaacaatgcatgtagagggcctgcccccacacattagtcactcactaatactagcttccatagaatcttttttttttttttttttttttttttttttgagacaaggtttcacttttgtcacccaggctggaatgcagcggcgtgatctcggctcactgtaacctctgctttccaggctcaagcgattctcctgccttagcctccccagtagctgggactacaggcacacgtcactgcacctggctaagcttccacagaatcttaatcaccatttttagtctgcagaatcagaagatacttatttgtctatactttcttttttttttttttttttttttttttttgagactgagtcttgctctgtcgcccaggctggagtgcagtggcgcaatctctgctcactgcgagctccgcctcccgggttcatgccattctcctgcctcagcctccctagtagctgggactacaggcacccgccaccacacctggctaatttgttttgtatttttagtataggcagggtttcactatgttggccatgctggtctcgaactcctgaccttgtgatccgcccacctcggcctcccaaagtgctgggattacaagcgtgagccaccgcgcccagccttgtctatactttctacttttaaaactggcctgaaaagttatgcttaaccagtacttttaaacttaggaagtccagggaaggaagtaataagctatcatgacttaatatatcaatattatgatacttatatttttcattatctttttcttttacaagttgcatgatatctcagaatcggaatttctaactgaagctgaaatcatttgtgatgttgtatgcctggtatatgatgtcagcaatcccaaatcctttgaatactgtgccaggatttttaaggtttgttgctcctacagactatgactgaatgtaacttcatatggactttttatggaattgcagtgtggtgtttcctaaccacaaaaatgcaacaaaatcatgtgtattttaaaaatacatacatctttaccctattcctgaaggttctggttttgttctaaagtggtagagtctcagacatacatatttctgaaagttttcgacatgtgattgtgaggtgcattcctgattgagaacttttacattaatgcaagctcttcccagctgttaaaagttacatatgtctgccttctctctgatgaaaaaaaagagtagtacatatggattatatattgccaaatataccaagaataacagccagaggaaagggataaatctgaagcttagaaagtctatcagtcacttagggattatcaataagattcaataggagtaaaaagctatatgtacaaaggtgtttattctagcattgtttttaacaggaaaaaactggaaataatcaagatggctaacaatggacgatgatttactgaagtaagataaaataatctagtggaatgttaggcaatatttaaattaaaaaata

SEQ ID NO: 19752 - DNA, 1022 bp, Homo sapiens
tatgtggctaaagcaggaagatcacttgagctcaggagttcgaggctacggtgagctaggattgcaccactgcactatccagcctgggtgacagagcaagacgctgtctctgaaaagtaaaataataaaataaaaggagatagccagcaataggagaatagaatataatccagctatttagaatgtttccataattgatgaagaagtccataccttataacacgtgtgaaaaatatatagaaatatacacacattgtgtttgcagctgtgtaaaaaatacatagaaaaagtctaaaaggggctgggcacagtggctcactcctgtaatcccagcactttgggaggctgaggcagacagatcacttgaggtcaggagtttgagaccagcctggtcaacatggtgaaaccccatctctactaaaaataccaaaaattagctgggcatggtggtgcacgcctgtaatcccagctactcgggagactgaggcacaagagtgactggaagctgggaggtggaggttgcagtgagctgagattgcgagactctgtctcaaaaaaaaaaaaaaaaaagtctaaaaggaaatacctgaccttttaatttgttgccttgggtaacataaatgattttttttcttactttgccttattttctaatgagtgtatattagcttttttatatttgaaaataaagtaaactttagaaagaaaaactatgcagtaagatactataagttattctaagatgatattttctataagtcattttgaaagaattatgcttttgaattgtggaagaattatttctgcttaagtttagaaatgagccagaagcggccaggcgtggtggctcacgcctgtaatctcagcactttcggaagccgaggtgggtggatcacctgagatcaggagatcgagaccatcgtggccaacacggtaaaaccctgtctctactaaaaatacaaaaattagctgggtgtggtggcatgtacctgtagtcccagctacttggaaggctgaggcag

SEQ ID NO: 19753 - DNA, 1029 bp, Homo sapiens
tggtatagggttttcatactaatcatgttttaaataataattatattttctgactgcaggcacgtgacacaagctgacctcaagagctccacgttttggcttcgagcaagttttggtgctactgtttttgcagttttgggctttgctatgtacaaagcattattgaaacagcgatgatataaaaagaaatactgtccctaccaaaaacaaatacttttatgtacattctgaatgctttaagttctgctagaattattgagatatttatacatgcagagttactttattaatatttgtaattcatgcataagagtattttaatgatagttataactgcagtattggctagcatatggaaagaaaacagctaacagccaaactaaaatggctaaattccagaggccaaaagggaatattttgtaaatatatgtacatattcaggcaagatatggtctcccaagctgagttctagaaatgatgtttctagacatttctaagtggtattgttagtgctcacttggctcactcttctaggtttaagttagcccagagattgtatttactcatggatcactttatttatttcacatttactcagaatgatcctttgggttctataaggacataaggtacaatttgccattgtctctccatttttaaaaacatacaagtcagtgtcagcttaccaacatgacattttttcagtcagttgtggtaggccagccttgaagccatcgcacagtctagaaacttgtgtagctgagtgtgcagctcacctttaagggtgaagttaggtaaaagcaattagcagaggcgttatctatgtgattatgttgcttccttgtcagtatgttgaattttatagccctttcaatgaaataaaaaaaaaatttgtatattaccaatgtttttagtttaaataaagagtcacccttactactgttgaatttcatcccaagtgtaaatcattctataatggctgtgtctgttatagtatattacagtaactgcatgtgtcaccaagtgttc

SEQ ID NO: 19754 - DNA, 1001 bp, Homo sapiens
atgaccctccaagaggtttttccacttgtaggaccacagaacccttatttcaggtaccatcaggtacctggtattccacagaacacacattgggaaacccttaaaaatcagctgggtgtggtggctcacacctgtaatcccagcactttgggaggctgaggcaggcagatcacttgaggtcaggagtttgagactagcctggccaacatggtgaaacctcgtctctactaaaaataccaaaaattagccgggtgtggtggtgggtgctgtagtcccagctactcgggaggctgaggcaggaaaattgcttgaacctgggaggtggagcttgcagtgagccaagatcgcaccactgcattccagcctggcgatagagtgagactccatctcaaaaaaataaaaataaactcaggggctatgtttcattcaaccgaacaagacagagaaaaacaagggagggcaagatgggaccagccagcacagtggaggaatcctgaactatttctgtcttgaccgcgaactcactctctgacctggactagtttattttgttccttttgccctatgcacctgtttccccataaaacgagtgggatgcctgggccacagttgatccttagtgaatatgtgttaggtggacacataagaggattggatgagggtctctcaaactctctttagccacagcactctagtgatgggagagagtgcaggctctcgcccctctgcctggatatgaatccatctgcacctattaccagccattcacacttgggcaacccagctcttggtgccttggtttcctctcctgtaaaatggagctcacaatagtgtgtacctcttagggttgctgtgagatttaaataggggggaccactctcaaagtgaccaagttaggacactttgagagtaaaggagctactgtaaatcacactcaaggctgggcagggtggctcacgcctataatcccagcactttacgaggccaaagtgggaggattg

SEQ ID NO: 19755 - DNA, 1050 bp, Homo sapiens
ccttccccaggcacagcttgggttttggctctgggtgcctctctgcaaacccatctaaccaagggctgcctgcctcttcccaagctagcgtgtctgagggtgctacctcctgctcatcttttgattctcactcagacttcacctactccaggaagccttccttgacctctgacctccctgggactggattgggctccctcttgtgtgctcccacagcaaccatcactctgaactgtgattgctggttactaatctgtcttgagcaccaccgtatccctccctgtgcctggtaatgagcctgacacttagtagttgctcagtaaattgtgatggatggatgatgagtgagtagatgaaggaaggtatagtgaacacaaatacgggctctggagccttactgagtgtgaacttgatggattcctaaagctctcggtgtctcagtttcctaatccaatagaatggggatgttaatagtccttatctaacgggaagactggtgatcatcaaatgagccaaaagacgtgaagggctgagaataataacccctgacacctaacaagaccttggtgaatgttgcttcttattaacaattataggagaaagggaaatgcggggtcaggcctggtgcaaggaacatgctggctgggaagtgggtggggagctccgctgggccccagctctgaccctctccccactccatttcctgcacagatgagcaacaagcgttccaacagcttccgccaagccatcctgcagggcaaccgcaggctaagcagcaaggccctgctggaggagaaggggctgagcctctcgcagcgacttatccgccatgtggcctatgagaccctgccccgggaaattgaccgcaagtggtactatgacagctacacctgctgccccccaccctggttcatgatcacagtcacgctgctggaggcaaggacaagggtggggagggggttgctctgccttggggagtggcgggtatggggagaggagccaagaggatgacacacagatcatgggggaagagggacatttcttttccat

SEQ ID NO: 19756 - DNA, 1028 bp, Homo sapiens
gcgtgccccaccacgcctggctaatttttttttggtatttttagtaaagaccgggtttcaccatgttggccaggctggtcttcaactcctgatctcaggtgatccacccgcctcagcctcccacagtgctgggattacaggtgtgagccactgcgcacagcccaaactgatcctttaaaattcaaatttaattcagctccacacatactttgtgttttggggcaaattattccagctctcttaagtctcttttatctcatctctattaacaagttgacaataatggctcctaccccagaggctgagacaaataatgttaaaactcactacaatgcttggcacacggtaggtgctccatggatgtctgctattattttttgcttttaatagtaacataatttacattactagttattattatatgctaagctctgttttaagtgcagccaagatgaagtttaactgccttgcccaaagtcaggcagctaagcagtggcactggtggactatgaacccaagcactggacttttaaccacctctcacttgcatgatcctccagttgccctcttagaaccactgtgccttctcagagacttcagctgaaatccaacttctgagaatgcttctagggttcgccagaacccgcctttgctagcctccctaggattatctcttgtgaccagcaccttcactgacagctccagtcttttttttttttttttgagacggagtctcactctgtcacccaggctggaatgcaatggcgagatctcggctcactgcaaccttcacctcccaggtccaagtgattctcctgcctcattctcccgagtagctgaggttacaggcgcctgccactacgcctggctaatttttgtatttttagtagagacagggtttcaccatgtcggccaggctggtctcgaactcctgacctcaagtgatccgcctgcctcggccttggcccatagtgttgggattactggcgtgagcaaccgcgcccggctatcagctccagtcttaccac

SEQ ID NO: 19757 - DNA, 1020 bp, Homo sapiens
tgtgacactttgtagttgtgacaagaagcagagaaactctgtaaatgatttatttgtcaaagcatcaaaactaaaatgaatatgaggtgcttgtgcccatcacttttacttaaatattgttggatgtgagaggtatacaatacactttcccactgtattttgaaaatcacagttagattttgattttgtcatacattttcacagattgcatcatcagagaaaatacacccagtcattttgcggtgaaaacatgtaagcatctcattcataatgtaattcaggaggtataatcatactgtcatttttttatgtgtgtgtttaatggtatctattcagttgacttcagaaattttctaaccttcctcactaaaacttgcaagctaattaacacaggtctcttaaagaaggaaaataaaacatcttttaggaaacggtaatagacccatataaacatacttcaaatgtgcagtgattttctccaaactattgaaagtaatgggacctgttaataagggttagtatttaagaaagactatattctatgaaattacatgctttattattataggatgtaatggaattttctaatctattaatagaagttaatcttctgataaaaattttaaatcaagaactgaatttacccacaaaaatttaaaaaatttgaaagaaaattgaccaatttatcattttttaagtgaattggacactgatatttgaaggtgagctcttttaggggaaaaaataagtgggttgtgtttttaagtcatggtttagtggtaggtagttattgtaaataggccatctggttttacttttgagtgtctttaattttggtggtagtatttcctttctctaaaaaaaaaaagtgtgtgtgtgtgtgtgtgtgtgtgtatatgtatgtatttgacacagggtctcttactctgtcgcccagactacagtgcagtggcgcagtcacagcttactgcagccttgacctcctgggctcaagtgatcctcccacctcagccctctgag

SEQ ID NO: 19758 - DNA, 1618 bp, Homo sapiens
tggggcaaatgcctaagttccttggatttagtcgagtcattgagcagttaattgttaataactttgtagtatagaagcgtttttttccacactaaatttttcagtgactcaatttccccaaacatttcttctctgcaggtatgcccccacctgttccacgtcctggaattcctccaatgactcaagcacaggctgtttcagcgccaggtattcttaatagaccacctgcaccaacagcaactgtacctgccccacagcctccagttactaagcctcttttccccagtgctggacaggtaaggtgaaaatcctgaaaaggagtgcacttatatttaaagataaagtacagttgtttacagaagtctttgaaattttcataggtcaatttttttgtttataatatttttaatattatttattaaatatactaaaaggtggcttatccacttccatgtttacacactgatttcctctacccataaaaggttgaacggagccaaagttagtatgttactttttcatagctgtgaaccctatttattcttagtttttttttttttttttttaagctaatgaaagtttagtatctggagcgtttagaagttttcctttactgactaaactgaatggaaggacaccaaagtcaaagattagcattcttaagacggtagcaaatcatttgtcaggctctgcctctagtacggaacagtgatgagctacaatgccgcacttgtgctaaaatggcgtaatttaatggcttttgacctaggcacactggtatttcttactggtcttttttcaaagcttttaaaagtcttttttccagagcataagtgaaagatgcttctgttctatatggtatacacatgatggttaacacctttgctttttttcctagtttcattgagaagcagattcagatttaatttattcagaatttagatcgggatgtatgtttattcattttcttttttagattatcccttagatttttttaaattgcttttttctgtttgtgggtgctaaattaaaagcattttctttaagtgccttttgttaagcacattaacctagcttttatggtgggtggaaattttatgtattgagagatgtaaaacttttggcaaaaatcttttgtagagaatcattgatacagaattggattgaagtgtcagtatttgtacatcgttattctcagtttcaggtatcattcttgaaataatgcaaaacagtagttttagaaaagaaactagttaactaggttttattgatttagaattaaaattttgaggctcatactttaattttgtttattgtaaatgcattaactgcctgccttttaaaataagtgacatttgattgcattaaattttgcatttacaaatatgcaatctactaaaaagtctaccacatggcttattttgacccatttgtttggagacttttcattgtttcctttcttttatgctacagatggggacacctgtcacaagctcaagtacagcttcatccaattcagaaagtctgtctgcatcttctaaagctctgtttcctagcacagcacaagtacgcaggaagttgcagtttaaaattgttaaaatggctttataacttaacc

SEQ ID NO: 19759 - DNA, 2176 bp, Homo sapiens
ttttattgtgtcaccatttacactgttcatgttatagttagtaacgagtttaaactcatattctgtagttttttttttagctgtttgatagattaataactaattaatagaacattaaaaatagaacacatgctattctaagatactgtatttcagcaatctggaataaatacaaagcattgtaaatttaatttttggtgaggaggtagaagacatctaacaagttaaatatgcagtcttatttccactgctgtgttgtgggtgtgactttaacctagcatcttttgatatttttatgggttatcttgaattttgtggaatgtttatcacattaactttgtattaatttcatttaaagtttggtcctttatttaatgttgatgccttgttttaagttaaactgttgtagatatagttaatttaaggttttgaagtttcgttgatgaagtattgtattttacaggctcaggcagctgtccaaggacctgttggtacagatttcaaacccttaaatagtacccctgcaacaactacagaacccccaaagcctacattccctgcttatacacagtctacagcttcaacaactagtacaacaaatagtactgcagctaaaccagcggcttcaataacaagtaagcctgctacacttacaacaactagtgcaaccagtaagttgatccatccagatgaggatatatccctggtaagttgcttttagttttctacgagcagcatttgatttaaagccattatagcagttcgtccctttaaaataagtgttcatttgtactcagatggtctgtgatctggtttaatgctcactaagtggtttttgccattctgattcttaagaaatcataaaatacttaaagtggacagatattgcatgttttggtcttagatggtttctctccccttcctccagactgtttctaaaagaagacagtaagtcaggttcttaactctcttaaaaatcattttagttaaacataagtttgcatatgttaattgaataaacgttaagtgtgaagtagaatctgcagatcccttaagtcccatataaatgaatgaattttgatacaaagttaatgtttagaatgttgataatggccaggtgtggtggctcacgcctataattccagcactttgggaggccaagacaggcagatcacttgatcaggagttcaagaccagcctggccaacatggtgaaacctcatccatacaaaaattagcagtgtgtagtggcgggcacctgtaatcccagctactcgggaggctgaggcgggatcatcagttgaacttgggaggcggaggttgcgttgagccaagattgcaccactgcactccagcctgggcaacagagcaagactccatctcaaaaaaaaaaaaagaaaaaaatggaatgttggccgggcgcgcagtggctcacaccggtaatcccagcactttgggaggccgaggcgggtggatcacctgagggtcgggagttcgagaccagcctgaccattgtggagaaaccccatctctcctaaaaatacagaattagccgggcgtggcggtgcatgcctgtaatcccagctactccggaggctgaggcaggagaatttcttgaacccgggaggcggaggttgtggtgagctgagaccaggccattgcactccagcctggacaatgagtgaaaccccgtctcaaaaaaaaaaagaatgttaataacaatacttcattagatagtttcttgttgaagcaatttgtaattcccggaaagttgttagccatgcttcaagtttacaaataggtgaagttttaaggtatctagagtttaagtagttggattggtttgtctggcaaaagtaaatagttgggatgtaagggtaaatttttgaaaattactcttaacgttgtaagattttagatgcatgcctttatgcttggtgagcctctgcattcgagtatttagccctgcgcttatttttattcccaggaagagagaagggcacagttacctaagtatcaacgtaatcttcctcggccaggacaggcccccatcggtaatccaccagttggaccaattggaggtatgatgccaccacagccaggcatcccacagcaacaaggaatgagacccccaatgccacctcatggtattcctctttttatgtttttcatattta

SEQ ID NO: 19760 - DNA, 2578 bp, Homo sapiens
cgatctcctgactttgcgatccccctgcctcggcctcccaaagtgctgggattacaggcgtgggccaccgcgcttggccaaaatctgcattcttaatcacaaacttacgcattgaatgttaaggctaaaaggtcatctggaaatgcttaattttaaaatattttcaagcctcaccacattagagcaaatgttaatgtagagccctgtaaaggtgggaaggtggtgtctatgtgtgtgcttgtgtatgtgggggtatagaccatatagttgatataacaacagaatttgggtgttacagacctttcagcatggatggattactaattttcaggtatcgaaactgaaatttgatacctgatcctgtggtaaagtatgttaaactatggttttggagtgattattttgaggttcattttcagcctcactgaacagtgttttacgcacatgtgaaaagtatccacatttgtttccaactaaaatttgcttttatttggtgagaaaagttgtgtgcgtgtgtttgttgtagggaataattagggaattggaagagaggccaaaaacaaacctgaattacttttgtttcttgtgtttgagccacgattctatccagatagcagtttactctgagcagtaacaatgaacaagcagtatagcatttagcaaacctggaattgtttgtatatggttttcattcttggaagcataaagaaaaaatatgcattaaatgaattgtaaattttgacttgttaaataacatgtttttcactataactaataggattttaatatttaaagaattttgttgcttccatgacaaaatatcccattggactattttataacctcagtaatcaacatttaagagtccttaattggagatctgttttctctattacctaccatcctgcaatatgctgaaatctttctaagttgcttatcttaattctaatggtgataattgaaaaaagtgtgctggaaatacaggctcttatctggttgagtactgggggtgggaaggatttagtaatgtcataatctgttgaaggtaatatctatagataactaagatagttcctttttttttgtagttctgtgactcagacaaataagattttgagaattatgtagtttttaggtgtctgtaacatccactagtaaaacttggcaaatgaaagaaaattgtgaagtcaccactttaactgagtcaaaattttgtttgaataagctgatgaaaatagacatgtaccctagaagtagatactctaaaattatacagacatgaatgtcttttttaaaaggttgtcattattgacctaatattgagtaatctttctgcgttattccaaattgaaatttgtttgctcttcattgtaacttttatgtaaaagtcctttaaaaggggattcaattataaggctatttgactatagggcagatttttataagtaaacattcccccaattccacttatgctaactgtctcatgacagtaaagtttactcctttttagaaaccctttctcagtattttaatttctgtcattgaatcatttaaataataaccttttgtttttatagcaaagaaatcatctgacttttctgtgtgatgtttcttggcaaaataagcacttgatgtatggtcatgtacataatggatattcattaattttgtgattagtgctgagttttctaaactactatcttaagctcttaggcaccctattatggatctaattcaaaccaatatgtaggaaatggagaaagtaggacttcagtttgcgcttcccaataactttaaatatatccaccttttccaagtgtttaagccctaaaacatctatctttatttttttacctggcatttttgttagaaaatagattacgttttaaagtaacattaaaaaaattcttcagtaagataattgcttttaataagtatatttttcttgctcttggctctatacatttttgcataatattttagtcttgaaaagcttttcattttcttaactctggaaaataatagtttggaactaaattagtttgagaaatctgaatcatctctctttaaatctgttcagttagtctcatgtattctcaggggaaaatgtctttattttactaagcggaagtagtagtcatattgaggcagaaatttgtagcccaaacaaggtaggtcttcgctgaaactaatttgaactattcctatttgaagcaaattgaacactattataaatctagactggctaattagatggaaactttgatggttaggttctttaagaggcatacaatccgttatgagaatgtttatgtttatgttttaatttttatcaaaataacctcagaggaggtacatgtgagtaaactgtcttaatggttgattacttggaacccacccattaattctaaatgatgtaatggtctataaggtagtaatctggcacagcttcagtaatgtgtgctgtgtttgtaaaaaggtgaagtactttattggcattttctaagccctctgacattgttagtgtctgggttggttggtttgcattttactattatggtggaatctgtgttccttc

SEQ ID NO: 19761 - DNA, 1033 bp, Homo sapiens
ggtatgtctacatattcgtttaaatttagaaattcccacatgtttaagatatatgcccatcccctttttagagtaatcaaaatttctatcacagttcacatactggaatacatagtaaaattgagatgtgtccaagagattttcaatgttaattagctcattctaaatagccaatataaggtaacttctgtttaaaaaaaaaaaaaactagggaaaagttttaaatgtattagtatcaggctctgaggaaatttaatgcacattgactttttaaactatggattgaactcctcagtttaatacaatttgtgtttttgttaactagcagcagaatttcagcatttgctacttactggtagagaagaaaaatcccacagccctgccagtacaggttagtttaatctgtaagtacctgatgttcctatttttttcaaacatatccatataactcacacaaggaagaaagctgtgcggttacttaaatgttagtataactaataatagatccattggacactttaaacactcagtacttgggccaaagtagatctaggtttgctaaccccagttgtaataaaggtgtaatactgctcctttgttatctccttgtggttcaacctaagtagatacattgtacataaaaggaaaagacagtttcagttggctatgcccttgttgatagatgatatggagtccagggctttgggtccagggtcttttacttaagctatttcatggtggttctctcattcaccttttaactttttacattatgaatcaacctaagaaaaaaggcaagtttcctcacatctagaaatgataaatggtgtacagtcataagctagaatatgtttttataatgcttttttgttcttttagcaacacttgtaaatacaagtactcctctatttttgttctttttttgtaaactataacgtatcccgttggtgtaccagtgagttcattttactgtaaactaagaataacatacctttttaatactgaaagttgactactcatcaagaaatgtagc

SEQ ID NO: 19762 - DNA, 1082 bp, Homo sapiens
gatgttccttaacatgtagccatgtaattagaactcacaaggggcattgaaatgtttttctttttcagatagtctggggctatttacttattttaagtaagccaagtctaccatttgaaaaatggtgctttatttccatatctgaagcctgaagttattttttagtttgttttcatctaaaagtggaaagatttttgcttctgcgttattaagagcctctttgtttggaggagatggttatctccttcactcattaacctttgagtgcttgttatctacaaagatgaataaaatctttcatttattatttatgatacttgtctgagcccattttttaaatttgtatccagaacagttatatattaataaggtattatgatatgcatcagttgtcctgagcagtttttgttgtatcctgggaactgtaaggaataattattaaatacagaatgtctacggggaaaaggggtaaaagagcacgcttagtgtgcatattttgtatgtgatagttgggtaggtagatgagccagaagaaacagtgatttagagtgagcataaaactagatcttgcaaccaaatccttgcttttctattatttattagttatatgacctggaacaaattacttttcaaatggtagttataagtttcataggtttgtgagaaacaagtaaatatgtgtagaagaatttggcctggcaactttgtaagtgctcagtattttctgtatgtttacttgaaagaactaacacactatacatttgtgctaaccttgttagaccacaggcaatggtgggagcagacagttattgcaaatcaaaaaatttcatttagcacatatatatgaatgcccacagtgtgctttgatattatcctttgtacatagtagagaggaagtgcatctgagtagagactttggaactgaggatttaagaagccagcctttgcacaaagtctcattgagtaacagtgttttgggtagtaggtgtgcagaaaccatgagatgggaaacataacatcttgaacaaaaaatgaggtttgaatggtgggtgggatgggtgcgtgtgcatgtaaggtgagtg

SEQ ID NO: 19763 - DNA, 1025 bp, Homo sapiens
atgcttctgtgttcagtatgttgcagtgttttctgggttgaagtacccaaagaaaatccaacctcacacagacaagtagttgggaaagggattattttaatcgctttttcacttgaaagcttaaatgttttctgttacaacaaatactgagttgtttttcttgaagtgacagggttacttcatttttgaggaaatgtctgccacatacccacatctgtagatccgtggttgtctatcagttcttgcaaataaaaatggtgctccctgagaaaagtagctagttcagcccaactcaaagaattgcacaaatgtctttccatgagacaactcttgtacttctgtgtgtggaagtgttttatgcatgcttcccatgttatcactcacagtttttaaaagatgtgtattcatgggtcaaggatttataaaattaacaatttttattctgtcatctggggcaatcttaagtgaaactggctttttctgtgagtgcatgatgaagaatacagtgactactgggacagtttgataacactgcctagattcatactaagacaccagctcttttacccatcatcagttttgtaccattaatgcaaatgtcaatcaattgagaacaatttgtagtattattataaaaatagctttaacctttcagacccttgaaagggccttggggaacatactctgagaagtgctgccctaaatagtaatagagaggatctgtccaatggtgtgctaagaatctcttcacattccccaggaagagagacatagctgcagacatttagagtagacataaagttaagtgtgttgctttaaaatcaagagtaactactaaaaaaaacccagacacatctatagttttcaaattagcacggctaaaaaaagggaatacagaaatcaattcaatagaagaaaggaagagactcagaaaaagggataacatcttgtgtgtgatggctcatgcctataatcccagctgaggtaggaggacctgggcaacacatagtgagaccctgtctcta

SEQ ID NO: 19764 - DNA, 1050 bp, Homo sapiens
agctgctactcctcagccccacggcagaaagctccactaagaggagggtctctttcagaatgtgggaaattcaggggtgacacacacctcagattggcatttggtttgtggaggtggccgagacgctcatctgctctgtgtagggtgtaagagtgaggtgttggagcgggaccgcctggctagaggaggtgactaatctttccagactgcctgtaggggttggaagtgagttaagggagttagttgtcagccgcggagttcagggaattctttggaacgggtcggctgcatgttgccggaaaaattaaaatttcttaacgctgtaataacgatggtcttacacctacacacaacaggaaaactgaaatgggaatcccagccagtcgcttccggcagctttctgttgggattcaagtgtgaacagaaatttattacgacagaagaagacgttaatgttcactcataaaggattcaattagggcttggactagctcttcactgcacatgtaatggcatctttgtagtgtagtttgggaagatctgaattggctcaacaagtagtatgagaatgcacctgtatgtgggacttgcaagatgttggcatttgacttagtgtgttgaattttggtattccagacctgcacggagaaaggacaatgacaagatcttgatactttatcattggggatactagagaaggagaggaagtgggcgtcaaggtgtatctttgaatgatattggtaaaaggtgtttcattttaaaagttctgatcttaggtcagttacttctacggaaccagagtcatctcaatcaccgttacatggatattttattctgagtacacactattatttagaactaatgtgaggagcatgaattttaatagtctgtgtctagtgtctaatattttttctttcataaagtagaaattacgtcaaatattacaattagagtatttcctgttggcccactattctaggggagagttccctgaaagcttcactgttagagcaagcttgagtcatggtggttgacggccttactttttct

SEQ ID NO: 19765 - DNA, 1045 bp, Homo sapiens
acttctaaaaggaatctgttgagttctgtgaggtcctgcctcaggctcccaagtggctggaactacaggcgcccaccaccacccccggttaatttctgtatttttagtagaggcggagtttcatcatgttgtccaggctgatcttgggctcctgacctcaaatgatccacccacctcagcctttcaaagtgttgtgattataggcatgagccactgtgcctggccttttttttttttgagaccgagtttcattctgttgcccaggctggagtgcagtggtgtgatctcggctcactgcaacttctgcctcctgggttcaagcaattctcgggcctcagcctccccaagtagctgggactacaggcgtgagccaccatgctcggctaatttttttttttttttttttcttttagtagagacgaggtttcaccatgttggccaggctggtcttggactcctgacctcaggtgatccacccgccttggcctcccaaagtgctgggattccaggtgtgagccaccgcgcccagccaagttctgtgaggttctgacaaggaaaatctggtcatataattacagataatcccagtaagaataggaggaagtcagtatgattttatgggacttaaaaaaaaattaactcagtatgtatgaaagtggaaggaaacaggaaatacaaacaagaatgaatataaaacagtagtagactaaaacagatgatgaactgagtctgaaaaatgcaggtgggcacagtggctcacacctgtaatcccaggactttgggaagctgaggtgggaggattgcttgaagccaggagttatgtggaccagtttggaccacacagcaaagaccctatctctgttaaaaaaaattttttttttttaaagcagcatgggtaacataaggagaccacatatctacaaaaaagataaaaaaattgactgggtgtggtggtgcgtgcctgtgtcccaggtacttgggaaacagaggcaggaggatcacttgagcctgggaagtcaaggctgcagtgagccacaattgtgcc

SEQ ID NO: 19766 - DNA, 1078 bp, Homo sapiens
atatttcacttctgccttttctaggaaggaaaatgattttcaaactgcaaaagatagaaataacagcagaaagagataattaatggtaggtgagagaagacagagcagatagtctctgtaaataagttcaggtctctaggctctaacagtttcttttattatcaaaaaaatagttttagcagatataactatagagccatatattattctgagaaaaatcatggagaggtataaggaagatgaggcaaatgttatcctgcctttcaagagggtaatgcaaagaatagatgtattcactgtgtgctgcacattgaaataaagaaattaaaaataaagagtagacactatacatggtcatcagtggtagagttctgggacagattatttgataaggagatagtaatctcttaaaaaaaagtggatttattgtgaacagattattccaaattcaccttagttctctctgttttgttttgttttgtttttttgagacagagtctcactttgtcacccaagctggagtgcagtggcacaaccttggctcactgcagcctcgacctcctgggctcaagcagtgctcttgcctcagcccgccaagtaactgggactacaggccttcaccaccatgcctggctaatttttgtagagagggggtttcgccatattgcccaggctggtcttaaactcctgggctcaagcagtctgcctgtcttggccttccaaagtgctaggattataggtgtgagccactgcacccagcctagttctctttttggttagctttatcagacccatagattttcaggggtctgcatgccacctgtttttgtaaataaagttttattggaacaaagccacgcccatttgtttccacattgtgtgtgactggctgagttcaggacctgctactaagaccatataacctgtgaagccaaaaaaatttactatctggctcttcacagaaaaagtttgccagcctctggattagaggaatgatatagactgtatatctgatgtaagcagggtagttgaacatttgccataatattaatatcacaggtacaggttatgaatttac

SEQ ID NO: 19767 - DNA, 1051 bp, Homo sapiens
agtacctttacaaagtagagtttgttcagaggagagcaactaagttacctagaaacaaggacttcggaggaacagttgaaatagccaaagatgttaagcttggataaagggaaaattagggaaatgtaaatgataattatctttaagtatttaaagccatgtgaaagaaggtatagatttgtgttttgtgtttcaaaaaggaataatttgttttggccaacattggaataggctgctttgtgaacatttctgtgactagaaatcattcagaattgttcaggcacaggaggaaattctgtgggagaagggacattgcttcagactacttttaaaaagctatcattacataatataattgaaataaatgcaaaaggaatttgagggggagaatcactgtagactggagttacatgggaaactcaataggacttcagatggacctaaaaggatatataaggtttatatagactgagaagatggcaagacatttcagatgggattatggcattagtgcctcttgaaagcaggagtatatactgtagtcttgtgcagaggtgaatgaggtggcagaatggcgaaaagttttaaacattgggaatcaaaggtcattactggggagtgaagggaaaagatgaacttttctactctatatcaagttcttaagtaccggacacagtcccatgcattctctgactattcaggcagatgaggatttcagggccttgaattagcattctctggagggtgaggtttgcttgccctgaattagagttctcaggagggtgagtctgcaattggagaatattaaagaggcagtggcactaaagtaattttaacctacattccaaaatacctccttagttgttgagttgaaccattctctaatttttactatttgacaagcatatctctagtttattgtttcaaaagatgtttctttagagttcatatactgccctcttctatatagtgggggaaaagctctgtgatggatcccttttttggtcatagtttaagacttaggttttgaagattaatgaggaatttaaaa

SEQ ID NO: 19768 - DNA, 1051 bp, Homo sapiens
tctgaaagggaaaaagccagctggaccttttgagtcttaaaagcaactgctaggaatgaggcattagtgcttaggatgagaatttctcccctttattacctgtgtattatacattaccattactatttctaaccagggagaaatctgtgctttaaaaattcctaatctgtcatagaaatctacattccaggtctatacatgttgtttggaagttcttggtctctcctcagtaggtaggagtcttgaagatagagctcttttcctaaaaaacataatctaagcacaaaaatattttatgtgtaaaaagccaagttgatgctccattatgatataactattacacattgagatactgtggatcagacactaaatagagcaacatggataatatgtaaggagggaatttaagctgttctccaaagcatggtttgtgggaagaatttgaggacataatgttgcatgtactgtctctccttattgcaggtcgagctgtgtttagagtgcatcgaatgggccaagtcagagaaaagaactttcttacgccaagctttggaggtaggttttacattagtactcatttcaggtctctaagcatgagacagagggtgaatgtaagcagtaccatccttatcaaaagtatcttcagcaactttgtaattacctagataccgaaagattattgatggtagccccacttatgataattgctctgattgaagttttgagacagatttgctacttggctcagagtagtaagcaacaacatggtaaagttaacagtcatttgctggctataataggagacaatacattggctagatcgtctcttatgctgaatttgatgctatcatcagaaattgcatatttaacagtaacagttctgtgactgtcaatctttgatttctttctgtggctttttccccccccttcaatcaatgccttttctctttcctaggcaagactggtgtctttgtactttgataccaagaggtaccaggaagcattgcatttgggtaagtaagctggtaataagtcatctcagctagctaaa

SEQ ID NO: 19769 - DNA, 1085 bp, Homo sapiens
cacacccagctaattttttttgtaattttagtagagatgggatttgtccatgttggtcagtctgatcttgagctcctgacctcaggtgatccgcctgcctcagcctcccaaagtgctgggattataggcgtgagctgaaaccgtgcccagcatttttttttttttcaagagatggggtcttactatgttactcaggcttgtctcgaactcctgggctcacatgatcctcccatctcagcctcccaaagtgtggatttacaggtgtgagccaccgtgcccatttaggtagatgtctaagctgcctcccagctctgatcttttatggctctattattttatatgttcttattcctttcttttcaatgcccaggtattatccatgcagcagaagagaaggactggaaaactgcgtactcatacttctatgaggcatttgagggttatgactccatcgacagccccaaggccatcacatctctgaagtacatgttgctgtgcaaaatcatgctcaacacgtaggtgcaccttaactctggactacaagaactcagatccttcagcaagtctgtttgccatggcagagatggcctgagcagggagtttggccagttacagaaacagcagcagctgcggcctctagggctggctaaggtagagcgggaggatcaaaagtggtccagaaaactttcgcttgctagtctttcagaatcaggcagacattttagaaatccccttcccagctcctcttggagaattctcctcatcctttaaatattctgtcctcataggtgcagagcacaggacagagggtcaggaaatagcttacagatcagccagtaacagccaactgagccacccagaatgaggaaggaagggttaaggagaggtttgaaaaagtggacaacaaaagtatgacagacctacttataaagaagtctacagaattattcaattcttttgggaataaatgaaatattgactaagaactctctctggatctttggattacataagggctatgttttaataatacctgttacactgggatttgacttaaacttatagttctgcttgttgtgtctatt

SEQ ID NO: 19770 - DNA, 1883 bp, Homo sapiens
cctcctcctggtgtcctcatggcttcctgattgacactgctctgtcttctcttgcagagttggatctgtagcggtcctttggagagtgtgtgtggcgggagagtgaaaccttgggggaaaatgctaggagattcttttttctttttgttctacttttcgctcggaaagtttttaaatcctcatttggtgcatctgtattccagccaataggtgtgccagttttcatgtaatctttactggcccaacttgggagtggggaaattgcttaaaaaaaaagaaaaagaaaaaaaaaaagattattctaaataaaaggaaaaaggcttacactacctaaagctgtgctctctgcctcctgggagagggccgcaaagccaggcaccccgccaaccactgggggtcctaatccacctgctgggcatcacctctcctcctcctcagaattgggtgtttgctgaccatcaaaagcaatgactttttattctgtttgtactgaaccaaaacaaacaactgtgtatagactgctgttttcttttttatttgaaatgaggcattttggtgttctttcccctaccatacggcctgtctgcccttccctccccacattggctccagcagagtagccgaaggtcctgccgccgccgccaccaccaccaccactgcagcaacaacagcagcagcagcagcagcgcctgcatagctccactctgacctgtgaaggaatggggatgaggccaggagctagtgtctaccacggccacacagggagcagtgtgggcccttagcccccaaggggcctgctatgcatgtggctttttttttttttttaaacacagtaaactagattagtcgtcagtgttttaattgcccctcttctcctctcctgcattcctctcctctcttctttcctctctgtcccttctctttcccctctcaaccaggagaccatcatgtctctctgccttcctcctctcccctccaggggagtcaggctgtctgtgaaagccatgagcttctctccctctcccactcctcctctcctactttcagatggatttattccttttttaaacaatgaacatcggaaatgagactgtggggtgtggtttctctctctcttttttttttaattttctttgttgggtttttgagcaacctcatgtccccttcccagggagctttttaatttacctcttagaactcaagtggatgggaagtagagcactatgtgtcagtatgctttgttttctgacacgattacacagcgaggctttaatgccatttgggtaggtgagcttctgcacttctgttgtgctgaactgtattttcttctctcatctcctctttgtctttttctcttttcctctccttcctgccttcttctgctggcctccttttctctttctttaccttccttggattatccttccaggttttcataataaatttatattttgtaaaaggattttgttgtaccaggttttgcatcctcactgaatctgactggcttttattttcctctccaaaatcaggtttttgttctcaacatctttccccatcatgtctagtcactgttttggttttggcaccatcagtatcaaatgtacaaacggttcttgctaaccaacaccaggtatatctgatgttcagatgagttccaataaaaataatttttttttttttcaaaaggtgtctttttcttgagtgctggagggcttccaagcaagtccagacagctctgtgtggccccacactagtctagctctcatctggccaaagctgttatctcatttgtgtaatgggagtccttaaggtaaatttggggtccaaacttggagggctttgggggcaagaaagttggtgtgtgagttctgaggttggaaatg

SEQ ID NO: 19771 - DNA, 1396 bp, Homo sapiens
ctgctaaatcctcttcagtctgagcagttcagccattgtcagttttagtattgtgtctctgtatttcacttgcagaaagagctttgcttctataaaggactttaaaaagtactccaaagagatctagttttggagtagaggggagatgttttctcaaacttagggcagtcctgagatgctcaggcagtagcccttttctcagttccctttgcgggtcttggtcagatgatgccctctagacccgtgctgtccaatatgtagccgctagccatgtgcagctgtcaggcccttgcaacgtggctggttcgagctgtgatacactgcaagtgtaaacacaaaccagacttcgaaggcttagtatgataacaaaagaaaaggagtgtaaaatatgtcaataacttttttatatatgtgttgaaatattttgggtattgggttaaataaaatatattattaaaattcacctgtttcccttttacttgtgtaatgtggctgctagaaaatataaagttacctatgtggcttctatctggacagcgcagctctagacctccaggaccagcagttgtgtcactgcctcctctcccaggcctctcatgacctgagtccaggcacagctgggaaggtcagctggccggtgggctggcctgggcccggctccctcacctcccttctgggctccagccttcatggtgccaggactttcttgtgtgttaatgagactctactggagttgggagcagaggctctggtcccctgctgtgtgctagttatgtaatctgtgctgctcagaagggccactagatgctgctctgtgatccctgaaagaacaaagccgacttcctcaggagtaagggctcaggcctgctctatttggaacccttcttggaagctgtagctggcccccgccttgacctccctccctcgggatgctatgggaagtggggcatgcaggaagagtggactctccggcagtccacgggcagcccagcccagcagggaagctaacaagcaggctggcccttcaggcagctagagataggcaataggctaagtaggctgattgatgggggtgggatttggaaatcttccctgcagttctatgatgaaggcagctaggaagaaaacagctctgcctcattcaactgggtctgccttctgggtccttggttctgccatttctggcagttgactgtcctttcttccttgcttccagttggagcagtgataggaactgggggtggggaggtggtggtgggttgaatgaaaagaggagctctgtggtgtctgaaaaccagcataacaggcatggcctgggtgataggagctcctggagacccctcccttagtcgcagcagcaagtgggctgccagtgccatcccattcctgctgtgct

SEQ ID NO: 19772 - DNA, 1788 bp, Homo sapiens
gtttttttgtttgtttgttttgtattttagagacagggtcttgctctggcatgatcatagctcactgcagcctcgaactcttgggctcaagtgatcctcctgcctcagcctcctgagtagtagctgggactacaggtgcatgccaccatgcccagctaattggtttcttgaggttttatttttagagatggaattctaatgatgttatccaagctggtcttgagcttctggcttcaagtggtccgctcgccttagtttcccaaaatgctggggttacaggtgtgagcatgtttttgaacacctactgcacaccaagcactgtgacaaacaccaggcatgcagagatgaagacacagtggctggctgatatgagacaaggatgcaaataatttcagtgcagtgtcatcgatgccagggtgctggaggagcagggactggcctacccggactttggaaagggccaggtatggcttcctgtcattctgtaggaaccactgccaaaatctgtgtgaactgatgagttgagctccagcagcatcatggagtaacatttcgtccagagctttgcccattcagccactgcagtgtggtgaacagagcacagcctaggagttagggaacctcagctctgacagcaacctgataggggtcacttttgttccctaaacttcagtcttcttacctgtaaggtggtctatactgaacagtgcccacctcttagatcataagaattcaatgagctgatggatgtaaagtaccagcatgtgcctggatgctcaataaacaggacagatactctgattatcctcattattggtaccagccaatgggaagacctccttatagggtgccctgcatacagctggcactagatcagtgtgtgtggacctgcactgagagcctgtgtgtactctgaattcctctctggactgtggcacagagggcttcacaatgaggtgtgatccttaaagtcaaagaaacatgggacaagggctggcagggagattcaggcccctctcacctggaaccatttctgttttaaagatgggaaaaccaaagtccagagaggggaggagttataaagccagggttaagacccgtgtgcctgactcccaggccagtggtctccttcttgtgtcttctttggtttcacatgagggtattgacaggggcagcaacgccaacaattgctgaaggaagttggttggtcacagctgtgggtaacctcacctctggcttcttcagggactgtatttggggaggcgcctcagtaggcctggtatttacattgagtaaccagattccatctccaataatcacatcacaaacagcatgaaatgtgaactatggggaaggctttgctaaatgtgtgactggttttcttatttttccctccattcccctccctcggaccccaacccctctctccctctcacgtctctctgtcacacacacacacacacacacgcacaacttgcattccccaggcaaccagtgcaggcctctgattccagcccagtgaaggccatctttagaagagagatttcccctgtctggggtgtggcaagaggaattggtatttgaagatcaggttcttgttccttgcagttcaccactgttccccaccatgaccaaggagtgtggagcccttggcagtttaaaaatggctaaacatcttacaccatgtaagcctcatccatgaaattggcaatcatgattcccattatgtggatgcggaaactgaggcttagagtatggaagggactgccaggtcacagagacagaatt

SEQ ID NO: 19773 - DNA, 1050 bp, Homo sapiens
caacagaagaaactggcccagtccccagtcacctctgcacacattgcaggtctcttttctgggccttgtcaccaccctatggggcagagaagggaggttagcctcattctgagggtaactaactgtcccagttggcctgggaccgagggtctactattaaacctgtagtagtctcaggcaaaccaggacaagttgatcagcctacttattccacagatggtgaactgaggcccaagtcacccctggcaggtggcagtgccctagacccccagagtttgccctactctcaacgcacacacacctgctgcctagagaccagctcaggaagggggctgtccttcccagccacccaattctctaggcttcatgtgacctggccctgagttggaggccactgaagacactaggaaagtagacagcatgtaactgagtcagggaaaccaagctaagactcaaagcgcagaaaggaagtggtcaattcggggctgaggaaagcaggctcctcctccaggggcaggtgcccagaggggcttggaatgtgctctgctgttgcttcactctcctccccaactggaaatgccctggcttttccagcaggggccttggcttatgggacccaactgtggagccccggcagagcccccactcagaggtaggagtgtgagttccaaagcccactctctgccactaaacctctgggatcttgaacaaatatcttcccttttctaggcctcagttaaaacaggcatcagaatatggtccaagtctcaggaatgtcgtcaaaacatcagagatcattcacacacaagtgcctggcagagcagtgaggaagtcccaccttcatgaccaagcccacctccagctcaggtctgggatcatagctcaggggatctctacacctggtccccaacttccaggctcactgctcccatgaagtgagcccaggaccagggaaatcaggagggccggtggggcctaacctcagctgtgtgttttggggaagcctttcagcctctctcagctttggttccgtcactggggggggcagtg

SEQ ID NO: 19774 - DNA, 1024 bp, Homo sapiens
aaaagaactgcagaaaaaggaagaagagaatgctgacagcgatgatgagggggaactacaggatttgttgtctcaggattggagggtgaaaggggcattgttatagggttttaaagacccaaggtttctaacagcctctgctgttgtataaaaagtgctgtctctcagtagtatagcggttacttcatgcctcaagatttgggtacctggattgctaaactggattgttgagataaaatgagccagtgagctacagcactttggaaaatttgtgtaacatgtttttgaggtaaagttgtttttgaaatttctgaagtgttatataccaaaatgccaacatttccacgacagacttaactgtataatttcgttgtaaaatctgtaagttgtaaatattgtacatagttaaatctgtattctgttttgaatttttttaattaatagaaagaccaaccggcaaactttcagatgaatgcttactgtggtatttggaatgtatgtatcttctgaaccctacatcaagttgaaaaggtttgttttcttgtttctttggtttttgtatggttttttagaacacttcataaacacataagtcattgtaggttaatcagttctcttagtgtgctttattttaaaaacataagaaaactatatgccaaacatgaccaaaccaatgatggtcagatgtggttgcacatgagagtcacctatgaagcattaaaataattaaagtgtctgaggccttccccttcaataaatctgggattgggcccaggcaactgtgttttttaagcacccaggttattctaatatatgccagggttagagagtaactgccctaaatccagaacccatttatgtttttcaggttttttctttttctttaaataacacattccataaatttgctgtttcttgaatgaaggaaaaaatattatcttttatttatttcatccagccttaaattttgttatttggtggtaaattagggttccttgtttgcaggtcctatctattgtagaaa

SEQ ID NO: 19775 - DNA, 1055 bp, Homo sapiens
acaggcgtgagccatggcgcccagcctgggccaaccttttctgagccatagtccagctgtactacagctgtatccaaaaggtaccatgtatctcccagggtaacctgaagacctaactgggcatactaactgtcctcagatttcagttctttaaggcccatctcttctagatcagtgtaaatatctgaactcacttggtgcttcaacccaattggtcttgggattcatcctttacctacccagctctcattctcttctaggttgttccatggcctcttccatatattacatttgtggtcttgagcaagttagttagttacaacaacactgagcatcttgaccaaggtcacttggcccaaccacaggctaatcccaggccatgtgcacatcccaggattagcttgtggtttatcagttgtcaatttttttttttttttaatacagggtctcactctgtcaccctggctggagtgcggtggcgatcagagctcactgcagcttcaatctcctggctcaagtgatcctcccacctcagccttccaagtagttgggactacccacatgcaccaccatgcacggctaattttttggtttttttgggttttttgtttgtgtttttttttgttttgttttttgagacagagtctcgctctttcgcccaggccggactgcagtggcgcaatcttggctcactgcaagctccgcctcccgggttcacaccattctcctgcctcagcctcccgagtagctgggactacaggcacccgccaccacgcctggctaattttttgtatttttagtagagacggggtttcaccgtgttagccagggtggtctcgatctcctgacctcgtgatctgcccgcctcagcctcccaaagtgctgggattacaggcgtgagccaccgcacccggcccttgtttgtttttttaagtagagacaaggtctcactacattgcccaggttggtctcaaactcctgagctcaagcagtcttcccaccttggcctcctaaagtgtggaaattatagcatgaaccactgtcaggctcttttg

SEQ ID NO: 19776 - DNA, 1048 bp, Homo sapiens
ccatgggtagcaccaaaccctatatctaatgtgttttttccctatactttcactgtttcacttaaagaaagcacttaaagaaaggcttttctttggcatatctgaattgccagcatcactactctggagatttggggccattaaataaaataagagttacttgaacataagcagtattagagttgatctggtaagtaagaaggctaccaagtgactaagggctagtagcatatacggggtgagtacaccagacaaaggaatgattcatgtcctggggtgagagggagtggatggcatgagatttcatcaggctactcagaatgaaacttgaaacttataaattatttatttctggaatttttcatttaatatttttggactagagctgactgtggtaactaaagcatggaaaaccaccagataagggaggactactatatactatcagaaaatagaaatcatttccagtattattgttatggcaaattgaatcatatgatatacactcttttatgtctggcttctgtcactcagcatcattgttttcagattcatctatgtcattgtgggtaccaatagttctttcctttttattacggttgagtagtcttctattatatggataatcaatattggcttcttcattcatctactgatgggcatttggattgtttccagtctatgtctttcacaaataaaaatgttatgaacattcatgcacaagtctttgtatggacatatgcttttttttttttttcctcttgggtaaatactttggtgtggaatggctgggtcatatggcaagcgtacgcagaacttcttaagaaactgccaaattcttttccaaaatggtcgtacccctttatatccctacaaggagtatatgacgatgcccattccttcacatcttcaccaacaactagcatggttagtcattttagccattctaatagatgtgtagtggtatctcactgaagttttaataggcatttccctaacgactaatgatgttgagcataattcaatgtgcttatttgtatccatatat

SEQ ID NO: 19777 - DNA, 1027 bp, Homo sapiens
tggagagcttggctacctccatcctcctcaggccggagcaggcttcctgagagagtccaggtcgtaggagttttacgacttagaaaagcgggctgcagattccttcctgggtgtttggttcaagccttggctccagcctcactctcagtcttcccgggagttcgtgggatttggaccttagattattagtattattttgagggcctcctgtgtgtaagcactggttgtgcgcagatggctgtgcagagggccatgaggtagaggctggggaaatgagggcttggaggtgcttgaggtatggtctttacctacgtgaaatgttggaggtaagtcggatttataacttgtgttgatgcttttataatctaggagcttagggtttagtaggaagagtcgctcattcaatgaattaaacgctcattcctatgtactaggcaccattccgagtgcagtggctacaaagactagtagaacatagtcctggttctttaggaactctgtgattgggcaagtgggagagagggcggaaaacgtgaactggtgagtagttggcgtgtgatgcgtgccgtagtggaagaaagtgctgtgagagttagaagagggggatgattgaaggaattaaggacatttaacagaaagtgatatttgagtaaagtttatttttgttttgttttttttttttttttgagacgggagtctcgctctgcctcccaggttggagtccagtggcgctatctcggctcactgcaaccgccgcctcccgggttcaagcagttctcagcctcagcctcccaagtagctgggattacaggcgcacaccaccacgcccggctaatttttgcgtttttagtagagatggggtttcaccatgttggccaggctggtcttgaactcctgacctcgtgatccacccgcctcggcctcccaaagtgctgggattacaggccaaagccaccgctcccggccttgagtaaagtttaaaaagtatacttagggtgggtatttatccctccatgaaagcgccttt

SEQ ID NO: 19778 - DNA, 1003 bp, Homo sapiens
ttgaaaacaggccaggcatggtggctcacgcctgtaatccgcgcactttgggaggctggagaaggtggattgcttgagtccaggagtttgagaacagcctggacaacatggtaaaaccctgtctctacaaaaagtacaaaaattagccagatatggtggcctgtgactgtagtcccagctacttgggaggctgaggtgggatgatcgtctgagcctggggaggttgagactgcagtgagccatgatcaggccattgcactccagcctgggtgacagagtaagaccctgtcttaaaaaaaaaaagaaagaaagaaatattaattagaaacccatggttgaaacttacctgaatagaaggctttattttttttcataggtaagcctatgttttcttggatgtgaaactagggcactgggttgctcttaggtaatacaaggagatgaaatgcagcgatgcgatgatgagtgaagtagagcctgacctggtattgccattgcttcactgttggctttgaccagggtatgatctcttaatcttctctctgagctgattctgattgtggtttttccacacaggtgtgttgtatcctgtttggacactggttttattatgtttaagatgtttcttttattttcttttgaattactgatattctcatgttttcctccttaggttgagatgaaaactcttgctttgaattcttcatggaggactacatcatttcaatcctgaatctggctcaattctattattcacttattactgtattaaaaacgtttaattggccaggcacagtggttcacgcctgtaatcccagcactttgggaggccaaggcaggcggatcacttgaggtcaggagttcgacaccagcctggccaacatggcaaaaccccgcctctactaaaaatacaaaaattagccaggcgtggtggcacgcacctgtaatcacagctacttaggaggctgaggtggcagaattgtttgaacccaggaggtggagg

SEQ ID NO: 19779 - DNA, 1025 bp, Homo sapiens
ctttgaggagttactgtggataaaatcacaaagccataataggttcatacttttacccagttgcatttggcctttagatttttgccccattagcttgaggagttacattcttagtttttcttgaaccatcaacggtggtgataaaggaagatgatactcatttttagaaattcttaaatataagtgttcctaaaattaattggatgttcttaaaattaattggatgccttgttggatatctataacctgaatgaaggaattcttttctcttgctataggtgcacattaaagatccaaagtcatgactgactccaagtatttcacaaccaataaaaaaggtaagtatgagaatacaatcaaatcttttgaaattttcaaaagttgtagtgtaagattgccccaggcagaatgctgctgacctcttccttcagacatacatgtagctgacaatctcactggacatctactacttctatagatgaatgtattcaagcaagttattaaagagtaggttttaaaagagagggctgtgatgcacattattatgacttgaaggttctgtttagtgaaagagactcctctttgctgtttgagatgatccattggagattggttaagtgtgaggaggacaaaagaagcagcatactttttcccttttattaaataatttttacttggaaataaacattttataacaaagaatacaattaaagcaatacagatatgtatgtaaaaggtaaaaatgaaagttctcccttcctgttcctattcccaagggaacttggtgtatatcctcaagtctttttctctgcatatgagtgcatatattaatacatatgatttaaaatttttttatctttaatgaaaaagcaatcttgcaaaacaatgaatagaaatgagttattttcatatccgtccatatacatctaccatgttcttcgtctagatgtatatttaaaacggaatctctagagccatctatggtttttaggtcatagacggaattacttgagggactttgcact

SEQ ID NO: 19780 - DNA, 1029 bp, Homo sapiens
caggggctgttgtggttttgccaagcttatttctgtatcctgcagaaaagttaaaactcttgatttttttttatatgcttgctattgctgatactttattatgtacttagcactataccacttatcattattcaaacaaaaggctagtggatgtctgtttgccttcatgatttttactgtctagttgatgaaacccaaaacttgaaaaattagggaaaaataaaatatacttatgtaattaggcactgaagtgtatattttaaaggcaatacgagttctaccaaagagagatacaggttaacaggaatagttgaagaacccttcttggagatgaaatatgagctgtacttagaaagatagtgcaaagaaataaaatggagattagctatttgtagattgtgatatttcagcctttcctgcaagtaacctcaagtgcagcactggccagtggaaatacagtgtgaaccacatatgtaattttaaattttctaatagccattttgaaaaaatgaaaaggaacagatgaattaattttagtaatacattttatttgacccagtatatctaaaatatcctttcagtatgtaatcaacataaaaattattaatgagatattttacattatatttttcatgctaagtcttcaaaatccagtgtgtgtttcacatttacatcacatctcagttcacactcgccacattgtgtttagtagtcacatgtgactagtggccaccatattggaaagttcaggtttctagtttataggttggcacttaacactttttacttcttgcttgatctttggctattaagtcttcttgaccttgtgtagattgctagaattaaactatttaggatcttgaatttattattggttaatgtttaacatttactggttatcgttgttttgtgcatgagctagtctaggaaatagaaaacacatttttggagagtatttactaaatatctacaggtgcatgaaactaccgtaggtaccatgcatacaagtgaaacacatagtttgctttc

SEQ ID NO: 19781 - DNA, 1050 bp, Homo sapiens
tcattcccttttttccccttattttccttgtggaaatacacctacatttgttttttctttcttctatgctagtagcaagatgtttagcagtattaaaaatgtataaggtactttgataaagcattgtggggaagatttattgctaacttcccataaagttacagttatcctatattgtaaagatacagcttacactttagaatctgacaagctcaacccttccaagctaatggtgctcctttaaatttgtttcctgtggcttataggagaatggtaaatcatgaaataactagaacttaggaaaggtataaactccttttatatttgattactctcaaattttcatttgtctgaatatgtaatgttaaaaaaataatttcactaaaagggaatcaggacatcttggaggatgactgattctaggtctggaattagaaatgtacaaaatgagcctggatggggcatcttgtcataaaggaaagtatggaaaataccaggtcatatcacaaggattcaggagctcagttcccactggtcaagactggaagaatatgaactttaaaaagcgtaactgaagtgctttgaaactgtagtagatggatatgaagaattattgttccttttgccctgtcgcactcctgaaagcaagatgattcaccagcagctctactggagccacccgcgaaaagtcagccagggttcttgctattgtgtctgctgaaactgggcacagtctgatctggaaattgagcctcgttacatgccaccagtgtttccatcatacgtgaaggatatagatttcattaagttggactaagtgatcttccacgaatggattatctaaggcacccacccaatgagagaaaccatgttagctttttgtacataaaataaatattttaaaataattattgttattttttatttttatttttgagatggggtctctctctgttcctcaggctggtgtgcagtggcatgttcgtggctcactgcagcctccgcatcccaggctcaagtgatcctcccacctcagcttcctgagtagct

SEQ ID NO: 19782 - DNA, 1036 bp, Homo sapiens
aaaatacctcattttttagaggaacaattttaaatttacagaaaagttacaaagacagtacagaaagttttcatatacgcttcagtcagtttcacctaatgttaacatcttacgtaaccgtggtacatttgccaaaactaggaaattagcattgggatgttactattaaccaaagtagaatttcaccagtttcaacactaatgtcctttcgctattccaggattcagtccggaataccaaattgtgtttagtcacttccttttataatgcatcagtctactctgtttgaaggtagctcgaaaacagaaaagtgctttacaaccatgaaatggcatttttcatccagtcaccatagcatagtggttgaaactcaggctctagaaccaaatagatttgggtttgtatcctggttctgctatttcttagacgagtggtgtctctaaattttagcatcctcatctacaaagtggagattacaaatagtgcttctatcgtaggattgttgtgaatattaaaggacagagggcttgcaaagcacttaatactggtcctcatatggagtaagcccctaataataacaaacacatatccttttttttttcttaagagacaaagtcttgctctgtcgcgtaggctggagtgcagtggcacaatctcggcttactgcaacctccatctcctgggctcaaataattctcccacttcagccttctgagtagctgagagtacaggcacatgccatcatgcctggctaagttttgtatttttagtagagacagggtttcaccatgttggccatgctggtcttgaattcctgacctcaagtgatccgcctgcctcagcctcccaaagtgctgggattacaggcgtgagtgagccaccatgcccagcagaaacatatattctatattgtacagtgattgtagtgccggatattaataattttagaagggttagtatttcagtggcaaaatttactttttaattttataagattaaaattttaaggttaagattaaaacttttaggatgaaga

SEQ ID NO: 19783 - DNA, 1076 bp, Homo sapiens
aagacgctgtctcaaaaaaagaacaacaataatattcttatgctattatttattaatttacctatcatagactttttctgttaactatctgctataagaagtttacttcatacacccaccattcccacttccgtctcctgttttccagtgtagttacataatgaaggtttttgttcctatatccattatcatggtagattgaaataatatgcctttgtttcttattctatcaactgttggcttgcaaaatttatgcatattacgactgtgtaaatatttagggccaatgtaatgcaaatgattacattttctttcttatagcatcttttttttttctggaggttttttgttttgttttgatttttgagacagagtctctgttgcccaggctggagtgcagtggtatgatctcggctcactgcaacctctgcctcccgggctcaagcgactcttatgcctcagcctcctgagtagctgggattacaggcatacgctaccacacctagctaatttttgtatttttagtagagacgaggttcgccatgttggctgggctggtcttgaactcctagcctcaagtgatccgcctgcctcagcctcccaaagtgttgagattataggtgtgagttaccacacctggccctggagtttctttaattgcctctttttttcttgcatgtgtgtctttatcatgcccctatattattcctgttccttaagcataatatcaaatctgtaaactttcttttgtcttagacccttctcttttgcagtcctctgtcttcttgttttttctactctgactgattgcttttctggcttctgcacatcattccatacagcctccctatttcttgttattggtatatttttccttgcattgctctttttgtggttgcaatagcttcttgaatctctgaggatatgaatgattcgtttttttgtttctgcactttgaatttaattatcggatattttttggtgatgattgcatatctatgcatataattttttaattgagatgtataccatgcatacagtaaagtgcagctcgtttctgtttaagaaagaggtaa

SEQ ID NO: 19784 - DNA, 1029 bp, Homo sapiens
tgtagtttctgttgataaataatttaatagaaaggctgttaacagcaagaagttagctagtcctgggttctattcctggttctgctagctcacttgattcagatatttaatgtttctcttcattggagaaatgttaaagtctttttgttggatcttgatatgttaacattgtttttattaccactgtcaccacacgtcacaacttgtttttcttttctttttacgttaacatatcttactagccgtctacttagtattaatgtagataattttcagagagattttggtagcataagagtaaggtggttttgttctcttcactagtgtacatagccatcttttccacaagactgccattgtcttatgacctacctctctgacaaagctgtaaacagtaatacaaaaattatatcttattctgaagttcagagactttctagccctggaattactagaaagtgttctcaaagcatctagattcctcaaggctgttagtcatctattgtgactaatggaaaggttctccataatcttctggaaaagacttctgatggctttcacttcttcctttgactaagcgtgctttgatgggagtatgacaggatgtgaggaatgaactttcccaggaaacttaaggtcacccttcaggaatcctgtcttatctagtgctgtcatttcagattacccagatttaccttagaacttttcctgtaactgtttcagccatgaaggttttcagtttgacagagttgccaagccaaacagttaattggaccaggagaggcaatgattgcctgtttgcactaactcatccatgggacaggaatcagcagcataagaattgtaatgaactttctgtatagctttgggaagcaacaagctgttgagcaaataaatagcactgaaaaagcaatcctatggtgctatttttttgttcaataacttttgcctatttctttcaggagtaaacaaactcctggtccttttcagttttaaaaaggagagaggttgaggcactaggttaagacc

SEQ ID NO: 19785 - DNA, 1050 bp, Homo sapiens
gtgtgtgtgtttctctgtttctggactttttgtatatacagtgattggatgtcactctacttctctgccatactgctgtaatggtaggtttttttggtggggttgggggcatagtctcgctctgtcggccaggctgtagtgcagtggcacgatctcggctcactgcaacctgtgtgtctcccgggctcaagcaattctcctgcctcagcctcccaagtagctgggattacaggcatgtgtgaccactcctggctaatttttgtatttttagtagagacggggtttcaccatgttggccaggctggtctagaactcctgacttcaggtaatccacccacctctcacctcccaaagtgctgggattacaggcacaagccactgcacctggccataatggtagttttttgttttgctttgttttgttttgttttgttttttgagacggagtctcgttctgtcaaccacattggagtgcagtggtgtgatctcggctaactacaacctctgcctcctggattcaagcaattctctgcgtcagcctccggagtagctgggattacaggtgcctgccaccacgcccggctaatttgtgtatttttagtagaaacagggtttcaccattttggctaggctggtcttgaactcctgacctcatgatccagctgcctcggcctcccaaagtgctagtgctgggattacagtcatgagccacagtgcctggccttttgtttgtttgtgttttttgttttgagacagaatttcgctgttgttgcccaggctggagtacaatggcgcgatctcggctcattgcagcctccacctcccagatgcaagcaattctcctgtcaaagcctcccaagtagctcggattacaggcatgcacctggctaatttttttgtatttagtggagacggggtttcaccatgttagtcaggctggtcgcaaacccctgacctcaggtgatccacctgcctcagcctcccaaaatgctgggattacaggcatgtgccatcacgcctagccttggtagtatttttttttttttaatc

SEQ ID NO: 19786 - DNA, 1035 bp, Homo sapiens
ggatcacttgaggccacaagtttgagaccagccggtcaacatagcaagacccccatctctacaaaaaaatttttaaaatttagctgagtgtggtggcactaaattgtagtcctagctacttaggagactgaggagggaggatcgcttgagcccaggactttgaggttacagtgagctatgatcatgccaatgcactctagcctgggtgacaagagtgagaccctgtctccctgtctcaaaaaacaaaacaaaagaacatctgatgaatttttataaaggttttaaggtctaggtcttaaaaaataattgaagggaaatttaagtcattaaaatcttctgacttaaaacctattcattctcttgactaaaagcttttacagtttggtggtttggtttagggtcccttgtttgtggttttgcctttagccttcactgttaaattagttcttagttttgccctcaataaccatagttcattttttttcatcaggtatgaaagtatcatcgccactctgtgtgagaacttagactcgctggatgagccagatgctcgagcagctatgatttggattgtgggagaatatgctgaaagaattgacaatgcagatgagttactagaaagcttcctggagggttttcacgatgaaagcacccaggtaagttcttgtctcttgtctatcctagtagttttagatgtctttggggagatttcagagaaagcaaaggttataggcagtttcttctgtgtctgtatttacatatagtatgttcatttttctcccaacagggatgtctcttctcagttttactaattttttgtttttgttttcgagacagagtctcgctttgttgtccaggctggagtgcagtggcaggatcttggctcactgcaacctttgcctcctgggttcaagcgattctcctgcttcagcctcccaagtagctgggattataggtgtgcaccaccacacctggctaatttttatatttttagtggagacagggtttcaccatgttggccaggctggtcttgaa

SEQ ID NO: 19787 - DNA, 1051 bp, Homo sapiens
ggggtgaggtagtaaatagttgtctaattcagaaaaatctcacctttaaaaaatattgctttaatgacagttatgcagttatttcccttaaaattggaaatgtctttatattaattttcttatattttccattgagaaagatgtataataatgatgtatcatattcttgtagaatctataggatcatttatatcttttcattgaactcactttatcttctcatattattcattcctttccattagagtgaagaaaaatatgtgcatgatacctattctaccttctttttagacatactgatagaaccatgtgttctgtcacattttctaaatggtatgtcagaagatgacagaatttcatgtgtagagaatactctgtgaaagattttatttatttcttgtcaggtgtatgaaatcatttcccctttttacttctttcttaaagccttttcatcatggcttcctggacactttccttgtaaattagctttcctagattgtatttctgtctttaatctttgcagttccatgtttcttctcttctctgattattaatcttggttgtatcaaaaggttcaatctgaaccctttctttctgtgtttctctacatattcccttagggaaattacccactgaccactaatatattacagagctttaccatttagaccatgttttcaattgatccttgctttaataaaaccttatgcttcagtgatattgttatcactgaagaaattttgtctcacagaggttgtcgctttccgaaaattatgcagctagtaattaatggagccaacacttaatcccctgtttttaccaccatcctacactgacccacaccctcatgatttcacctgagatgtgtatgtgaatttctaaccaagcttacttctctagctctgactgccagtcccttggttttgtttttgtttgtttatttgtttgtttgttttgttttgtttttgagacggactgtcattctatagcccaggctggagtgcagtggtgcaatcttggctcactgcaacctctgcctcctaggttcaag

SEQ ID NO: 19788 - DNA, 1054 bp, Homo sapiens
ccagttatgtttttatgtaactctaaattttaacatttcctgactttgggatctaaaatggtatccttggtgttacagccccagaaattgtttacagtgcagttttcttcagcttattctgagattgaaagatatcccagaaatcaagatgagaagaaattaaagcccttatttttgctttggatccgtatgtggttaaatatatattcactcagagaatcaaggttcctttttcgagaacatcacaaggaagacctaaatttgcctgtgtggaagaagatgagtttctaaggcggcagtggacttttaaaatgcttttattgttcttatgcaaattacctaaagagaagattaatcctcaaagccattttttgaatgcatccttgccttacagagtgcttctcaaaataaattatataccttgaatctcctaaagattttgtacaagagagggtttgttttgttttgtttagtttgtggaaatgggttctcactatgttgcgtaggctcatcttgaactcctgggctcaagcaatccccctgccttggcctctggaagtgctgggattacaggtgtgtgagccagcacactgagcctgcaagagatgatttagttggtctggagtgagacctagagtctgcgtttctaacaaggtgacactgaagctgctggtccatgggccacattttgcatagtaaggacatagaatatcttgtgaccactgtgaactacttcagtttagtgtttgaactgtagctacctagatgctcagatacctttttctttttctctctcttttttttttttttttttggaggtggagtttcactcttgttgcccaggctggagtgcagttgtgtgatcttggctcactgcaacctcacctcccaggttcaagcgattctcctgcctcagtcttccgagtagctgggattacaggtgcccgccaccacgcccggctaattttttgtatttttagtagagacggagctttaccatgttggccaggctggtctcgaactcctgaactcaggtgatccacgtccctcagcc

SEQ ID NO: 19789 - DNA, 1045 bp, Homo sapiens
gaatttttataatttctaatcctcagaacaactcaagaagataattggtattggaccccattttacagaaaactgaaggtcatacagtaagttgcagagttgggatttgaacccagggcttctttaaaacttcaaagtttgtacactttatactgtcctatgattttccagtttgtttgttattgtcatcttgcagaatagaatacagtttcacctaactggtccttctcaaactgggaaatgcagtctctggagtacacagcagagtgcagggtgcatttgaagctgcagaataaatatggctcattgtcttgcagtgtcagtcttacttgatggtaaataatgtaaacagaatatacactggtgtgttaccacttagaatgtaaaattgcatgactttaagataaaaaatacagcttgcttgccctgggcctcttgatggtgtacatcccaggtccctgagtatatgagtttgggttaatgtgtcacatgaaagttggagaaggactacagaagtgtgttcattcatgaagaaaagagactgaataatgagtaagttcatgcacctttcttgcagcaagaggaacagattgttcatcttatccttatttatttatttaaagacagggtcactgcaaccttgagctcctgggctcaagtagtcctcccacctcagcctcccaaagtgttaggatttacaggcatgagccactatgcctggtcattttattttcatttaagtaaaaccacaaaaatctccgtttcccatctcttcaccagtgagctgtaataaagcagtagtactttgagggcagttaaatgatgtgcaggcattcttcttctgaaaatttcctatcaaaaccactcaaacaatacatttcctccctagaatgagttttgacccggctgggagatgtttgtttatttatttttttgagacaaggtctcgctttgtcacccaagctacagtacagtggtgtgatcatagctcactgcagcctcaaactcctgagctcaagtgatcctctaacctcagcctcccaag

SEQ ID NO: 19790 - DNA, 1117 bp, Homo sapiens
tataaaacttattataaaaacttttcatcagaacactcattaaactacttattggcttatagactatttgaaacactatttaaaaatttaaaagataccattcattctttttttcttctttgagatggagtttcattcttgtcacccaggctcgagtgcaatggtgcaatcttggctcactgcaacctccgcctcccaggttcaagcgattctccagccttagcctctgagtagctgggattacaggcacctgccaccacacccagctaatttttgtatttttagtagagacggggtttcaccaatgttagccacgctggtttcgaactcctgacctcaggtgatccacctgcctctgcctcccaaagtgctgggattacaggcgtgagctgccatgccctgcctattcattcttaaaatgtaaaatacattatgccttaaatatgggaattaaatacctagtagagatttgaacctggaagaatttttctactatactgacatcgactgtaaaagcttttgtgaatcagcttataaacattatacaaagtaaagttaagcttgctcctactgggagcctttcttgagtttatttatatcacgtaattatattccttaaaaagagaattgattctctctgtttaaatacagcagaaaccttaataagtgtctaaatgtgtttcctctaaatgagttttctctgactcttgatgtccttgtttctcatttcgtgtgttagttgtgcttagaaacattttcccagtgaacttcttcaaacttggactgctttttcaagtcagtgtctgcaaggagacagtggaattatgatttaacgtgttcatctccagggtaatgctcatggtctttatgtagatgctgcagggttcccacagctgcttggcctcctttttccagggccataaactcttttgagaacattgatagcatcattctttcaagttttcaggatgataaaagcacagtttaaagagccaactaattctacaattatttaagaaaaactggccgggcatggtggctcacgcctgtaatcccagcactttgggaggctgaggtgggcggatcacgaggtcaggagatcgagaccatcctggct

SEQ ID NO: 19791 - DNA, 1079 bp, Homo sapiens
ttgacctcccaaagcactgggattacaggtgcgagccaccacacccagctggatttttctgttttagatattcctgtacatgtccccactcactgccatcatctacatacttttcatgttcccattttttctgacagaactatcttaaaatttacttaaatcagtgttcaatgtttacatcaatttttttttttaagagataaaatcttgctcagtcacccgggctgaagtgcagtagtataatcatggctcattgcagcctcaaactcctaggctcaagcgatcctgctaccttaggagaatctcaagtagctgggactacaggtgtgtgtcaccacgcctagctaattttttatttttatgtagagatggggtctcactgtgttgcccaggctggtctgaaattcctgggctcaagtgatcctcctgcctcagcttcctaaagtgctggaattacaggtatgagcctccacaccctgcccagtgtttacattattatgactgcatatattctttgaagctgagccatatattaaagtgatttttcctcaataaaactttttgtagataattggagttaatacccatttatgttggtgtttttaactgtaattcaatcccaaattccattgagatcagacccttcaaagtatactattggtttccctttcttaaagtctcttctagactgatttacttgaatgcctggaacatagctgtcttcctgggacctcctttcatcttaaccctggagattcattcccttcatcagctctctcctactcaggatctcctgttatagtgtccttttcttggtttactccctcttttgatgaaacacattttccagtggtttcctgagaataggtatgtagactattccataggtttgagcctttacatgtttttaaatgtctgttttagtctgtcttcatactaggttaggaatcattttcctcctaatcagaagccgttctgattcttgatacttgctttagccctgtttttttctcagtgaaagcttgtactttgtccccagtgttttaaatttcagtgatgtgcctcattgtgactctgtc

SEQ ID NO: 19792 - DNA, 1032 bp, Homo sapiens
cactgcttgctttagtgtgtgtgtattgtggcttttatacttttttgactgcaacttacagtaagaaatgtattttacatagtgtatacacacacaatatgtaaaactgaacagtttcaggaaatattacttactcttcatgagatgcactgtgatatttttcattttatttttttaatgccagtttgaacccacttagttaattttaagaactaccggttggtcatgacccaccaagctagggatacttgaagctaaaggatacacaatagcacattttcctagagcatcagttttattgaaaggtaaagagagaaacacatattaaaacatatatgggtacattatgggatttagcatggaacttcaaagatattttgttcttatgatagtctacttcatattatacccctaatcttgacccagccccatgcctccttcacagtatgtgtccattctttcctcttctattacgggaaatacactagaaaaatgtgagaagtactgtgcttttgggacttgtttgttcgtttgtgagacaggatctcactctgttgcccaggctggagtacagtggtgcagtcatagttcactgtaaccttgaactcctggacccctatcctcctatcctcttatcctcgtgcttcagcctcctgagtaactgggaccaaaggctcatgccactgcagtcagctttttttgttttgttttgatagagacaaggtctcacttaggttgcccaagcttgtctcgaactcctggccttaagtgatcctccttccgcctttggtctcccatagtgctgggattacaggagtgagccactgtaccaagccccatagaacttttaagttcattattgtgtaaacccaagtgaggtcagaaactttgtatagtttattttacaactgttattcttactcagcacctattctgtgccagtcactattctagaaactgagaatattgtgacaaatagaagacaggaattctttccctcatggaatttatattctaccacaagtggggtat

SEQ ID NO: 19793 - DNA, 1050 bp, Homo sapiens
aagtctcttctaatctcttttttaacataatagtagtactacatctgagcatatgtaagatttcagataagtctaatgtggttatccttaattaggatgctgagtaaaaaaggtaaaacaggagatggtgaaagcagagtgaaattttttttttttatttgagatggagccttgctctgttgcccaggctggagtgcagtggtgcaatctcagctcactgcagcctctgcctcctgggttcaactgattctcccacttcagcctcctgagtagctgggactacaggtgcatgccaccacgcccagctaatttttgcatttttagtagagatggaattttgccttgttggccaggctggtctcaaactcctcacctcaggtaatccgcctgcctcagcttcccaaggctcacatggtggctcacgcctgctgggattacaggcgtgagccactgtgcccagccgaatttttcttttttgaacagacactttctacagtacttatgagtcaaggctgttcactgtgctgtgcaaatattaactcattatcctcataacaaccccatgaatttagtactttgtgatctacattttacagacaggaaactgtcagagtcagaatttgaaatcaggtgttctggctcccaagtccatgctgtgaacctctgtatctgccgcttctgatgtgtgggtatcctagctcctcagaaaattgttctacagtagaagtcccaggaaagccctcagggtgtcccaaaactcctgaaattctatggcaaaatgttgtgtgtacatttttcagcaagagagtcagtggctttcctctgtttgtccaaagggtctacagtgcagaacagtttagcaccacttacctagaggacctttttgtgtcctttccattgttaaaaggctcctgttggcataaggattcttttggaagaacaagatgtttacaaacccattcagacttcttagataacaatgttctaaattaattgcttatccggttgatcttcctgggaactttttcccaaatatttatgccaggtccc

SEQ ID NO: 19794 - DNA, 1052 bp, Homo sapiens
gcagctgaaaggaccatcaacaagttaagggctttggcccttcccttttcatttaataataatccctataactcttagaaaagcattagagcagctgttgctctgcagtcagtggctttgatgtttttagtatggattatttcctaatcttatagacccacatggaatggaggtagaagcacagcacaacttgatattgattaaattgaaatgctaaaacccacagcacttattaacataatctctttgtttagctactccagtgatagaagtttctctcccactgtgtcaaaagttttcttgaactgagtgcttggatacctttagagctaatgccaacctctgtgctaatcttccatctcctttttctcctaacagctgtcactgaagtgtagagctcctgaagtctctcaatacatctatcaggtctacgacagcattttgaaaaactaacaagactggtccagtacccttcaaccatgctgtgatcggtgcaagtcaagaactcttaactggaagaaattgtattgctgcgtagaatctgaacacactgaggccacctagcaaggtagtaactagtctaacctgtgctaacattagggcacaacctgttggatagttttagcttcctgtgaacatttgtaaccactgcttcagtcacctcccacctcttgccacctgctgctgctatctgtccttacttgtgggcttctccatgctgtgccaatggctggctttttctacaccctcttttgagtgtagtttggtattttgtaattgagagctcatttcaaaagcagaaaaagacaacaaatattaaagcaaggaaaagtgtaactgaaacactgcactttactgttttatacttttgtacatatgagaaatcaagggattagtgcaaccagtagaaagcattgaaatgactgtcattaaccacacagtcctggaggcagagatgcagttacctaccctagcttttgatgggttctcttacctgtagtagccttatccctggtcatttggattttcagtttgcttttttctttttttcc

SEQ ID NO: 19795 - DNA, 1033 bp, Homo sapiens
ctggctgcctgaaaccgctcttgcagctggcacgttgactaatgaatctgttaaggaaacttctctttagtgtacttggcctttctaggagtctcttcaccttgagctgtaccccccaatcccttgagaagttgccacaaacattcaggaagttcatctccctggagctgcccaggggccctactctacatcagcccattatgcatccagtctgaatctttttctgtttctcaaccctgagggcagagagaagcatacagaaggggcacatcaggtagcagtctaagggcagtggcagaggcaggagttgcattgatcccagcttgggccatggagagctcaccagcccaggtagtgctattaaggagcacctgctttgagccaacagtgctagacactcagggaggaagagggagtatatacaaatgaggatggcctggctgtggccttctcaggagctcacagcagaagtggggaactggagatggaacagctctaatgaaagtgtaatagaaggattgttagaacacaggagatgaagggagtagtcccctgcttgcaggaaggatgggaaatcaggaagcttcttggaggtggtggcactttagctgaaccttggaagatagaattttaacaggtccaacacccagctcagagctggactcttagaggtacttaataaatgtacttgttgaacaaaggcctcgatggatggatgagggcacgacatggagcaaggcagagctaaactccagatgtgcacaagacagtgcagtggccctgtagatcaaacaatgtgacctgctccatcctggcttgggaatggggaggctacagctcctccattctccctgggcctggtctcctggggatggtcgggtatggaaggcttcaggtgcagtggcaggtgagagcactgcccctctgatgggaggtgtttgggggctaggggagccctcatggctgctctgaccctggtactggctggggatattgcaggagtgggcagacacctgctgcaggggactccgga

SEQ ID NO: 19796 - DNA, 1032 bp, Homo sapiens
ggaatagagggccctgggaaggcctcagggctcggcggctagtaccagtgcagaaacatccctcctgccgcagctttgtggtaccacccgctgcccgctgattggctgccggggtcccgcagtccgcctcagcccgccgcgccgccctcagtacagctccggccgccgcgccgcctggctttcgtattcgttgttctcggcgggctgtggggcctccgcgccgcggccgttagtcatgtcgggtaggtgacttcttcagcgagcagcggcagcgacgagaaggtcctggcggggttgggctgtcttcccgcccaccggagggccctgaggagaagcctccggccctgagggaggcttggggtgggggggcggccgctgccgccgccatgttgaactggaggcacgcacgctcccaatggctccccggctgcaaatcacggcgggagcgcctcgggcctcttgtcttttgaccctgtccttggaacccgaggagacttgccgttcccgggggagggtgtgtgtgagtcggggggcggaggccgtctacgccatcgtaggggcggggggagccgagattagagcatcagcctgagagaagcggtgcttctggttctccgctccgcctcggatctttcagcgaggcctcgggccagtcatctcgccgcctcgtacctcagttttcccatcctcgaagtggagctgggcctgcctgactcacccattcatcaggtgggggccttgacgctctgggagccctttcaaaggacgttgccttacacgaaatcgtacttatcgttattcactctgcagtaaccacctggatttgagttgggggtgtttgcatagtaatttagcttcctcttcaccctcctgccattcgtcttccccaccagtttatctcctgaaagagtttgaaagtgagccttgtctatctattattgataagctcctgtaggtgtatgtggcatttaccttaaaacatgcagaccaaaggaaaggcaatcttttttccccccacgaagcagttaactt

SEQ ID NO: 19797 - DNA, 1047 bp, Homo sapiens
gagactctgtctcaaaaaaaaaaagtgtgtgtgtatatatatatgtatatatataaaacctaaatgacaattacaagaacttgacaagtccatagttatatgggaagttaaaaaaaatacctctttgtgtaattaatagatcaggcaaacagtaagaatatgaccaaacattagtaaaatatgagtgatacaactaatgagcataatgttatagactgatagaattcacttgaaatttagaaaatacataattattttcaggcacacagggaacatgtgccaagggggaaaagcaaaacaggaaatctgagcaaataccaagaataataaaataacttttctggctgcagtggaatattaggaaaaaacacaaagagaatcaaaactatacacttggaaattcaaaagcactttaaatttaaattcgtaggtccagacacaaagcacaattgtcaaataatcacaatgaacagttgtttaggatgccttaatctataaactgattttctctgatgaatgtaaaacacctgcactttatcactcaaggatttataccaagggacagatttactagtcagtacgcttatttctatatcatctgggagtttttaagctagccagctaaagaagttagatttataatttcagagggctgaaatgactgggttaagattaagggccttactgttagatttgagatagggttacaggacctatgtgctgtaccctactaaaattttgcctgaacctaaagaaaatatgctgcgattatgtattttgtcactgggagaacctacatccatgcttcaggatatagtttaacctaaagcttcatgcatccacaaataccttgttttactcattgttttccccctcataacccttttcatcctttgatttgggataatctgatttcctgtcatttcatagaggcatctaatctcttaatggtctaattagattgtgtattcttttccgatttttcttaattggttgttagctacaactctagctatcttctcatgggcctggcagtgatgtgtaatt

SEQ ID NO: 19798 - DNA, 1032 bp, Homo sapiens
gctacaagcaggtattgctgacttgctgtgccaattggctgaatccctgaaagcttggtaaaatcagaatagagcaactaacttagctgctttttttttttttttagcaagtctttggaaatatttttgttggtgctgacagccaaagcagtccaatacagaggaatggtgtatatcttggggtggtaaggatgttcaagtagatgtaatcctggggatgtcatagtgcatgtctttcccctttttggacctgattagttttaacagatgtctttttgtatataataatattgcttaaggtcttgagtctgtttaaagaatggattttcactgtttacatttgttcactgggttcttgtgaccctagcacacatgtagaatagtagtttgcaaatacgtagttattgtaaaaagtaaatactatttgtacaaatttcttgtttcatagtatttaacttgagttagtttttctttctgcagttctttacattttcttaccacatttcttctgtatgagctaaagtcagcctttgaaggaaccataattttaaataagatttaaaattctttttatgtgttctagattctggaagttacggtcagtctgggggtgagcagcaaaggtaaagtatacatacattttaataatatgaaagggtagaactgaggtgaattttgtcaagcttcttctcttgagacttgatgctggatgtcataagttaaatattagcttgtcacagagtgaagagagtcagtgtaaataggtgctgtaagacatttattccctttctgtttttctttatgttttgagacagagtcttgctgttttgctcaggctggagtgcagtggcaaatcatagtgtactacagccttaaattcctgggcttaagcgatcctcctgcctcagtctcccaagtaactgtaatctccactacagacatgtgccactctactgggcttcttccttttcttttttttttgagactgagtctcgctctttcgcccaggctggagtgcagtggcgcgatctc

SEQ ID NO: 19799 - DNA, 4268 bp, Homo sapiens
tgtagtcccagctaccctggaggctgagggaggagaatggtgtgaacccaggaggcggagcttgcagtgagctgagatcgcaccactgcactccaacctgggcaacagagcaagactccgtcgcaaaaaaaaaaaaaaaaatagttcttttgggggctgtttgaagaatatctggcattagttgggtttatattaaaagaagaaggggcatgggccaggtatggtggctcacgcctgtaattccagcactttggagggcacagcgggtggatcacctgagatcaggagttcgagatcagcctgaccaatagggtgaaaccccgtctctactaaaaatacaaaaaattagctggacacgatggtgggtgcctataatcccagctactcgggaggctgagacaggagaatcagttgacctgggagttggtggttgcagtgagctgagatcacaccattgcattccagcctgggcaacaagagtgaaactccatcgcaaaaaaaaaaaagaaggggcataatttgtggatgaggattggatataaggtaaaggatgggacattcttggacttacagatggtgtgattgcctggctagaagaagaattcccggtcaaaaagaaaccatcagctttccaagtgtgaaagagagataaatctgtgaagattatagggactacaggaaacttaatctttttctttgaaaaagcaattgtagcaaaaaaaaagaaaatttcttactgtcatctaaaattgacatggacatcttagtggactagaagttaagggcataaattctcccagtgatttttaattttagcattgtgattaacaccttctaaaattgccagaacttaataaataattgcttttcattattagtatgccatcaaatttagtagctgtttcaggctttaatgtgtcaagcctaaaatccagatttttgaggatcttctccctcttaaaagagtattcagttaactgccgtagaaatacacatgtatacaagggcactgtatacatcagtctaaaaaataaaaatatgtatacgttctggtgagtctagcacagcattgcccaatagaaatacaatggaggtcacaaatgtgacccatatagttaattgtaaattttctaatagccacattaaaaagaaaacagcacaaataaacaaatgagaaaatctatttaactcaatatattcaaaatatttcatcatgcaatcaatataaaaaatttctttttgttggtcatgatggcctgcgcctgtaatcctagctacttgtgaggctgaggcaagaggattgcttgaggctaggagtttgtgactagatgggcaatatagtaagatgtcatcttttaaaaatgaaaaaattagctggccactgtggcacacgcctgtagtcccagctacttgggaagctgaggtaggaggattgcttgagcccaggagttcaaggctgcagtgagctatgattgtgcttatgaatagccactgcactccagtctgggcaatagtgagtcggtcaaattccatttccccctccgccccatacctcttcaaatgtttaaaaaaaaaaaaaaaaaagtactgtacattccttttttcatattaaaatttagaaatccattttgtattttgcatttagagcacatcttaatttagactggctacatttccagtgctcaacaggccacatgtaggtagtggatactgtattggacagtgcagctctagaatgatagattcttggcctcctgagatgttgataaatgctgaatccagaaagcctttttaccatgcatgtaagacataggaggaaataaaatgtaaatacagctgttatggagaatagtacttaaatccattgagtcacttaaatgtggaattaatgttggtcttttcctcacactcagaaaattgtattctggatttagtagtctgaaaacccaagcacagcatgggtttttaagctaacctttctccatttttagccaagtcctttctctctagttagtgaaattttctaagaatagagattcctgcattgtccttttacttcttggcagttttagtccataaatagatatagttaggtttttattttatttttattatttttttttttattaaaagatttggaggctgggcgtggtagtcatgcctgtgatcccagcactttgggaggccgagacgggtggatcacgaggtcgggagatcgagaccatcctggctaacatggtgaaactccatctctactaaaaatacaaaaaattagccgggcgtggtggcgggcacttgtagtcccagctactcgggaggctgaggcaggagaatggcgtgaacccaggaggcggaggttgcagtgagccgagatcgtgccactgtactctggcctgggagacagagcgagactccatctcaaaaaaaaaaaaaaaaaaaaaaaaagagagagagagacctggagtagagattctgtcaaagaactttttctttcttgagaagcatctgaaatggaatctgttgtctcttcgaaatatgtactgctgtaacagtgaaacaaccctcagagtatgccttcgtgtgggctgctcgttgtggttttgaacttgggggaactgtctgtgtttgggtcaagaatatgcaactggctgggcacattggctcacgcctgtaatcccagcaatttgggaggctgaggcaggtggatcacctgaggtcagggcttcaagaccagactggccaacatggtgaaaccccgtctctactgaaaatacaaaaattagctgggcatggtggcaggtgcctgtaatcccagctactcgggaggctgacgtgagagaatcgcttgaacccgggagttggaggttgcagtgagccgagattgcaccattgcactccagcttgggcaacaagagtgaaactcttgtctcagaaaaaaaaaaaaaagtatgcaactagctgggggctgtgacgcgtacctgtagtcccagctacttaggaggctgaggtgggaggatcactgatgctcaggagttcgtgaccagactaggcaaaatagcaagacaccatctcaaaaaacaaacaaaaaaaccagctagttttcttatgcagggggtactctgccaataaagttgagtatgcttatattgtgtttctgttaaatatctctgctacttcaggaattctttatgtgtaaatgttttctgctttttctgggaattaaagcaaatttgttgtgtcaacatcttgactcagatgttcaagtacctttgtgtcttgatttgccttagcatgtagaaaagggacttgtaacattaatgcagatttgaaagaaagattgttaacctcaggcacatcttctgttaatatctaatagtactacttgaaggttattttctgtatttaataaattccttaaaaaggataattttctaataagaagagagaaaatgattgaaacgtttgaacttgaaagaaggctttgcataaaattacagatcatctagatcaatgcctaaaccaaatgtctagacattttagacttaaatgtgcatatgaattacttgggggatcttattaaatgcaggttcttattcagtaggtctagggtggggcctgagatcctgcttttctcagaaccttccaggctatgcttacgcttatattccatcatgttttgattagtaaggggacagacccttattttgttaaggagattgaagcttatggagaaccactgacatgtccagattttcaagattgattagttatagttaagactgtaccctgagtttcttgaagactagttctttttccagtgtactatggtatttccaaatttatggccatgtgttgaaatcttcagctgctttattttcaaaggaaatgcacagtaaagatgacgttcaaggccgggcgcagtgactcatgcctgtaatcccagtgctttgggaggccgagacgggcggatcatgaagtcaggagattgagaccatcctggctaacacggtgaaaccccgtctctactaaaaatacaaaaacaaaaattagccgggcatggtggcgggcgcctgtagtcccagctactcgggaggctgaggcaggagaatggcgggaacccaggaggcggagcttgcagtgagccgagatcgcgccactgcactccagcctgggcgacagagcaagactccgtcgcaaaaaaaaaaaaaaagatgatgttcaaatgtattatatggaggaataggaaatcataaacctatttaaatgtc

SEQ ID NO: 19800 - DNA, 1197 bp, Homo sapiens
ctagctatgtatgaaattgcatgttttccatccattgtggccaggtttggtattcccttaagatggcaacaaagtaagaggcatttcttctagcacttattcgtgaacccagtgacctccaatttcccattttaaaagtcatctttatcctcggaactttaacctactggcataagaacgtgggcttaagttcttttttatcactttttggagttaaaaaacctctgagaggccgggcgtggtggctcacacctgtaatcccagcactttgggagcctgaggcgggcagatcacgaggtcaggagatcgagaccatcctggccaacacagtgaaaccccgtctctactaaaaatacaaaaaattagccgggcgtggtggcgcctgcagtcccagctactcgggaggctgaggcaggagaatggcatgaacccgggaggcggagcttgcggtgagccaagattgcgccactgcacttcagcctgggcaacagagcaagactccgtctgggaaaaaacaaacaaaaaaaaacctctgagataccttggtttctattaataatattttcagcagtttaatctcaactctgttggcttccctttcttaaagagttaggcagtgatatacatgtcatttagaagtaaagggagggctttagtactgcctgttctgaagtaggagtcttagaaattcagtggcaaactgtataggaagggcctgagtttcatattgtctatattgccttgaaatagccttagtctcctgcttaaaaaggcatcctggaaatcatataaaaagtaacaacaaattaaaatgcatgtgtctgtacctaaggcagctgtaagtggaaatatttttacctcatagtgaaatagaatggatgtattaagaagggagaattttttttcagagtgttttatctcagtgtggctcagaaaagccatttatagggtagggtaatcactagagttgagggttcctccccccaccccccataagattggtatccataaagcagagatttctaagcagtgagagacttcagtattttagattagattcttgggttataatagaataagatcattagtagtagaacatctggtatcagaaaacttgagtgtttttattgccatgttagcatatgaatcttaaaggattacagaattcagttaagagaaacaagcttttattggatg

SEQ ID NO: 19801 - DNA, 1121 bp, Homo sapiens
aaaacacttagatggaaacaacatttagaactctgtgaaatggaatttactgaaaacttagaggtgctactgttttcctaagcactctacttgtgacagttaagtgtagattgagcccagggctcagcacattagagacttaaggaagaaatcatttcttcaatttttcctctgcagtggtggtgaccgcggtggcttcaaaaattttggtggtaagtgctgagtatcccaaaatgtttcagtggaaatgctatataaatctaaaagccaccaatatcccgcagatgtagtcaaaagtcctttcttactctgttgaggctggtgtgtgttgtgtgctttaaaaaaaattttatatatatatatatacacatatatatatcaaagtaaacattaaaaagccaaagttgatctcaaaacagtccaatgggttttctacacagtgaatttgcatgaaagagtctgtggtgaccaatgaatgacaccttcactggattttgacaatttgttcttataaaggtagctgacatggtgtttttaaattattagggttgtccaatcagcctttacaaccagagcttaacaaaagtgatactagcataatgctaaagtggcaggtgctgtctaggacaagttaaaggaaatgttgacattcatcttgatttcctaaactttaaataaaacataatttatatatttactttgtaaatctgtgatggttgactttcaaggattttggaagtattgacttttcatgccttggtttattactattttttttgttaatgattttaaataaattgccttaaatagctcttttttcttttcttttcccttaggtcacagggattatggacccagaacagatgctggtaaggtttatggtggtttgtcactttgccattaagaaaatgttagttttttttttgatgggaaaagtgtgtgtttggaggggcttagtacaggaggaagatttaatttgatagtgctgccagaactggggagctttatttcttttttttttttttttttttttgagatggagtttcgctcttgttgcccaggctggagtgcagtggcacagtcttggctcactgcagcccccacctgccgggttcaagcag

SEQ ID NO: 19802 - DNA, 1031 bp, Homo sapiens
tttttatttaaatgaaattcaaggctacagatttacctgtggagcctgttgaaagttataatttagaggttaaaaatctatttgagctaaaaatttgaaatcagaacttttgtttttattaagatgccaaagtattctatgtggatggcaatttctgaattatcccttcatggactgaattcttatacatctttctttctttgttgtactaatccaaaagtgtgcatgtcaggtaacatgtacaaggtgcctccgcactctggtatatacaaagcttattgcaatgaatgggaaaccagcagttctgctttgtggcttgcttggaagttcaaagtatcagatttggagaattttgtactagagaatcttaaaaatgtttaaccgtaaagaattagagttctccagagaaagaaatgctaaactaactccatctcttcatgacgtttagccctatgtctgaatctgaagagtgaggtttgtaagatcatccttaattggtatataggtatttcacatagtgtggacttgatccactttacttgaaatttagttgtaagaattgatcaaccaaataattactgtgaatactttgcatgtttatataaggttgttcttatattggtcctttccttttggtcatagaaacaattgaatattggacaataaattattgtctttgattactgaacagaatgtcataaccaaggaatatgtaaaattaaccatcactttttttctcttagattcagaatctgataattcagataacaacacaatctttgtgcaaggacttggggagggtgtgtctacagatcaagttggggagttctttaaacaaataggaattatcaaggtgagtaaaaatattatatgttgaaaatctcataattaatgttctgattacaatacatagactatgtagtaagcctacatacttcagtacgccttgtctcttaaaattttgtgatgcacatgctcgtttatgtctgtagacgtttgctaaatttgttgaatatatgaagattttattc

SEQ ID NO: 19803 - DNA, 1736 bp, Homo sapiens
cttgttttttgtttttgttttttttttaagcttagtaagaagtgactgtctcccagtgacagatatgctcttttcagtagataatgtcacttttagcactgttatcttgactctttgcatttgaatttctgtgaggacatgtcagttactcctctgaaactaaagatttccaagactttttcatttttgttgacaggtggaggtatagagtagcattgcttcaaagctgatttcttttttcttaggaaaagaattccatggcaacatcattaaagtgtcctttgccactagaagacctgaattcatgagaggaggtggaagtggaggtgggcggcgaggtaagatccttgctgcgtacagtcctggatactatccaagggtttaagtttgagttcatactctgtttctatttgtgtgaacttgctactgctttttctctcgctaggtctttttccctctatcttaaaatgagttcaggtactgaatatattaggtaaatgagatatcgtaatagctaagaaagtagtgggaaatggttgtagaaatccctttggaaagctttattgtgatttgctgttcacttggaaatcaggaggcaattttttttttttggtttttgtgtttcttttgagatggtgtctcactctgttgctcaggctggagtggagtggcgtgatctcggctcaccacaacctccgcctcccgggttcaagtgattctcctgcctcagcctcccaactagctgggactacaggcgtgcgccaccatgtccagctaatttttgtatttttaatagagatgatttcactatgttggccaggctggtctcaaactcctgacctcatgatccagccaccttggccttccaaagtgctgggattgcaggcatgagccaccgtgcttggcgaggcaattgttttaatgatacctaattaggtaattaatctgaccagtttttaagctgcctgatacagttactgccagctttttttttattttttatttatttatttatttttgagacagagtttcgctcttgttgcccaggctggagtacaatggcgcgttcttggctcaccgcaacctctccctcccgggttcaagtgattcgcctgcctcagcgtcccaagtagctgggattacaggcatgcgccaccatgcccagttaattttgtatttttagtagagatggggtttctcccatgttggtcaggctggtctcgaactcccgacctgagatgatctgcttgccttggcctcccaaagtgcttggattacaggtgtgagccactgcacccagcccagcttctttatttctattggattcatattcttgtcttttttctttttctgttttgtgggtggatgttactgtggcctttgcattcatattcttacatttggagtttttgtcttctcacctaatcttcttcatggagattctcaaactaagtagggtataggttaggcatcctaagtttgaaaatctgaaattggaaatgctctggaatccaaaactttgagcaccgacataatgctcaaaggaaatggtcatggtcattgaagcatttcaggttttgggtttttggatttgggctgctcaactcgcaagtataaggcaaatatttcaaaatctgaaaaatccaaaatcagagacacttttggtcccaagtatttgggggaagggatactcaacctgtattacagaaaatggactttgaagttttctagtgcat

SEQ ID NO: 19804 - DNA, 1330 bp, Homo sapiens
ctttagttctagtccttctgtcattcctatgaagtaggtatacttcccattttacagagtcagtcatttagtgtaacttttccaaggtcacatagtaagtggcagatccagaattcatacatgtaagtgcttgctcattccactatgccactctcctatttagagtgctggaactgggacagtttctgatcttctgaaatatttgtggtttggagttttaagtggaaaatttttaagagagtgaagcaaagcttcttctaggaactttgtgaatcttaaagctggtaaattagacatttaagtatcttctaggagtacagaaataaatgaggcatggtgtcattctttagaaattgtctagctgatgccaatcactagtaccctgaagaagtgtctaatgctcccccttcgtagaaaattagaatttagtccggctctttatttttcattcctagaaacgactacagaaatgatcagcgcaaccgaccatactgatgactgttttgaatgttcctttgtctctgacatgatccatagtgaaattgccagagttttgcctgctgctttcctcgtggcctcttcttgggtagtgaaattaagtgacatttggatttttatttgggtgggagggctgggacagtttttcttctagaaatgtctgttgagatttccccctttagtttccaaccttctccccaacccttggagctaaatgcgttgtaaaatattgccaaaatgaaaagtgttttgtaatactgcaataaaggctgcttgtttttgtggacttttgtacatactagtgcattgttctgtcacactcaggactcagttacattagactctaatcctaaagaattaggaaatgaattatatacttcagtaaattaaaatgttactttaaacaatatttattgagctcctactgtgtttagtggttcccaggaatgacaagtcagaatcacctgaagtttgttaaaattagattcctaggttgttaaatttagattcctagattcccagccctctaggtctgctggatcagagctcaatgaggtatggggagttagggctggaaatacttatttagctcaagtttaccaggtgattttgatatagttatttagtatcacttgacaacgatttatttaggggagtgttttagatgctgggaatatgaagttccaaggaaaagaaaggatttacaagccagggttaagatggcaacatatgtatgttatttgctgtttattagagaactatttattctactcttaactatgggtaaggcactggatcagattctagatatgttgctgaccaagtaaacaga

SEQ ID NO: 19805 - DNA, 1056 bp, Homo sapiens
aagatagatgagaaggtttgagggagagagtggagggtgtgaatgctttttgtttgccatcagaagaagcatccagagatcccattagaaaggtttgggttagaggagagaaaagagagggacttacattttgaatagtgtctaaggatcagtcccagtaactgagaccagtgggtgtctttggactatgagagaagccagcgactgcttggataaagtagacttctaagagtgtttgatctaggtagctttggtactgggagggctctcgtacattggtggtgtaccagatggtgactgctctgtgaaaacctttatgcccctcactgccatcttgtcttctggtggggactggtgaaattaggattgaggtgctactaggcagatatttgtatctggttgaataataagacgtcctctggaaatacctaaaaatatggaggtggagtggttggggatctgtgggcaggattttgcagaagttgagtttgaattatgtagttagtaaggtcatgttttgtactcacaggcttttgaggcacagggaaatttgggttatgttgctcatggacccaaagcagtggagtgggcaaaagaggaacatctttcctatcattggactttggcatcacaatattagaggggtccccaggcagtgctgcatacactcaaaatagtgaaaccacccttggtttttacttacagctcgctcacaggcaaaacatgaatctagaagtgatggggtaggttgggagataattctgagtgacacactatacaggtttagtatcccttatccaaaatgcttggaaccaaaaatgttttggatttcagatttttttttcagagtttggagtatttacattatacttacaggttgaatatctctaatccccaaatccaaaatgctgcaatgagcattttctttgagtgtcatgttggtattgaaaaagtttctagttggagcattttggattttgggattaggaacgctcagcctgcactgaattcagaataactgttgggattactgtagaacctggggtgcggggaagt

SEQ ID NO: 19806 - DNA, 1081 bp, Homo sapiens
tctcagattttatagtcagcttgctcattgggagatggaacattttgatgtgggtttgatgtacctctttgatgtacctgtgtgagaaattgcataggcagctttggtccctttgtaccttccctcctcaggttgcaacctcacttctgccacagggctacagcccagctcagatatgggaccagaggaagacagatgaggactcagtgatatccaccagagccgagccgagccgagccggccgagccagatggagctgagccaagccgagccgccctaagctcctctctgggacctgtaggctgacttgccttactccctggcccaccccttccttgcccttcctcactttcctagaagatgtggagggtgagaagaatatggaggccagcaaaacacacctacagtcatctctcattttcctcaacatcttctcagcctccctttcctctcgctgatcatacaggtcgtgccagtgcgtgtagatctcaggtttcttgaagtagcagtacgggactgagtttggcttgctcggatgctgcctccagcactctggacttgggggaaactcttcctttggcatctgggggttgcaagtggcagaacagtcagaggggtcccctaggcccttacttgtgagggtatggggaggagggggtaaagggagggaagggcagggtgaaacagatgccctctagcctctcatctgagctggagtcacagctaccacctaaccccttgcataacttgggcaagttacttcatcctatcaaagtctcagtcttcttatctgtaaaacaaagctaataatccttgttctgtgtccctaccaaggttgttgtaaagatcaaaagagagatccagattgtgaagccactggtgatctgtaaatcgatttgaatacatagtttggttagttgaggatctcaaagcactttgaaaatgacacttgagtagggaaatgaaaaggcaaggtgtggggaggatgtgggataaaggtggggaaaagacagactattgctcattcagatatttatttgagtaccaactatgtgccagatactgtgctgggtgctagggt

SEQ ID NO: 19807 - DNA, 1027 bp, Homo sapiens
ttaagccaggtatgctaattacacaagaatgctgcttttcacaaatccattcctttgctcttgttttcacaggaagaaaaatgtctgaaaagcagatgaaggaagcttttgtcagtaacctcaatggaaccaccgtgctggaaatcacccagggattgtgctttcctgcattctgtatcctgtgcagagggttcctgatcattttctcacagtacttgtgttctttttcacctacctggaaaactagattcctcactgactttgttgtcctaatagttcccatggtagccactttgaccatttgggcttcatttatcctccttgagcttctcggtgtaattatctttggggcagggctgttgtatcaaatataccgaaggaggacctgctatgccagactgcctttcctaaaaatccttgaaaaattcttgaacatcagtctagaatcagaatacaatccagccatctcctgtttccgtgtaattaccagtgcgtttactgctattgctattttggctgtggacttcccactttttcccagaagatttgccaaaactgagctctatgggacaggagcaatggattttggagtaggtggctttgtttttgggtctgcaatggtttgtctagaggtcaggaggagaaaatatatggaagggtccaaattgcattactttacaaactcattgtactctgtttggccattagtcttcctaggaatcggacgattagccattataaaatcaataggctatcaggaacatttaacagagtatggagttcactggaactttttctttaccataatagttgtgaaattgataacaccactgctgttgattatttttcccctaaataagtcctggattattgccctcggcattactgtattataccagctagcccttgactttacctcactgaagaggttaatattatatggcactgatggtagtggcacacgggttggtctattaaatgccaaccgcgaaggaataatctctaccctggggtatgtggcaataca

SEQ ID NO: 19808 - DNA, 1032 bp, Homo sapiens
atgattgtattgctaggccctttcttcaaaacgggctttcttcgcattatttagtttacaggtggacttttttttttttaaaggaagccaaattattgaatgtgtaagagtactataaaaagctgattgctcatcttgagtgtcaagacccagttccgggtactttattctttagatttggtagtgtagcattatcgaccctctgccctatgttgctgtactgtttcctttaaaaggaaatggctgaaatttgaattgaatctgaacaggaaatgagtgcagttgcttgccacttaagaaatgaaattaaccttttccgaatatcttttgaaatctgcgttttgatgatgctgaagctttggattatacatttgcttatttcgataaggtgcacctaagtctcttcatctcatcagtattcttttgctatcaaaggcagttgatcagttttgttcctcaatatttttttttgcaaatatctaccgaagttttttcaaattttatgtaaaatgcaagtcattgtagagatgccagtctatgcctttatgcttgccagtctcaattaagacttgattgagctgcagtactttaaaaaggattagaagagctattgaatgacttaatttattagaagtttttaagtgacagcatttctaattattcaagtgcatttatttttcatgaaaaaaggtagaatgatttgttctgacataaagtaaatagtgttgatgcattagaaattgtgtgtcttgattatgatttctgtactttttgcattagaagtataatggacttgtatttttaaatagttgaaactagcactgtgatcatattaaataatgcatttctcagtttggacttcagatagggattcatttgttgatattttctttcttctctcccctgctaacataaacacttttctgaagcatatagttatgatatcagcctttaaggtttattgtcccacaatggctgtggagttaaaaaaaaaaattcagtgagtttggatataagattattatttaatga

SEQ ID NO: 19809 - DNA, 1031 bp, Homo sapiens
gtggtggcaggtgcttgtaatcttagctacttgggaggctgaggcaggagaatcgcttgaatccaggaggcagaggttgcattgagccaagatcgcaccattgcactccagcctgggcgacaagagtgagactttgtctcgaaataaataaataaataaataaaataaattttattagtaaaattgtcaaacatagaaaagtaaaaaatacaatgattgaacctcccatgcacttttaccaagatttagtagtaatcaagagttgccacacttgcttcatttatccacctttttctttgtattttaaagcaagtcccaggcttcgtgttactctattgcatccttccacatgcatctctaaatatatggacattttttttcacacattgccatcataacacctaacaaaattaagtgtaacaatcgaatacccagttcatacttagattttacctgtttctggttttttttttttttttgaatgttggtttgtatgaatcaggatccaaacaagaaccacacattatgttcttgtagcctgaagaaaagaagttttcttaaggatagttgttattttgctgcttgatttgtcagtatcttttttttttctttctttcaaattctttttttttttttgagatggaatttcccctgtcacccgggctagagtgcagtggcgcgatctcggctcactgcaacctctgccgcctgggttcaagtgattctcctgcctcagcctcccaagtagctgggattacaggcacctgctaccatgcccggctaatttttgtatttttagtagacacagggtttcaccaggttggccaggctggtctcgaactcctgacctcaggtgatcaacccgccttggcctcccaaagtgttgggattaacaggcgtgagccacggcgcctggcccaatttgtcagtatcttttaaaaattttttattttttattttttcatcagctcattcttccttctcagatttgtcagtagcttcagagaatttctgactctaaatgcagagta

SEQ ID NO: 19810 - DNA, 1035 bp, Homo sapiens
ctgagacagggtctcactctgtcacccggactggagtgcagtggcacaatcatggctcactgcagcgttcatctcccaggctcatgtcatcttcccacctcagcttcccaagtggctggaactacaggcttaccccaccaggcccagctaattttttgtatttattgtagagatggcgttttaccatgttgttcaggctggtctccagcttgtgggctcaagcaattctcccacctcagcctcccaaaatgctacaattacaggcatgaaccaccgtgcctggcctcttgtattcttaaattatctctaaattataatacctaatgcaatgtaaaagctatgtaaggctgggcatggtggctcacgcctgtaatcccagctacttgggaggctgaggcatgagaatttcttgaacccaggaggcaaaggttgcagtgagccaagatcgctccactgcagtccagcctgggcgacagagtgaaactctctcaaaataaataaaaactgtttaaatagttgttatactgtattgtttagaaaataaggacaagaaaaaagtctgtacatgttcagtacagatgcaggttgattttttcccccccaaatattttcgattcttggttgaatttatggatgcagcacccacagatatggagggttaactgtatggctttttgctagatttgggcatttttactatgcttttccagatgtgagctcctgcagtttttatatcagcttttttcctactgtagtctgtataagccagaattttaatgtcatgtctatgttttattaagacaatgttgagtagttatctctttacctgactttaatgtattattagatcaaagtcaaaatatagaaagccacctctgtgcatgacctagagcagttctcaagtttttggtcttaggatccctttacattcttaaaaattaaggtactcaatgagcttttgtttatgtgggttatacttaccaatatttactgtattagaaattaaatgataaattttaagctactccttcaaaa

SEQ ID NO: 19811 - DNA, 1021 bp, Homo sapiens
gtccccggcctcctgggacctcgaggaacacaggacgcagccggtagtacggccagctcagctcgccgctcctctagccttgagggaggcgctgtgggggacagcctggcagccacgcatgcgcaaaacaccgtcaggaaggggccggggaggggcgggctcccgaacccggaagcgagggacccacgtgggagcctgggagcgggtggtcgtagctcggtagtccagttgtgggtaatcggggctgtttgttcctgtccgagagagctcggcggagacggctgtcgagtacccttcacctcggtgttgggagcctgggagcgaactgcggcgcgggttaccgctcccggggacgcagcaaggggcatcgagtccctggcgggagctgcgccatggcattgctctcgaccgtccggggcgcgacctggggtcgcctcgtcacccgtcatttctcccatgcagcgcggcatggggagcggcctggtggggaggagctaagccgcttgctgctggatgacctggtgccgacctctcggctggagcttctgtttggcatgaccccgtgtctcctggctctgcaggccgcccgccgctctgtggcccggctcctgctccaggcgggtaaagctgggctgcaggggaagcgggccgagctgctccggatggccgaggcgcgggacattccagttctgcggcccagacggcagaaactggacacaatgtgccgctaccaggtccaccagggtgtctgcatggaggtgagcccgctgcggccccggccttggagagaggccggggaggcgagcccaggcgacgacccccagcagttgtggctcgtcctcgatgggatccaggatccccggaattttggggctgtgctgcgttccgcacacttcctcggagtggataaggtcatcaccagccggagaaacaggcacggacgtccctcattctctatgtgccccaacttggagacgcagccgagttcctaagcaccttggcccttgggtgatcccttagc

SEQ ID NO: 19812 - DNA, 1069 bp, Homo sapiens
tcccccaactgtcatattattctgcagccatatattctgagggccagatgaggccctggctctgacaatctgggggcacttgtggggacaatggggccagtgctcctgggaagactgagaatgtgcagctctcgaccctctttgtctgctgcgcccaagcaccccaccttcaactcctttaggcctggactgtcggtcttgttgccggctccgggctgcaggcgatagcggcggaatccgtgttatctcatcacattgggcagtgtgttaagaggcaggagaccctatttgagtcttggctctgctttcccaaggctgtgtaaccttgggcaagtcgctcaacctccctgagccacaactgtcccatctgtggaatgggggtaatgatagaatcttccccataggtgggtgtgaggttgaatgagataatgtggcatggtgcttagcagagtgcctggcacactgtatgccctcgataaccaaattgagaagattggatagagcgagatttcaagaaaagcgtctgatgctgtagtggaaagagcaggatctgtagtcaagagcccgggtttattttcctgcagccttagttatgagccatgaggctttcccatctatggcctgaactttcctcctctgtcaattggagattctgagttaaaactcacctcaaagggtttttgtgagcatcaaatgatacagccagggctcagggtccctagcgcacaattggtgttcagaaaatgttagttcttctctccttcttctcccacagggtgggcggggcagaaaaacgtcccaggggcttggagaatgtttgggaggaatggggccagggaaggtgcccagggatttgcagctcaatgggagaaggtatgggttggtcctaggaccctaagcccggatgagtggggacatgacattgtgtgtgttggggaggtcacaggaaatgagggtgtcagcacacccatggctgatggctaaggagcctgggagggaaattgaaggagaaaaggtcagctcaggtggtccccctacctacctctcccccagctcctcatcactggtt

SEQ ID NO: 19813 - DNA, 1044 bp, Homo sapiens
gatggtgggtgggggtggacatactggtggccccagttggcttcctgtcacaccagggcatcccctcccatatgaagtcaccgtgagatctctctatcccagctaggttagttgctcttaattaaaccaattgttggacttaatacccatcccattaacatgtctcccagatctattaattatgaccagtggaggaagggcacgggagctttgggtggggatgcaggggtttgaaaaccaagccaatctgcctcacagagaagagaaggggcaagttcattcctggatatgagggcaatctggctgcaacatttgtcaccccgttgatcaccaggattgatttgggtgatctggctggctaggcgggtgtccccgtcctccctcactgctccatgtgtgtccctgctgaagctgcacacttggagaggatgaccttccctgatagaggaggactgttctttggtcaagggtataccaggagctcgactcgcctgctggaacctccgaacaacctctcaggttcactccttgtttcctcctgggagtcttggaaacattcattacagcctcagaattcctggaagcctgctgtgtctgcatcccatggggtctaactgaggccctctggccaccatgacccttgggacccctttcccatttagctttctcagagccactggggcagggacaggggaggtggaggtgactgtcattggtgcaaggtaggggccaagaactcatccgtggggtcagaacggaggctgagtgggaatgaggattacagatggagagctggagttaccccagctccacccacacacacctgtgttcagaatgttccctctgcagctctttgggaccaggtagggctccctaaatccctctgtactctgatcaggccttcctggatggtgggtggacttagaggcagatgctggacctacgcagggatgctcagactattagtaggccctccccttgtgccttctccttcctccttccctcccaactgggccctccccgctgcccccagtgtcaggggcc

SEQ ID NO: 19814 - DNA, 1033 bp, Homo sapiens
ggccctcttttatttattcacaccagcatagtacttggcttattctagatgttcaataaatgtttattattacacacaggtgcttcctaaatctcacttctatggtgggaaatttttgaaatactgacttttttcttccttcgtaacatcccttccttttacccctcggtatcgttgcctcaaaggacctcagaggatgaggcctgtgcccaggcagacccctgagagccaagagggtgtggctgagaggtggcatctagatagcttcatggagaatccagtgcctcagcaggaggagcagaccccctaacgtgccttccatcatgacctggaaggacacagaactgaaattgccacttggacaagaaagaagatcctcttagaaggcacctgggtgaacagatcacatggacgatcacgtgatactctccccacccagcctccagcactacagaagccctcccagacttagacggaagtctagggaaaggacgagaactccgaggaaattcaaaaatcactgagactgaattttttttccactgccagtggcacaaggactcagcatggaaattaaattgcattaaagaaaaaatgttttatcataagagtctccggactgagacttttactacactgcccctatctgggcatttgctcggctggagaaacacatttcagggtggcactggcctctgagcatgcggaaggaagtgtggaattctaagccacctactgagggcagggaggtactgggagttcggaacccagaaaagcagacaaacatcctgaggccaaagttacggagactgataggtgttctccccaccgggaaggtctccccttctgtgtgtggaggtggcaaggagggccctcttgttggcaaacttagagcttcctcccaaggtattttggacccattacgctctcaaacaggaacctaattaaatatatatatttatatatatttataaatatacatatacatatatatttttttaagggatggggtctctctatgttgcccaggcta

SEQ ID NO: 19815 - DNA, 1044 bp, Homo sapiens
ttacctatatttatgctatttatcctgtgaggcagacattactctttttatacccatttttacagttgaaaactgaggttcagagagggaaagcaacttgtccaaagttacacaactggaaagtgacagagccaggactccgatactagtcttctcgctccaggtggaggtttcttcatgtaaacccctctttgaaaataactctttggcaatgcacttaaaaagagccataaaaatggctcatcaaagctgtcccgctcagtgagaagaatagtatcaagtgtcctctcaagaaggagctattatgaacacagaaactgaggaccagaaagtcaagctaggtggacggttgagctgaactaaaactgaattgggtgttttgtggaactagactcttgtcctttgctgagcacagaaggggcccatccagctaccccagagggcaccagagcttggtgctgggagctcaaagccaatgcagccactggtccattctaacccagctctgcagcctctattcacatagtccctcagactgtgaaatgaatgaatgaatgaatgaatgaacaaaaatgttctgcttctcacctccacctttttccccaccacccgcctacttggtgtgagagccctgttctccactcccaaaggtcaacccccaacatctctcctctactatctgcagggaatctactcaacctcttcagtctgacttctcaaccagtaccttatccccctcctcctgccaccttcttagctgcccccaagcctggccctgggaggagcgaaggttacctgggaactagcattcccaatgctgcccccgcccccccgccccacaatacacactcagttactgactctcccacttcttctcccaattttctcatcctgctgctaagctgtccttttaactggcatcctatatggctttttttttttcttttgagatggagtcttgctctgtcacccaggctggagtacaatggtgcgatctcggctcactgcagcctccacctcccgagttcaagtgattctcctgcc

SEQ ID NO: 19816 - DNA, 1044 bp, Homo sapiens
cgggggatgcagaatggtttacagagggaccgcgaggcgctgattggtcgcaggccgcagtgacgtcggcgggcgctgcattaaggcgagggggcttccagagctcagccaacagccaggagcagtgaccaagccgccggagctggggagagacgcaccggggcggcgactgggccaggagaccagggactgagggacgcgcccggggagggccagcaacaagccgcggcccgggcgcgacagcggcggtccgcgccgagccgttccagccgccggcctactgtagccgctgcgccaggacatttttttttaaagctctccaagctgcccccctcctccccgactcctcccgctgcaaaagaaaaacaaaaaaaaaaaaggaaggaggctagaaaggaaacccagatttgccaccacaacgaaaaaaagaaggggaaaaggaaaaggagagaaagtcgagcgactgtggggttagacggaggcagacagagcgtgggccgagcgatgcggggctgtgcgcccaggcggccgcgagttgtgactggagccacgatgcacggccaggcgcggtgagaagccagcccgtagtgcctcccgaaggagcccgggcgcagggagggtcgccctgaggacacggaggccgccaggcaggccaagggccgaggtgactgggctggggcggtagggaaggagcgagtgcgcctggctgcctccgcacggagttgtccctctctgttttcgattgacacaaacacttctccaaaagcggggaaacctaagcaacaacagcaatcaacaccaagatcttcctcctaccctcccctctttcccttctcccgcggtcggccctcgccccctcccccaggcccagcgcgggcgctcggcgcgtccagacccgcggcgcgatgccggcagtttaggatccaaagcttctctgctccttttgttctttccttcccttttttaaaaaaagaggggggaaatcccagtggtgggcagcctggcacgcacacagtcgccctcataccccgacaaaagcagatg

SEQ ID NO: 19817 - DNA, 1053 bp, Homo sapiens
ggagtgaaatttgggtatgggagcctacctggaggcagctgggcctgtgggcggaaaggaggtgagactgctgaagctccaggccagggggagtctctggctcagtgctaggtgtccggttcaccgggcctgatgccctgcgtggctgtgggtggatgtacctgcctgggaggctggctgtgcatgtgcacatgtgtgcaacacggaaggccctgaggcctacaggagactgtgagaacctgtgtacatgaatgagaagtcgtgtgtctgtgtcactattggcaagaggctgtggataagtatgtttggcactgtgagattgtacatgggtgtgaaaaggagattgtaggttttggtatcataggctgtttctgtgtctctgtcatggttggggggagggttgctgcaagagaccgtgaaatggaaacgcggtgtgtgtctgacattattttggagaggcgtagtctctatgtgtgtacagccccagagaagcggtaactgtgatagtgtgactgttagaaaaactccagctataccacaactctccccctccagacacggcggcctgtccaggtcctcctgtgggattcctgctcaccattggctcagggtccgccctgagtggtcctagtcagagatcgcaccgtcaccactaccctacacacacacacaagcgcgcgcgcgcggtgtcggctagccaggcggtgaaggggtgctggctaggcccggagcaccccggggtcgggggtggagtctcggtggcctcaccccgccgccatgtgctgcaggtctggttccagaaccggcgctccaaggagcggaggatgaagcagctgagcgccctgggcgcccggcgccacgccttcttccgcagtccgcgccggatgcggccgctggtggaccgcctggagccgggcgagctcatccccaatggtcccttctccttctacggaggtgggtgcgcgccgaatggcggggcacggccaggtcggggcgggcttcgttggaagcgggtggcagcgcgggggggcacgcctcgctctctgtaagcca

SEQ ID NO: 19818 - DNA, 1046 bp, Homo sapiens
taaaggacataatcaatagaaagcattagcacagtgtctggcacacatctcaccatgaatgttaggtactaatattatctttttctgctcaaagaggcatttggcagtgttcgaccatgtgagcaatcactcaatagttatcagtgtaactgagcctcactagtcttcagtgttttttacttttttattagtatttggattctttatataatttaaattaactaattgttctggaaagtgttatagtttactaatacttacaatgcagtgttggcctcttacgacgctatggaaagatggctacagatttccttattgctatacccagctactacctccttgaagcgtttaacttttccttgaaatacttttctttggcttggtgacactacctgtgctgtttgggttctcctacctttctgatctcttctctggttccttttgtatcctctcaatgtaaatttcattccgtttagaatcctgtcctcaggttgcgttttctcaatatagtctctccttggcactgtcacttactctgataaccctaactattgcctctaaaataacagacttccagctgtattctagctccagtaaactcctgagtaccatgcctttgtagcttcagcaccctaaactctacttttcagaaactaaatgaatatctccttcctctccacacaccaccccaaacacgtaaacttagtccccagtcaccttggtgttacatgttggtaatttaaacttgaactgtggaagtgatttcaaagacatcgtctgatattttagtggctgcataagtggtaagtcatggagtaatcttaacaaaattaagggattttctgtgcacaaaaccatttctctaaaagggtttgctttttctctctttcttttttttcttttttttttgagatggagtctctctctgtcacccaggctggagtgcagtggtgcgatctcaactcactgcaacttctgcctcccaggttcaagcgattctcctgtctctgcctcctgggtagctgggactacaggcgcatgccacc

SEQ ID NO: 19819 - DNA, 1525 bp, Homo sapiens
taaaatcacacaggagtaagataaatatacagaagccttcaggaagacagtactcctttgactgacattcagtctcattttatttgttttacttctgtaactttagataatttctttatatctctgtcttgatttatttattctctgatatgaaaggtgagactgctgctaatggaagtaagatggggattgagaactgacttatctagcaacatggtgggcatccttgaccttgatggagtttggcaggctagtaggcttacaggcttgactggaatgggtttaagagagaatggagtggctgggcacagtggctcacgcctgtaaccctagcactttgggaggccaagatgggcagatcacttgagcccaggagttcaggaccagcctgggcaacacagtgagaccctgtctcaatttttaaaaattaattttaaaaaagaaacaaaaaaagagaatggggaaaatgaaatagtaaagtataggcaactctttgaagggttgttgctttaaaggggagcagagaaatggggcattggatggtgaaggatgtggtcaaaagaggggtgttttgcttttttttttttttttttttaaggtgaagtatcagcgtgtttgcatgttgataggagtgacccagcagagagggggaaattgatgatgcaggagagggggacatctgttgtcacagtgtcctatagtgggtgagtggggatggagtggagatgggccagtgcacaggagtgccttagatagcaatgtggaccatctcatggtggcgggtgcctgtaatcctagctactcaggaggctgaggtaggaaaatcacctgaacccagaaggtggaggttgcggtgggccaagattgcgccaccgcactccagcctgggtgaaagagcaagactgtctttaaaacaaaacaaaacaaaaaccaataaactgcatttacagtgtattaccatgtaaataaggtagactactaggacagggaagaattggaaaattgtgttttcttccctgttttttcagtcatggctcctaggccactcaaaggagaatattcctagtttagttcaagtttttagttgctctccattacctgcttaaaatcatgctattttcagttcgcttcctatttatttattttttcccttttgcccccctcccccccactgtagctcagttttatcatctcaatcctttttttcctaaactttacatcatgccatctcttgtgttaaattttccattttgagctggttgttctctaggagtagtgcacagctgtgctcttgggcctttcattgctcttctggggagagctaccgctttcgggttttcaggctctcttttgttatctcagtttactgtcagtttgctgccaaacatgcatccagagtaagttatctgagttcttgtaggtttgaaaatactgtgccctcattcctcattgatgtattcttgtttgattgggtagacctttctagattgaaaattactttccctcagaattagaaagtattgcc

SEQ ID NO: 19820 - DNA, 1024 bp, Homo sapiens
agacctggcagctttctggcttcacacccatttgtcacccagcatttccctttgtgtatagaacaagaattaattaggctgcactgcaggaaaagtttatggctataatttatataggatgaatttttttttaaagagacagcattgttttgttacacctatatacatgtaagtgtgtgtgtatagaaagtgtttttttccccctcttaaagcagtgtctgtaagcttctggagtaaacatttttttttttttttcctaatgcaagatgatagtgtaatagatgcatttatcatgattgctgtctgatgaaactgttggggttttttgtttgtttcttgttttttaattcattgtttactagtgagaacactcagttttaggtttacattttagacattggtcagacttgtctggtttccagagctttgtattctttctgtctcttggaagactcgggattctgtcttttttagggtcttgctcattcaattaatgttttcataatcaatgcaagtcagaacttgcaatttgttcctgatttgcacattaaagagctccattaattaagaatcttggtgtttggcatgttcccgcaggatctgtgcattatttacatggtgaaagtgcaagatgcaagtttctcagttgtaagggcaattgcagttaatcctgctttttcttttcttctttctttcttttttcctttctttttgcttgtgagtaacaattatttcacaactcattgaaactccttaaggatacattgtaccaaaataggaacaaattattcaaaagagggggctatggtgaaaaagtagaaagtaaatcctttttttaaaggattttaaaggatttatcctttttttaaaggactgtgtacaacacagtcacacaattggtgagaggcaaagccagtgtagaaactgaggtctgctgtgcctcacaaacgttgctcttggccacactgcccactcactatgcatatggtttaacttaactcttttcatctgagggttttctccc

SEQ ID NO: 19821 - DNA, 1027 bp, Homo sapiens
gttgaagacagtggaatcggtgttttttaagattgtgggagaattaaaggcatattttaatagatgttgacaagaagtgaactaacaaaagcaaagcaaaggatttgcttgaaaagatttaatcaaacgtctttcttgggggattaattgctggggatgactagtgcaagtggcaggcttgtgtggatttgaatgaaaagtattgttctcaggccaatatatcgtgtgtcattttgacctatagtttagctctagttctagagttacttttgaaggagaaaaaaatgctcttgtaatctgtaaattccaattcaatgtatttatctggggtaatatgaatgggggagtttatgtgtacttgtacataaataattgtaatgtttgcgtatttatttaaaaacaactgtatagatatttaaaaactgataagctttatttactttatacactcactcttcctgttctcgcttcacgccattgccagaaattgtacttactggtttataatctaattaatgaactgtgtgtccatgcccaaacttattcctcgcttacagttttgtttatgttggacagcctagatgaatcagggaaaaaaataaagctgttaggtgaaaatggtttttagattggtgacattttatatatagaatgcttgcatatgggtagcatataaatgaatacctaatataggagtctgtgaatactgtccaatcctagtacaagcagagcttaagatttttaccatgtgaaatatgatttttgatagtaatatgccttctatttttacagcattaaaaaaattctaaaatgccttaatatataataacacagttactatttttaccttattttgtaaggacaagcaaaggcttgtccacattttataaacgagaaaattgagactcaaagagattaaattggtccattcagcataacatgactagttagtgacagtgtcagttgaaatacagggcccctaacccccagtaaagtactgtttacatttatcctctactgaaaatta

SEQ ID NO: 19822 - DNA, 1034 bp, Homo sapiens
gatgttgtcacgatgtaatggtaatcattcatttctatagcaaaatctactgaacttctggcactggggtttatacgattcagacttgggattttaactttattagaaagaatgttttattcttaaaattgaggccttgtaagtgttcaagtgctgaaaatccaaatactttaaaggagtggatttcaaagcaataattattaaagtatcagaagctaatctccgtgtgtagaaaaatgatatgacctgcttaagactaactttttttttttaagaacaattatagccactcacaaactcagtcctttacagaaagtccctcctgaaaagatgattttctatctctctgctgacacagaaagatagagaaaccaatgtagcttgccttcagcactgattttctgcattatctgacactgcttaatgttgttgcagggttttggtgcctttgaacgctcaatcttgactcagatcgaccatattctgatggacaaagagagattacttcgaaggacacagaccaagcgctctgtctatcgagttcttggcaaacctgagccagcagctcagcctgtcccagagagtttgccaggggaaccggtaagaactctgtaatgcagagtgattatggggaatagtttctatgaggcttattagctgaaaaacttgtagctattacctgtttatataagaggttagtgagagaaaggaaagcaacactactttactggattactgagagaaacttgagtgtatgtgagaggagagagtttttaaaaatggggcttctattaactcctgtgtgtcatcttctcttaattttgagtttgatgcaggagtctggtagtagaagcattcataatccaattttcaaaattcagttttaaagctacttctgtagaaatgtcagtattgaaacaagtgtgtactttaggctcaacgtttgccatttaggtactttagaaagggtgcagaagtggaatagtcaaattcttttgtttaaaggaaacatttaaaattttttaattatggaa

SEQ ID NO: 19823 - DNA, 1034 bp, Homo sapiens
gacacgatatatcatgcctaatggaaatatatggggtctgatgagaaagttttctgtgttgactaataaattttaacccaatggccaagcttagtgaaatattatggcctttgaagtattttagggcttgtgctgagaaaatagtactgctttattcaatgaatgaatttatcatttcttccaaatcataggccttagcgctagctccggagtggaggcatgctgcaacgcagaatcaaaaagtggaaaaactaatcaaatccttaaagaccaagggcagtgaggcagaattaggctgactttttcagtggtagcctctagctatacattctcttatttgagtaaccaaaggtggactatttgtaactttagtattaagatgcttcttagaccttatttgcataacctgatttcctttcattcttccctgtgtcattctgtaaatattgcacttccccttgcaaaaggtggctgcttttcatgcttgttgacaaaatctagaagactgcttgctacttgactctttgattttaggaatattattttgaaatagggtctcactctgtcacccaggctggaccatagtggtgcagtcatagcgcactgcaacctcacactgctgtgttcaagctatctttccacctcagcctcctaagtagctaggactatgggtgtatgccaccacacctggctaatttaatttttttttttttttttttttttttttagcgacaggttctcactgcattgcctaggctggtctcaaactactggcctcaggtgatccccctgcctcagccttccaaagcgttgtgattacaggcatcagccactgtgcccagcccttagaaatattattgaataatcactgtatgcaaaggcagtggtggagttccaggtattaggggtaagagtttcagtcagatgtatcccctgcctgcaagaagctcatagtcaagcaagcaagatgacataaacataaataaccagaacgcttggtgagtgtgtatcgaagaattcagaaaagggagaaa

SEQ ID NO: 19824 - DNA, 1079 bp, Homo sapiens
ataacctatccttttgcacctcccttctactttttccccttggagacctcatcctagagctctctggactcttctggcgtggctgcacaccaggcctgctggctgtattcctgggacttgcctttgcttcttccctgagttagacctctcgtttctaatatcttatgtcttgattttagtatactcatttactgaagtacatctttctgtgaaagagtacacagaaagtaaattgttgagtccttacgtgtatgaaaaatgcatttatgtaactctcattatacttggttaataatttggctgaggaggcagaggctgcaatgcgctgagattgcaccactgcactccagcctgggtgacagagcaagactgtcttagtaataataataataataataataataataataataaggctgtatatggaatttgagtctggaagtcattttccatagaattttgaaggtaccttgctgtcctctgctatctgctcttgctattgagacgtcttttcccattcagatttccattctttaatatgtagggcgactgtataatttattatcaaaactgggacaggtaaagtgctagtctgacagcatattaggacaacaggtgtaaaccaggactttcttggtaaactgggacatatgatcacctctttatatgtaacctgttttttctttaactgcttaggatcttctctttacctctggtgttctacatttcatgatgatgtgtcttgacagaggcccttttttattcattgcactaggtctttgcagttgtattcctgttctttctttgatttgggaaaattttcagtattccttcaaacattttctcccagcctttgttagttagatgtttgactttctggattatcctctaaatttttgtcttgtcttgcaaataagcaaggggatattatctttttgccttttggctttctttttgttttatatcagagattttcattcatttaagttcttctgttggattttttaaaattttctgtttagtgtttaatttctcattttagtctttttcacagcatcctgctcttatcaaagtatacc

SEQ ID NO: 19825 - DNA, 1051 bp, Homo sapiens
acttgaatttaggaatttgagaccagcctggacaacatagcaagaccctctctctaccaaaaaaaaaaatttaaaaattagccaggcatggtggcgcacacctctagtcccagctccttggtggtggtcggggctgggaggcagaggtggggggatggcttgagcctgggaggtcaaggctgtagtgagccgtgatcgcacactgcactccagcctgagcaacaaagcaagaccctatctcaaaaaaacaaaacatcaccaacaaaaaaacaaggatacatagaggccttttttataaaaagtgaagaattagactgggcatggtggctcacgcctgtaatccgagcacttttggaggccaacacaggtggatcactcaagtccaggagttctagaccagcctgggcaacatagtgaaaccccatctctactaaaaatacacatattagctgggcatggtggtacactcctgtagttccagctactcaggaggctgaggtgagaggatggcctgaacctgcgagtcagaggttgcagtgagccgagatagcaccactccattccagcctgggtgacagtgagaccctgtctcaacaacaacaacagcaacaaaaagtgaagaattagaagcaatgtatgtgttcaaaaatatgaaaatagggtacttctgttcctacggttatatgcagctatttataaattgtttatgggacattgcttataaggctaggtgagaaaagaattcattcaaaattgtgtgaatatatatatatataaggatcattatgtgaaacaaacgtaacaacaattgtctataggtagaaggattgtgtgtgggattttttgtttgtttgttttttagataagctcatactctgtagtgagccatgatcacaccactgcactccagcctgagctacaaagcccagaccggagggctcactgcagtctcaacctcctaggcttaagcaatccttccacctcagcctcccgagtagctgggactacaggcacatgccaccgtgcctggctagttttcttacttttttat

SEQ ID NO: 19826 - DNA, 1058 bp, Homo sapiens
tgtgtgtgtgtgtgtgtgtgtgtgtgtgtgtgtgtgtgtctgtgtctgtgtctgtgagagaggcaaggtctcactctgttgcccaggctggagagcagcagcacaataatggctcactgcagcctcaacctctcaggctcaattgattctcccacctcagcctcctgagcatgtgggactacagcagtgcgccaccatgcctggctaattttttgtattttttgtagatacggggttttgctgtgttggccaggctggtctcaaactcctggacttaagtgatcctccctcctcagctcccaaagtgttaggattgcaggcatgagccactgtgcctggcctcagctttgagtgattgaccacatatagtccatgagagaatgctccacttgtgactcatcttttgaccttggagaagactcttaccctccttagacctcaatttttccttctctcaattgaggatagtaattcctgtgttatttttatatcctctgcccttatcctttattgacgttatgatgaacaatgaataatatgggtacactgttttaagctatttgaagtaaaagaacaagataaaataaaggcatcaagacagtattgttacacttttttttttttaatatttgtgaatcattctttgcttttgtctttttttttttgagatggagtctcgttctgtcacccaggatggagtgcagtggcgtgatctcagctcactgcaagttctgcctcctgggttcatgtgattctccagcctcagcctcccaagtggctgggactataggtgtgcaccaccacgcctggctaatttttgcatttttaatagagatggagttttgccatgttgtccaggctggtcttgaactccccaccttaagtgatccatccccctctgcctcccaaagtgctgggattacaggcgtgagccaccgtgttcaacctttttttttttttgttaaataagagacagagtctcacacttactctgtcacccaggctggagtgcagtgtcactatcatggctcactgcagtctccaactcctgggctcaa

SEQ ID NO: 19827 - DNA, 1029 bp, Homo sapiens
aaaaaaaaaatagctgtcataaatgaaagtctgtatcgttagtccaagagtagatagaactaacctaattactgattgaaacgacccaagtagcagttcgagagttactgactgctccaatctaccagttattgttagtcagttttactctccatcttctttgcagatacatctttggattagttgtttggtcagtagtgatccccagagttgctgctctggtgtctctgcatgatatttgcatgacagttgtcaaataaaacttcattagcagtaaattaagttgtagtagttaatttagtttggagaaaggcaaaatgacccatatgaaggatgaaaaaaatacttaccttgcttgaggatgtgtaggtgggacatgcaagaaatcacactttttctcagctaatgggaaatcttctggatggattattttgtctgtagcttctttgttttcctgtgggagttaataccataaattttggccataattcttcctaagaatgtaagatctgcctttaattgtctcgtccattactgccagcagttcctgcccctgtgtagtttaaaagacagtgaggtggccgggcgcggtggctcacacctgtaatcctagcactttgggaggccgaggcgagcagattgcctgagctcagtagttcaagaccagcctggccaacatggtgaaacctcgtctctactaaaatacaaaaaattagtcgagcatggcggtgtgcctgtaatcccagctacttgggaggctgagacaggaaaattgcttgaacctggggaggcagaggttacagtgagctgagatcacaccactgcactccagcctgggccacagagcaagactccatctcaaaaaaaaaaaaaaagacagtgaggtggctgggcgcggtggctcatgcatgtaatcccagcactttgggaggccgaggcgggtggatcacctgaggtcaagagttcaagaccagcctggccaatgtggtgaaattccgtctctactaaaaattcaaaaattagctgggt

SEQ ID NO: 19828 - DNA, 1029 bp, Homo sapiens
agtccaggaaatcctttaatactttaacatttttaaaaagtgggctttagggagggctatgtttgatgggttcctttgcaattgggattttaaggcaaaatggattaaaaatgcttttcccaaaatcacaagaaatacattaaccattctctgtgagatttaaactttactaataaggttaaagctttcttttgaacctcttcctcaaaagtaactgccgagtgcatcttgatcggtttgtgtatatctttttagacttttctaagcatttttataaatgtccgtttgcacaaagtggttttttaaccgaaattaattattttaaagttgacttgtcctgtttataaagatttggcttctgtcaagaacaagtaatgtgtttaagtacaactgttggtaaagttttaataatcctgatagacggtgttacttcccagggcaaggggcaaattaccccttttaaacaacttcaaagtagtagaatcattacgatcctaggttttactcttaggtgctgaataaaactttcctatttaaaaaaaaaatctaggactactagcctattgtcttgtctttgcttataaagaaacgtcaaagggagtggaagacagggagagttgctaaagcaaccaaggcctgggtataaacttacagagctaacatttaagatggctttattatttatgaaagcttcacttcacctgggtgaagacaaaggaaagtgttaatgtgggcacccttcaaaccggtaatttcaggaaatggatgggttaaaacaaaattcatgtcaggattctgtggatttatatattatacatttaccgaggacttttaccatgctaaaggtgctgtgcctgaatacagaggaagaaggcaagtaaggtcggtctctgaccttatgaagctgacaggcaaatagtgacattcagagagagttggccagaattgttgtcatggttctgaattcccagaaatcaacattagatttattgaattgtgaattatgtaaaaaagtgtctaaaacaaatg

SEQ ID NO: 19829 - DNA, 1044 bp, Homo sapiens
ctaggattacaggcgtgagccaccatgcccagcctagaaatgttttactaattagtaatgtagtcttctaaagggaactattacattgtcatattgtgtttccagacagtattttttcagttaaagccaagggaataacttcaggatcctctgccttgggacccctctcgttcagctgaaaacttcatccctccctttgctgtaggatggcacagacacccagttgccctcacagtgcagtcggactgctctcagcatgggagcgggcatggccttcgccagttgcctccatcccgctgaagcagaagactcagctgtttacctcaccctgctcggaaactctagcgtggtaattataggtgcctttgatttgtaaagaaaaatgggaaattaatttattagtacattataagtgaagttaatttggtataaaatcactaaaagatgtggaattgggccaggtatatggtaaggaagtcctcatagggtgaaggttgaaactctccgctggagctttaaggattttgatatgtctgatgagacatcaaagatgatcaaagggtgattattaactactgagctgttagtcctgtgaactttattctaatttataaattctgttctttatcttcccttaaagtagtaatgagcttgtaaggactgaaatcttatttatgaaaagacctgcattttctgagatgtcatggtcttgcttctcagagggcagtagtaactttgacagttttgaggcaaactcacacctacctgggttttattgctgattagtgatttttttaagcactttgcctctagatgttctgagttacataaataacagtttatcatttaaccaagcacatatgattcacatttaatttttaccacttagtcctggaagactttaaaatgttatttatataagccattgctcaaattggtttccagttatcattaaacaagtttaaatacagctgtggacttttgcgagctttttattggatatttcacacccgaagaccatcttgtaccaccaacagtttagga

SEQ ID NO: 19830 - DNA, 1024 bp, Homo sapiens
atgatgaacaaagcacatacggttttaccatgcagttctcttctaggggaggaaaacagtcattaaatactgatcgcacacaaataattataggtgtagtgaagtaggagtgccatgggagcatatgacagggaaagataatggccgggcgaggtggctcacgcctgtaatcccagcgctttgggatgacgaggcgggtggatcacgaggtcaggagatcgagaccatcctggctaacacagggaaaccccgtctctactaaaaatacaaaaaattagccaggtgcggtggtgggcgcctgtagtcccagctactcaggaggctgaggccggagaatggtgtgaactcaggaggcagagcttgcagtgagccgagattgcaccactgcactccagcctgggcgacagagcaagactccgtctcaaaaaaaaaaaaaaaaaaaaaagataacttggtctgggagatcagagaagacttgcctgaggaaatgatatttaaagttgggattgtggctggatgaggtggctcacaactgtaatcccagcactttgggaagccaaggctggtggatcacctgagaggtcgggagttcgagaccagcctggccaacatggtgagatcccatctctactaaagatacaaaatttagccaagcatggtggcacatacctgtaatctcagctactcggaaggctgaggcaggagaatcggttgaacccaggaggtggaggttgcagtgagcccagattgcaccactgcattccagcctgggcaacagagtgagactccatctcaaaaaaaaaaaaaaaaaagttttttttttttttttttttttagagttagccaggtggagaagtgtggtgaggaatagcattctagggaaacagaacagtacaagcaaggctttgaggttaaaagagtataaaggggtgtcagattttgtcaaatgcttttttgtgtctattgagatgatcatgtgatacttgttctttattctgttgatatgatgacatattaattgatt

SEQ ID NO: 19831 - DNA, 1047 bp, Homo sapiens
ccaataggggccgggggcgcgcgcggcgtcactcgccgtggaggccagcgcgagcacgccctggggaaagtggcgtggctaagcccttccggaagtgacgtcggcttgggggcggtgctcggcggtggcggagcgcggcctgggctcgcgctgggctccgcgcgccccccgcccccctctatgaggcagaggccgcggcggccgttagcgctgtcgctccgggggccgcggcgggcggggctccggcggggcccggcctagtccccaccccagcccggctcccagccgcccgccctccctccctctccccgatgcaggaggccgagctccgggatggcgaggcggcggcggcggccgcttcgtaccgcgtcctgagccgcctccttggctatggagaggcggcccccgagccaggccctccgccaccgcccccgggccatggccccccgccgccacccttcctcgcgcggcccggcccgcggggctcccggccgccgcagctgatggtgttccgcaacgtgggtcggccgccggaggaggaggacgtggaggcggccccggagccgggaccctcggaactgctgtgtccccggcaccgctgtgccctggaccccaaggccctgccgccgggcttggcgctcgagcggacctggggcccggcggctggactagaggcgcagttggcggctctggggctcgggcagccggcggggccgggggtcaagacagtcggtgggggttgctgcccgtgtccgtgtcctcctcagccgccccctccgcagccccagccgcctgctgccgccccgcaggccggggaggaccccacggaaacgagcgacgcgctgctggtcctggagggcttggaatcggaggccgagagcctggagactaacagctgctcggaagaggagctcagcagcccgggtcgcggaggaggagggggcggccggcttctgctgcagcccccaggccctgaattacctccggtgcccttcccgctgcaggacttggtccctctggggcgcctgagtagaggggagcagcagc

SEQ ID NO: 19832 - DNA, 1049 bp, Homo sapiens
cctgtaatcccagcactttgggaggccaaggcgggcagatcacttgaacctggaagttagagaccagcctgggcaacgtggtgaaaccacatttccacaaaagatacaaaaattagctgggcactgtcatgcgtacctgtagtcccaggtactcgggagggtcaaggctgcagtgaaccgtgatcatgtcactgcactccagcctgggcaacagagtgagaccctgtctcaaaagaaaaagttgtgaaagccatcaagcccaaaacaataaattactgctgaagaaaactgtgtccagaaattgtatgtgacttcataggatctgtgacagagccaatcaaggaaatcatgaaagagatatggcaaaaaaagaaggtgaagggtgaaggatttcaagatagggatcttagagaaattcaagaactcatagataccacatcagaggaattaactgaaggtgacttgatggagatgagttcttctgagtcagtgccagatgacgaggaagaagacgtagaagaaacagtgccagaaaacattaatgtcaggcaatctggcagaagggtcgaggttatttgagactgcttttgagttattttagacttggacccttctatgatatgggcactaaaaccaaagcaaatggtagaagaagaattggtaccatatagaaacatttttagagaaatgaaaaagcaaacctgagtgtggaggctcaagcctgtaatcccagcacttgggaggccaaggcaggaggatcacttgaggccaggagttcaagaccagcctgggctggtagcttcagctattcaggaggctagggcaggaggatcacttaaacccagtagttcaaggatgcagtgagctgtgatcatgccactgcactctagcctgggtgatagagtgagaccctgtttctaaaaatagaaaaagcaaaaaaagtcagacaaattataacatttccataaatttataccacatgtgccttcctctcctacttccccttccaccttctctacctcttctacctctgccacccctgagacacc

SEQ ID NO: 19833 - DNA, 1050 bp, Homo sapiens
gtaccacattttgtttctccattctttaggttgtttccagtttttggctattatgaaataaataatgcttctttgaacattcatgtacagctgtttatgtgaatatcttttcaattctcttggatatattcctaggcgtgaaattgctgggtcatatggtaatcccatatttaaccccatgccagactcccaaaacaattgcacccaagattttgttattgtccatctttttgaatatagccatcctagtgagtatgaagtggtagctcattgtggttttgatttgcatttccctaatgactaatgatgttaacatcttttcatctgcttattggctattgtatctctattcacaacctttgctcattttataattgagctatttgtcttcttattgagttatgagttctttacaggctgggtatggtgcctataagcccagtacttagggaggccagggcaggaggattgcttgagcccaggagctcaagacctgcctgggcaatacagggagacactgtctctacaaaaaatttaaaaattagcccagtgtggtggtgcatgtctgtagtcctagctacttggaagactgagatgggaggattgcttgagtccaggaggtggaggttgcagtgaaccgagatcacgccactgcactccagcttttattttatctcaaaaaataaagttctttatatattctggatacaagtcccttgtcagatataaattacaaatattttctcccattctgtgggttgtctttttactttcttgatggtattctttgaagcatgaaggattttgatgagttcctattccaacttttttttttttttttgcttgttatatttagaaaagtttgcctaaccaaaggtgatggagcttaatgcctatattttcttctaggagacttaaacttttagcttttacattaggtctactatccgttttgagttaatttttgttttttaatttttttgtttggtgtgtatgtgtgtgtatatatatatatatgtacatatatatatgtacatatatatatatatg

SEQ ID NO: 19834 - DNA, 1157 bp, Homo sapiens
agtcttgggagcagtgaaatgggggttggatcatagagacaggcgctggggactcgggtactgcagttaggaaagtagcgttatgagttgtactgaaaatgttgattctctaatctgccagaaaaggacctgtcttttcatgcagatttcatattgtctttgtccttttcattgcttcttgaccttcctggcaggtgtcgctcagtttcttcctgtttcccttcctgtcctctccacacctgctatcccgtcccactcccatctacctcccgggaagccagccctgcatgctgagtttgtgacctgcttcattcccatttcatttctagagggtttagaggtgacctggaaccgttccctttccctctcctaccccctcctctgcaacaccaagaggcctggaggggcagacagaaagcagccagccacggcgggaagacatgcatgtttggttgcagctggactgcgatcgtagttcctcctggagatagagtgtgaggaacttaggacactcttcctcagactctgggatcatcacataccacactgccccgctcagagtttcgtcctgagctccctaaccagctcaggtggagcagaagcctgctctcactcctccatctctggtgctcccttgggcggggacctgtccctcactcttaggcccagaacctgtccaagggacaggtagggtccaggtgccactttgggtagctggctgttggaatgcccacactggtgctgcctgtggcatagccactgctgtacgtttttggttgtttttaagaaactcgatgaagaggggtgtcattctgggctcggggtggttgccaatttttcaccagaaagggagccaccccttgcaaccacttctgtctccgttagccccccctctgccctcctccaagccaaagcgtggcctggcttttgtcttcccatttagttttcctcttttacccttccttttgtgcttaatttattaaaatagttgctgtataatttattttcataaactataaaaaaatactaaatggttaaaatagacttgcaggccaatcttaaatggggtgggaggggtctgagggtgggatggggaaagggaaagaggttttgatataaacaaaacaaatgcactttgggtgtgttttggtattttt

SEQ ID NO: 19835 - DNA, 1055 bp, Homo sapiens
ctgcccctggccctgcctggggcccctgccccactcccgccccagccgcagaacgggttgggccgggcacccggggcagcggggctgggggccatgcccatggctgaggggctgttgggggggctggcaggcagtgggggcctgcccctcaatgggctccttggggggttgaatggggccgctgcccccaaccccgcaagcttgagccaggctggcggggcccccacgctgcagctgccaggctgtctcaacaggtgagggagagctcagccctgggaaggggaacagggtggggggctggctctgggaagggagggattttccccaaaacacccacaatccctaaaaggaaaaatggcctctggtctcacagggtatataatcctagtcacctcttggcctctaaggactccacagactgttagacatgtgtgtcctctggacggtagctccccagggacaaaagaattgttgacttcctgtcctgcactctaggatttccttctgggacagttcttctaaatcagacctgtatccctcttgctgcaccctatgagcacggtgctctaagatcgcacatccctgccttgcttcccctgggtctgagggagtctaggggcttgggattaggagcaggagtgtttccctggccctcccccatggtctgtgtgttgtcccccccccaccccccacccccacctcagccttacagagcagcagagacatctccttcagcagcaagagcagcagctccagcaactccagcagctcctggcctccccgcagctgaccccggtaatgcccctcccttccctgcctcaggtgccccttggtctgcctggaagggcacatctcagaggatcagggccagccaggagagggcaggagcaggcagagtgaggggaagctctaggctgggcctgtgggactggggctgggccctgtggagcatccatggcaggtaagggggataagatcatgcccaggatcccctgggcattgagaaagggctgctgtaatagccccaggtcgcatcctggtgaaagactctggag

SEQ ID NO: 19836 - DNA, 1166 bp, Homo sapiens
ggctgcgcgcggggcgttccaccgccaggcccgcccggcagggggcgccgggaccgaccgctcacgcccggcgtgctgaggaggccgctgggcgggcgccgtggtcgggcttccgtaccccgcccgcccctggcctccgccctcgcagaacgccgcggcgtcttccggggcctggcgggccggggaccgagggggcggggaggtgacccggcgggggcggagccagcgggcgggcgcggcgcgggaggcgaccatgcgcggcgcgggggcgatcctgcggccggcggcgcgtggtgcccgggtgagcacccccgccctgcaccagcccccgtcccgaaccccagccgggcccctgccagcccccactccagccccggcccggccgagcatcccggagctcccggcccgtcccgccggtgtctggcttgcctcagctcacaggcttttcccgagcgccagtccctgccaggacctccgcagccagcaccttctcttgcgacctttttcttaccctctcattcctccctcgccccttcagccctgtcacctcctccttcctagatggcctcccgtgtccttccctttccactgattttatttttccgtttccaaaccaccgtcttgtgatgcctgccatgcttgcgtaccttgcaggacctgaacccgcggcgggacatctcctcctggctggtgagtccccccatcctcccctcctcctcgcacaagacccccaggcacggagatctcaaaggcagaaacaggaaatggagctaggaagagtacaggcctattccctggagttagcccgtggctctcagggaggtggggcggaccagagggcactgggcagggcgccagtcttctgtactgaggacagcagcacctaatgaaccaagccccagtgtgggtggccctgccgtaggctggaaggatcccagcccgccttccctagcacgcaggtgggagccagcgtttgagggaaggcagctggaccctgaaacctgagtgcctgcatggctttgaaatctccctgtccaaagctcacggtcctatggtgtcctggggaacggtcttgttgggtggcatcagatcagcctcttgtagaggaaacctgccacacacacaggccagtgggaaactaggaagggtcgcaggccggacggtgc

SEQ ID NO: 19837 - DNA, 1048 bp, Homo sapiens
gccttggtgacagagtgagacttagtctcaaaagaaataaaaaataggtcgggcgtggtggctcatgcctgtaatcccagcactttgggaggccaaggtgggcggatcacgaggtcaggagatcaagaccatcctggtcaacatggtgaaaccccatctctaataaaaatgcaaaaattagctgggcgtggtggcacacaccggtaatcccagctacttgggaagctgaggcaggagaatcgcttgaacctgggtggtggaggttgctgtgagcaacttgcctcagcctcctgagtagctgggattataggcgcctgccactgcacctggctaattttttaatttttagtagagacaaggtttcatcatgttggccaggctggtctcaaactcatgacctcatgatccgcccacctcagcctcccaaagtgctgggattacaagcatgaaccactgcgcccagccaacgaaaaaaaaagttaataatatctgggattatctggataagaaccttaaaaccaaatactataacacagctcagggcctgtgtttgaacttcctattatgctgatgccgagttaccatctgaagtaacttttactgcagtgtttcagacagaggtgcgtagatggtatctctggggtccagattttaaaaagggtctggacattgctcaggtttgcagttcaatgcctcagcctgtcctgccagaaaaatcactgatttcagatgggctcatagaggaagctcccgtcaatagtagctaagaatccagaatttttcaggtcacctaatgtattttttttcttttcaataagagtaagacatttattttattatttttattttttattttattattattatttttttgagagtttcactctttcgcccaggctggagtgcagtggtgcgatcatggctcactgcaacctttgcctcctgggtgcaagcaatcctcctgcctcagcctcccaagtagctgggaccataggtgcatgccaccatgcctggctaatttttaaatttttttgtagagacaggggtc

SEQ ID NO: 19838 - DNA, 1049 bp, Homo sapiens
ttcccacatcctgggaatcatcccttacttcaggcatgtcttggggccagagctgggaatcttgagcctagaaaaaagagagttaagggaccagaccaaatcagagccagaggctgtggtttgaaggggttccactctgttggcaggatccggatcacctgtttgaaaccatctcccaagccatgctgaatgctgtggaccgggatgcagtgtcaggcatgggagtcattgtccacatcatgtgagtatgggctgggagaagtctagaagctctgcagacaccctgcctctctcccttctccacgagcatacaccccattttcccagccccctggtcaggtgtgagataagaaaggtgcttttggcagtcctgggtgagcaaaagtccatgcctccctatggctggtaactggcagcctacccagcttcctctggcctcttgtcaggtgaggttctgtgaccccgtgctcacaagagacatttcttccttaacaatgtctccgaagtctcagggatccgtgttggggtgagccacaacaaagctactgcagatggattgaaattctaggtggctcgcatcctctctccagcccagatctgtgtgatgttctgagctctagagaccaatttccaagcctcagccaactccctaagtgccatcctccttgtccttttacttgtttggggccatcaccaggaacctgattggatagagtaggaggtatccttccaaccactttcctacattgcaggataagcatttggacccttttgggggatagcctgcttaattaccgtgaaatagtatttggccaggcgcgttggctcacgcctgtaatcccagcactttgggaggctgaggtgggcagatcacttgaggtcaggagtctgagaccagcctaacatggcgaaaccccgtttctactaaagatacataaaattagccagacgtggtgtcacgtgcctgtaatcccagctactagggaggctgaggaaggagaattgcttgaacctgggaggcagaggttgcagttagtcaagatcacgcc

SEQ ID NO: 19839 - DNA, 1404 bp, Homo sapiens
taagttccagtgtttccatcctttttgagaccgtggggccaagaatgtgagcagtgtctctggcctggcctatttggactctgtgatgtgcttgggccccagttgactgaccaggtgcattatgctttcccaggtcagcagatccggaagctcatcaaagatgggctgatcatccgcaagcctgtgacggtccattcccgggctcgatgccggaaaaacaccttggcccgccggaagggcaggcacatgggcataggtaagtgtggtcatcttctccttaagaaatgataggtgctggcatctatgctgaaatatattcaggatctaagcactctgtctcatcttgagcctgtttcttactccttgatatttgatgtgttttctgcctgtgtgcaaatcagaaagttggtgctggtattggaattgagagtatccctggtaggaggtcacatttactaagtccctacctacactatgccaaggattctgtactttctagtttcagaatgatcgaaggaagctccttacaacgtgctgtgttgccttggtgcactgcctgttacacccacattctgcatgaagtgaatggggaattattgctgtatttgtgcttcctttaaaattgagtaaacgaaagaacttacgtagttgggatcatcatctggaaaatggaagtaatgctacttaaaatgaggttgtgaggattaaatgagttaaggaccctgacttgaaactatattcacttggtgtacttatacacagtgggcctgggtagtggcccgttcctaactcatcttctccacaggtaagcggaagggtacagccaatgcccgaatgccagagaaggtcacatggatgaggagaatgaggattttgcgccggctgctcagaagataccgtgaatctaagaagatcgatcgccacatgtaagcacaccctcttgggcccagtacccatttgctgctttgatggctagttcatttcccagagatttttttttttttttttttttttttgagatggagtcttgctctgtcacccaggctggagtgcagtggcgcgatctcagctcactacaacctctacctcccaggttcaagttattctcctgcctcagcctcttgagtagctgggactacaggcatgtgccaccatacctggctaattttttgcatttttagtagagacggggtttcactgtgttagccaggatggtctcgatctcctggccttgtgatccgcccgccttggcctcccaaagtgctggggttataggcatgagccaccacgcgtggcccacagagatctgtcttactggccttgggtagggagctttttttttttggagacagagtctcgctctgtcacccaggatggaatgcagtggcacgatcttggttcact

SEQ ID NO: 19840 - DNA, 1045 bp, Homo sapiens
gcaactcattccagaagctgactaggctcaaagggagaggtctggggatgtgcttctgtctccctagcatctcatctcttcccaaactgacccgtcttttctcttccctgaccagtgaccaggctgaggcccgcaggtctaagaccaaggaagcacgcaagcgccgtgaagagcgcctccaggccaagaaggaggagatcatcaagactttatccaaggaggaagagaccaagaaataaaacctcccactttgtctgtacatactggcctctgtgattacatagatcagccattaaaataaaacaagccttaatctgccttcctctctgcttcttgcaaggtttacggttactgagtgaggttttttttttttttttgagacgagtcttgccctgtcgcccaggcttgagtccgatggcgcagccttggctcaccgcaaactccacctccaggttcaagcagttctcctgcctcagcctcctgagtagctgggattacaggtgcgtgccaccacgcccggctgatttttgtatttttagtagagactgggtttcactgttggccaggttgatctcgaactcctgaccacaagtgatccacctgcctcggcctcccaaaatgctgggattgcaggcgtgagccactacacttggcctgctcactgagtcttttaccttgttttagtgggatgtagggagaaaaggaatggcttttatgcaagcctccaaaatactgtgcctcagaactgcccttcgaagcacgagtgacacctaagaagtggtctcagaatgttggttgggaccagtagttgtgacatcagttaaggaatcagtctttacaaaagccataggaaatacttagggtgtttatacttctcagctgacaagtgggggttacaaatgggacctgagcttggactactggctactacctaagctgtcactaaacagctttattgagatacagttgaaagtttgagacagaatcaccctgtcacccaggctggagtgcagtcggcaacccctgcctcctgggttcaagcaac

SEQ ID NO: 19841 - DNA, 1050 bp, Homo sapiens
gcggtggctcacacctgtaatcccagcactttggaaggctgaggcgggcagatcacgaggtcaggagatcgagaccatcctggctaacacgatgaaaccccgtctctactaaaaatacaaaaaattagccgggcatggtggcgggcccctgtagtcccagcagctcgggaggctgaggcaggagaatggcatgagcccgggaggcggagcttgcagtgagccgcgatcatgccactgcactcgagcctgggcgacaagagcgagactccgtctgaaaaaaaaaaaaaaaaaaaaatctaaaagttttgtaaggagctcacttatattctctgttttatcttctcactcgagactgcagcagcataatgttgagaatgtgacttacacatcatttttagtatgttgtgggtggaatacagaatgcaattagtaatgttggttattttaattgatgggtaaataaaacttctaatggagccaggatcagggcttgtgtgaaatgacagtggacttgtaaaagaagtcagtgtgcacataaagaacataaagcttacattagaggatttgtctgtttttttttgttttgttttgttttttgtttttttcccccgagacagagtcttgctctgttgcccaggctaggatgcagtggcatgatctcggctcactgtaatctccgcctctcgggttcaagcaattctcctgcctcagcctcccaagtagctgagactataggtgctcaccaccatgcctggctaatttttgtatttttagtagagacagggtctcctcatgttggccaggttggtctgaaattcctgacctcaggtgctccacccaccttggcctcccaaagtcctgggattacaggcgtgagtcactgcactggcttttttttttttttttaagacagagttttgctcttgttgcccaggctggagtgcaatggcgtgatctcggctgactgcaacctccacttcctgggttcaagcgattttcctgcctcagctgcctgagtagctgggattataggcccccgccatcacgcct

SEQ ID NO: 19842 - DNA, 1350 bp, Homo sapiens
aaagtgctgggattacacacgtgagccaccacaccagcctaatgcagacttttttttttttttttttttgagatggaatcttgctctgtcacccaggctggagtgcagtggcgtgatcttggctcactgcaagctccacctcccaggttcaagccattctcctgcctcagcctcccgagtagctgggactacaggtgcccaccaccacacgcggctcatttttttgtatttttagtagagacggggtttcaccatgttagccaggatggtctcgatctcctgacctcatgatccgcccacctcggcctcccaaagtgctgggattacaggcgtgagccaccgtgcccggccaatgtagacattttttaaaggtgataaaggtgatatttttgttgttgttatttggtaaactgttgattatctctcaaaattttcagtcttatactctcttctcatctcacagtttaccctatagggatactataggatcatcttagccctttgtaattactactaactgaacagaacaaaactggtaataaaaacctgtatggggggattaaaacatttcacaaatccaaataatgtggatcatttaggattattatccgagtattttttctttcctctgttataaccagttctttctgttctctgcctttctgcccttaaagcagtaatgtcatattttcctttctgcatgccctgtaatgtaataaccaaagattccccagacctcaggaggtaataatttctgcttctgaaacctccggaattcatgatgttgactcactcactccattgttcttgcttttgctttgttttcagccgactttgtggtagcccttgtccagctgtgtggcctgatgttatcaaactgccctacttcaacaccatgaaaccgaagaagcaatatcgaaggcgtctacgagaagaattctctttgtgagtttggggaaaatgaacatctcgtttctgtgtctggctggtgttgggacttggctttttcctggtctgggtagttaatgttgtcccagtttatcatggcaacacagtgtaggaaaacattttagtttcgaacagtatatgagttttatcatagcccttttgtaattttctcttctgaaggctttagacaatagaaaaccattttattttgaacaatatataaattttctcatagccttcttgatctttccatgagaaaaagagaatggaattgttggcttcatgggttttgtttgtttgttttttaaattgagacagggtcttgctgtgttgtccaggctggagtgcagtggcacgtttagggctcactgcagccttgacctgctgggctcaagcaatcct

SEQ ID NO: 19843 - DNA, 1035 bp, Homo sapiens
atgttggccaggctggtcctgaactcctggcctcaaacgatccacccgcttcagcctcccaaagtgctgtgtgggactgtaggcatgagccaccattgcacatcctttttttttttttttttaaaaagagatgggctcttgctctgttgcccaggctgcaatgcagttgtgcagtaagaactcattgcagcctcaaattcctaggctcaagtgattttccaatgtcagcctcccaaatagctgagactacagggtgcacagcattgcacccagctaattaaaaatatatatatatttgtagacatgaggtttcagtatgttgcccaggttgatctcaaacttctggcctcacgcagtcctaccttggcctcccaaagtgctggaattacaggtgtgagaccctttgaaacaaaattacaaatttgagaactgtagggtcattgtgaacttgtcctttctgtgttcttttccatagcattccttctgcagcacttgatttattggaccacatgctgacactagatcctagtaagcggtgcacagctgaacagaccctacagagcgacttccttaaagatgtcgaactcagcaaaatggctcctccagagtaagtgctggtagccatgttgtgaccctaaatctttccctgggccttagacgatgagaaactcataaaagaaccacagatgcccagtaagacccaaatgaagaggtgtctttgagtattatggttgaggtttgttttttttgttttatctttgttgtttttttctttatataagtaatagatttagctttgatacttgttctaatttgactcaagctatcttcttttgtccctggatctccatcccagaatattgttgtgtagagcctctttgaaagtattccttttagatttttgtgggttggtttatttatttatttatttatttttgagatggagtctctgtcgcccaggctggaatgcagtggtgcaactcagctcactgcaacctctgcagggttcaagcgattctcctgcctcagcctccc

SEQ ID NO: 19844 - DNA, 1065 bp, Homo sapiens
ctttcctctccaccatctcacattttgcttttaagtgaacactttttccccattgagcatcttgaacatactttttttccaaataaattactcatccttaaagtttactccactttgacaaaagatacgcccttctccctgcacataaagcaggttgtagaacgtggcattcttgggcaagtaggtagactttacccagtctctttccttttttgctgatgtgtgctctctctctctctttctctctctctctctctctctctctctctctctctctctctgtctcgcttgctcgctctcgctgtttctctctctttgaggcatttgtttggaaaaaatcgttgagatgcccaagaacctgggataattctttactttttttgaaataaaggaaaggaaattcagactcttacattgttctctgtaactcttcaattctaaaatgttttgttttttaaaccatgttctgatggggaagttgatttgtaagtgtggacagcttggacattgctgctgagctgtggttagagatgatgcctccattcctagagggctaataacagcatttagcatattgtttacacatatatttttatgtcaaaaaaaaaacaaaaacctttcaaacagagcattgtgatattgtcaaagagaaaaacaaatcctgaagatacatggaaatgtaacctagtttagggtgggtatttttctgaagatacatcaatacctgaccttttttaaaaaaataattttaaaacagcatactgtgaggaagaacagtattgacatacccacatcccagcatgtgtaccctgccagttcttttagggatttttcctccaaagagatttggatttggttttggtaaaaggggttaaattgtgcttccaggcaagaactttgccttatcataaacaggaaatgaaaaagggaagggctgtcaggatgggataatttgggaggcttctcattctggcttctatttctatgtgagtaccagcatatagagtgttttaaaaacagatacatgtcatataatttatctgcacagacttagaccttcaggaa

SEQ ID NO: 19845 - DNA, 1052 bp, Homo sapiens
atctcggcctctcacagtgctgggattagaggcatgagccactgtgcctggcctctgtaattgtgcttttgaagttatttggctgtgttggctgcgattgctctgcagtcctcatgcgtacctgggaattcttgcaaagtgagaagatctaacttactaattgttttcagatgtcatgaaacatttcagaatcctgcactgaacaattagtagagtccacatgatgtttcccttggcagacatttaattaaaattgtattgattttcagtcttgtagttttacttttgtatttgggagcatatatttttagttcgctgacagactgtgtctgtgttgcccagtggttacaaggactcagtagggtcgtgctgagcagggggtttggagccagagagtggcaaagcaggggctgagacttggctctcccgagtcctgatcggtcagcaccggtgggtgcccaggctggaaagaggaaggaggacagagctctgaggcctagtgactgagggtggaaggggctgcagagcccagggcagagtctgaggagcaagaggagtgctgggtggtgtgggttgggtgggatggggtgggtgggtggcaggcctgggggcctcaccggcagccagaggagaggtggcatcagatttcatggagctggggtgggcttgaggaagaggcacatggtggggctgtgtgctcagtgggggagcatctgtatctttaacaagcccccccagatttggctgccctgctggagagcggaagccccagtctaggcggttgtgaggggtcttcctctccagggctcctgggctccatcgcccagagtccctgtgtcctcccttctccagggtggctggtgccccacctgaaggagcctaggcccgtcacccccgtcattccaaggagtcaggtcgcagtctggcctggtgtccatccagttccctcaaacctctggacattggagtcagggccaaggcctcaggggtcctggtgaaaatgtctggtgggctggggtagggacaggggcaaggacacatccactccgtct

SEQ ID NO: 19846 - DNA, 1049 bp, Homo sapiens
cagggtcctggagacaaggacactcctgggtagaattaggacctaccccccaggaaatcaacggggaccaggtgccgtggctcacacctgtaatcccagcactttgggaggccgagacgggcggatcacaaggtcagcagttcaggaccagcctggccaacatggtgaaacccgcctcaactaaaaatacaaaaattagccaggtgtggtgtcaggcacccgtaatcccagctactgaggaggctgaggcaggagaattgcttgaacccgggaggcagaggttgcagtgagccgagattgcgccactgcactccagcctggcgacagggcgagactccatctcaaaaaaagaaaaccaatgggacagggcagatatggggacaatggtaaggagatgggagagtgggagggaggtgtcaggaagaccttcttgacttcatgtaggctggtgggggtgttagccagcaagcctccagttccctgggaaccgttctcagggtaccaattttaccacctgtctgcaaacactttaagattcttaatcagactcaaattggccacaaatcaggtaaacaaactcactagtggggtggggctaccacccgttctgaccctccagcccaacccagcccagccaccctgccctccgtagagcctgtggtgtttatcggtggcattgggagaattagtgtgtatttatgttggcgtggggtgtggggtggatttgtgtgtgtgcagttaggcctagtggaaggaatgtgggatctgaaggcaggccagcctgagttccagtcctgcctgttgctcacaagctttatgaggcgagagctaacccctgccagcctcagttgtcttctttgcaagatggaggttgcagccccagtctctggagcatgttatgcagatccaccgagagtgcctgccaggcacacagtaggtgctcagctcagttactgtggcggcccccactccccattgttgttgttttcctattgcctggcggccacagctggtatcccttgaaaagggctacagggggtggagtcgga

SEQ ID NO: 19847 - DNA, 1045 bp, Homo sapiens
ctccaagtactggggaaccccagggaggccctggggggtggcagtgttcctatttcagccccactctgcttccccctcccaggatatccaggaggtgcagggctacgtgctcatcgctcacaaccaagtgaggcaggtcccactgcagaggctgcggattgtgcgaggcacccagctctttgaggacaactatgccctggccgtgctagacaatggagacccgctgaacaataccacccctgtcacaggggcctccccaggaggcctgcgggagctgcagcttcgaagcctcacaggtggccttcaccgtcattgaaaccttctcttggttattcagagctgaccagggccactgctaaccagggggaggctttgtgtgcattagaaatggtgtcccttctgggcagacgcaggcagagcccgggaagacgccctcagaagattggaaaaagattccccttcttcctgggaagttgtagcttgcgtcagcacatataattcaatcgtgagaatgcaggctgggtttttgcccccacttggctgagtgaagtgtacagtgaacaacctatgtaactatttgctggccctggagccgactctgccccagagtctgggtgccaggtgctttgcccgcatggcccatttcagtcacgctgcagtcctgtcaggaaaaaatcagtgttattctcattctacatatgagaaaactgaggcttgcagatataagggccaaaagttacacagctagtgagtgatggggctgagtttcagactccacagtctcttaaccaccaagcagcatgcccagagtagaggtgagaaggaaggagagagctgcggtccacatgagcatctggacctagcatggacaactcactcctccctggctctcgctttgttcttgttgcgggtgtggtggtggtgggactcaaagacggtaaagatagctttctctcctccctggggaatctgggggttgtttaaaaggcctgctcctcttttagaaggcaggagggccccaagggaagcagaaggtgacagaagg

SEQ ID NO: 19848 - DNA, 1372 bp, Homo sapiens
agcgccgggcaggaggggtcctggttgcctcccatctgcagagcttcctggaggtgtcgtaccgcgttctacgccaccttgcccagccctgagccaagccctccccatcccatgtatttatctctatttaatatttatgtctatttaagcctcatatttaaagacagggaagagcagaacggagccccaggcctctgtgtccttccctgcatttctgagtttcattctcctgcctgtagcagtgagaaaaagctcctgtcctcccatcccctggactgggaggtagataggtaaataccaagtatttattactatgactgctccccagccctggctctgcaatgggcactgggatgagccgctgtgagcccctggtcctgagggtccccacctgggacccttgagagtatcaggtctcccacgtgggagacaagaaatccctgtttaatatttaaacagcagtgttccccatctgggtccttgcacccctcactctggcctcagccgactgcacagcggcccctgcatccccttggctgtgaggcccctggacaagcagaggtggccagagctgggaggcatggccctggggtcccacgaatttgctggggaatctcgtttttcttcttaagacttttgggacatggtttgactcccgaacatcaccgacgcgtctcctgtttttctgggtggcctcgggacacctgccctgcccccacgagggtcaggactgtgactctttttagggccaggcaggtgcctggacatttgccttgctggacggggactggggatgtgggagggagcagacaggaggaatcatgtcaggcctgtgtgtgaaaggaagctccactgtcaccctccacctcttcaccccccactcaccagtgtcccctccactgtcacattgtaactgaacttcaggataataaagtgtttgcctccagtcacgtccttcctccttcttgagtccagctggtgcctggccaggggctggggaggtggctgaagggtgggagaggccagagggaggtcggggaggaggtctggggaggaggtccagggaggaggaggaaagttctcaagttcgtctgacattcattccgttagcacatatttatctgagcacctactctgtgcagacgctgggctaagtgctggggacacagcagggaacaaggcagacatggaatctgcactcgagcagccaaagcctggcagggaagacagaggcacagggaccatgggaacccggaaaggagagggcatggggtctgggtgggcttaacaggccagacacagccagacaagatgaagccagggagtgctgagcatctgcaccaggcttgtcatttaccatcttccataaact

SEQ ID NO: 19849 - DNA, 1034 bp, Homo sapiens
gggagcctccagtcaggccgcctgcctcaaacagatccttctgctgcaattggacctcatcgaacagcagcagcagcagctgcaggccaaggaaaaggagatcgaggagctgaagtcagagagagacacggtacgggaggggttaatctgcattcgggccgaggagcgagttgtgcgcatgctcgggggaagggggctgtaggaggttaaggcacccccgggttaggggtaaaggaggttggccaccggcaaaggagtatcttaggcgctgggtctctgggagccaggctcacagacacgttgggttggagggaagggttaaagggcaacctctcagggggagggggaggggtttcaggtgccaaagggttaatttaaaatgacagccccagacgtgtgggaaagacgtttagtggaaaaagacgtgatctgtgaggggttaaaaatgaaagggtggggtgtaggtgttgtgtccttatggaagggttaaattaaagagctattgcgttagaaatgcacggtggaggagagggctgtagcaagcagctgttgctttcaccactgctgcagcatctttagataggagggcagtaggccttttagtgggcacaggggtagaggtgatttacgtggaatcctattttagttttcttaaatgatattaagagaatcactgcctttgatttcagacagcttttaataggaacctgagttctaatacatgacccactgaccaggtcccttttataagcatggtgtttgaaactggaagattttagggcatcaggggaaagtaagcttattaaatgtattaaatagacctccccatccttattttagaatcttagggagtaggaaagtcgtttattatttctttacttctgaggagcttggacgacacaggcttgtttttactgcagcagtagttaagggcatctctgcgttaaaacatattccttcagatatgagggaagctggggtggggggtattactgtgctagcataccttacagctgcctaaaaataaacatggt

SEQ ID NO: 19850 - DNA, 1050 bp, Homo sapiens
aacaaacagatgtacctaatgagcttctccattcactttgtaaaaataatttgtatgtgtaccatcttggtcctctcccctcccgttttgttaaaatatcaggatagcactcccaggccactttggtctcagtgtaagatccctattaactatctgaaaggaaaatagagccaagacctctggtctcaaatatataggaattgcctttctttagtcttcaggactattgtgtgaaaacaagtaggggtctaatctcctagaaggtaggggcttttatccttaaagagaatatgtccccagattattagcacttttagaggagaagccaaggtatgtagggtgtgtggctggcccatcagtggagcacgaagagagaatgggataccattgtgggaagagaagaaaagttcctcaggggcctcccactgctaaagttttttgtgagatgttgatctgtgcttcctggatttgacttttaaaggaattattctggcagcacatgtagtattcttggatgatcttgctgctcttatttctccttttgtgtgtgtgtgtgtgtgtgtgtggctatgggttttcatttgtaactccatctgcttaggagagtgggctctctataagggaacctgctgtaaacttcattgcagcaaggatgtagagagaaataggacttaattccactaggggctctcatctcacaccttaaggaggagatttctagaaaaactgggccagattttctttgttctccatcattttaatgtggcaggctgttcagttttcttactcttacctatgtgatatttcttcgtaacgtgtccaaaaagaaaaaagacccaatcagtgtctcttgactttgttctttgatccctcagtttcttcttgatttcagcatgtgtcgggttcctaattttgggtatgagttagcaaatttaaccattgtgtttgtgccctacccaggggactccccagtttctgacttgaagtagactgagaagaatccacgaggtgctatctggccagatttaagtagattctatttccttggtt

SEQ ID NO: 19851 - DNA, 1846 bp, Homo sapiens
gaagcccatgtcttctgctgttcttcacttctgggaaattgaagtgtcttctgttcccaaggaagctccttcctgtttgttttgttttctaagatgttcatttttaaagcctggcttcttatccttaatattattttaattttttctctttgtttctgtttcttgctctctctccctgcctttaaatgaaacaagtctagtcttctggttttctagcccctctggattcccttttgactcttccgtgcatcccagataatggagaatgtatcagccagccttccccaccaagtctaaaaagacctggcctttcacttttagttggcatttgttatcctcttgtatacttgtattcccttaactctaaccctgtggaagcatggctgtctgcacagagggtcccattgtgcagaaaagctcagagtaggtgggtaggagcccttctctttgacttaggtttttaggagtctgagcatccatcaatacctgtactatgatgggcttctgttctctgctgagggccaataccctactgtggggagagatggcacaccagatgcttttgtgagaaagggatggtggagtgagagcctttgcctttaggggtgtgtattcacatagtcctcagggctcagtcttttgaggtaagtggaattagagggccttgcttctcttctttccattcttcttgctacaccccttttccagttgctgtggaccaatgcatctctttaaaggcaaatattatccagcaagcagtctaccctgtcctttgcaattgctcttctccacgtctttcctgctacaagtgttttagatgttactaccttattttccccgaattctatttttgtccttgcagacagaatataaaaactcctgggcttaaggcctaaggaagccagtcaccttctgggcaagggctcctatctttcctccctatccatggcactaaaccacttctctgctgcctctgtggaagagattcctattactgcagtacatacgtctgccaggggtaacctggccactgtccctgtccttctacagaacctgagggcaaagatggtggctgtgtctctccccggtaatgtcactgtttttattccttccatctagcagctggcctaatcactctgagtcacaggtgtgggatggagagtggggagaggcacttaatctgtaacccccaaggaggaaataactaagagattcttctaggggtagctggtggttgtgccttttgtaggctgttccctttgccttaaacctgaagatgtctcctcaagcctgtgggcagcatgcccagattcccagaccttaagacactgtgagagttgtctctgttggtccactgtgtttagttgcaaggatttttccatgtgtggtggtgttttttgttactgttttaaagggtgcccatttgtgatcagcattgtgacttggagataataaaatttagactataaacttggctcccttgccagtgttttgcatgagtcttgatttgggagggagggaagaggactccctaattcccccacagggtcacggtcacaactcaggtcagcccaagttgtgaaacagaagcccagagagatgaggagcccctatgaggccataaatgtgtctgcactccccatcagttatcttttttaaccacatagatcaccaggatgtcatgccatcccttagattggaagtgtcagggacagaaaagtagtgagatgctggttattcacatgagcatctagtatcctttatggcttcctttgtgtttggcaagtaagtttcccaaggtaatatgccatcagatgtcaatataactataccaagtcctgggttg

SEQ ID NO: 19852 - DNA, 1071 bp, Homo sapiens
attcatagggtctcatgtaagcatgggcctctcacagagttattttaggacctaattgtaaatgtcagaccactgagtagaatgttacaggctcccagccaggcacggtggcatatgactttaatcacagcactttgggaggctggggcgggtggatcacttgagggcaggagttcgagatcagcctggccaacaaggtgaaactccgtctctactaaaacacaaaaaattagccgggtttggtggcaggcacctgtaatctcagctactcaggaacctgaggcaggagaatcgcttgaacccaggaggcagaggttgcagtgagctgagatcatgccattgcactccagcctgggcaacagagtgagactccctctcaaataaataaataaataaataaataaaagtaacaagctgtcttagaaacatcaggccttccagtgaggtatagtcaggtttgtggtaaacaccattggcatttattaggcgcactgtgagctccaggccctgggctggtcagaggttggatgggtctgggcagggtatcctcaagtgaaaatctaacctgtctaacctgcaggagctggatgtggtcaagtggtcatcgctacctactctaagcaaaagcctgggctggggcatgaggaggtcttggcttcaggaccaccgaaactcctttctctctggccccaaatctagagaatacttgggggcaatttagcctcccatctttcttttcttttcttttcttttttttttttttttttgagatggagttttgctcttattgcccaggctggagtgcaatggcctgacctcggctcactgcaacctccgcctcccgggttcaagtgattatcttgcctcagcctcccgagtagctgggattacaggtgtacgccaccactcccagctaattttttgtatttttagtagagatgaggtttcaccatgttgaccaggatggtctcaaattcctgaccttaagtgatccacctgcctcagccttgcaaagggctgggattacaggtgtgagccaccgcgcctggccttttttttttttgccttttt

SEQ ID NO: 19853 - DNA, 1027 bp, Homo sapiens
tcgggaggctgaggcaggagaatggcgtgaacccgggaagcggagtttgcagtgagccgagattgcgccactgcagtccgcagtccggcctgggcgacagagcgagactccgtctcaaaaaaaaaaaaaaaaaaaaaaaaaaaaaaaaaaagaggtgggctgggtgtggtggctcatgcctgtaatcccagcactttgggaggccgaggcaggcagaatgaggtcaagagatcgagaccatcctggccaacacggtgaaaccctgtctgtactaaaaatacaaaaattagccgggcgtggtggtacacacctgtaatcccagctacacgggaggctgaggcaggagaattgcttgaatccaggaggtggaggttacagtgagccgagattgcagcactgcacgccagcctgacaacagagcaagactctgtctcaaaaaaaaaaaaaaaaaagtagtgaaaacaggaaggaaactgtttttttggtaacaacttatttgattataaattttatgtattatttattaatttgtattattattttttaatagagacggtttcattatgttgtccaggctgggctccagcaatcctcccaccttggcctcccagagtgttgggattctaggtgtaagccaccacacctggcctgactataagtttataaaacatatatatttatatatggagatatatttgtttatttatattttaatggctctttaaaaaacagttggtaaaattccccagaacttaacagtatgctcttgtgagccagtgtgaaccagcttcaggacaccactgtatccatccatccatgaatccattctgcccttttagtttctctcttctcttgtccccaccaccacaacccttagggaggcctcagcttgtggtctagcatccttctctgccttctctgtgctgacactagagagatctttcatgctcctgttccaaaggcatccctgctccccatgcttccaagagaaagtgaaacatcccagcattcaatacccttccctttc

SEQ ID NO: 19854 - DNA, 1029 bp, Homo sapiens
tggcaaaaggggcggtggcggcggcggcggcggcggcggcggcggcgacggcgagaaagagcttgccggggggcgagcaggacaggacgaagccggagtgtaggcggcagaggattcgctcccagagcagctgcggccaggtcggaaagaggccggggcggctgggtcagtcgctgaaatgacctgcggacctgagtgggagggaaagtcgcggggaggggggctcggggcggggcttgagaagagaggggggcattagaggaggggccggagggggagaggggtcttgcgggtggggcctgaggggcggggggccgggggactgtatcggaagaacctggaggagagagggcgtggggaatctggggaggagtggtcgaatattggtatggggcgagcggggactggaaaaatggggaggaacgtttttgagagacaggcaataagggctcctgaagggttgggtgagttaaggcggcaactctgtgaggaacgaggtaatcgtgcgcaaaaagggagacgggaacggaggacctgttgggaacggctaattagcaggatgctgtgggtgaggagtccagtgtgacattttggggattgagttaggtgaaagctagtgtttgggaagatggctcgggaaactgcttacactagagggaatcttgagagcgttctttgaaaaggaatcagaatttagttaaaggttggattgagaatgttaagatgcgcattggaacgtctggagttgagggttcatgttgaagtggtgtgaagtgagggaagatggaatttttttttttttgttttaaaggtggggtctggctatgttgctcagactagtcttgaactcctgggctcaagcgatcttcccaccttggactcccagagtgctgggattacaggtgtgagccactgcacccggccaagatggaaatgttaaagtgttcagcatggcagtgtgtatggtcgagttttttatcaggaaggaaagttcttaaaaatagcattgaggcaaggaactgatatgtg

SEQ ID NO: 19855 - DNA, 1069 bp, Homo sapiens
agctggtactgataagttatgtgatagcaccaaggtgaaatgcaggagaggtgtgaacattggagttttcaggttttactgatggcttttacgaagggaagagattctagactcactaggtgtttttaggaaaaaaaaaaggcaagaggcaagagacagaagtcttgttctgttgaagagaaaatttttttttgggttttttttttttttttttgagacggagtctcgctcagttgcccaggctggagtgcaatggcatgatctctgctcactgcaacctccacctcccaggttcaagcgattctcctgcctcagcctcctgagtagctgggtgccatcacgcctggctaatttttgtatttttgtagagacgaggtttcactgtgttggtcaggctggtctcgaacttctgaccttgtgatctgccagtctcggcctcccaaagtgctgggattacaggcgtgagccaccgcgcccggcccgagaaaattattaaatgttctttctttacttgtgttctctgattgggagagtaacctggtatatgttagtctgttttcctgctctgaaataactgtgaaattcatgggctcttggttcaggcagcttcagcaaacatagtcttcttacaaccccaggaagagttgcaggctacaaaatatatgtacttatttgggagtaaaaacctgcttaatattatgctattgcaacctacagtgtacctttttggtttgttttttaaggggattttgagataacatatggaggctcggtgctcctgggcggacttttggtacagcctgcttattttttttttcttttcttttcttttttttttttttttttgagacggagtctcactttgtcccccaggctggagtgcagtggcgcaatctcggctcactgcaagctccgcctcccaggttcacgccattctcctgcctcagcctcctgaggagctggactacaggcgcctgccaccacgcccggctgattttttgtattttttttttttttttttttgtagtagagacggggtttcaacttgttagcgaggatgtcttgatct

SEQ ID NO: 19856 - DNA, 1030 bp, Homo sapiens
gtccgagaggctgcgtgtgagagacgtgagaaggatcctgcactgaggaggtggaaagaagaggattgctcgaggaggcctggggtctgtgaggcagcggagctgggtgaaggctgcgggttccggcgaggcctgaggtgaagtgaagggaaaagagctgagctcgctggaggtctgaggtcgggatcagggaaagggcaggtgccctcggggtagttctagcagttatgcgtggtgtgaaggaggtgaaagttgtaggaaggaaatattctggggtgcgttgagagctgcctagaatgaggactgagtgcaggggcggaaagaactgagggaagactgagctgcagtgtgagggcttgggatagaagagactaaatgtggcgggtgctgggctgaactggtgataaagacaccccgcgtgcctggagggaggaaactagaagttctatataaatcaattcatgtaacttttttttttttttgagacggagtctcgctcttgtcgcccaggctgtagtgcagtggtgcgatctcggctcactgcaacctctgcctgccgggttcaagccattctcctgcctcagcctcttcatgtagctgggactacaggcgcccgccaccacgtccggctaattttttttttttttttgagacggagtctcgctcggtctcccaggctggagtgcagtggcgcgatctcggctcactgcaagctccgcctcccgggttcatgccattctcctgcctcagcctcccgagtagctgggactacaggcgcccaccaccacgcccggctaattttttgcatttttagtagagacggggtttcaccgtgttagccaggatggtctcggcccgtctcggcctcccaaagtgttgggattacaggcgtgagccaccgcgtttggccgtaatttttgtatttttagtagagacggggtttctccatgttggtcaggctggtctcgaactcctgacctcaggtgatccgcccgcctcagcctcccaaagtgctgggattacaggcgtg

SEQ ID NO: 19857 - DNA, 1027 bp, Homo sapiens
caaagcactggatgtttgcaggtgagttacggctctgttgcattcttttattaaaaaaaaaaaaaaagaaatgctgttaattgtctcatgtaactcaagtgaatgtggcttaagaggctctgttctgctacttttttacgctcagaaaggaggacttgtttctcagtggggagctctggatttccaccgtgttaatgtctgaaacattatcagtccattacctacagagggagaaacaaatgagatgttgctggcactccctgtggtgattatagattggttaattacatttgtattaaaaaagactccagtttacttttccattagctggtctcaagcaggtttatttatggacctgaaccgtctttgcctttagacttgttccccttcctttccttttgtgagcaccccttcttcccttcagttggtggtcccccacagttgtactccagacctctttctcccttcccatcctcctgcccctcctgctggggaaagcctctgtgccgactgatgaaatttcttccttcccagtagggacactgggtccattaaaatgatacttgctgtgctggcctgctggtccaacctccccctattgctatgcagaagacccaggtctggcttatggcttcctgtgggcaagtactttggagagagcagtgggagagtaagctcttcctattgctagattgcatgatcctgaatttgaaagtttcccctaatcagcaaactacttgggtaaagactgcaactatgagcaatagtcatgtaggctagcgtggtttagcctacacatatcctatgtatatataactgaagatatcccttttaggtttggtgtgtatgggtgatgctgactccctttagtcagtcacccacactacatatcctctctcctacccatgacattttctcctcatccaaaatgttatcattggcttaatgtatgatgacctacttggcatccattaggaggaaaccattgaagtttctcaaatctgatgtccatgaattatttcaaagc

SEQ ID NO: 19858 - DNA, 1062 bp, Homo sapiens
gttgttgttgtttttgaggcgcgtctcaccctgttgcccaggctggagtgcaatggcgcgttctctgctcactacagcacccgcttcccaggttgaagtgattctcttgcctcagcctcccgagtagctgggattacaggtgcccaccaccgcgcccagctaattttttaatttttagtagagacagggttttaccatgttggccaggctggtcttgaactcctgaccctcaagtgatctgcccaccttggcctccctaagtgctgggattataggcgtgagccaccatgctcagccattaaggtattttgttaagaactttaagtttagggtaagaagaatgaaaatgatccagaaaaatgcaagcaagtccacatggagatttggaggacactggttaaagaatttatttctttgtatagtatactatgttcatggtgcagatactacaacattgtggcattttagactcgttgagtttcttgggcactcccaagggcgttggggtcataaggagactataactctacagattgtgaatatatttattttcaagttgcattctttgtctttttaagcaatcagatttcaagagagctcaagctttcagaagtcaatgtgaaaattccttcctaggctgtcccacagtctttgctgcccttagatgaagccacttgtttcaagatgactactttggggttgggttttcatctaaacacatttttccagtcttattagataaattagtccatatggttggttaatcaagagccttctgggtttggtttggtggcattaaatggcaatttgtgactgagacaccagagggcacccttataacattgactactttgaaaggggatgcttgaggctgaggtagttttgagggaaagggggaagttctagtttgatttgtttgggagattgctgtcctttcataactgaagcaaatgcttgaaatgtaaaccatgtgtgatacgaatgatctgagagccagtgaccaagtctgcttttccctgagctctcctgctgccgcctctacctttctgacatggccttcca

SEQ ID NO: 19859 - DNA, 1051 bp, Homo sapiens
acgtgactcgctatggccgctgccatcgccccgcgcccctgagccgcggccccctggacggctcctctcccgggaccccgcaccctgatgccgagcagcaccagggcgccgggttagggcagacgctgtgctcgctggcaccccgaacgggttgcttcccccgctgcgaggtaattcctcccctggggattttggggagcccctggttcccgcaggcgtcggggccccatgtcctgccccagattggtgctgcgggaggggactgggtaccgggaggcttccgacgggaacccggggtttcctgggcttcccaactcgctgccgccgtgtccagggtgggggagccccgtctgtgagtctgcctgcgccgtgtcttcgcgcgcagccttgaggcgtctggggccgtctgctgcgcgtgtcccccgcgctcgagctgttgcagaaccgccgctgggaacttctgttctttttctctttaatgataagcaaaacaaaaagacttgaattcaaacctgtttggggagagatcggatgctcaacggactagccccctctctttttccctcctgttatctgagctgccctgtggtttggggagaatcagccagggggcccactcccaccagagggagccggccgggggccgggccggttcagctggtgtcccccgtggagtgaggggaaccgtcagaattgggtgcgggagccaatgcagtatgtgtgtaggggtgttcctgggtcttgtgccaccatggggtgtgggaactttttggggtgaggggaagacggaatagactgacttgtcgactttgctctgctgagggtgtctgggacctggtgccacccacgaggcttggaagctgctggccagatgtgtgtgtgagcctgttgtggggttggggggacggctgggaaatgagcttggctatgtcccctcatctcctctctgggcactggcctattgtcaggctgctccttgcgaaaggaaagacaggcctccagtgtgctagggtggggatggggaccaactaacccggaaaccagacagaag

SEQ ID NO: 19860 - DNA, 1069 bp, Homo sapiens
gtagctgggattacaggtgtgcgccaccacgcccggctaatttttgtatttttagtagaggtggggtttcgccatgttgaccaggctgatctcgaactcttgacctcaaacaatccgcctatctcagcctcccaaagtgccgggattacaggcgtgagctaccacacccggcctaacatgttattttattatttatttatttatttatttattgagacagagttttgctcttgttgcccaggctggagtgcagtggtgtgatctcagctcaccgcaacctcctcctcccgggttcaagcgattctcctgcctcagcctcctgaatagctgggattacaggcatgtgccaccatgcccagctaattttgtatttttaatagagacaggatctctccatgttggtcaggctggtctcgaaatcctgacctcaggtgatccacctgcctcggcctcccaaagtgctgggattacaggcttgagtcaccgcgcccggcctcatgttattttataatgtgaaaaataggactttttccccccagaaggctctgaattgagagttccctcctactgccctgggtggcgggggaagctgttttatggagaagggagtaagggtgaccgacggtgatctgagtggtcagggaggggacactccaggctgagatgtttggttgtctgctctgccttcctaggggtccgcctgagtgcatagcaaaacccgcttcacctatgcacctgctgggccagtccccgtgtggaaccccgttagctccatatgccaatgagctcattcgattctctgtcaatggtggcatgagggcactatttacaccaggggaaactgagactcagagggtctaagccacttgcctgctgtcgcgcagccggtaaatagcagatccaggcctatgcgaggcccaactagttcttgagcccaagctcttgagcctttcatggaactgtcctccatccagcctggctgggcttcccaggtgctgtcccagggcctgacagtccccaggaggggttgcctctatgccagccttgtgtggggctggtgggtgcaggc

SEQ ID NO: 19861 - DNA, 1059 bp, Homo sapiens
tccaatctatttactggaatacaatgatttagcacacattgatttttcccataaacattcatatgcaatgattgctcactaaaatgcaaaaagggtgaggatacaatatgtgtttttattgtttttggatttggcttctttcacttagcatgttttcgaagttcatctctgttatagcatgtatcagtacttcattcctttttattgacgaataagattctattgtgtggatatattacattttgtttatccattcatcggttgatggacacttgaggtgtttcgctttggggcttttatgagtaatgctgctatgaacatttgtgtataaaaggacacatcgtattaacctatttatatgaaatgtccagagtaggcaaatccgtagagacaggaagtagattagtggttgttaggggctgggaggaagggaaaaggcggtgactactaataggtacaagatttccttttggggtgatgaagtgttctaaaactagatagtggtgatggttgcaaaacattgtaagcatactgaagaccactgaattgtacgttttgtaagggtgaatttcatggtgtgtgaattatatctcaataaatctgttattaaaaaaatgagagacatttcattaaaaatatatgttcaccatataaagaaagagaggacctgatagtatatgcagcttattatcaaaaggagacacattttgccttgagaagggtttcagtaatgttgtttttaatctatttccattttaagtatagtgtacttcactcttattctgctcagcatttgtgattgaatttgactctcaaattattcaaaaagctgtgttgagttttaaaaggcagtggaagcaatgggaaaaagcagatatagctcaaaggttgtagagttgtactgatgctgaaaaatcaataagattaacccagaaattggctcaataagaaaccagggactcccaaagggggttttacaattcagaaacaggaaaaaattagaaagtggtttatttgcaatttacatggattcctctactttgtgaggtttagtataat

SEQ ID NO: 19862 - DNA, 1029 bp, Homo sapiens
gatgcaacagggtcaagaaggtggaacgtaccaaaggacacagtgcgtaggcgcgctcgaaacctgggccggtattctcggcacccagacaccgtccactcgcactgcgcaggctccgagacagatcaagctttccctccccctcccagctctcctagagtcaagaggacgccctcctgccgcagacttcctgcgcaagcgccatcccatgtccccgcctccaaaccaattggaagcggcgccgcctgggcgcttggggcacgacgctgtgggtggggtcaggacgtgagggcagcgcgctggcgtcagaggcgcggctatataactaaacacaggcaccgcccctctgccccagtcactgagccgccgccgaggattcagcagcctcccccttgagccccctcgcttcccgacgttccgttcccccctgcccgccttctcccgccaccgccgccgccgccttccgcaggccgtttccaccgaggaaaaggaatcgtatcgtatgtccgctatccagaacctccactctttcggtaagctatgggaaaggtcgcgggcccgggtggggcagcggggccttccgggcccggagacgtgttccgggaagttgccaagcgctccgggccttcgtaagctcgggcaggggaaacttgaccagggtcgcagggcagcgggatcaaggcctgggccccggggtcggaccctgagcgcgaccggaaggagcaggcggtaggtcagcccttgggcgggcccggcgtctcagtggcgcatttactaatggctcctgggcctcctcgggccacacccgcccctcccgtcaccattgcgtcacgtccgttacgtcaccacccgttgtcacggatccggagggaaaggcggtgccagccctaagtggcaagcgggtgcaccaatgggggtgggaggcttagccccgcctcgggagctcgggttccggcgggttgcatcagctgggtggggcaccgcctggcagcccggactcccccgacatgtgatcggcttcccagggag

SEQ ID NO: 19863 - DNA, 1030 bp, Homo sapiens
tttcagtgttgttttctgcacgcgcaaaacacctggggaccgaggggatggcagtggcatcctatctttgacagctctgaacgagcttaaccttttttttcagacccctttgctgatgcaagtaagggtgatgacctgcttcctgctggcactgaggattatatccatataagaattcaacagagaaacggcaggaagacccttactactgtccaagggatcgctgatgattacgataaaaagaaactagtgaaggcgtttaagaaagtaggtcttcagtgagattttgggaaagtcataatggatttgtccacaagggggtgccagctgtgttgtatgtattgttagcggaaggggtgataaatgcgttcatgctcttgctaggcctaattcgttttcctttgtgcttgcagaagtttgcctgcaatggtactgtaattgagcatccggaatatggagaagtaattcagctacagggtgaccaacgcaagaacatatgccagttcctcgtagaggtgagttcagtcactacttgatttgtgcctctctgctggcaaatctcagatcctgtctgttagcttctgctggggacataaaagttggctttgtaaggctgagcaaaacctcagttgggttttaaagtacatagacttatttctgttttataggaaaaagcagaagggacttgtctacctttggtttactgtttctgtggatctacttcacagatgcaaatttgaatagcatatagatgcattgtaaaataagccaaatgctgggttgttcctgtatttgtaaggacatgagtttttaaaaatgaatttcctgagtattaatactaaaatactgttacatgatcagctcttgatataattgaagagatttcagatacctgatgagtctcattctcacactaattcagaaccttggaaggcactgagtgttcaaaaaaggtagctcttaactgaggaccctctgttgaaccattgtgcgcacccctggctcttgggcagtgtagtagcaggaagac

SEQ ID NO: 19864 - DNA, 1033 bp, Homo sapiens
gggtagcgcgtggctccctgcggaggccctgtctacgtgtcacacagtcggacatgccaccctgggctccttggaggaatttcattcctccctctctggttctcctggaaccctcatctctctccattttaggtacaccaggccagaggcacaggccgcccatttttgccagccttggggtttgtaaggtggcctcctggtctgacccaggcctttggtctgccccagcaagtccacttttgttagcggggacagggcagggctgtatgccagcctcaggggtaaatctagggtcccagttacacacagaccccacagcacactgaaagaagtcagtgtttcttagaccctcctctgaaacacacaactcagcccacaggaaattagtggccatgactttagaggcaggcatatattggggtaagcctacaaactccaagagtcccaagaccctggttcaaatccaggctatgaccatggacagagaattttgtctctttaggcatcactttccttatctgaaaagtggagacaaaaacaggacctacttgctaaggctgatgttaggactccaaggacatggatgaatgaacgtaggcttctcacagggcctggcagtcctccagccagttcagcacacattaacattgaccctgaggaaaaccatatgacctgatgctgtggaacttgtagaaacttaatgcagagcttaagccttcataacaacactgagaaggaaacagtccagacttaaaacctgtctgcttggtgggcaaattcagatatagggtagtagccagaagtgcagccctgagcccttgactgctaggagtgaggcaggggttgggatttaggggatgtcatccctgatggggactctgggagcccagctcatgagtgttgagcttggaaaactttttgttttttagctggaggctcactctgtcgcccaggctggagtgcagtggtgccatctcagctcactgcaacctcctgggttcaagcaattctcctgcttcagcctcccaagtag

SEQ ID NO: 19865 - DNA, 1500 bp, Homo sapiens
aatagccatgcccacgcaatccccgcacccaggaagcatcgaggaagaagacgtcccccgtccggactgcccacccgccctggtgctcctgcctgcgctgagtcccacgcctcaggctccttgtccctgctttttcctgggcacacatgcaggctgttccctacctgagaccagtcacagactatccccatgccacgcctccaccccagcccccaccaggaccccagcaccagtgcctttcccagcccttcctgagttacagggtgcgggggagcctgggaaaaaagaagaaaaagaaagcactcactggcctccacccggggcccctgcccctcccaaggccatgaccctcactgcccgctcccccggctctcccctgccccagttctccaccttcatcaaggctcaagtgagtgagggcaaaggacgcctcatgcctgggcaggaccctgagaaaaccataggagacatgttccagaaccaggaccgcaaccaggacggcaagatcacagtcgacgagctcaagctgaagtcagatgaggacgaggagcgggtccacgaggagctctgaggggcagggagcctggccaggcctgagacacagaggcccactgcgagggggacagtggcggtgggactgacctgctgacagtcaccctccctctgctgggatgaggtccaggagccaactaaaacaatggcagaggagacatctctggtgttcccaccaccctagatgaaaatccacagcacagacctctaccgtgtttctcttccatccctaaaccacttccttaaaatgtttggatttgcaaagccaatttggggcctgtggagcctggggttggatagggccatggctggtcccccaccatacctcccctccacatcactgacacagctgagcttgttatccatctccccaaactttctctttctttgtacttcttgtcatccccactcccagccccttttcctctatgtgacagctccctaggacccctctgccttcctccccaatcctgactggctcctagggaaggggaaggctcctggagggcagccctacctctcccatgccctttgccctcctccctcgcctccagtggaggctgagctgaccctgggctgctggaggccagactgggctgtagttagcttttcatccctaaagaaggctcctttccctaaggaaccatagaagagaggaagaaaacaaagggcatgtgtgagggaagctgcttgggtgggtgttagggctatgaaatcttggatttggggctgaggggtgggagggagggcagagctctgcacactcaaaggctaaactggtgtcagtccttttttcctttgttccaaataaaagattaaaccaatggccttagggtgtcttttggaccaggttgaggggcaggggggaatggctaggggatgaagtggggattgtgggaggcctttagacccagagattggggaaaaagttaaaccaggctgtttcca

SEQ ID NO: 19866 - DNA, 1027 bp, Homo sapiens
cccgggtggagttaagcgagcagcaactgcagttgtggccgagtgatgtggacaagctgtcacccactgacaacctgccgcgggggagccgcgcccacatcaccctcggctgtgcagctgacgtagaggccgtgcagacgggccttgacctcttagagattctgcggcaggagaaggggggcagccgaggcgaggaggtgggcgagctaagccggggcaagctctattccttgggcaatgggcgctggatgctgaccctggccaagaacatggaggtcagggccatcttcacggggtactacgggaaaggcaaacctgtgcccacgcaaggtagccggaaggggggcgccttgcagtcctgcaccatcatatgagtgttctcaccaccacttatgcccctagaagggaaggggagagggaaacgtgccctctgtttgatccttgttttgtgacattttttttttttttttttttactcaaagttaacctacctgtaactttttaaaaacttgtaaaataactgaccctcccttcctgtccgccctcttcccctctaatgctcacgctcccaacacaaggtgggcagggaggcaccattcaggaacctggaccaaagctgacgaggctgggccaagccagggatggggccacagccagaaccccgagccctacttccaggttctggttagctcagccccagcccagcccagctgctctgcccagagctgggtgagtggggagacacctcagagccccgcaaaacccactgaccggaggcaaaaggcagtggggctgggggtagttttccatggtcacagagaactagtggtggctctgagaaggggaggacctctgggctttgattccatctccttgtcttttttctttgtttttagagacagggtcctgctatttcccaagctggagtgcagtggtgcgatcatggctcactgcagcctcgaactcctgggctcaagcaatcctcctgagtgatcccatttcttaatcagtgtagccccaagaaggc

SEQ ID NO: 19867 - DNA, 1066 bp, Homo sapiens
tcttggctcactgcaatctccgcctcctggattcaagcgattctcctgcctcagcctctcaagtagctgggattacaggcacccgccaccacgcctgactaattttttgtatgtttagtagagatgaggtttcactatgttggccagtctggtctcgaactcctgactttgtgatctgcccacctcggcctcccgaagtgctgagattacaggcgtgagccaccgtgccctgccccagattatcctttttatttgctcagtccccccagggagcagatggcttcagacagccacacaaaacactgttcctgcttaattctccatggggtcatggttaaagagaggaagctgggctgagctccctttactaattggtcctctacatcttgcgcacagaagggaacctggcccagtggccagtgactctcctctccctttatggcagcatttccaagcacctgccctgtgacagatactggctaggtactggggataacaaagacgaataaaataacagcttaccatccagtagtagacatggagacatccgtttcctctgactagcattgggatggtgctgaaaccctggaactatacattcagtttagaactatacattcagtttagaactctcagttatggacgttctgccttctgtttttttggtttttgtttttgtccaccagaaaacatctgctagtaactgccttctgtgttgatgctttctttcctcaccttacccagcgtgcttctgttcttcaaggttgaaaactaagcatggggaagagctgcaaggtggtcgtgtgtggccaggcgtctgtgggcaaaacttcaatcctggagcagcttctgtatgggaaccatgtagtgggtgagtgttgttggagggggaggaacagtggaagaagttgaaaaataaggaataggacttgatcacaacacacacaggctaaaagctgctcctggtggttttcccccctggaagaataaaacttacattgtaacagatcaactctacaacactgaacaaatacggagggagaaagccctatgtccaagataggaa

SEQ ID NO: 19868 - DNA, 1044 bp, Homo sapiens
gcacacacaaatatgctcctatactggcattaggcgtctcctcatccctcaccctgacctttctcctgtccttttcttggctggaagaagttggcctcctgggagtgtagttttctgttttaaatcccccacccctggctgggctcagtggctcacccctgtaatcccagcactttgggaggccaaggcgggtcgattacttgaggtcaggagttcacgaccagcctggccaacattgtgaaaccccatctctgccaaaaatacaaaagttagccgggcgtagtggcacatgcctgtaatcccagctacccggggaggctgaggcaggagaattgcttgaactcagaaggcggaggctgcagtgagccgagatcgtgccactgcactccagcctggtcaacagagcaagactccatctcgaagaaaaaaaaaaaaaattccccacccctaccaattgttttacttcctcttcctgctcagggagcagatgggcctcactggttgagatggaatagaataactgggctatgagtcaccagcccactttgtgacccagcaagacctttcccctctctgggcatcagtttctcatctgtaagatgaccagagttgcttagatgatctcctagatcctttccagttctcttgatttcgtaaagccaatggcttctccctctttaaggtgctatgccaaccagccctggaggctgggatctgccgctccctccagccaccagggggcaggagtgcactacctgctgtcagtcaccagagtggccgctcagtgcccagcccgccagcctcgctcttggaggctgctctttatcctgcctgtggttttcagctcagagctggacttctatttataagttacctgtatttatatttatatgcccgctctcatggtgaaggctggacaaggtgctcctctggcccctccttcttacctcagatgcctgaacagaacaaggcaaacccgtagcagcctctcaggagctgacaggtcctctttcggggctcaggagggtgggcacacacccagcg

SEQ ID NO: 19869 - DNA, 1622 bp, Homo sapiens
ggttgacttaaaccacgtcttgtgagacaggcaggcaagtaggatggagtcttgtgagtagtcaggctcactggtttttgccaagggataaaccaagaacaagttgaaatgttgtaatcatcgggatcctgaaaacaagttgcttgtagtcagctgatttgattgcaagtagaaaccgaaagaaccccctcaacttacatgtaacagccagtggtaactagtgtctccatgatctcatcttaaacttttccaatctcatgacagtatttctctgcacttctggtgttgatccttacttcccaaaatgattgctttctattttttaggccttcagacttatcatctggtttatacacagtttttccccctttttgctatgtttatgatcccatgactttatcaagttatggtccctgtgccactttttaagagtgtggctgacaggggtagaatcaaattgaaatttggaatgaaaatgatagagaaaaactcttctgattttttgtcttattgtgcttttgaagaggatgattgttctggtttactcctagtttttggtcaaacaagtattgcctgggtattagagttggggagatgaggcaatggagaagttgattggactggtttttgttttgttttgttttgttttgttttttggagcagcttctcctttctgatgggagtaaagggtggtaggatgagttcggtagagagaggctaggaaatgtagacctgcgtgtgggaagatccttcttcatttcattgtataaactgtcatggtggaagtcattttaaatcttaccaattaaaccagcccatgaactctagtttggtttattatctgttgtttttccttcactttacttgattcttgagctgtgttctcaagaatcctacaactgtaaagcctatgtgaacttatttagaagattcctagtcagaaaatgggacattcagatatgtttttacaggcctgcccagctattgtgcttcttatccttttgaagacataaatactctttaaatcccatggcttggatcattctataagtggccatgctgaaagttctcatattctgaattttaaaggggctggaaacgtagatacctggagcttccccttctgtctttctccagacttcacagcattcaaagacagtggcagtgccttgcttcttccttggaaagagagcctctatctttcacattctcacgtagggaaaattctagtttgtagctgcctagaaattaaatgttcagagtatctgcagagtctcttcattattgcacagaaagaagagatattttagcttcctatctacatgcagaggtatttcctggcactttcatcattcattcagggaaacgtaggagagaaaatggcttccaccaagtaacagatttatacatgtcaccatcacttaattttttttccttttgctccttatttctaaaaccatttccccagatgctttactggggcaattatgctttctttacctcaaatttattttctgtgttttcatcccctattcttcttgtctttttatggatatatcttgtcttttcgtggtttgttttctttttcatccttattttctgaacctgtctcctggttcctc

SEQ ID NO: 19870 - DNA, 1049 bp, Homo sapiens
aggaagttaagagaaggtagtgaagaaggagagccagagaacatactttgctttctccatgaaagggggagaacaactttcataaaaaggcagatatggaggcagttccacattttctttggtgacatattttaaagttaaatttttttcacattaaggatgtatttcagaggatctaatagaaatcttccattataaatgttataccttttcccagttttcccaaaagctgggaaagataatctagttttatttttaggtttattagttttattgagatataatttacatgaaagaaaatacatacattttatgtgtaccatttgatgagtttcaagaaatgtacacctgtgtaaccactaccacaattaggaggataacctaagtttgataaatgtgctaatgtttttcaggaacacagtggttccactgtaccttccattttgaacaggatgcagacaaaccagactcccccaacctataacaaaaccaacaagtttacctatggctttcagaacatagtagatgcttatggaattggaacttaccgagagataaatccaggtaaaaaaaagcttgttatctttttcctctagagttttttttgtttgtttggttggtttggtttgttttgagacagagtctccctctgtcacccaggctggagtgcagcagcacgactgtagttcactgcagcctcaaactcctggcctcaagagatcctcccaactcagtctcctgtatagctaggaccacaggcgcacagcaccacacctggctaattttttattttatgatttttttttgactgggtctcattctgttgcctaggctgtagtgcaatggtgaaatcacggcttacagcagcctcaacctcgtgggctcaagtgattctcccgcctgaacctctggagtagctgggactacaggcatgtgtcaccatgcctggctaatttttaaaatttttttagagatgggttttgctatgttgcccaggctgataatttttaattttttttagagacggggtcttgttatgttgcccaagc

SEQ ID NO: 19871 - DNA, 1303 bp, Homo sapiens
cgcatgacctcctttgcacctgctaatgtctggctcccatactctcgtaggacttaatgcatgccagtggcctccctgcccgcctctttgcccccatcaccaggtggcaggaaactcactcattcattcaataaacttggtccagctgtctgaggctgccagaactggctgtgctgggtcctgggaggcggcaagaaaggtgcccaagggcttacccctgataggagagatatgttggctgaaggatacaatgtggggacaaggacaggaatatatgtgggttccgctctcctctgccgggagagaggggcaggaagggctcagggcagagcccagccttgaaaaatgagtgttgcttggacggacgcttggctaatgcttgtaatcctagcgttttgggaggctgaggcgtatggatcacctgcggtcaggagttaaagaccagcctggccaacatggcgaaaccccatctctactaaaagtacaaaaattagccaggcgtggtggcgggctcctgtaatcccagctactcggtaggctgaggcatgagaatctcttgaagccaggggccagagactgcagtgagccgagatcacaccacttcactccagcctgggtgacagagtgagactccgtctcaaaaaaaaaaaaaaaaaaaggaaagaaaattaaacacctcatgttctcactcatagtgggagttgaacaatgagaacaacatggacacaggaaggggaacatcacacaccggggcctttcgcggtgtgggggtcaaggggaggagtagcattgggacagatacttaatgcatgcggggctgaaaacctagatgatgggttgatgggtgcagcaaaccaccatggcacatgtatacctatgcaacaaacctgcatgttctgcacagaactgaactgaaagtataattaaaaaaaaaaaaaaaagctgggtgcggtggcccacacctgtaatcccagcactttgggaggccgagacgggcggatcacaaggtcagcagatcgagaccatcctggctaacacagtgaaactcagtctctactaaaaatacaaaaaattagccgggtgtggtggcgggcacctgtagtcccagctactagggaggctgaggcaggagaatggcatgaacctgggaggcagagcttgcagtgagctgagaatgcgccactgcactccagcctgggggacagagtgagactctgcctcaaaaaaaaaaaaaaaaagaaagaaaaaggagcgttgcttgtttcaggccacaggaaggggagagatagtgaaagtttttcag

SEQ ID NO: 19872 - DNA, 1056 bp, Homo sapiens
cttcccacccttcccaaatgtcacagtggttgacactcaattggtgctaaggccattttgtcaaatgaacagctttctcagcatgtggtccagtcaccactcaatcagaataccccaaatgtgaagcaaagggatctgcattttagcaagttttccaggtgatacaccctaatgagacactgggaatgaatgggtgagtgagctgcaggtagcagtgccacagacaggaggaggaaactcaagcatggcatgggtcttggaattttccatctgcctctgatgccctctggcactgctcgttctctggagtggtttcctggtggcttattctctggacacatgccagcccttggagtgactattgtgcttgcctgtttcttcaccttcatgctcccctcaccatcaccataggccttaccagttgaaccctttctgccaccccctctggggatactgtacttagggacactttttcccaaactggcccatactctcctccccaataaaaagatctcactgttcttctgggctccttccccaggcaagttgctccctgagctgctccaaccttatacagaacgtgtggaacatctgagtgaattcctggtggacatcaagccctccttgacttttgatgtcatccccctgctggacccctatgggcccgctggctctgacccctccctggagttcctggtggtcagcgaggagacctatcgtggggggatggccatcaaccgcttccgccttgagaatgtaacccctgagggagactggcagagggagtggatgggggacggggaaggccattttgagggggctgttggaagtaccatggccccagaggagagaagtgggggctcagggtggtgggaagaagcaaggaggaactggttctcagtttgcccgctgagtcggaggaggaggagcctgggtaggaaggggaggatgggggggcaggttggatgtcagggtcttcctctcactccctccttccctctttttaccctttcctctttaccccaggacctggaggaacttgctttgtaccagatc

SEQ ID NO: 19873 - DNA, 1022 bp, Homo sapiens
gatggtgtaagtgtcctatatttatctttgtgttcttgagcagtaggtcctctgtcctctgtttccttgtcagtttaagatgtacagagggaacagtgggatttggatctgggaactaggactctgttacagacatgatgactctagtatagttcttttatttcttatttatttatttatttttgagaaagggtgtcactttttttgcccaagctggagtgtagtggcgggaatgctgctcactgcagccttgacctcccgaactcaagcgatccttcctcctcagcctcgcaggtagctgggactacaggagtccaccaccatgcccactgatttttgtattttttgtagagatggggtttcaccatgttgcccaggccggtctcaaactcctgagctcaagtaatccacccgcctcagcgtcccaaagtgctgggattacaggcgtgagtcactgcacggggactccagtatattccttttagaccctcagtttcatttacgacgtgaagtgaatgtgctaatgctactgtcagtgttagagtgagtttcaaataaaagagaactagcttaggccaggcaccttggctcacgcctgtaatcccagcactttgggaggccgacgtggacggatcatgaggtcaggagatcaagaccatcctggctaacaccgtgaaaccctgtctctactgaaaatacaaaaaattaactgggtgtggttgtgggcccctgtagtcccagctacttcggaggctgaggcaggagaatggcatgaacccaggaggcggagcttgcagtgagctgagattgcgccactgtactccagcctgggcgacagagcgagactctgtctcaaaaaaaaaaaaagagaactagcttcatcaggttacctggtttttcccatggctctgaacaagactttgcttatatttgtttgcatgtcttgagtagtgttatgggatatgcagttctcgctatgtaactgcaattgctatctttgctttgcatctctaacacctagt

SEQ ID NO: 19874 - DNA, 1050 bp, Homo sapiens
ctcttatccatgattttgtagcttcttgagagagttccctaggctctggccacatacaccactgcgttttgttgttgtggggacactggagtacccctggattcccctctcccatctcctgagactgatctctggagttaggctgtggtgtcttaaccttggctgtacacttcactagcagtggagcaagtgaatagataccaagtcctgtgagcagtgcttggcatatagcaagtacttcttaaatgttaactgttgctacttttaaatctcttacctctagtaagccgttccagatgcttcctgatggagataaacactgttctgtttctctttggtcatttctcatagctttctgtgatttttctctttataatggtggatcttggagacctgagggtggaaatattttttggacactgcactacctctaacacagggcctaaataggccctcagtgaataacaaatgtaattcttactcatttagaacattgatgatggcacctcagatcgcccctacagccatgctctggtggctggaattgaccgctacccccgcaaagtgacagctgccatgggcaagaagaagatcgccaagagatcaaagataaaatcttttgtgaaagtgtataactacaatcacctaatgcccacaaggtgagcatttcaagaactagaatttaaatttcttctccctgctctgttgaataatgagacagaccttgcagccattccaacaccaggaagggatatcatttccaaaatgttcatcttcaactcataaagtggctatggtttccagttttgcctttgatccatcttttaagtgttgggtaaagattgttttccatccacagtaaacacaggcatggggtctgatctgccctcttccactgttccaccctcaaggataaatacaataggtttcaaaaagtctgtgagtgcgtgaaagcaagtcttccccaattaattttactcacctgttgggccctttagtctggggacatacactgtcttagtacagtgttttgttttgttttgttttttt

SEQ ID NO: 19875 - DNA, 1932 bp, Homo sapiens
gctttgttcttgtgctctttgcaataaatcttgctgctgctcactctttgggtccgcatagcatttatctgctggtaacaccgaccgcagaggtctgcagcttcactcctgaagccagcgagaccacgaacccaccaggaggaatgaacaactccagacgggaggaacgaacaaactccagacatgccgccttaagagctgtaacactcaccgcaaaggtctgcagcttcactcctgaagccagcgagaccacgaatccaccagaaggaggtaactctgaacacgtccgaacatcagaaggaacaaactctggacacatcatctttaagaactgtaccactcaccgtgagggtccgcaacttcattcttgaagtcagtgagaccaagaacccaccaatttcggacacaagaacatccggcttctactgatggaaggccacgactcctcagtagaaagagggcccaggcaaagaaaatgagagagagtccttggggtggtgacactatcttgggaacatggagtgctaggaaacgataactggaagactaggatgaaatctgcaagttaaaaaatgacactacccatatatccttctcatcccattctccttttttcgagaccccgttaaagagatcttggttagggacctttggttttggaaaggcactgtttctcctttttgtcaaacactcaactttcaggccacactttttttttttttttcgagacaaagtctcgctttctcaaagaccagcccaggctggtcttgaactcctgagctcaagcgatcctcctgccttggcctcccaaagtgctgggattacaggcatgagccaccactcccggcctcagcttggataacttggcttgtacaggcctctggtggagacagtaaccaaagttcgggttgccaggtttgtttcattaaagggattttgttgaggctgaaagaaaaaaaaatcgatgtggaggaaaagctaacttgtgccaagacaaggtgagtcagtcacatggacttaacaataatgtcaattatgaaagctgaaggcctaggacccagctatctgactctactggctgtagacctaaggagcaggtagggttaaccatagctttcgtgtttacacacgttcaagattaatgctcttgctgaaagaatttttttacatgccagccaaagagagttccttatggagacctggatatggtccagctaagctagaatctcccacttcctgttttctcttagttggcccaccagctggaggagctccagaatatctaaattaatttccaattgtgtaatttgagaaaaagagacgaagattaatttccctaacgagtagggaagtgtgtttcttttttttcttttttttttgagactgagtctcgctctgtcgcccagcctgaagtgcagtggcacgatcgcggctagtgcactgcgaactctgtctcccgggttcacgccattctcctgcctcagcctcccgagtagctgggactacaggcacccgccatcacgcccagctaattttttgtgtttttagtagagatgggggtttcaccgcgttagccaggatgacctcgatctcctgacctcgtgatctgccttcctcggcctcccaaagtgctgggattataggcgtgagccaccgcacctggcaggaagtgtttcttaaagttggaaagtggtatttcagaatatccgcttttggcagactgagtcagtcacttcattttcctgattttttgcctaaggtcctggtgaattgacaaagattctgcccaaattttaacgaccccagtaattacatgtcatatgaatgaatacttgacgtcagcaggactgcgttttggtggtgaacttggttctaggtagaaacaaagaatggagaaaactgggggataattatcttagggtttcaaaaaag

SEQ ID NO: 19876 - DNA, 1045 bp, Homo sapiens
gggtgtaccctcccctgagctcagcctgtatttctatctgctggccacttaccagccagtcctttcatctacaatgccctttactcacctagaaagctcacatcaaaagtcgcctcctccagaatacctctcaagttctcctctctggtcccttgaccctttgcaggtaccttttttcttgtacaagtcacatgataatgtaaggggtttttttccccatctagagcctgcctggtgggctcatggtccatttgtggaaacatgcatttccctctcctccgcccccctccttcatgatccatgctttaagagcttccccaaggcatgcagagcaagctgagaagaggtagacaagcctgcagacctttcaaagaagtggggtggcttgggaagtaaaagaagatctggagataggagttcctaaaaagcagacaagagattaccgaggggttccccacagctccagcacacagcagctgcaaaaaaaatgcagtggaattactgagggacattatgggcttgatggaggacagggaatgcttgtgccaagccaccaaggatcatgctgtggcagttgtgaccagatagactatacttttgccaaggtgaaaggatttccctactaaatcctttactttccactttgtttaaaatgagtttaacaccaagaaaatagttgtctctatgtccttatttctaatcttcctgctcaaccatgaactgcactaaacacactcagacccatctaacctaaaattgagaaagggaggttctcactcctggagagagaattactgaaagggcggccctcatacagttcagggtcatacccccaatagctggttttatatttgaaagcagacactgggactctgacctttgcagagataaaagggatactttcctaacccagagaggccaaaggagcacaggacgcccaggccgagggcagtgaagcttgcagacccaggctgtgcaacccccacagcaggtctcctcacgggatagatagactattggccccaattcctcagccctacatgca

SEQ ID NO: 19877 - DNA, 1031 bp, Homo sapiens
gatccgcccgcctcagcctcccaaagtgctgggattacaggtgtgagccaccacgcccagcctgggactgtgcatttaagatcaccccaagtggctgggcacagtggcctctgcctcctgggttcaagcaaacaaaaagaaagagcctaggcaacctagtgaaaccctgttcgggctgcggcctatctgtaccccagctattccagaggctgaggcaggagggtggatggatgctgggaggtggatgctgcagtgagcagtgattgcaccactgcactccagcctgggtgacagagccagaccccgtcccaaataaataaaaataaaggaaccagtttgtagaaagcaggagagggtcccattgaacttcaagccttcaagctacagctgtggctggacaggttggaccagcaggctggagcagtcgccatcttggcagggatcattgaccctgatctatcatcgggaggaagaagagctgatcttatgcagggagggcaggtggactatgtgtggactctggtgatctgtttgggtgccaggtgttactcccagggccacccataactgtgaatgtgcaggaaccctgacttaggttcctggggaatgagagtttggttcccggtacccagggaaaccaccagcatcggcagaggtgatagctggggaggagcggggatttggacgagagacacaggatgagtaccgggggcagccctgtgatcaacaactgctgcaagaggggccgtttgttcgactcactagtcttctgtggctctatgcggtactaaagagcagaagacagaagatacaaaaaccacaaaaattagccgggcgtggtgctgcgcgtcaataatcccagctactcgggaggctgagacgggagaatcgcttgaatccgggaggtggaagtttcagcgagctgagatcacgccattgcagtccaacctgagcgtccgagcgagactatctcagaaagtaaagacagaattaaagtgcccagcgcagtggctcacgcctgtaatcccagc

SEQ ID NO: 19878 - DNA, 1050 bp, Homo sapiens
ggcacatgcctgtagtcccagctgctcgggaggctgaggcaggggaattgcttgaacccgggaggcggaggttgcagagagcctagatcgcgccattggactccaggctgggtaacaagagcggaacctccgtctgaaaaaaaaaaaaaaaaaaaaaaaaaaaaaattgggagaattttgctcccactgccgtcaaaatcccacgtgtatttcacacttaacagcgcagctccattagaactgaccacatttccagggctccctagatacctgtggctagcggctgccatactacaccgtgctgggctgtagaatggggatgacaagacagggcggcggagattgggttggcgtgaagcgagggaaacactcggccgcaggacaaaactaaaacagcaagggggcaccgaaagactcagtagtccacgtgaatatcttgattatgttgtagctgagataatgtagggtccacccctaccgggtctctgggttttctcttcgcgtgtgtgcggagacgagagatcgaagagataaagacagaagacaaagagataggaagaaagacagctgggcccgggggaccactgccaccaaagcgcggagacagacaggtagtggccccgagtgcctggaggcgctgctatttattgtagtcaaggcaagggggcagggtaaggagtgccagtcatctccaatgatcgataggtcacgcgagtcacgtgtccactggacagggggcctttccctttgtggtagccgaggtggagagggaggacagcaaacgtcagcgtttcttctatgcacttatcagaaagatcgaagactgtggtactcctactagttctgctactgctgtcttctaagaacttaaaaggaggagccaggtgtacaggctgaacatgaaagtgaacaaggagcgtgaccactgaagcacagcatcacagggagacagacgttggagcctccggatgactgcgggccggcctggctaatgtcagacctcccacaagaggtggtggagcggagcgttctctgtctcccctggagaga

SEQ ID NO: 19879 - DNA, 1038 bp, Homo sapiens
agaagttgagagctctacagcagggctgaacagggatagggttcagggcctcattaccaggcagggaattgagagcctcttcaccgggctgtgtagaaattggagcctctgtaccaggctgcatgaaaacatagtttagagcctctttttcaggctgcatcatctcattttctatctgcatagctggagagttgagagtttgaggaaaggtaggagggtacagctgtgatggctgttgataatatctttcagctggattttgctggttgggggaaataaattcattcagatcagttaaaagttcatcataaagcgataaccggggcatggtaggctctggcgtaggtggtggcaccaaaggaatatcagagtggaggtccatctgtagaactatggcctcaatctgtgcagtatcctcaggtgaaaaagaactaagcacttcctcagcctcctcagaggaaagagggatcagtctccatgttgtcctcctgagtctgtaaagagtctaggacagagcgaaccgaagcccagattgaccaaattgggggtggaataatatgcccgcctttatgagcaattttgaatgtctgccaatctcatcccaatccttaagttctaaagttccctcagtaggaaaccaagggcaaagaagatctacaacatcaaacagttcaattaacttatcagtagatacttttaaccactccttctttaaggagagtttttataaaatttaaataagctgagtacttagtacaggcctgtcccttggtgtccccgggatactctgagtgcccaagcttaccaccaagcttattgacctcaatcctcaggaatctgtcattgaaatcctctgctgtgtttcacgctcaaagtgcaacttcacacagcgagagagaaattctcgttgggcgccagatgtagggtccaaccctacagggcctttggggttttctcttgtgtgtggagatgatagatcatagaaataaagacacaaaacaaagagatagaataaaagacagctgggcccgggtgaac

SEQ ID NO: 19880 - DNA, 1026 bp, Homo sapiens
ggcttcaagggagcctgatttgtagaaaaggaaccaggcttcaagggagcctgtgactccaagggagtccgattagcagaaaaagaaccaggcttcaagggagcctgtgactccaagggaatccgattagcagaaaaggaaccaggcataagaaaactaggctgtggagggatagggctgagggcctcattaccgggccgagaattgaaagcctcctcatcaggctgtatagatatcagagcctctgtactctgggctatcgagctgcatggaaacataatttagagccctgctttcaggccacctgatctcatctgctatctgcatggctgcagcattgagagggtgaggaaaggcaggagggtctggctgcaatggctgctgatacatttcagctgcgttttgctagttgggggaaataagttcattcaggtcagttaaaagttcatcataaagtaataactggggtgcagtaggctctggcgtacgtggtagcaccaaaggaatgtcagagtggaagtctgcctgtaaaattatggtctcaatctgtgcagtatcctcaggggaaagagaactgagaacttcctcaacctcatcagaggagaggaaacagggatcagtctctgtattgtcctcctgagtctgtaaggagtctaggacagcaaaccaaagcccagattgaccaaatggtgggtggaataaaatgtccccctttatgggcaattttgaattgtctgccaatctcatcccaatccttaagttctaaagttccctcagtcagaaaccaagggcaaagaagatccacaacctcaaacagttcaattaacttatcagtagaaactttaacccttccttctttaaggagagtttttataaaatttaaataagctgagtacttagtactggcctgtcccatggtgtccccaggatactctgagtgctcaggcttaccaccaagcttgtcaaccgcaatcctcaggaatcttttgtcaaaatcctccactgagtcccatgctcaaagtgcaa

SEQ ID NO: 19881 - DNA, 1052 bp, Homo sapiens
gtttttcctcagttaaaataacaaacattaatactaaaaactaataattgataatatccatatataatctctatatcctatgtctaatataactttcttttatcctaactattttctttattatattggagcagcttatgccttcagtctctttcctcggcacctgggtggctttctgcccacactgactgagccaagtgaatggaaagtaagtcacactctggtgatatacacgtggtaaacgtgaatgcagtgatcttcataccatatctactgagccacgtgaatcaaaaaatagactcagcagagtgatgttcatgcggtaactggaagtcaatcatcttcataccacatctaactgagtcaagtgaatcgaaaattagtcagactctggagagcaaagtacatgtcataaatttaaatgacaggctctttatacccctctgactgagccaggtgaattgaaatgtagttagactctggatagtgacgtacatgtgacgaatatgaatgcagtgatattcataccgcatctgactaagccaagtgaattgaaaagtggtaagactcctaatagtgacatacacgccatgacattgaaggcagcaatcttcatactgcatgtgagtgagccaagtgaatcaaaaagaagtcagactctagatagtaacgtacacacagaaaacttgaatgcagcaatcatgttacaggaaaggggccccaatccagaccccaagagagggttcttgaatctcacacaagaaagaattcaggatgagccctcagtgcaaagtaaatgcaagttttttaagaaggcaaagtggtgaaaaaacagctactccatagacagaataggacattcccaaaagtaagaggaggaacacatctatcctaggtacaatgcttgtatatttggggagatgtgctctgctacaagggtttgtgataaaagattaatgttctcaattactgtattttgcaagaaccgatattatcatctttgaagcaaaattaggaatgcctttgttctccagatatcgacatatctggac

SEQ ID NO: 19882 - DNA, 1034 bp, Homo sapiens
agtcaaagtgctgtccttcactgggaccaagaccagcctgagcatgaaggtaggtgagatggtcagcctgttcttacatgtgatggccaagggaatggaagaggacagcaagtgagacagctcccttgtttttgtgccttaggatgtggatcaagagactggagaagatctaaacccaaatagacggcgaaatcttgtcggggagaccaatgaggagacctcaatgcggaatcctgatagacccactcacttgtcccttgtcagtgctcctgaagtagaggacgactcactggaacgcaagcgcctcacccgaatctctgacccagagaagtgggagatcaaacaggttggggcctttagttttcatgaccagatagtcattcagcatgtagcatggtgcttaggggtgtgccctggagcacgatggcctgggataacttttggccactgtattagtctgttttcacactcctgataaagacgtacctgagactgggcaatttactaaagaaagaggtttattggacttagaattccacttggttggggaggcctcacaattatggaggaaggtgaaaggcatatctcacatggcagtagacaagagagcttgtgcagggaaatgccctttttaaaaccatcagatctcatgagacttactcactatcgtgacaacagcgtgggaaagagctgcctccatgattcagttaccgtccactgggtccctcccacacacgtggaaattcaagatgagatttgggtggggacacagccaaaccatatcagccacttattagccgtgtaatccttagctaagctactctacctcatgcctcagtacccttttctataaaacaggaccagtgttggtggtgtgaggattaattaaaggtgaaagtcgttgggcgtgatggctcacacgtgtaatcccagcactttgggaagctgaggcgggcgggtcacgagctcaggagttcgagaccagcctgaccggtatggtgaaaccccatctccactaaaaatacaaaaaatta

SEQ ID NO: 19883 - DNA, 1031 bp, Homo sapiens
cagtaagccgagattgcaccactgcactccagcttgggcaacagagtgagactctatctcaaaaaaaaaaaaaaaaggcagatggacttgagtaatgttaaagagttaaaatggacaagacttggtgggtactagcaggtaaagggaagaagggtgagggaagtcaggcatgactgtcaggtttctggcttgggcagctggatggaagatggcactgaggagggaaacatgggaggaggcttgagtggaaagatggtgaatttctcccctattctattcctaataatgagagttctttctaagcagggcttctgtagttctgtagcaggtagaagcctttcaggaccagtaagatgctggcatgatgcgtgatattccggtgcccccagtgatgatttttccaagcaattgtgttttattagctgaacctttgggtggaagaacagtgacagtgccaagctgagactaataatcctccagatcacatagactgctacacacacgcaaactgtgaaattcctgtgtcatctcatggttcattttatgatcagtaaaaagaagcaatctccctcttgttccacatacatattccgcaaaatacaagcagctcattttttagtccagatgtctcggtaggggaaagaaaaatctcattttgcattggcacatgtgatgccaggaaatctctgctttcccagggtgctagaaaattaaaattgtagtaatcaacattggatctagaaaatgagatacacagtagctatttgcaccaaatgaaattggcttttattggctgtagctttttcctattccactcacctctcaggtaccatcccttttccaacttaaccattaagcagaaggtacctcccttctgctgttggaggctgagctgggattaagtgtcattttaaccgtctagagagagagatagccacatattcctttgggaagatatctgggttcagaagaccttttcacacctcagggctgagcctgggcacctcactccagctttgcccctcttgcct

SEQ ID NO: 19884 - DNA, 1035 bp, Homo sapiens
tgtggttagaggtgtgcgggtgcttcagtattggggtgtggctgtcataaacagactgcagtcttataggtgtcaggcaggagaggtaatagtataaaatgtaagctcagctgaggcctactagggaccaggttgactgtagagtggggcctatatccagaggcttgagtactatctctgtcccccctcagggtggtgtaccatgagctggtgctcaccaccaaggaatacatgcgtgaagttaccaccatcgaccctcggtggcttgtggagtttgccccagccttcttcaaggtctcagacccaactaagctaagcaaacagaagaagcaacagcgtcttgaacccttgtacaaccgctatgaggaacccaatgcctggagaatatctcgagctttccgacggcgctgaaaggcaagattgttcctttgcctctccagcagcagtagccagggcttggacttatcgatgacaggctggtcctgaggatacagctgtcccgtgactgactgtcttaactgagcattttctcaactcgactctcatttcttccctgctggtaaaatagaaacagggatttaaacctggctttggcaagagcctgcagcctccatcaccccaagtccttgggcccagttgggagctcatatctaacacagagacacattgcatcaacttcaagaaagggacaatttgtgcagctccaggatgggaaggtggagtgggtgagcatcttgtgcagggacatggtgagtgccctgatgccccagctagcaggagctactgtgctcatctaaagtgtttgccccacttcccaccccgtctccagcccctgtactttggcttgacctcgtggaaatatttattttcttaaggaaacaaaaatggttttctgtgactgttttcttttagccgaaaggttaggatattggcctgggctcagggtgagggagatttagtatctgtgctctggcacacatgatgagaatcccctgaatcccctgaaaccagaacgcagggcctctttgcgctcgg

SEQ ID NO: 19885 - DNA, 1031 bp, Homo sapiens
ctggcggaacatcaggcaggtcttgccaggccaggtttcggaacttacggaaagctggtctggatgtagtgcttgtagagaagcttctgagagattgggcacatcctgttacgttgctgcttctcctgtccttatgttattagtaagttctgaagtgatgtaaatgctagaactactgtagaactgtatgccagacactaagagagactatgtaacattccaggatataaaggaatgtatgttgtcactgggcagcaaaccacaccctaaagacaattcagaaagagtccgagggagaggaatataggccaggcaatctgctggctgcagatccctgccccttcattaagctgagtgcctcctgattctgtctgagtattcgcctttgtaagcccaggccagtaatcaaggggcagggcattgttgtgtgttaaccttgaaggccttctggggagagacagtacagggacctcaaatgaaaccaaaggggaaacggggactgggcacccacctccccaatctcgttttgtttttgtttttgttaagacaggatcttgccatcttgcctaggctggcatcaaactcctgagctcaagtgatcttcctgcctcagcctcctgagtagctgggactacaggtgcatgccaccacacctggctcccagtcctaattccagcctaaattttccccattcagaaacactcctggatatagtggcccagcctgtcctgactgagtgcccagcactgacaatgttgacacctggggagggagggttgggtttcaagctgaggttgaaaagggatgttgaatgggctaaggataagagacagcagggttcgttatcttttctggctcaggtggaggaaaaagaaggatccccattctgtgggtgttccttgaccatctctctacgctagagctgaggtcacttctctgctatgacaacatagctgggttctgaccttttgaccatcaggaaagcaatgtcagcagctgagctgagcctgctctgagggagaagggggggg

SEQ ID NO: 19886 - DNA, 1764 bp, Homo sapiens
cctagtcctgcagacaggacctgattttaaaaagaaaaaaaaagagtatctgctgaatgaaacctgtgatacgcgacaagattttcacgtgcttcaaatgccaaagcaatcagaaaaaaaaaaaagaaaaagagaaaaaaaagatgtcacataccattttctggccttggagataaatgagaggagagactgtggccattgtactacagtttttccgaggggatttgcctttcctctctcacccttccaccctgtttcaatcaagagtctgtagcaaggtagacctattcatacaggctccccctctgctctgtggtaccagattgttgctagttcccaggcatctgtggaggaggattttgggcgagggccctggctgaccatgaaatccacgctaggcctggatgagagagaccctagctgcttcctctgtacctacagcattgtcatggtgctgcgcaaggtaaggattctgggtgctgagacccaaaggaaagaccatttttctccctctctctgacctactgccctactccaccttaggaaggggctgtttgctccctcgtaccctatacaagtagcagcacgaagcccctttggttgtatcttccacttacctaccttttcactgtcatccataggattgggcccaggtggaaggagagagtgggttatggtatgcctctgcacttccaggccctgggtggggtggggtgagcacactgccaccctcaaatctccctagtggttaagggttgtgtgcagagacatgccagtacatgtgccaacatatccctgcctgtgactgttatgatggaacattgtgtaaacacatataaacaaaagaaagtgctggacacagtggctcacacctgtaatcccagcattttaggaggctgaggtggaaggatcacaaaggtcaggagttcgagaccagcctgggcaacaaagcgagaccctgtctctacaaaaaaatacaaaaaaaaaaaatcagctggatgtggtggcacatgtcttatagtcccagctactagggaggctgaggccagaggatcacttgatcttaggaggttgaggctacagtgaactatgatcgtgccactgccctccagccggggcaatagagcgagagcttgtctcctttaaaaaaaacccaaggccgggcgtggtggctcacacctataatcttgagaggtcaaggcgggcggatcacctgaggtcgcgagttcaagaccagcctgaccaacctggagaaaccctgtctctactaaaaatacaaaattagccggacgtgttggcacatgcctgtaattctagctactcaggaggctgaggcaggagaattgcttgaacctggaaggcagaagttgcggtgagccaagatgtgccattgcactctagcctgggcaataagagtgaaactccgactcaagaaaaaaacaaaaaccaaacaggtcaggcggggtgggtcacgcctgtaatcccagcactttgggaggctgaggcgggcagatcacttgaggtcaggagttcgagaccagcctggccaacatggtgaaaccccctctattgaaaatacaaaaattagccaggcttggtggcacacgcctgtaagtccagctactcaggaagctgaggctggagcatcgcttgaacccagaggcggaggttgcaatgagccaaggtcgtgccatggtactccagcctgggcgacagagcgagactccatctcaaaaataaaaaaataggccgggtgcggtggct

SEQ ID NO: 19887 - DNA, 1048 bp, Homo sapiens
cttggttcactgtcctgcaggccggggatgaaaggcctggacagggtccaccacccactctcccactgccacggccgtggttgactgtctttgcctccccttttcagaggaaaggttatcaggacaggacgcagggagccagaagaccatctgaaggaagcctgcttccaacgggcccagcctccagccaccgctcctggggcagcgccattgctcctggctctcaggctgccagtctcccacaccgacgctctactgcccgcatctcggccagctgggtcacccagcccctttcgactctcccctggcacgcagccttctccttcactcggcctgcctcgctgctgctgtaattcctcttgtctcctgggagaaatgagattgctttcccaggacttccacatcccacttctatcaggtttcaccaacagggaggaagccctgtcaagatctggtgtgtcctgttttttttttttttttttcccagagggcactggcatgtaggagaagcggatttaccactagtagatgttaatgaaatttcagcttctaggcccctaacttgcaggacctgcccaaggccctgaacttaattttgttttcatcatttggtatttttttgttaaaagagccaccgaccacctccccgctaccccagaactgcacgtgtttctggccctacaaacccagatcgtcccttggaatatacacagggcaatttgtgtaggatcacactgcgctaaaagtgaggcatggtgggctaggcgcactggctcacacctgtaatcccagcactttgggagaccaagacaggaggtcttaagtgattaagcccaggagttcgagatcagcttagacaacatagcaagatgctgcctctacaaacacacacaccccctattataatatgtcaaaaaaaaaaaaaaaaaaaggaaaagtgaggcatagaactgactttattgttttgactaggaaagagcaaagggtttggaatcaaaagtcccaacttccccaccttcttaatagtgtgtgaatctgagtgccttat

SEQ ID NO: 19888 - DNA, 1029 bp, Homo sapiens
atatgtgaaatttatttgaatagtgtaaaattccatataaatatacattaacttttttcagagattggggacattaagactgaaatttatttatttatttttgagacagagtctcgctctgtcgcccaggatggagtacagtggtgctatcttggctcactgcaagctccgcctcccgggttcatgccattctcctgcctcagcctcccaagtagctgggactacaggcgcccatcaccaccacagctggctaattttttgtatttttagtagagacagggtttagccaggatggtctcatctcctgacctcgtgatccgcccacctcggcctcccaaagtgctgggattacaggcttgagccaccgcgcctggccccaagactgaattttatatataatgtattaaaaataacattgctagtatccacataatgcttatctattcaaaaaattacaaaaaaactacaataattataggtattttataccacagaccagcaacaaggagccagagctgcccgatacctgttttgtaaataaagttttattgcaatgcagccaaacccatttgtttattgtctatggttgatttagtgctgcagcattagagttgaagagttttgacagcaaccttaatggccagctaagcctaaaatatttactatttggccttttgcagaacaagtttgccaatccctggtataaagcaagcttaagtcactaagtctgcatttgaatgtaattctcccaactcttacatctgtgttatttccgctttcttatttttctcatattctacaacaaatgaagttttgatgtgtctgataaacatttcttaaaactttcagagtgaagacaatgtagacctaaggcagacctatactccattttcttcaacagaatattcaagttctgtagattcttcacttttctgtgcaccatggtctacttatggagatgacattaaacaaccttctaattctcagatcagtataaagaacaggtaaattaattcatttctcaaggta

SEQ ID NO: 19889 - DNA, 1046 bp, Homo sapiens
gggccgggattggtggctcacgcctgtaatcccagcactttgggaagctgaggtgggcagatcacaaggtcaggagttcgagaccagcctgaccaacatggtcaggctgaaaatacaaaaaaaaattagccaggcgtggtggcacgcgcctgtagtcccagctacttgggaggctgaggcaggagaaccgcttgaacctgggaggcgaaggttgcagtgagcagagatcgcgccattgcactgcagcctggggaacagagcgagactccatctcaaaaataaataaataaataaataaacaaacaaaccaacaaatagatgtacaggttgagcatcccaatctgaaaatccgaaatccagactgatccaaaatccaaaactttttgagtgctgacatgatgctcaaaacaaatgctcattggagcatttcagattttggattagggacgttcaaccaaatatacaagtatacattatatatttggagtataatgtatatttccagaatccaagaaaaaaacctgaaatccaaaacacctctgatcccaagcattttggataaggaatactcaacctgtattacttcaaggaagaaattacccaaaaactgtaacaggtaaaaggtaccaatcttccacgtgcttgtggtttttacattttgtatttagtcagtatcagtcactaggtggatttctgggataaaaggaactccatccagtcatgctttgcaagcattagggatggctcccaaatctgttacatttaagcgacaactgcaaaattgctgtggtgtctaggatgaccatatcgcatttcacttttttatccaatattaatatagagtcacaaaaatagaatagagcatcaggttcatatggttttcaaattgcaaatgaggaagctgagcaggtgttgatggaataatgtataataagacaagacttgctttcaggagcagctatgataccaagcatgtctgtgacatcatagatgacagatttatatcttggtcacctaaaatgaaaaccatgtgttgtggagaaata

SEQ ID NO: 19890 - DNA, 1053 bp, Homo sapiens
tgctgttcccaggagtcgcgtttctgtgcgcgttttgggagacagtagtgggcgggaggcatggaagttccaagggttggtgaagatggttgagttgctgttatgtcctttctcaggagacgattgcctcgagctggagagttccatggctgagagtaggctccgggccccggacctaggtgggtaacaggacagaactagggacgtgaggtgaaaattgccccagggtctcttggagaagaccgaaaaatgttccccctgttggagttttcgatcactcagtgtttttatgtacttatttattcattttatttattgggatggggtcttgctgtgttggccaagctggtctcaaactcctggcctcaagcagttctcctgcctaggcctcccaaaatgctgggattacaggtgtgagccacttcaccaggcccacttagtggttttatgtgtgtgtgtgtatggacgcagcatcatagaccgttttgggattcatgataaaggtcaagtaagagtcatattatgaacaagattaacagacagatgtggagtcaggatagagtgacttattaaatatataaattaatacattcatagttgtttacaataaaatccttaagttaaacactgctacctaattaggtaagtattttagcacatggcacttccctccgtactgcccctttagttaatatcatctagttggccgggcgcggctgctcacgcctgtaatcccagcactttgggaggccaaggcgggcggatcacgaggtcaggagattgagaccatcctggctaacacagtgaaaccccatctctactaaaaatacaaaaaattaggcgggcgtggtgaggcgtgcctgtagtcccagctactcaggaggctgaggcaggaaaattgattgaacccaggaggcggaggttgcagcgagccgagattgcgccactgcactccaacctgggcgaccgagcgagactccgtctcaaaaaaaagaaaaaaaaaataccgtctacttttacttctggattgttaacagatatgccatcggcttg

SEQ ID NO: 19891 - DNA, 1043 bp, Homo sapiens
ggcccattcaggagccaacaagttcactgtccccttttcctcttatctgtctcgaatacacatgcatattcgccctaagctaggcggcaacactgccatgatgttaccctgctgactctggttaggggctgggcactggcaacagggcaggcagtgactcactcagcacagctagaaagcatcctcctgcctggcacccccgtgtgaatctcggccctcttttccctagtttactattcactgcagccccccaatgtctggtttggggatctgtctaatttctttttacttaaatggcttccctagatttagattctaaggaagaagtgaagaagtcagcaagccttgtttgcttattatcttgtttggaaggttccaatttcaccacatctgagcttctgagggtaagggcattggcttcacagctgtctgtgtgtgcccagggtctagtctgtgctattatagcacacagactgagctgtcagtgagggccacctggcttcaggactctcttttcaaacttcttactttgctcctctttattgttttctaggagtttccaggtgtctaggaaaatgccagaagaactcaccaggtgccaggaagcatcccttttccggaaagtccttttacttggatctgcctgctggcaagaatctccagtttttgacgggggccattcagcaactgggtggggtaggtaacctgctcttctcctgcgatgccatgtgcctttgcaggcttagagcaggagttggatggggattatatctatggtttccaagtattttcttttttgagacagagtcttgctctataacccaggctggagtgcagtggcatgatctcagctcactgcaacctctgcctcccgggttcaagcaattctcctgcctcaacctcccaggtagctgagatgacaggcacacaccaccacgtctggctaattttttgtattttagtagagatggggtttcaccttgttggccagggtggtcttgaactcctgacctcatgatctgccaacctcggcttcccaaagt

SEQ ID NO: 19892 - DNA, 1132 bp, Homo sapiens
ggagtttgagaccagcctgaccaacatggagaaaccctgtctctactaaaaatacaaaattagccgggtgtggcggcacatgcctgtaatcccaactatgcaggaggctgaggcaggagaatcacttaaactcaggtggcagaggttgcggtgagtcgagatcacgccattgcactccagcctgggcaacaagagcaagactccatctcaaaaaaaaaaaaaaaaaaaaaaacattagctgggggcagtggcacatgcctgtagtccagctactcaggaggctaagctgggaggattatctgagctcaggagtttgaggctatagtgagctatgattgcaccactacactccagcctggatgacagagcaagaccatgtctcaaaaataatgttaaaataaacaaacatattatctgttcactctagaaattttagagaacatggaactactccaagtgacaaccagcatttttaagtatttttctttcctcccttcctctcataatggcttaatttagatataattcacatgtcataaaattcatccgtttaaagtacacagctcagtggtttttagtatattcacagaaatgtgtaagttgtatgatcgcatagtcaattgtagaacattttcatcaccccaaaaaggaaaccctgtacccattatcagtcactccctatatgcttgggcaactccctatatccttgatactcctagcccttggtaatgcccatctaccttctgcctccatcctgcctttgtttttttgtgcttcttttttttttttttttttttaagagggggccacactcagtcacagaggctagaatgcaggagcgcggtcatggctcactacagcttcaacctccccagactcaggtgatcctcccgcctcagtctccctgtagctgggactacaggtgctcgccaccatgccctgctcatttttgtattttttgtggaggcagagtgtcgccatgttgccccagactggtcacgacctcctggattcaagtaatcctcccacctcagcctcccaaagtactgggattacaggcctgaggcactgctactggccctttttctttcttttttttgagacggagtcttgctcttgttgcccaggctgg

SEQ ID NO: 19893 - DNA, 1115 bp, Homo sapiens
ccggttcccaagggtcggtcccaccaaccttgcgccccttctttcctcaaagcgtggccgaatgcctaggcttccgggtatcagtggccccgcctcttaatccgaccggagccgtccctcgtgattcctgggtattgtagtcagtttcctgggaaagagtcgctcctagtggcagctcgcttcgccagaaaaactacaaaacccagaatgcagcgcaaattccccttgtccaataggaaccccccatgtagtggggcgcggagccctgctctcgcaactcaagatggcggacgagagtgagacagcagtgaagccgccggcacctccgctgccgcagatgatggaagggaacgggaacggccatgagcactgcagcgattgcgagaatgaggaggacaacagctacaaccgggggtaacgaaatcctcggagtccaattcccgtccagcctcccacaacctgggtctctggggtgcggggaagtcaccgggagcttagtctagccccaccctcatgttcttattggctaagtcactaggattctgcctggcgattggttattgcctttgtcatttaccaagggtgggtgctctggatattaagggccggagacgttcagtacttttattatataaaagttctatgcagtgttccactcgtgtgcttcaggccattcctgggaaaagagcatgttggacgatggttttcgatggtacaacacaggacagtctagtaacagtacagttcaaagggaacgttacttatagacgtgttgtttgaacaacgtgactagcaataaacgaatcataaaacatttcgcagcagttcaccctcagtgaggaaactcatcagactatacaaactgtatgtataattatattgtaaaatatcactaccagagaatcccaaaatataaactcaccttataaacctatgtaattaacggtatggtaatgctttgatttacatagtttccattgctccaaataatccataagtatcctgaacgatatattaatataattaagtcttcgaacatctttgccttgttacctttgcagagcagccccaggcttcaagaaatgagcgatgttgtttcttggagagtatttgga

SEQ ID NO: 19894 - DNA, 1072 bp, Homo sapiens
gcaaggaattttagaggctggaggttctagaactgaagttttaaaagcaattcctgcactgggaagcattgtgtcaggcactgactgaggcctgtaaactgtgacaccaccctgtttgcagattgccccaaggccacctttgtgtatctgagcctctggggatgttctaccagccccggtatttgctccacaggatcacatggtttcattccactgaagcatttttctagcaaaagcagctgccgggtgggacgctgactggggataaaatcctgggagtatgctgcttttcttctgaatgtaacccacagccgtgtctctctgggaagtactggtgtaatagtgtctgggtgggcagaccctggctgggccctggggtctgtccgcgaagtgctctaagtctagcagagaaagagcagtgagtgtgggatggcatcagtcacagttcagtgagaagcctgtgaggactgttgggctgcgtgggcagaaggtacagctagaaaggccaacctggcccaagggtagaaattcttgtcttctggggtggggagtttgaaacaagggtggagcatgaagggttgtgttttcttagggagtcagcctggggccatgtagatggttgattgatgtagcagtctgagtctgcctggactaggagggaaagggccagaagatacggaagaggcaggccctgtgcctgaggagatatgcacgggggtgcagggagccgccgaatgaccagggattctctcttgagggcctgatctgtccttgccatggatagatccagggtgatcagctcatctcactccatctcttctgtcttgcctccagactcccaagacagctgggctgcgaccaatggaaacaaaggacattccagtagtgcaccagctcctcaccaggtacttgaagcaatttcaccttacgcccgtcatgagccaggaggaggtggagcactggttctacccccaggagaatatcatcgacactttcgtggtggaggtgagtcagggagtggtgttccaggtctctaacacgttcccagagaggcacccccctgagtggccgg

SEQ ID NO: 19895 - DNA, 1452 bp, Homo sapiens
gaggaggcggaggagaactgagcagagcagagcatcgagccaaaggggagatgagtttgtctgtcctctgctgaggctacggccgggcctagggaactgggagcttgggtggaagcgacacccgtggaagtgggaggaggtggcgccgggactttaaccccttgtgggctctgcggcaggggatttaaccctttgtggatctggcccctcggaggcagcgtcatcggtagttttaaccccttcggggctgggtttcacgcactggacttaccctcatcaccttgctcaccaactcctttattggggtgctccgcttggaggtttgaggcccacctccgcccattacgtactgttcctgccgctgcacccccttggacccgctagctggccgcactgtgggcgcttaaccctttactgacttgagctccccagattgcagttggagtttgctgatagaaggactagctaaaggcgtcactgcaggaattacaaactgaagaggactctgttggactgttttttttttctttttcttttttttaagaaaaacccatttttttccttaaggacttactagccaaaatttcttaaacttcgaggactctactagccatggccgagccattcttgtcagaatatcaacaccagcctcaaactagcaactgtacaggtgctgctgctgtccaggaagagctgaaccctgagcgccccccaggcgcggaggagcgggtgcccgaggaggacagtaggtggcaatcgagagcgttcccccagttgggtggccgtccggggccggagggggaagggagcctggaatcccaaccacctcccttgcagacccaggcctgtccagaatctagctgcctgagagagggcgagaagggccagaatggggacgactcgtccgctggcggcgacttcccgccgccggcagaagtggaaccgacgcccgaggccgagctgctcgcccagccttgtcatgactccgaggccagtaagttgggggctcctgccgcagggggcgaagaggagtggggacagcagcagagacagctggggaagaaaaaacataggagacgcccgtccaagaagaagcggcattggaaaccgtactacaagctgacctgggaagagaagaaaaagttcgacgagaaacagagccttcgagcttcaaggatccgagccgagatgttcgccaagggccagccggtcgcgccctataacaccacgcagttcctcatggatgatcacgaccaggaggagccggatctcaaaaccggcctgtactccaagcgggccgccgccaaatccgacgacaccagcgatgacgacttcatggaagaagggggtgaggaggatgggggcagcgatgggatgggaggggacggcagcgagtttctgcagcgggacttctcggagacgtacgagcggtaccacacggagagcctgcag

SEQ ID NO: 19896 - DNA, 1068 bp, Homo sapiens
tttattcataacaatgaagtttatattactaggaaaaaatttcattccatgataaatgtgtggtatcatgtttttcttcaaaatattgaatttaaagaatgttcattgcaatactggcaactaagtccagatttgctttttaaccatggagtaatttctgagaaatatttgttttattttattttattttattttatttatgttatttatgttatttatgttatgttatgttatgttatgttatgttatgttatgttatgttatgttatttttttgaaacagagtcttgctcttgttgcccaggctggagtgcaatggtgtgatctctgcctcctgggttcaagcgattctcctgcctcaagctcctgagtagctgggattacaggcgccctccaccacgcccggcgaatttttgtatctttagtagagacagggtttcaccacgttggccaggttggtcttgaactcctgacctcatgatccgcctgcctcggcctcccaaagtgttgggattacaggtgtgagccaccgcacccggcctctgagaaatatttagattgtacgcctcaaatgggcagggactgtgtcttacacttttgtatttatgctacagcttacctaatacagtgccaggcctcgttaaacacttattgattgctcagacgataaagaacttgctttggaaggaggagaggatagtcatgtgcttctgaatgtattgaacttcttgaaatctctttcctcatcaattttagcagagtttctattgaaactcctagggtgtgtttatggaagacaaactgagatgtgctgtcccagccttaggccctggcagtacgccttgccttttcacggcacacccactacagcctttcccacactgtgacactggagctggtgagtcaaagtaagtataagtggggagcacttttcagtacagtagttttaaggaaagacttgggtctctgaaagccatgtttgcatccctgccatgtccctcactggctgctagcctcaggccactgactcttagcctctgtatctcggagcctcagtttgcttaactgt

SEQ ID NO: 19897 - DNA, 1049 bp, Homo sapiens
tgcatggactctgggattgtgtgtgtctccagacttcttatctgagagtgaagaatctttattccatatgacattggcaattgggtattccattacctgcacctaaagcattcctccctgtagtacagcaatctcacagggttgttgtgagcattaaataagataacaaatatgcaaaaattccaagcctagaacttggtttagtgtaggtgttcaatacatgctaatttcttccctctcctctattttaatctcttaactttagattttttttctactctaccaatctcacaagattgtgctaaaaaacaaatgagatcattgttatttattgccacaataatgctgtataacaaatagccacaaaacctgagtggcataccacaataaacatttctttagcccacaaacgggagacactgttaacttgggtaacaaaggggcggatgcacaggcctgtgaatctactaaaagccattgaattaaatgggtgaattttatggtatgtgaattacatctcaacaaagcagctaaaaagaaaaaaggaggatgattgcagagtagggagaggagggaagaattactaggtggtggtgataccatccatttcctataaggctgctggggccccaccatgcaggaccattcacaaccctgcttgttaaggttttctctgccatccttgaaaataatcactggttgcataacggacgctgtggggaaagattctgctgacagcaattcactctgtggctgactttgctggagcacaagcccccctatcccacaggcccagacaggagctgggatctcagtgcatacaaggaagtagaggcaccagatgagagatgggagcatcatcccagggctgcctccttggccagaaggtggcattaagggcttctgtcctgctgtgtatttggagaggcagaggcatgtgggaaagggagaaaacgttagcgtgtaacagcgacgaaggggctggagcatgggacctacagggaaggatgaaatgaaccggggttatgagctagagaagagcagcagga

SEQ ID NO: 19898 - DNA, 1027 bp, Homo sapiens
gtttttaggattcacatcggttacaggaccgggccatggtctgcccacctgaagctgaccacctggtcactgttcactctcccagccagtctgccggccaaagtccattgaacgcctactgtgtgccgagctcaggagctgtaagtagattaaggacggcacagagcccactctcaaaaatggactgattgcttttaatgtgtctcatcaaatgaaagatgaaattttagactctagatttacacggtgccagaaaagtgcagaaagctgacctgggaggagaagtgaaaaagaagaatggcaagggacccccggctggagagttgaagggcgatggcctgagccagtttcagaaagatttggtgccaatgctgagggccatggccaggaagaagaggaccacgttagagaggtaggttggaactgctttcagggatggggtttagcaagaaactgaggagcaattaagagggaaaaataaaggagtcagaaggaggaggggagaaagaacaagggctaatctgtgtaattatacaaatatacagcttccatttagcaggcctctctgaggggcaggatctgtgctgagcgctttgcataccctgcaaggtacattgttaatattcttattttatagacaggaaactgaggctcagagatattaagtgctttcgccaaggaatacagttggtaacattcaatcagactttaaatcctattctcttaaccactcgaacgtctactgagtgagtaaccaagggatgcttatgagggaacgtgccgtcaggggtgctggaaataggaaccaggctcagctttccctctggaaggctggtatttttggaaatagaaatgctttggagctaatggtttttcctgtaatggtttcagcctgtttggggttttcacgcttcagtttacagtctgagccactggtgtgtactcatttattcctttttacaggaaaaaaaaaaaccccaatgaatttttgatcaaattgagcttgactatttgaccagtgaatcag

SEQ ID NO: 19899 - DNA, 1021 bp, Homo sapiens
cattggtgtaagacactgagatgtagagttgtttgtcataaggcatcgtcacagaaaagtcagcacaccctcccctccccaccacctccatgccctgttggaaaagcatctcctggccgcttatccaggcactttgttgtcaaattcatgccctttgaagggtacctgcttccctgccagacatgctccccgcaaggagagcagaacaagctctccaacttcttccattgtgaaagcccatttatagcatcaaatgttgtctctgccccctaaggttcagtggctatatttttgtagccattgattgggactaggtgtggggaggagcacagtgagaataggcaactatgaatcagttaccctttaaaattgattatgctttaatgtatattttatccaacagaacaacagtttacaaatatttgaaaagcagtatatgaacataaaaggggtagtgtttattccctcactgctgcttacccctcagattcatggactccttgcaatctgagactcatagggactgcggaaagagagtgaattttgttgtgagatcgattacttcccagccacttcaactgcctggatctcagatctcagtttcttcttctgtaaaataagcacatctctgctgcagggttttctgaagtattaaggcgagcacaggaatggtaatatacatggcagacatgggatatactcaacaatcacatctttttaattttgtctctgctgtttattccgccctgtgaccttgggccagatttggagatgactctcagccttagttccttcctctgcaaaatgaggagcatcatacctatctcaggggagacacagagtcctgaacgagaatgcacctggagcacagtcagtgctgaaataattttctccgtcctttcttctctgccagcccctcctgtcttccatggccacatgcaaggcacagcttctccaaacagccttcccaaggcccccactccactcaggagtctcctttaggacaaagctcctctccaga

SEQ ID NO: 19900 - DNA, 1015 bp, Homo sapiens
cggatacttgatcctcatgtaaacacctggctccccggaggcccgaaacccccagagccgggctttgcagctccctgctattccgcctgccactctcagaattaatttgctctcccctgtcaatgagtcaggtccctgcttatcaagagagcaacagctgtgggccaggagccctaacctacctgaggggaggctgggggcctgatccctgcaattggggcctcctgtgtgcacccttgggtccttgtggtcttgaactcagagtcccaagagggcacaggggtgagcccagacaccatgtagtttactccaagactcactgtgtgacctcccagcacattgttgcccctcatctggccctcagcccctcatctgaggatggagagggctggatggcttggcttctaagatgtcttccagctcaaaactcccagattccttctcctgcccctctttcctctaccagatggatttggggtgttaaggttgggggctacagcagaggagtaggaagacccagccagaaagtgactccccagggagtgacttgggaggccagggcagggcaggaggctggggcagccagatctagcagcctcgtgtgtctgtaccatgtcctggccatgggagggactcgggagagggagaagacacactgggaggggcttgggggccaaggggaggaagtgcagaaaggaagaagggcctcttggccaggtcagtccaaggggtgcacagttggccagcccccaatatagtcaggcccattttgtaataaggaaattgaggcacagagaggctaataacctatcggaggtcgcagagcctggaggcagggtcacagcccagggacgataactctcacgatgctgggggctgagtccttctggagcccctaggaaggaggcagcatctgcacatcagaggagcttccaggaggaggcaccagttcctgtcatgtccacttccagagtgatcctcgtgtctgggcctacctgcccccactccccagcgc

SEQ ID NO: 19901 - DNA, 1120 bp, Homo sapiens
gagtggcccgtgccatgtccatccccacctccccaacccgtgtcagctttcacagcatcaagcagtccacagcagtctgagctggcaggtcatggagcagcccccaaagagctgtggctggggggatgacggccaggctccctgaccaccctgcctgtggaggtgacctgttaggtctcatgcccactcccccaggagcagctggcactgacagcctgggggggccgctctccccctgcagccgtgcaggactctagctcatgagtggaaagtcacctacaggactgggccgggcccagggcctctggcttccctgcccaatcctccctggagaagggacatgggaatgaattgaaatggggcgctggacacctacagcagcacgcatgtccctccaaggctgtcttctcccagagcacaagaaggccagcccactgggccctggggctgccctcggcaaccgtggggaggccatttgctgccctggggcatcatgggcaactcgtgacagcctctgactcaccacgatgacgcctctggacctcggtgatgccttccgacaccactgggaaccaagggccctcactcaggaaccctggagacagaagtcaggtgtcatcatcagacttgcggccacagcactagagtcacccccccaggcctccagaaccttactggcactgtggcactgccaccagcaatgccctgccttgctgccttcaccctgaacatttagtaccctgcaggccaggccagcttcccctcacttaaccaccccataccagtcacctcctgctccttttcctcttttgtgagaagatgggggctggagggggcagagtggcctgtgagcaagagccaggggtgtcccagtcccagcctctggggcagagcttgtagccctggatggcctctggggcaggaccactagctaagcaagccaggagaagacccctgcccaagtggctcttgggacaacgtgctgcttacactccaggtgtggaccggccgcagcccccactgacctgcccatgtccagagggactggacagccagggcagggctttggggggcactagaagatgagggtgtcggctgtgaggcgggtggctggtataaa

SEQ ID NO: 19902 - DNA, 1025 bp, Homo sapiens
ctcccgagtagctgggttgcgcaccaccatgcctggctaacttttgtatttttagtacagacggggtttcaccacgttggccaggctgctcttgaactcctgacgtcaggtgatccaccagccttgacctcccaaagtgctaggattacaggagccactgtacccagcctaggatatgatatcacttcttagagcaagatacaaaattgcatgtgcacaataattctaccaagtataggtatacaggggtagttatatataaatgagacttcaaggaaatacaacaaaatgcaatcgtgattgtgttagggtggtaagaaaacggtttttgctttgatgagctctgttttttaaaatcgttatattttctaataaaaatacatagtcttttgaaggaacataaaagattatgaagaaatgagttagatattgattcctattgaagattcagacaagtaaaattaaggggaaaaaaaacgggatgaaccagaagtcaggctggagttccaaccccagatccgacagcccaggctgatggggcctccagggcagtggtttccacccagcattctcaaaagagccactgaggtctcagtgccattttcaagatttcggaagcggcctgggcacggctggtccttcactgggatcaccacttggcaattatttacacctgagacgaataaaaaccagagtgctgagattacaggcatggtggcttacgcttgtaatcggctttgggaagccgaggtgggctgattgcttgagcccaggagtttcaaactatcctggacaacatagcatgacctcgtctctacaaaaaatacaaaaaatttgccaggtgtggtggcatgtgcctgtggtcccagctacttgggaggctgaagtaggagaatcccctgagccctgggaagtcgaggctgcactgagccgtgatggtgtcactgcactccagcctgggtgacaaagtgagaccctatctcacaaagaaaaaaaacaaaacaaaaaacccaaagcacactgtt

SEQ ID NO: 19903 - DNA, 1028 bp, Homo sapiens
ggggggcatgagtaattgcctgtaatataattgtgctcacgctgtcatggaggaccgtacaaagtgtcagaagcacagtgccaggaggcacagcaaagggtagtagaggtgacatttgagcccagccttgaaaactgtctaggatttctcagcatttcagcaaagtaaggcaatttctgtctaaaatatataggcaaagtttttataaaaatacgagaaattaattaaataacagattatgaccacaatgcagatttaaaaactaaggtatgatgagtgccgttgaccggttcatccagacagttcagagaacagaacatccatgtagatccttcttgtattacagaatacaaaggagcggaaaattttgcctcagtaactgccaggtcattctaattaaagtacctatacattgtaatataattcctccattaaggtaacagccaatcaggtggtacagagtctgtgccattcagtcaagaaattcactcccttaacctagactgtgctggaagttcattgacaaattttgttctttggttctccatttttcttcagaattcatgcagaccacttgacttccttagcattttcttttgtgggcgtatattaatgtctttggttaagcttcagcttccgtttgcatcaatcctgttgtaatcgtgcctcctgaggcatctttttgcttcccttgcatcagtttccaaaatcctactttctgcttggtaaggggagtatccattttctttaaagcagtggttttcaaacttgcctgcacatcagaattatttggggagaaggataaaaatacagattactgagcttcacctgggattctgtagatttgagttgcatttgggattactttaaacaatttaccagatgatttttgtggcacctccacttcagttttaggaaggactgtttcgaggcagcttttcaaactttaatgaccatagaaatcacctgaagattgtgagaaactgcagatcctgatttagtaggcctgggtttaggcctgaggttct

SEQ ID NO: 19904 - DNA, 1064 bp, Homo sapiens
ctggaaaaattaaagacaaaagccagcctataatttttttttttttttaaatgagatggagtcttgctgtgtctcccaggctggagtgcagtggcgtgatctcggctcactgcaacctccgcctcccgggttcaagcaattctcctacctcagcctcccaagtagctgggattacaggcacacaccaccacacccagctaatttttgtatttttagtatagatggggtttcaccacgttggccaggttggtctggaactccatacctcaggtgatccacccgcctcagcctcccaaagtgctgggattataggcttgagtcactgcgcccggccatgaaaatttcttagaacagccatttagccagtttggattagtttcatcattactttttacactgctactgaatttgccatatctaggccaaagaatgagaaccttcctctgtattcaggaatcaaaggaccagtatatgcaaagagactacgtaaaaagtggtctgaaaaattattttgtggcaaagtaatagagatatgagatcactggatactgtttcaaagacagtattacaaaaacagctttatgtgaggtgcatgttctaaagaactattaaaactattccatacatcaggtaatcaaaagttgaattttgagggatgtgatgatctttaaaaaattgaaattctcaagatacatgatctttacatgtacatgatctttacatgtagtaggttatgttttcctatttattctgttaacctcatgaaaatccagttcaattgtaaatactaaagttattgactacttttggcagctgttttgatgggaggtataacctttgagattaaaagttgacaatgaagaagggtgcaatttaagctccaatatgtagtgaacacaaatagaattattatctgaaataattgcttttatatccttcttattacagctcctcatttctatctcatcctaaatcttatatttacacatataaacttaacattggtgccatttaactatgtcccctaccacaaagttgatgtgaacatgatcttctcattacca

SEQ ID NO: 19905 - DNA, 1032 bp, Homo sapiens
ctcaaactcctggcctcaagtgatccgccctcctcagcctcccaaagtgctgggattacaggcctggcctgattttaaaagaaattagaataatactttcatgggttcctcaaagtttcataggccctgggcactgtgtctagtgggtaagttgtccttgcctgtcagttttaaagttacttgaacctcacattgttttttcagtactaggagtgagaggatttttgcttatttctggttcttggctgtgctctggatagttgaaattgtttagcagattggcctccagataagtaaggcattattattggatatagtaaattcatgttctggaagtttggggcctaaaggagcaatgtgggctctgtagggttaaatgagggcagggtatggtgagaaggcaaattttgaaacattgtgaacataagagacaattgcaaattggcagaaaactggagaaagcattttaataaacaaatgctatggataaaaatcacagaggtaaaaattaaattagaaaggagaatattgacctgattagaacacaggggtcaatttagggtatatcaagctaaaagctgagataggtagggaaaatctactgtggatataagagtggggagtttggatttgctgattaatgtgtggtcatcttagttaagtttctaatgagagagcatgcacagaacccttcctttaaggtattaagaatactatggcatggtcagtacaactttatctttttctttttttttttttttggacaccaagttttgctcttgttgcctgggctggagtacaatggcacgatttcggctcactgcaacctccgcctcctgggttcaagtgattctcctacctcagccccacaagtagctgggattacaggcatgcaccaccacgtccagctaatttttgtatttttagtagagatggggttttaccatgttggccaggctggtcttgaaatcctgaccgttggtgatctgcccgtctcaatatcttcttaatttatttaaccttttctcctaa

SEQ ID NO: 19906 - DNA, 1050 bp, Homo sapiens
ccagctttgccccacaactattaggccctctgctaccccgacactcattaattcattgaatatttattgagcacctactatgtgctgtgcaccattctcagtgctggcagcacagccctgccctcgaggagtttaccttcttttatgctgcagtatcttgtctatctttcctctccagtgctgaaccaggagtgggagttctggttctagacctccttactttatttttcctcatctgtagaatgatattataatttgggctggttaaactgtaaggctcctttcagttccatgataacagaactgatgactgaatgactttcacaagaaacacgtggagtccagtgagcaccagcaatgaactttcgcaactgcagaaattagtgattgtagctgagttgacacaacagtagctgaacttattaattttactggaactttgaacccagtttgtgattatctcttgccgtgtcactgaatacattgagtacattggaattagattgacatattaaagttacttgaaaactcctgaacctacctgaacaatgaatgaatgaaaataatgaatgaatgaaaacaataaacattttacacttaaatgtttaatttagatgaactttatagaggagctaatagccaggcttctatttttgagatcccaatggttgtaaaggtgaccacatttgtcccctatgtagtccaagatcagtctcctgtcctggaccttatcgtatgtccaggacacaagaagcactacatttaacaagctccctaggtggttttgatgagcaggtaggcttaagaactgttaccttatctcaagaccattttttttcctgaacagcggagcttaagaactattaccttatctcaagaccatgtttttcctttatagattttgccctttaatgagcgaaatgtaaaggcaaagtgagtgaaatgaaaatgaccagattgttgccactacttttaagtaaagttaacaacaaacttacatgatgctgtgtaggttacacagcgttttcatgttcatcatggtcagaggca

SEQ ID NO: 19907 - DNA, 1066 bp, Homo sapiens
cactctcgctctcactgggggagggaaagaatggctttggtggctttgttcacatagctgatgcgtgccctgggaaggtgtccacagtgagccctgtgtgcaggactgtccacacggttcacaccttgtcaccatcaggcctttctggctcctgatagggtggagcaaaagtggaaaggaaaggaaagaggccttttctcacagccattatattaaatagtaggtcgattcacatcctcgtgctcctggccaccctcccctgtgcctcagtgacatgtagatgactgactgccaatacttgtcaccattccctggaagcagctacctaggggaaacaagatgtagtgctattgccgataacaagtaagattttccacactacagctgggtgtttctcttttctaaagtgaggccagtgttatttcccgggagtgttcagtcttgaccctagtcactgattttttctagttgttaatagagtggttggcttttaaggttcagagactgtggcttggcacctgcgcccaggctttgtgggcctttgccccttagaaagtagctgtaggcaaagatttgtgattttccaattacagtctcagctctagttttagtatctctaattctttggttcccttctcttccctgaaatatattagcacctgccagccaggccctcattttgcccagccagtgtgggcagatcccaccgtggagacatctgtagtgtgtatgtccttgtaacactctgttttcagggactacaacctttttccttctgtgaccagccccggattcaggctgtactaataccaggtatattgtggaatttagtataaaggccaatctgtcctgaagtccatctaatgtggtgaatcactgaaagtctcagaaagacctggttagtgtatgttctcatttaccacaggcctaccagccctgggcacagcagcttcatggcaagacataaaatgacactcaaaatccttcagatctggaaaccggctcagtattaaccctacctttggttgtcctgccctacctgctctgttagtttcttgttgcttga

SEQ ID NO: 19908 - DNA, 1046 bp, Homo sapiens
atctcggctcactgcaacctctgcctcccggttcaagcgattctgctgcctcagcctcccaagtagctgggactacaggtgcacagcactgtgcctggctaattttttgtagagacggggttttgtcatgttgtccaggctggtctcaaactcctgagttcaggtgatcttctggccttggcctccctaagtgctgggattacaggcatgagctaccgcaccaggcctgtgtttattattctgtacttatgaagcaaaagacagtatataaaatgcagattttacaatttaagcctaaatatacacatgatattgaaaactgtatctgtacgccatttgtcatatcatttcttcttttaacattgtgcacttagtacaaaggtatttagttcttattttaatgcagtggtttgcaaaattttgagatttgttatttttgtttatatttgatattgttaaagcagaatgctttttttccaaattaaatcttatacagtatcctaatatataaaatattaaagttgagcttctctgaccaaagtgggagaaatgaccaagtgaactgctgaaacagctccataagaccttagaaatataagaaagaacttaaaattactgatctagggtattattttgaccaggttatgttaaaaagaaaaaaaaccctgaaaaacaactgattcagattctctctagtgaaattgaagagtgagttcttggttattggtggtattccatgttgactccttaatattttaaaatatatttaaaattaaaaaataattttatgatgattacaaaaaaagcattgaaaaatagaaaaggtaatttatcatttggcatattcagaaatacttcccaaatatctagtcatgtagcttatgagctctcttgtttcttctgaaagacctgagtgaagaaagttggtgttgagcaaaaatgtgtaagagggtatggaaaatggtcaaggtgaatgtgagacattgaatccataggcgaagaattagaggaaatcattaataggtgttgttaggcatttaaggcct

SEQ ID NO: 19909 - DNA, 1044 bp, Homo sapiens
ggtggcacacacctgtagtcccagctactcaggaagctgaggcacaagaacttcttgaacccgggaggtggaagttgcagtgagctgagatcacgccaccgcactccagcctgggcgacagagcaaaactctgtctccaaaaaaaaatatacatacatatatatatatattttttgttgttgttgttgtttttttactttaacagtaaaattgctgtctttgctctctagggggaaaatgataattaagtttaagtcattgcatttgtgattctacaagtgagttaactgttttctttttttagacaacatgttgtgattttgttagtaaatgatcccttcctttgcactgatactattcaggttatctggaagagttcatgtaccactaagaatgaactattgacttaacagtttggcttaggctcctggttagaacaccaccactcctctctccaccttaccttctgtttgtcccagtgcaaaatttgtttgttcttctctggcttaggtgaagattgtccccagtggatggtccctatcacaatctctactagtgaagaccccaaccaggccaaactaaaaattctaatggacaagccagagatgaatgtggttttgaaaaatgtcaaaccagaccaatgggtgaaggtgagttcagaatcttacctaaacagatttctctcacttatacattttatggccggttttaaattctgcttcagtttagtagtttcaaagaaaaaaaaaaacctaaacttttctttgtgaaacttaggacgaattttcatatagtattgtccagacatttgtccttatgttagggaaggtagtggtagagaagcagatccaaaggcataggactaaggaggagaagaaaaaaaaaaaagtagactgagtgtaagcatatatgaaccaaaatatgtgtagtctcacaccttcaaactcccctgtcattgtaatgaaaggttaacttcaatgatgtgttgtcaccatatgtgtactactgtaatctaatgagagcagacatacataataatcggtt

SEQ ID NO: 19910 - DNA, 1641 bp, Homo sapiens
aaattctcatgcctgaagattatgcatccttcatatagaccagtgggtattttttcataacctgtaatattaacttcttattgctagtaatgatcctgcattctgggttgttttataccaggctttcttcgagagtcacccagctccttcagctgagcgtaccatccagcagtgttgtgaaaatattctgctgaatgctgcctggctaaagcgagatgctgagagcatccaccagtacctccttcagcggaaggcctcaccacccacagtgtgaatcctgaggtgccgccattggcggttctgctgcttcgctgcagggataaggtggagctaccgaacagctgattcatatgccaagaatttggagtcttctttcaaaccagtgggggttggacaatgaatgtagttaactggttcctgctcacactccagaattaaattctattgaaaaaggaaaatcagcaattcagcaaaaaataaataaaaaataaaaatgtaaatatgatagtaataaaatagagcataacgaaactgtgaaactttctgaagccttgtcagtggttaaaagtatttaacactctactgttaatgacagatgttctgtttttataacctaccaaaaggaaactagaggcttcttggtgaagagcatttttgtgaagtgggttctgcaaggagcctataaagccaagggtggtgtccatttctgggaatggttaaacacaaaaggctgatagctggtatcacatagttggagtcagtgcataattccaagtggctttttttttttttggcacggggactgatcaggaagatatattcctgcataactcaatctgaaccaaggattgtagtttagttttcctccttgccttcccttctgtgtgaccgaccccttggccaaaaaaaaacaaaaagcaaaaaacaaaaacctaccctgttctggtttttttcctccctttagttccacccccaacccccattccctggtgtccttcttagagatgaagaaataataaggaaacatctttcatagccacattaaataagagaaactgatatacattatttttttctttttaaagatgacttataagaaccctgaaatttatataggtgagacaatagaaataaaaagatcttcagccaggcctttctgaaggagttattctgctaaaaatggtcttagttgtctgaaaagccagctcttgaacctcttcacaacagtatcaacactggcttctcccggttcattttatgcgtgcgagaagtcagtggtaactgctgcagggcttaatacattagtggtaactggtttaaaaaacaaagactgtaagcctgtgtgtgccactgtttgcttcaacagtatatcctaataagcctcacctatttaatccaatgagttttaaatctaaatctcattcccttcttctttccctaccttttttttctttttttcttaaaaaaatattttgtgttattaacagaaattcatatttggtgtggcttaacggtatttcagaaggtcatcagattgtgagactgcttccttgaaacatttttgtgctattgttttaaaaaaataattaaaaaacagttggcgttaataaaaatgtcaatgtgaaactgatgtcctgattc

SEQ ID NO: 19911 - DNA, 1026 bp, Homo sapiens
cccctgtggctctccccacctatttcctagagctctgccctttcctagctaccttggtctgtactcatggccaggcctggcacccgactgcctcttaacccatttccactgatatttttccctctttgctcggttattcctctcttggggttttttctttttctttctttcttttttttttttcttctgacctggatgaatagagacctaatcactagggatctgcacccagaaaacagactgaggctcatctttgagatggggcctgtttgctgatgaaatcacaggggaaagttcctcgtttttcatattttaaaatttaaggggtccggagaaaatgaagctaagtccgctagagactggtcctttgtataaaaatgtgggatggattggttgaaacagcctagatgccagttaagtttctctttggtgtccatctcctgttgggggatggggtcagagggaaggattggatgatgcttgacatctttgagaaaggtaataggaattaagtctgagtaacactaaccatatgtgttcctttgtgttatataggcaaaatgtcaacatcaacaaagtgacaaggcttattttatacagactgcctttgaatgatttttttgttgtttttcatatgtgccaatttttacaactaacctgtttatcctttcctagaagagatttttccactagtataggctgataattccatttagggtattattcctgtttctgcttttgcaaattttgcaaaaagctttttatcttattcctaacattcttaacattctttagtggtacataattaataaaacttttaagaattatcttctgctgtgattgcagagcttgttagcagtaagaaaaatgtgtctgcttttgacttttcctgctaactttgctgtttgggcacggtttttggtggagaggtgtgtgtgtgctaaatttttaaacaaagggagtagtttttgaggcctgtggattacaaaaggttacaaaagaacatgcttttcagggatccactgt

SEQ ID NO: 19912 - DNA, 1031 bp, Homo sapiens
aaatttagataaacagttttattttctaccccccatcataacagccattcatttaacaaacattgagtaccagacattattaaaagttcttgggacacctcagtatacatagaagactgactactactaccatactctgaaaccttgcaattcgggggtctaacatgacaatttgggcactaagaatgatcttgatagggaaatctgtaattcctcattaagtgctaggctccacgagaaaagtggaagacttcctgttacactaagtaacatttttatagaagtcagtgaagtaaatattttgtggtttcctgaaatgcttatatcaaaaaaaaattagacattagttccccccctcgccgcccctctggtggttcagtgctctataaattatcctcagttgtggaaattcctaagatatttttatttacaaatttatcttcccttaacagcccactttccttgtggaactgtccagagtgctggcaaatccaggaaacagtcaggttgccagagttgcagctggtctacaaatcaagaactctttgacatctaaagatccagatatcaaggcacaatatcagcagaggtggcttgctattgatgctaatgctcgacgagaagtcaagaactatgtgagtaacgcttatctgtttggttatattgcccagagaacaagaaatcgctttctcagatcttttgctatttgcatgggatagagctaacagtgtgataggtttctgggacctcaactttacctaaagataaaaattgtctttgtcttaaatctttctcaacacagcttgtccattcccattgatggattggaattctttttagatgactgaggtaggctgcagcagtttgggaaactttaattacgtgccataattggtaaaatctgtttggcaaatgggagtagtgtacaaattggtgctacatttgtataaaaattagggaatttgttaataggtatttccaagctctccagaaattccgattcggtacttctggagtacagctcagggaat

SEQ ID NO: 19913 - DNA, 1068 bp, Homo sapiens
ggaggcctgggaggtcaaggctgcagtatcgttgtgccattgcactatcgttttgctactacactccaccctggacaactgactgaggccttgtattttcctttttttttttttgagcctgggcaatatggtgatgccctgtctcaacaaaagatagctgggcatgtcagcatatccacccctgtagttcagttactcaggagcctgaggcgggaggatagattgcaccgtagagattgaggctacagtgagctgtgatcgtgccactgcactccagtccgggcaacatagtgagaccctgtcttaagaaagaaagaaaaaaaagaattcagagacactaatataagtatggtggtgggcaaaatgtggtcaaatagtgttagaaatttgtatcttttgtctttttttttggtgcaggttttgcagacattgggtacagaaacttaccggcctagttctgcctcacagtgtgtggctggtattgcttgtgcagagatcccagtaaaccagtggccagaactcattcctcagctggtggccaatgtcacaaaccccaacagcacagagcacatgaaggagtcgacattggaagccatcggttatatttgccaagatatagtaagtgcttgcctaatgtatctggtttatatacctctgattgcctctagctgtgacatcaatgatattagtactaccttattgaatcacgaagaaagccaagctaaattgcacagttttgaaagtgagactgatttatttcccttaggcctgtgtcttcacattgctaatcatgccctaaagtaaagaaacttgaggatcgcaaactgaaaacagaagtctatgtttgaagagtcttagattctagacttacaaaatgaggatattctcatttggattatccctgacccagtcttttttcttaagatcccgaatgtaccatgaatgttgtggcgcattttcatttacaacattacggaaagttttgccaacatttgatgtagttggtttagccactggagacacagtattttagatgtagcccccccagcactgttgttcctgatgagg

SEQ ID NO: 19914 - DNA, 1057 bp, Homo sapiens
tagcctgtgcaacgtaacaaaaccctgtctctaaaaaaatttctgtggagaagaacaactgagttgttaaccagttttgtgagctcttgtgtttacagggcttataatggaaaaaaaataatgaaaaatgaaataaataaaaattatagcaattggtctgtttcataccaccttaggaaggtgtttttaagaaacaggatatatagccaggtgctttggcacatgcctgtaatcccagctacttgggaagctgaggtgggaggatcacttgagcctgggagttcaaggctcaagatttcaccactgtacttcagcctgggcaacagtgcaagactctgtctccaaaaaaaaaaaatatatatatatgtatatgtatgtgtatgtataatatatatgtaaacattttggctgaaaatgcaatgaataacataaaatttaccatcttaaatcatttttaaatgtatagttagttaagtagattcacattgctgtggaaacaatctccagaactttttcatcttgcaaaactgaaactgtacatactgaacaacaactcctcatttccccctttctcagccactggtaacgaccattttactttcagtttctatgtattttactactctaacgaaataccttacgtaagtggaatcatatttgtctttttgcgactggtttgttttacttagtatgatgtcctcgagattcatctaaggggtagcatttgtcaaaattggctttttaagggtgattaatattccattatatgtatatgccacattttgtttatctagtcttccatccatggccatttggtttgcatccaccttttggctattgtgggtaatgctgctatgaacatgggcatgcatgtgtatctttgagactctgctttcagttctttagggtaaataccgacaagtaaaattgccagggtcatggtctgaaagtatttctgtatatatgtttgttgacacttcagctgggtttttaccatttcttgactttggaaaggtctgaaaccccagagcaaatggcaattctaattgattagaaa

SEQ ID NO: 19915 - DNA, 1050 bp, Homo sapiens
attgccgtaggttattcaagccatttctactaaaaaatatatatacacaaacagttaagggagaaaaggtttttgatcagctttgctactttattgccataggttattcaagtgattgttttcccctgtagccattaaagcagctttgctattgctatacccaaaacctgacccttcaagaagatagaagtaatatcttcagtctgaatagtattagtgaatttagccgtaccatgggttccacacgcacctttaatgcaaaaaaaaagactgaggccaggcgcggtggcttacgcctgtaatcccaacactttacaggcgcatgtctgtaatccagctactcaggaggctgaggcaggagaattgcttgaacccgggaggcggaggttgtagtgagctgagatcacaccactgcactccagcctgggagactccatctcaaaaaaaaaaaggactggctgtggtggctcacacctataataccagcactttgggagaccgaggccagaggatcacttgagcccaggagttggagaccagtctgggcaacatggcgaaactccatgtccacaaagattagctgtgcgtgatggggcgagcctgtagtcctagctacgtgggaggctgaagtgggaggattgcttgagcctggtggttgaggctgcagtgagccgtgatcatggccactatacttgcaccagggcgacagagcaagaagactgtctcaaaaaaaaaaaaaagagaaaaatggccgggcgcagtggctcacacctttaatcctagcactttaggtggccgaggtgagtggattgtctgagctcaggagttcgagatgagcctggtcaacatagcaaaaccccgtctctactaaaaatacaaaaaattagccgggcatggtggcgggcacctgtagtcccagctacttggaaggctgaggcacgagaattgcttgaatcggggaggcagaggttgcagtgagccaagatcatgccactgcactccagcctgggcaacaggagcggaactctgtcccttccccgaaaaagagag

SEQ ID NO: 19916 - DNA, 1050 bp, Homo sapiens
gggactacaggcacgtgccaccacacccagctaatttttgtatttttagtagagatggggtttcaccatgttgaccaggctggtctcaaactcctgacctcaggtgatccacccaccttagcctcccaaagtgctgggattacaggcatgagccaccgcgcctggccgattttggactttacataactggaatcatacagcatacattctagttctgtattttgttctaaatgtttggaattcattctttttggatgtagttgaaattttttcattcttgttgtgtagtactaaatggaatcttcttccatctgaatcttgtttaacaaaggctatgctgtgatgaatgtttgtggaagagacaaaatataaaggtcttatattttatttccctggagtttaagttctaaagacattcaagagtagtcagaggacctttagagttaaaatgattctttggacaaaatcttaactagtgccatattctttcaccaggacgaaaatgatgatgacgatgactggaacccctgcaaagcagcaggggtgtgcctcatgcttctggccacctgctgtgaagatgacattgtcccacatgtcctccccttcattaaagaacacatcaagaacccagattggcggtaccgggatgcagcagtgatggcttttggttgtatcttggaaggaccagagcccagtcagctcaaaccactagttatacaggtgaaactgagggatttttggagtagaaagtaggatatttattgtttaaacttaaagcatatctttatttttcaaaacaaaactgtaaattgtcatctacaaagattatctctagatacttgtttacttttaatgagggtaaaatatatttcttaggtttttaattacataagtcagcatgatccagagacatgtgaaagaagccaaaagagaaaagtcatctttaatttcattgcccagaaataccactcttaactctgtatttatccttgaagctttttcctatgtgcatgtgtgtgcaacaggctcttcctgtgcagattgttttat

SEQ ID NO: 19917 - DNA, 1050 bp, Homo sapiens
tagtagagagaccgggtttcatcatgttggtcaggctggtcttgaactcctgacctcaagcaactcctgacctcaagtgatctgcctgcctcagcctcccagagtgctgggattacaggcatgagccatcatcatgcccggcctctatctgagtaatttattgcagactactaaaagcatttacaccaaattcttaatataaaactctaaactggagttttgaaagatattttcaaatattttgaaagatgtttcacaccatgtcctgtaaaattacagaagtatcttggtgacttttttgagttaagccatccatcagtatttctttctctggggtagtagttaacatgaattttaatctttgttttgctttgctaataactgttatattttcaggctatgcccaccctaatagaattaatgaaagaccccagtgtagttgttcgagatacagctgcatggactgtaggcagaatttgtgagctgcttcctgaagctgccatcaatgatgtctacttggctcccctgctacagtgtctgattgagggtctcagtgctgaacccagagtggcttcaaatgtgtgctgggtaagggattttcttgctggtgagaaaaggagcttgcctgcgccactggcaagaaagtagaaggtgtgggagagaaatcaatctgcctcactggaatgctttttctgattttctttctaatttattcaattaaaatgtgggggagattccaactgcaagagccagtgggaacacttgacttatggttactggttcctgaaccacttagaacagtcatggtaacccagtggggaaactatctggacttgggttgctttcttgaattgcttggggacaagaagttttgattaaggtagagagtttttggctgtaagaagtatcattgctgagtagagggcaagagggaaggaaggtaggcagcctaaatgctgagtcagtataggctaatgtaattggttaaggggaggaagttcaaataaggaaggaatggggctaaacgtctttctgtgaaaggaaacagaa

SEQ ID NO: 19918 - DNA, 1034 bp, Homo sapiens
ctctttgagattatatatgaagacatcttttttaaatgaatgaagaaaattggggtatttttttttttctgggacggagtttcggtcttgttgctcaggctggagtgcggtctcggcccactgcaacctccacctcccaggttcaaggaattctcgtgcctcagcctcctgagtagctaggattacaggcacaagccactacacctggctaatttttatatttttagtagaggtggggtttcaccatgttgaccaggctggtctcaaactgacctcaagtgatccgcctgcctcagcctcctaaattgctgggattataggcatgagccatcacgtctagccaggaaaattggggtattttcttcatagcacttcagacaacctgttaaattgttcacatgattttttaccatttcaaaccattttttcctctataattttagcccatttccaaaagggccattctaaattttaactgtctggagaccataatgaacatagccattggctcaaaggacttgaagatttcattcttggatattgtgttttcaaactcaaaccaggtctgcagacataccggttcctgagttcttatttttggcaagacattgtctatgttcttccctgtccttttcatttgaggctttaagattttcgctgtgttctttacagacctgatggacaccagaacaacctgaggagttctgcatatgaatctctgatggaaattgtgaaaaacagtgccaaggattgttatcctgctgtccagaaaacgactttggtcatcatggaacgactgcaacaggttcttcagatggaggtgagacctaagagtgcccctgactatgggtgggaattgggtagtacttttgacacctaggtctgttttccagactgttctgtctttttagtgtttaagtatatattttctcagaaagataataaagcttatacaaaaaacattgcaccttaacgttagcattgtttgtcatggtttactcatatatgtgttacactatatgtattatgggttt

SEQ ID NO: 19919 - DNA, 1064 bp, Homo sapiens
caaaattaaaaaatatcaagggacttaattgattttaaaaagaaaaggtatagtgttctgattgggagatttggaatcaactgatcttgaactcttactcatttcacagaatgttcttcggaaagtgcaacatcaagatgctttgcagatctctgatgtggttatggcctccctgttaaggatgttccaaagcacagctgggtctgggggagtacaagaggatgccctgatggcagttagcacactggtggaaggtcggtgagaaatactgtctggtcagggaatgtctttggaatgtaggcatttcagtggccttaaataattgtcacccaggctggagtgcagtggcacgatcttggcgcactgcagccttgaaatcgtgggctcacatgatccttccacttcagtgcccccacagtagctgggactaacagatgcacaccaccatgcccagctaatttttatatttttggtagagatggagtttcgccatgttgcccagactggtcttgaactcctgagtcaagtgatcctcctgcctcagcctcccagagtgctaggattatagatgtgagccactgggcccagcttaattttgtttgtgtgtgaagatagggtctcactatattgctcaggctggtctcaaactcctgggcctccttgtcagagcattaaagaatttttgactatagaaagcatagtccttttactggggcatgagtcacttcaaagttagattgaacttaagtgcacaccacttaaatttgtataactgccttgtcagtccatttaaatggggagccagtttgcaacggagattggcagaggtgttgttttttttttgttttttttttttgtttgttttttttttgagacttgttctgttgcccaggatggagtgcagtggcaccatcttggctcaccacagcctccacctcccaggttcaagcaattctcctgcctcagccttctgagtagctgggattataggcatgagccactgtgccctgctaaaagtttctattttctttcctggtacttgtcatcacctggtttggtttgta

SEQ ID NO: 19920 - DNA, 1026 bp, Homo sapiens
gtaagttataccctgcttctaagagctgaatagaacttctcacagaaaatgagaaaacatggagtaaggagttttgagagtatcgcggatggcaacagttcacttttttggcacagagatttctttgcagaacgcttcatgtcctgttttgagtgttcacatgatagtttattccagaccctcaaggtgtctgtattacaccccattaaactctgatgttggtcaacaattgcctctgtctagtgacctctactgagggttttatttatctttgaaatttgctaagaaacccatagcactggtttggaaggctcaaaacattatactggtatggggctaggagctcattctcagctgtgtttgttttgcacagggacttatgtacagcatttgggaaggatgtactgaaattagtagaagctaggccaatgatccatgaattgttaactgaagggcggagatcgaagactaacaaagcaaaaacccttgctacatgggcaacaaaagaactgaggaaactgaagaaccaagcttggtaagatcttgcctccactgtcctctttcttctacttcctggaggaggggggtatgttttctttaggccattctggcaagcactgccttctggcattttttttgtttgtactttttcccatgtaggtgcttctgagtcaggcagcctcagtttttccttgagccaaatgtttgactcctcatagtgatggagagcagaacttttaaaactggaattcactgaaattccctgagtattttgggtcctaataaaatcatcagtaatgccatttccccctaattctcttctgttttctattcctttcctcatgccctattctttctttacagcagtgcttttagacgttgcctagctctagagaagatttccaaagtcaaatgtttttttgtgtgtgtgtgtgtgtgtgtgtgttttctttttgagacagagtctcactgtcgcccaggctggagtgcaatggcacaatctcggttcactgcaactgctgcctc

SEQ ID NO: 19921 - DNA, 1896 bp, Homo sapiens
ttaagtggccctcctgcctcagcctcccaggtggttgggactgcaggcaagcacctccatgactggctaatttttttttatttttagagacaagatctcctgttgcccaggctgggtttgaactcctgacctcaagaagttctccctccttggcctcccaaagtgctgagattaaaggcttgagccactgcacccagactgaaatacagttttaatttctttcactcttaattagttatcttactccacagatctcagtaaaattggctctttgagtttccctcgcaccctctgatgtaggtgttaataagagcaggtcaatggcacataggacaagaagaaagagtgtcaatccttgaaatgttgacaaattccattcaggcctaggagcatgtaattgtaggagtcagcattattggctctgttgggtatatgtgatctcaaagattgacctttttttccatctgttttcagatctgttaccattgggatgataacctgaggacccccactggaaatctcccatcttttgaaaaacctggaagtgaggagtgtgcacggatgctgaatgtttgggaatgagaggatgagtgagtgaggcttgaaaacacaccacattgaaaatcctgccacagcagcagccgcagccgccaacagcagcgctgttagtgagctaagtaagcactgacttcgtagaaaaccataacatcggccatcttggaaaagagaaaaacaatggagttacttatttaaaaaaaaagaaagaaagttatctcttcccaggagaggctagaagtagcttttctgtcttttggccagtgccgagtggaatgcctggtttgggggaggaggagggactgggttcagctgtggtgctttgttgtaaaaggcagcctggcctttgctactgaggagaaagatggagcctgggtctcaagcccaccttcgctgtacctttgccacatggtactgtatgcttgccagctagaaggagggtcagggattttttacagtctgagaatgagtgtgtgtgagtgaggcggtatccacattttcaacttcaagtcattgcagtttctttttcccagaaaacaaggggttagatgttgcatttcataaaactaaccgaagttttgtttactgatgcagcacaagagatgtaaaaaaaaaaaaaaaaaaaaaaaaaaaaacacacacacagaggaaagacgctctttaggttttgttttgttttttttttttggttttgttttttgttttttttactctagggaaaacactgacgaatggtcagagctcctatcctgatcttttcatcaaggcgcctttcctaataatatggttcaactgtgaatgtagaagtgggggggaggggggagaaaaagaaaactctggcgttagaggatatagaaaaatataagtacaattgttacaaataacgcagacttcaaaaacaaaaaaatcacaacccaaacaaaccaaaatttaaatgatcagaattggcagcacaaagaaaacgccctctcctgacttgtattgtggcagtctgaacgcccccagaaaattgtgccaaagagtttagaaaaataaatatacaataaaagtaaacacatacacacaaaacagcaaacttcaggtaactattttggattgcaaacaggataaattaaatgttcaaacaatctgataaaataaccatttggaaactgcttggccttctgttcttttatttgattgactacaatgcggtattggtctcttgctgcacttcaaaagcaaccaacaaaacaaaaacaaaaaaaagtgtgtgttgtgtgaatacacacacacactaactagaagtcttgtgatgaaaatggcacttggaaaaggttttatttttccactgaagttgaa

SEQ ID NO: 19922 - DNA, 1055 bp, Homo sapiens
agcctgggcaacatagtgaaaccccatctctacaaaaaatacaaaaaagaagttagccaggtgtggtggtgcacacctgtggtcccagctactcaggaggctgaggtgggaggatcgctttagcccaggagatcgaagctttggtgagccaagatcaagccactgcactccagcctgggtgacatagccagaccctgtctccaaaaaaaaaaaaaaaaaaaaaaaaaatcaggagacatggtctcagccaaccctaagctatgacctcagttaagtcacttagcctccatccctcctctgaaaagtggggcaaatattaacaccctcaccaggttgtggtgagggtgatggggcattcatgtatagatgctttgccttcataatcatagatatttatgtggcactcggggtgtgccaggcactgttcttttcacctggcatacactagctcattttaattctcaaaacaaccctaagaggtgagtgtgggactgttatccccattttatggatcaggtgggtgaagtccagaagctcttgtcatgtatgcaaatggaagttctgatgctcctgaggggggctggcctccaaacagggggctgagtgttcttttaagtgtccctgtgtgttaatgacagagcaggggcattaacttgacctcgccaggggcaacagcccgcaacagctgcattgcggtggctgagaggagactttgcactcacagccacttggagagtgggcttgggatgtgtgacctggggcctctgctgtagtctggggtgatgactctccagacatggggaagtcctgggcctgtgcagaccctcccctctgtctctctctccagagggccctggtggagacgcacctgcgtcagatctgtggtttggagcagcagctgcggcaacagcaaggcctccaggatgcagccttctccaacctgagcccaccgccagcccccgcccctccctgcactgatttagacctgcactacctggcactgagagggggatctggcttgagtcatggtgagatctcagtgaccccgacttacc

SEQ ID NO: 19923 - DNA, 1035 bp, Homo sapiens
aggggatgggcacacggttggggacaggggtagagtgtgtgtgcacaggggccttcgtcctcaccgatctgcagtctcattgcccctgcaaacccaccattggccaagctgtgtgcagcgctcagccagggctgctcttgcagatggctccgtgtctggggagcgttgttttgcagccacccggaggtggcctgtcctatttgcgcttgcattctctctcccctcggatgggcatcgctggagagtggaaaacatctgctacatactcagtgtctctgccacttcctgggcccagtgctaccagcttaggtgcccaatccacccaccagctaccttcctccatggaccaggtgtgcgtgtcaggcaaagggtgaggcacggggtagagaaaaggcataaaatcccccctttccctggctctccctctaagttacatttgaaatcccagctcaccaactcttaaagctgtcccccatttccaatcctgcttctactcgctccagcttctgatggcctcttgggtttgtattctcctccatctgaaatagccccccttcccttaaaatgtccttgggtggacagtcctccaaagcctccccacagcccacagcagaacccgcttggcctggctctcctaggatggggcctctgcagcctcctctcatgcacacccacccctgccaactctccctgaacactaggctcttctctgcctgcctttgtaggcatgaggctgccttagaagggtgagattaggagtgctggctgtgctcttgggtaacaatgtcccccccatcacctgtgcgacccaagagaaacttcttttcatccctcagaacctgaattaatgatcacacctcccaccccgccaggagttttcttgtttccccttctgtgttcccatagaacctgctcatatacttctatttaacatgatatatataccatgattggtttccacttacagacttttagctcttagagcccagaattatgtatcactgatccagaccagacatacagtaggtacttatg

SEQ ID NO: 19924 - DNA, 1020 bp, Homo sapiens
cctgggagccctggtatccatggggaagcccactctcagagttctgagataccaggcttataggaggcacagtctgtgagtgggaagagactggagtgtagatgttgcccatttgtaggtggtaaaatcaattgtttttgatggaattgattttccctgagtggagtgctgggggaaggaggaggtccaggccggtagtggccattcgccgtgcctcagcgagcaggtgtgtgtgggtcctccaccactcacctcttggttagcgggagtgtgctgcccccacccccacccccgcacccccattctacacaaggcagaagaggcacgggtttttctgggagcgaatatcaagtgcctgagagcaactacaggactaactgtgtttgggttgggtgtagtataaataataataatggctaatatttcctgagcatctactaaatgcaaggaattgtgcttggtgtgtcatgtggattctctcttgcatcttcatgataaatgttattgtcgctgttttaccgatgagggttggattagaggggttaaacaacttgtcttaggctccacagctgggaacaagtggggctgggaagctgacttcgtgctcttcaccaccacaaaggatgtgtgtgcatcctggggcatgcctgcctcatgtgggggtgtcctgggctgaatttcctgggcacttctcagtggaactctctagcctcctggttcggaatgtcaactatgagatcccctcactgaagaagcagattgccaagtgccagcagctgcagcaagaatacagccgcaaggaggaggagtgccaggcaggggctgccgagatgcgggagcagttctaccactcctgcaagcagtatggcatcacggtgagcggcggcagcctcttcgcagccagaggacacctgggcccctgcttgtcttcctctgaccccgtctgacccctcagcctggttgcaccccctttgggccagtgtcttacttttcttcggtctttggatgttttcttcaatc

SEQ ID NO: 19925 - DNA, 1054 bp, Homo sapiens
gtgaaaccccatctctactaaaaatacaaaaattagcagggcgtggtggcaggcgcctgtaatcccagatacttgggaggctgaggcaggagaatcgcttgaatgcagaaggtggaggttgcagtgagcacagatcacgccactgcactctagcctgggcgacagagtgagactctgtctcaaaaaaaaaaaaagtgaaagtgtcctttgaatgtgttttctaccttctactgtgaaggttttcctaccctgatcatgatgtgaaaagtatggaatcttatcctgttgcttttgtgattcccatttcaggtttctctggaaacccccctggtaagtgtggaggaggcgggacactctgacccaagacgaaaggcctgtagctccagccaaagaaaataaaccttaggagggagaaggaaaaaaaaaatccatcagctgttcctgagaacagcctgcattggaatctacagagaggacaactaatgtgagtgaggaagtgactgtatgtggactgtggagaaagtaagtcacgtgggcccttgaggacctggactgggttaggaacagttgtactttcagaggtgaggtgtcgagaagggaaagtgaatgtggtctggagtgtgtccttggccttggctccacagggtgtgctttcctctggggccgtcagggagctcatcccttgtgttctgccagggtggggtacggggtttgacactgaggagggtaacctgctggctggagcggcagagcagtggccttgatttgtcttttggaagattttaaaaaccaaaaagcataaacattctggtccttcagcaatgctttctctgaagaaatacttaacggaaggacttctccagttcaccattctgctgagtttgattggggtacgggtggacgtggatacttacctgacctcacagcttcccccactccgggagatcatcctggggcccagttctgcctatactcagacccagttccacaacctgaggaataccttggatggctatggtatccaccccaagagcatagacctggacaattactt

SEQ ID NO: 19926 - DNA, 1080 bp, Homo sapiens
tggagacccactgagcaccaactacagccttgcccccaacactcccatcaatcagaatgtcagcctgcatcaggcgtccctggggggctgcagccaggacttcttactcttcagccccgaggtggaaagcctgcctgtggccagtagctccacgctgctcccgttggcccccagcaattctaccagcctcaactccaccttcggctccaccaacctgacagggctcttctttccaccccagctcaatggcacagccaatgacacagcaggcccagagctgcctgaccctttggggggtctgttagatgaagctatgttggatgagatcagccttatggacctggccattgaagaaggctttaaccctgtgcaggcctcccagctggaggaggaatttgactctgactcaggcctttccttagactcgagccatagcccttcttccctaagcagctctgaaggcagttcttcctcttcttcctcctcctcttcctcttcttcctctgcttcttcctctgcctcttcctccttttctgaggaaggtgcggttggctacagctctgactctgagaccctggatctggaagaggccgagggtgctgtgggctaccagcctgagtattccaagttctgccgcatgagctaccaggatccagctcagctctcatgcctgccctacctggagcacgtgggccacaaccacacatacaacatggcacccagtgccctggactcagccgacctgccaccacccagtgccctcaagaaaggcagcaaggagaagcaggctgacttcctggacaagcagatgagccgggatgagcaccgagcccgagccatgaagatccctttcaccaatgacaaaatcatcaacctgcctgtggaggagttcaatgaactgctgtccaaataccagttgagtgaagcccagctgagcctcatccgagacatccggcgccggggcaagaacaagatggcggcgcagaactgccgcaagcgcaagctggacaccatcctgaatctggagcgtgatgtggaggacctgcagcgtgacaaagcccggctgctgcgggagaaagt

SEQ ID NO: 19927 - DNA, 1045 bp, Homo sapiens
tctccctccgtgctccagccacccctgagctgaggctcccattgtctccatcagagcctgcatgtgtatgccgtcctcccctggtccggtgtttgtgttccccacccctcacagactgcctgagctcttctgtaagctggggtagggtgatggcagtgctccgggaactgggcctgcagccttcctcttctgggactgctgtgaggcagaggaatgatggagaatctagtgtagcagcctccaggcaggattcagcacaacactggggagtcacccttccctcgggcctctgcctaccaacaactgggcttatcactgggaaaacacaaaaaattacacaacccagcaacaacaaaagaactagtcctcttagaatttcttgcgctttgatttttttagggcttgtgccctgtttcacttatagggtctagaatgcttgtgttgagtaaaaaggagatgcccaatattcaaagctgctaaatgttctctttgccataaagactccgtgtaactgtgtgaacacttgggatttttctcctctgtcccgaggtcgtcgtctgctttcttttttgggtttctttctagaagattgagaagtgcatatgacaggctgagagcacctccccaaacacacaagctctcagccacaggcagcttctccacagccccagcttcgcacaggctcctggagggctgcctgggggaggcagacatgggagtgccaaggtggccagatggttccaggactacaatgtctttatttttaactgtttgccactgctgccctcacccctgcccggctctggagtaccgtctgccccagacaagtgggagtgaaatgggggtggggggaagcactgattcccagttagggggtgcctaactgagcagtagggatagaaggtgtgaacctgggagtgcttttataaattattttccttgtagattttatttttaatttatctctgtgacctgccagggagaggggagagagagagagatgctgttgagcacatgacaaaataaaataaaatggatgattcat

SEQ ID NO: 19928 - DNA, 1035 bp, Homo sapiens
agcaacaactttagaagctcacgctaaatatagtttagggcacaccatggtgaacaggtggacagcaagaagcctgtttccatattggtgtaccatatgtatacaaacacaggtactagattggtgtctgcttctgagtcattttcccagccaagtatagaaattttgtagcaaaacccatgtgcttcatgatcatgagtagttaagccttgtttttctatcaaagatccccgttaagtgaaagggacccacaaaccttcaacttgtcattttgtcaatataccaaaaataacctttctttttacctttactgtattacacagaagtcaatcatcttccttgcctcccgctctgaactttggagtggagaatgagccatttggggactatggggaaacttaccactatgtgtgaaactttacaagttctagtccttgttctgttcagttcgtgtctgcctgaattagccgagaaacagaatttagtacacgtattgtctctggagtagtgtgagaatctggtaccttgcagaagagggctgttttcaaaaattagctggatagaagtctttgtcttcccttttgaatacaccataccaacaaaggtcttaaagctgtttttttttttttttgagacggagtcttgccctgtcacccaggctggagtgtagtggcgcaatcttggctcactgcaagctccgccttctgggttcacgccattctcctgcctcagcctgccaagtagctgggactacaggcgcccgccactgcgcccagctaatttttttgtatttttagtagagatggggtttcaccatgttagccaggatggtcttgatctcctgacctcatgatccgcccgccttggcctcccaaagtgatgggattacaggcgtgagccatcgcgcccagcctgctgttttggttttttttttggagacaggatctagctttgtcacccacgctggagtgcagtggcgcgatcttggctcactgtaatactgcctctaggctcaagctattctcccacctcagc

SEQ ID NO: 19929 - DNA, 1056 bp, Homo sapiens
tcccaaagtgctggaattacaggcgtgacccaccacgcctgtccttattatgctgtcaaaaaccaaatataaatacttgcttcttgttgttgagatagagtcttgctctgtctctcagagtggagtgtagttcactgcagcctcaacctcctcccaggctcagtgatcctcccacctcagccttttcagtagctgggactacaggtatgcagaacaatgcctaactgatttctttctttttttttttttctttgagacggagtctcattgcccaggctgaagtacagtggtgcaatctcggctcactgcaacccccacctcccaggttcaagcgattctcctgcctcagcctccagagtagctgggattataggcgaatgccaccacaccctgctaatttttgtatttttagaagaaaccaggtttcaccatgttggtcaggctggtcttgaattcctgaccttgtgatctgcccgcctcagcctcccaaattaaatgctttttacatgatcctattttgaaatatttatgtatgacttgactgagatggctgacctcatatgtcatttctgagactaaacattacttccttacttggtatgatgtttagtttgttttgatacaaatacctcaaatctggaaaggatattgaggatattgacatcctgtatccaaaaagtttattcctgaataagtgcgtctgactactttataatgatttccaaggactgaaagtttatgagctctcttagtgacctcttccagtgtctgatcaccccgtcagttcaagtacagaatggtatttttaaattttaattagcttactctctatgtcccctttgccctcccatccgtgtctttccctcttatacatctcacatacaccataatgacaaatcttcttatttccagagacaagaaataaaggtcaaatttaattaatttacactgccaactcccaacgtcagtgacctttggtttgacacctcagtatgtcatgtgcctatttgccagtgctattcatcctgaaatcagacaccattctcaactgcactg

SEQ ID NO: 19930 - DNA, 1321 bp, Homo sapiens
atagggcaagcttgactgaagtgtttgtggttaaaggactttgctcaggatcctgtccttactggttgcgtttaagtatcccttccaccccaaagactatacctctcttgtcctcctctcagagagaaagcttaatacataatgtcacatttctctggcatagatacctaggtttctctgtcactgaatgctctacccacagaagtgcagttgcacttaaactgatgttagaaagaaatcatatttcctaaacctaatgctgtttaagtgaaacacatagttttcttacagtaaatttcttacagtaaaaattcagattttgtattgttggtgtatctttttttgttgttttgaatagatttcccttcatattttttttttatgtagttagaaatgtttttcctaggacatctcgtcctcagtcaagtaccagtgttaatagcctagtacctggggtcccagagttgatgccatgttgagaccagttgagtttactattccaaatgactgagagccagaatatgacgtagggtcttgccaggagggcaaggtgggaactatagacttaggcattggattgccacgtccctttccttttgctgttcaaatgcttagcagacctaaatgcctaggagcctttgtggaagaagaaatataactgagtcagttcaggttttcctcccttcagggggggaaatcctgttgaagaattatggcttgagggggaagagaatttagtgtcgttttcaggacggctgattttttttttttttttttttttaaacagtattggggaaagttctgggactggtctaatggctctgagtggaccctgagtcttccccattttcagtcatgatgtgctgcctgagccacatcctccacaataggtttgatcctctgcagaggaagcaagcagataccctaggcatccatcacaccccctaaccctgctgtgttactggcactgggctgtggcctccaatccctttcttcgtctcctttcatcatactttcccttcgtgccacataaatgtagggtggggttgcatcatatgcatgtttggcctgggcaaatccaaacatatattcagtcaaaatctgtgtcgatttctcaaaattaaaaacgctagggttatattttatagataagcatattatatttttccacagtggtgttttatccattatatgtaacactgatcagggaggtctgcacaaaaaaaaaaaatgctttaagagagttttaggggatactcaagagtgattttgactagattcagttttcgccttgggctctaactttagaagtaacccctga

SEQ ID NO: 19931 - DNA, 1057 bp, Homo sapiens
aatgacaaatgtctgagattggaaatcacattagatatgaaatgagtttctagtgcatcttctttctggatgcttctgaggttttgcttcatagagttcccattttagttgcctttgggggctgaaaactcagtgtggacatcttctcgcatattttggattggtgtttttatagtggtctgaacttctctgggacagagaacacgtgcaggttgaagttgagaaagtacccccaaactgattattctgttttcctgctatccaacatgtttccaggtttgtgtgagggaagagcagcatttgaaataaacttagagacatgattcatttttctaggacttgctcagacccagggatatgttctgctgtgattttggcagtgaagaagtcttttaaaggaggttgtccttaaagaagtacttcatctcgttagggtacttaattaattgtctttgctggtaggctaaaacccatgatgataaagaaatttagtcgttgcttctgtatgaaatttgttcgcgaaagcgtgtctcaaagtaggctctccctcattgggtcaatataaaactcttttgagataccagccacaggacagtggggtaaaagtagtagaagtgtgttaggtagaaaaggagaagctgccctgaaattgaaaatttgccataaagaatcacagagtagaaaatttcagccgggtgcggtggctcacacctgtaatcccagcactttgggaggccgaggcgggtggatcacctgaggtcaggagttcgagaccagcctagcctggcgaaaccccgtctctactaaaaatacaaaaattagccaggcatggtggcgcatgcctctagtcccagctactcgggaggctgaggcacaagaattgcttgaacctgggaggcagaggttgcagtgagccaagatcacgccactgcactccagcctgggtgacagagggagactttgtctcaaaaaagaaagaaaagaaaattcttaggtgttcctagttgactgtattagctttatcagccatgttttttttttcctctttacctagaaa

SEQ ID NO: 19932 - DNA, 1070 bp, Homo sapiens
taccacctgacacacaccatcgcaagggcaaggaggcaatgccagcaggaagctacgtagtccccaggtagtgacttcattctactaggagaacttggatggcccttcagattttgatcagaggagactatgtacttattactggatagaaggggggtcatcctactattaaaatttattgcagagcctgctttgtaagacctgcttactaccttgcagcacagtaggtttgcaataatacaacaggctggaacaaacttttgctctaaccatagttgactgacaaaatatatgttgattacaggtaagtcacagaaaagtaggtttggacctcatacttttaatacagttggaaaaaacctgattgcaacacactgaaatgtaactgtgtgcagaacaaacaccatcagaaatgcagtccttttgcattttgggaaatccaggttcccaggagcatggctggtcgtaagcaaactgcttttgactgaaatagagagcaaacagctcgatgattaagagaagttttgagtggattgtgcagatattttcaagaccccttaggacaagtctggttattagacaagtggcattttggtggctggaaggcatgtaagggatggtgtctgatatgggatggctggaaattttgcttatagtttagaggagggttgtggagaaaaatcccataatagaggaggcaggagaagaggggaagctctacattttctctttccctttctaccatgtctggttagtggattctagtcaatcctctctacatttccttatgaaaagaaggttaaggagaacttcaaattttttttttttcattttgagttaattttggttaaaaactcaatcactcattcaggacaggcacggtggctcacatctgcaatcctagcacttctggaggccgaatagggcagattacatgaggccaggagttcaagaccagcttggccgacatggtgaaaccctgcctgtactaaaaatacaaaaattagccaggtgtggtggtgcatgcctgtagtcccagctactcgggaggctgaggccagagaattgct

SEQ ID NO: 19933 - DNA, 1041 bp, Homo sapiens
aaggacgtctaactgctcactataatgatccagccttttatgaagaatgcaaaatggaatacctgaaggaaggaagaattcagaaaaactggaatttctacaaagagaaggctacagaaacttcccataagcctgtaggcaaatattcaaatgatattcaggaactctaatattcatggaagtcatttatagtataaatttccttaaataatggactcaagaatgtgtgtttgctttatcctaattatggaaatattaatttttatctgaaataaagatcttttatttcaaaaacgaaaataaaccccacacttcattagggcaggattaacatttgaattctacatgtatacatttcaatctcctttgaccttggtttcatcatctctaaagttaggagtatgtagtagttagcagttggtttcctcaccctgtagtagggattcctcaatccgggaagtgtatgtgttagctttgtggagcctcttcaggtctgtggtaggctttccagttggcatgggagtactttgagatctatggcttgctcttcctttttaggctagcagaaccctatactttctattggactggaagcccatttctctgatggttccagtggaaagcctttgtgaacaataaatcccaactaagtgttagggaacactgtatttatttacttttcctttgaagtctttgatgccatttagactggaaagttgtgaaaaatggaggtggaggtagtgggcaggtgactatctccttttctttagtgtgttccaagctgtaacttactagagtgctttggccaagagagcatctggtatgattggcatggattggaatgacctgtagactctcactctgtccccagagccatcatgaagctgaatggccaccagttggagaaccatgccctgaaggtctcctacatccccgatgagcagatagcacagggacctgagaatgggcgccgagggggctttggctctcggggtcagccccgccagggctcacctgtggcagcgggggccccagccaagc

SEQ ID NO: 19934 - DNA, 1482 bp, Homo sapiens
ttttgcgtttggtaatgtttatcaactttgtcaagttttaaattctgatgaatggattgatactactgtttctccttccttcaagtcccccaaccccatctcccacttaacacccaccacgtttgctgtattttccaggggatactcaggctccactggaggcaaagaaatgtaaggtcaccccaaccctcattcttcctctttatctttcttctgagtcctgtgtgacctgttctgtttattgcctgtgtctggacctgatgacctctcttccgtggaaggctgtctccttggaggtctcacacccactctcttgcctgttcttgctgcagatggctcaacggaagatccgagacatcctggcccaggttaagcagcagcatcagaagggacagagtaaccaggcccaggcacggaggaagtgaccagcccctccctgtcccttcgagtccaggacaacaacgggcagaaatcgagagtgtgctctccccggcaggcctgagaatgagtgggaatccgggacacctgggccgggctgtagatcaggtttgcccacttgattgagaaagatgttccagtgaggaaccctgatctctcagccccaaacacccacccaattggcccaacactgtctgcccctcggggtgtcagaaattctagcgcaaggcacttttaaacgtggattgtttaaagaagctctccaggccccaccaagagggtggatcacacctcagtgggaagaaaaataaaatttccttcaggttttaaaaacatgcagagaggtgttttaatcagccttaaaggatggttcatttcttgaccttaatgtttttccaatcttcttccccctacttgggtaattgattaaaatacctccatttacggcctctttctatatttacactaatttttttatctttattgctaccagaaaaaaatgcgaacgaatgcattgctttgcttacagtattgactcaagggaaaagaactgtcagtatctgtagattaattccaatcactccctaaccaataggtacaatacggaatgaagaagaggggaaaatggggagaaagatggttaaaatacataataatccacgtttaaaaggagcgcacttgtggctgatctatgccagatcaccatcttcaaattggcacaactgaaatttccccactctgttggggcttccccaccacattcatgtccctctcccgtgtaggtttcacattatgtccaggtgcacataggtggtattgaatgctcagcagggtaggggctgaccactgtccctgattcccatcgttctcaggcggattttatatttttttaaagtctattttaatgattggatatgagcactgggaaggggacgctaactccccttgataaagtctcggttccatggaggacttgagtggccccaaaggctgccacggtgccctcaccccagcccatgtgctcccataagggctggttcctag

SEQ ID NO: 19935 - DNA, 1089 bp, Homo sapiens
tgggaagggaggaaggcctctctacatatggaaaagcccatgcgtggagttcccctcctttcaacattgcaacaacagtaacaacaagacaaccgcaacatgtgggcgtagtcaggcaatgctgtgtgcgaagtaaactacctcaaggtatgaagttacctcagcaattattttcctttttgttccccccaaccccattaaaaaaatttttttttgatttttgtttttttgcagcttgctgatattttatataaaaaagaaaagcaaagcaaaagagaagctgatagtcttgaatattttatttttttaatgaaaagaaaaaacaagaaagttatgtttcataatttcttacaacatgagccagtaaccctttaggaactctctatggagaacaggcctggtgggaaaggctttgggggctgcccccttaggaggaggctagtgctaagagggaaggcccaggtttgagagagcccagaggggcagagcccagagccttgtttggccctgatctctgacttctagagccccagctgctggcggctgctggaatatcctacctgataggattaaaaggcctagtggagctgggggctctcagtggttaaacaatgcccaacaaccaaccagctggcccttggtctcctctctttcctcctttggttaaagagcatctcagccagcttttcccaccagtggtgctgttgagatattttaaaatattgcctccgttttatcgaggagagaaataataactaaaaaatataccctttaaaaaaacctatatttctctgtctaaaaatatgggagctgagattccgttcgtggaaaaaagacaaggccaccctctcgccctcagagaggtccacctggtttgtcattgcaatgcttttcattttttttttttgttattgtttcatttcagttccgtcttgctattcttcctaatctatatccatagatctaaggggcaaacagatactagttaactgcccccacctctgtctccctgtcttctttagatcggtctgattgattttaaaagtggacccaaacttagggaattcttgatttagggtggctggtggc

SEQ ID NO: 19936 - DNA, 1076 bp, Homo sapiens
gtaggaagtataattgaccatgccctagacacctgaaaactaaatattcaaaacagctaggaaatgcgtaagcactgagtctctttctggttatcatacctcatgaccacagagttgcacaactccaggggtaccatttacaatgtcagcaatgtaaggtggtcctccctagagcacaaggtagatcatattgtgaaaggaggccccttggagatgtacaaatggataaccttgctctgtgctaacttttctcacccgaaagtttggaaattttcagttttcttctttagagaatctataagatttcttcagattttttttttttttaaatatacgttggggggtgcagccgtgagagagtgaggctgacaccgcgccctggcctgtgcatcccgccctctgaaaaaaaaattaattaattaaaataaaatatactttagagaggattttgactgttctcaccacaaagaaatgacaagtgtttgagatatggatatgctaattattttgatttcatcattacacaatgtatacgtctatcagaacatcacagtatactctataaatatgtacacttacatgtcaattaaaacaaaactaagactgctaggggcttacacggagggaattgagccagcatcaccacgatggtgttgttggagagtgagcagttcctgacggagctgaccagacttttccagaagtgctggacatcgggcagcatctatatcaccttgaagaagtatggtggtggaaccaaacccgttccaaagaaaggttctgtggagggctttgagccctcagacaagtgtctgttaagagctatcgatgggaaaaagaaggtcagcactgtggtgagctccaaccaagtgaataagtttcagatggcttattcaaacctaccgagtgctaacatggatgggctgaagaaaagggacaaaaagaacaaaagtaagaagaccaaagcagcagcacagtaaagggcacaaatttcctgctttcaccaattaaccactgaattgttattttttcctttggtttttacttttggccacatagctaggtttctggttccc

SEQ ID NO: 19937 - DNA, 1092 bp, Homo sapiens
ggtccataataatagatctggttgtaaggaaattaactatgatgagccattcagtttatcctagagcttttcccagtgaaaaattccctcattttcctagcaaaagcaaaaaagactatctgcagatatcttactgcatggcacatagctcgtactcagtgaggactagttaaggataaggtagtgcagaatagtggttgcacggccatagctgttaaggaaatgagaaaaacatttcctgtcaagaggctgtgaaattaggagtacacatgagaccctggccttctgtaactttagtagcttaggttccttgctttgtgtacttagtaagtatgaacaagataaaatatttcttctgtgataaataagtatcttattatattcttatgagttttaccccttagtgaattactttagagattcttgtggtttgaaccttatttgtgcaccttcagtgagctgaggtgcaaatattgggcttaaggttttgtctagagttggaagatgctgattgggaggtaaggggcctttcactactgggtctacttctcaaattcaccctttgcatgtggctatcaagtttgaaaaaccgtagaacagagtaaattgctgcttggcaggccaacagtacacttcctgtagtgtgttttgtttgtttgtttgtttttgagatggagtcttgctctattgcccaggctggagtgcagtggtgtgatctcggctcactgcaacctccgcctcccaggttcaagcgattctcctgcttcaacctcctgagtagttgggattacagatgcccacaaccacacctaacttttgtatttttagtagagatggggtttcgccatgttggtcaggctggtctcgaactcctgacctcatgatctgcacgccttggcctcccagagtgctgggattacaggcatgagccttttgtttgtttttatagagagacaggggtctcactttattgcccaggcagaggtgcagtggcatgatcatagctcactgcagccttaactcctaggcttaagtgatcctcccatctcagcctcccaagtagctgggactacaggcacgtggctttcaagc

SEQ ID NO: 19938 - DNA, 1033 bp, Homo sapiens
atgctttttcccacttaaccatgtatcttggagatctttccacatctttctatgggtctgcctcattctctttaatggccacaagggttaaggatacgtgtaatagattttgaccattccctgattgatggtgtttatgttatttccgaattcttgctattacaagcatgttggcagtgaataccctcagggctcatgtagtaacagcatgtctgcctgaaaagcgagactctgggtcagaaaggtaagcacatttccaacttgcctggatattgcgaacgtgtcctccaaatagacagtgtaaaagtgccagttttttcacaccaagccaacacggagcattaccacttaaaaaatgtaatattgacaataagagaaaactgctctgtgtgcagagtattttctcctggtcccccaaggacaggactcctgagttgaaagtgccttcagggaacacaggtttaagttagtaattttgtttcagccaaagaaaattgactagaaagcttggcttgtggctttgcccacatccagactggtctctagcttcactgccactccccagagtcatccagagcatggaaggcaccactcagggtgcagagcctgtgcccccacccttcaggtgcccgtgctccccattgttgggaacagccttgtttacacttgttgcctggcgtaattactaacactccccaaagtgtcctggttgcatgctaatttctttttttgagatggagtctcgctttgtcgcccaggctggagtgtagtggcatgatcttggctcactgcaacctctgcctcccaggttcaagcaattctactgcctcagcctcctgagtagctgggattacaggcacgtgccaccatgtctgtctaatttttgtatttttaatagagatggggtttcaccatgttggtcaggctggtctcaaactcctgaccttaagtgatgtacccacctcggcctgccaaagtgctgggattacagacatgagccactgccccccagcctggatgataattcctatgg

SEQ ID NO: 19939 - DNA, 1021 bp, Homo sapiens
ggcctggcagaatctgggagtaggacccttctatccattgttctgagaaggtagccaaaggctggtaggaaagtcgctcatctctccctgactacctcagccttccagccaaaggagccggccatcgctgtcatctccactctttggctttggggtaggttaggccacagttcccgttgcctggagcaactctgagctcctgagaaagtgctcactggaaggcctcaatgaagcggagaacctggcccgtctttgggatcctgggccttgcagctgagctgacatacaatgtgggtatggcattgcccacaatcccatctgcactggctccagcttagcctccaggtctctggactctctgcctccatctaattgctcaccccctcctcctgcaattgtctttggcagtctcttccaaggaggcacacccattaggtgacttcactggagtcagctcaggaccaagacatcttcctcccttctcctgtggctctgacatgctcacaaaccatcagagccagaagtgaccctaggatttagaagctcaacttctttgatgtatagatgggtaaagcatgtggccaggagcatcgattttagggagcttcctccaacccccccaaaattaactgccttctgtgacagaactgtggctgtctcctgggctgcggagtgtggctggagtgggcgcagttgcagggaggagtagttctagtttttcaaatgaatccctttgactgtcctttagtgtatgctaataggatatgtttgtgtgtgttatgtgtttggggactggggtgggaatatcatgaccttgtcctcaggggaattgctggcagtagggttggtgttgtcagtcttgtctgagatctaaggacaacagagtggagagttcattttctttaaggactttcccccatccagcgaaaaaccacacacacccagatttccttagaatacatttctagcatttctctgctggaactggtgggtttgggcgctctagagtggagggcatgtg

SEQ ID NO: 19940 - DNA, 1090 bp, Homo sapiens
agactttatgagaaagggatcaggtgtggcttttctatttcaaacacttaccatagtgcctggcacatagtaggtggtcaaaaaagatttgctacatgacacgggagacgcagacatgtagccagattattgcagcatggtaaatgtcacctgtaaagggggtctctataaaaggcttctagagtacagcctgaagggaggtcactctgatgaaatcactgaaacttctctggaggagatgtttgaatgaagaggaagagttcaccaggtgagggggtgtgggggaaacgacacaggccatggaagagcctggcatgttttgggggagttgtgagtcattccttgtgattggagaggctggaaacaaggttgcaaggtagagtccaaaacctttggtgcctactaaggagtgtgggttttgtcctagtaatgatagggagccattgaaggtttttaagtagggagaaacctagtcgtctcaggttgacctccgatatttccgtaggacttccgggttgtgggctttgttctgatggaatatgctgacagaaacacatcacttctaagatattcttaccccaaagcgcatatcttgaatctaattgtcaggaaaccctgaattaagagatttttacaaaattattgtggtaagaacagacagcatgagatctaccgtcttaacaagtttttaaatgtacatacagcactgttaactataagcacagtgttatacagccaatctgtagaaattattcattttaaataattcatttaaataattataattcgtaaataataataatttatttaaattcattaaattattcattttaaacaactggcctgtattcttcaaaaatgccagtgtcatgagagacaaagaaaggctgagaatctaaaggagacagaagagacagctgaatacaatgtgtggcccctgactggggaggaaggaggaaattactacagtagatgttattgggaccattagccaaatttgaatatgacaatgtattatgtaatggtgttgtgtcagtgttgcatttcctgaactctgtaattggattgcagttatgtaagagaatgtcct

SEQ ID NO: 19941 - DNA, 1090 bp, Homo sapiens
tcctggccgagatggtgggacattctaacctggggccccttacctgagtctaaaaatgaggcctgccctcttcactctgcactatttcctccctccccgcagggggcgctcagtacccacaattggacttactggcagtgtggtcagtaccttggcgttgggcctggtgagtcccgtgaactacagaaagggtgactcaggagaggaatgtcgtggctgtgtgaacttgggccacattaacctctccaagcctctattttctcatatgtaaaatgtggcaaaaaataatacctccctatagaactgttgagcatgaattataaggggcttaatgttgcaccttgcactagggttctcagcctttagtgtgtatgagaatctcctggagggcttgttaaaacccaagctgctgggccccaccctcagaattcccaattggacagggctagaggagagcccaagaatttatatgtcttggcattttgggatagatgattaaaaaaaaaagaaaaagaaaaaagggcctggtgtcatgtgcctctaatctgagctacttgggaagctgaggtggaaagatcgtttgaccccaggcgtccaagaccagcctgggcagtatagtgagacaccacctcaaaaaaaaaaaaaaaaaaaagaaagaaagaaagaaagaaaagaaaagaaaaataatttatatttccagtatgttagaggcagttgctccagggaccacatgatttaaatctggtaaacacatagtattaacagccattaatgtggggatggttgttgatgttgtcaggggcccatggacgatttatgccccagggggctggaggccacacccgggaggctcggatccagacactggagcctgacaactggatgaaggaggtgatgctgtttggccatggcacccggaagcgtgtccccctgggcaggctggagctgtgagcatccaagggcacagggctctcctccaggatccccacaccccaagaccatgtctatttgtatatcttttatttcctgtcttgtcctggcccctgccttgccacatactgtatggtccctgttagcctcctctaaatgc

SEQ ID NO: 19942 - DNA, 1073 bp, Homo sapiens
agcgggccgaggagattggcgacggtgtcgcccgtgttttcgttggcgggtgcctgggctggtgggaacagccgcccgaaggaagcaccatgatttcggccgcgcagttgttggatgagttaatgggccgggaccgaaacctagccccggacgagaagcgcagcaacgtgcggtgggaccacgagagcgtaagtcccgcgggccttggcctgagcccgggctccgtgggggaggggagcgggcgcgggctgtggccctcctggccgcggcgcgatgtggccagggccgcacccggggtcgagcgtctgacccggtgcccatggagccaggagggaggatgctgtccggacccggggatgggggtgatttggttttgttgttctagtatcaagggggtccgggagagcccttggcataattgaaaagcaccttgatgaggcggggaaacgcgggaaagaaggatagcagcgtcttattaaatctagcggctccgaggtttcacctcattatgaaatagggagaagggcacatttttctatagtttgggttgaacgtcgtatttagactaaaatttctgaccaggattcatggtaaaaatcgtggcggtattttatttaagtaattacagcatgacgcttatacggggaaatagaaatgtaaaagaagtcgtttacttgttagggtttaccgtgatgatttacaagtattgttcgttaacagtattctaagaagtcccttatagaggcagctgtcaaggttttttcttccacataaaactcatttgatgctcttagcccggggagtaaaggtaaatattataaccccagtttcactggtgagacttaaaaaggctcacccaaagtcttggcaactgaggaaactaatctttgtagttctgttagctttccacaatcctatgaaactggttctctgcacctactgtagcatttcaagtgttttgatctagttttgaacatgcagtgtaatgtttactttaggtcttatctggagaatagatacagaatttaattttactttgaggttataatctaacatgctaattttaaaacaat

SEQ ID NO: 19943 - DNA, 1029 bp, Homo sapiens
gtttttttggagacagagtcttgatctgttgtctaggccggagtgcagtggcgcgatctcagctcactgcaaacctccgcttcccaggttcaagcgatgctcgtgcctcagtctcccgagtagctggaactacaggcgtgtgcctccatgcttggctaatttttgtatttttagtagagacggcgtttcgccattttggccaggcaggtctcaaactcctggcttcaagtgatctgcctgcctcggcctcccaaagtgctaggattgcaggtgtgagccactgcagctggcttgtgttccttttttttaaccaataaaatttccaggtattcctggattttaaattaatatttgtatgtgtatggcatttgaggtattccagtaatatgtcctgtttcagaatacagtaagtctgcatttaacgtcgttaatgggttcttggaaactatgacttcagttgaaatgacatataacaaaagttttaccatagactagttaatataaagaagagttaggtttctgtggcacattctggttacagaaacataactaaaaagacccaaaacatttctgatatcaaacattgagataaatttgaggtatacatacatttaagaaagatgaataaaagcgaggtaattacccagtttttggtgaatcagtgagtgatggcaattttagtggtggtgagttaagtcaaggaataaatgtttacaacttgaacattgtcagaagcacctcctacctccattcagttccaacacaataataaagatggtaaactcaccacttttggactatgctgtttattttcatgcatttgtatgattatcatatgctttacagacttttattttacaataatttcattgtaatatacaatatattcattcctttccagcctccttattccagttcagggtggtgggtggccagagctgatcccggctgcccaggatgcaaggcaggaactaaccctggacaagatcccctcccatcacagggcatactcacacacccacactcacc

SEQ ID NO: 19944 - DNA, 1103 bp, Homo sapiens
ttcaagacagggtgtgatagtgttgcccaggctggagtgcagtaaatagcacaatcatggctcattgcagcctcgacctcccaggctcaagcaatccttctgcctcagcctcctgggtagctgggactgtgccaccatgcctggctactttctgtattttttatagacatggggttttgccatgttgcccaagccggtctcaaattcctgggctaaagttatcctcctgccttggcctcctaatgtgttgggattacaggtgtgagccaccatgcctgaccaacgctgccttttcttttcatgtgttatagttgtgcattaataatctccccagagctgggcacagtggttcacacctgtaatcccagcacgttgggaggccaagacgggcaaatcacttgaggtcaggagttcgagaccagcctgaccaacatggtgaaaccctgtctgtactaaaaatacaaaaactagctgggcatggtggcacatacctgtaattccagctactttggagactgaggcagaacaattgcttgaacctgggaggcggagcttgcagtgggctgagatggtgccactgtgctctagcctgggcaacagagtgagtgagactctgtttcaaaaaaatatatagtaataatccacctagtaacagtgaagttttgtgtgaaggaaaggtgatattttggaattttgatttacatggtttgatttgtagtgttataaaattaaatttgggatagagcagttttggaatatatctgaaggagttacaaaagtaccagtgggagagaattaaacattggttttatgttaatagtttttccccatactgtgggaacccaccaagagaattgcttggagccaggagtttgagaccaacctgggcaatgtagcaagtccccatctttccaaaatattttaaaacatttgccaggcatggtgcttgcacctgtagttgtagttacttgggaggctgatgtgttaaggatcttctaagcaaaaagatggtgccaaattgctttaaatgagtgttaactgtgatttagatggttatttccaaatcctaatttgtaaataggccctaatctatgaaagagatg

SEQ ID NO: 19945 - DNA, 1047 bp, Homo sapiens
gtctttattagcaaacataacactgattttgctaaccataagatttttctttgtttttatttttcttgaggccaagatttttcccttaaatagtagtaactgacaatatgtgattgaccaacagaagttgaagataattgaattactatcctttcaattaagcattttaattattaaatagaaatattatgtatggtatgtgcaagtttgcatgtttatctttgttttcaacttgttggtaatacgttttattgtcttcaataggccgctggcccaacaggcaaaaatgaagaaaaaattcaggttctaacagacaaaattgatgtacttctgcaacaggtgagaattgtgtgcattaatgtcaggaagtaatgtgaaacagacatgtaaccagcaaaaatacaaggatgggccaggcatggtaactcatgtgtataatcccagcactttgggaggccgaggcgggaggattgcttgagccggagaatttgagaccagtctgggcaacaaagtgagacccagtctttacaaaaattagccaggtgcaatggcgtgtacctgtggtcccagctacacacgaggctgagttaggagaattgcttaagcctacaagggcgaggctgtagttagacgtgtctgtgccactgcactccagcttgggcaacagagtgagacctcgtcttgtgtgtgtgtgtgtgtgtacatgtacatatatatgtatctgaaaggacagcaaatatgaaaagacgctcaacactattagtcgttagggaaatacagattaaaactgcaatcaaatacctatttgacacctatgagaatagctaaaattaaactgatcataccagctattggcaaggatgtgagccagctggaactggggtataatattgcacaaccactttggaaaaaatagtctcatttttttctttcatattcctgtagatgatattggagtctgttttgttgtcgttgttactgtttttttgacagtcttgctttgtcacccatgctggagtgcagtggtgcgatctcagctcactgcaa

SEQ ID NO: 19946 - DNA, 1026 bp, Homo sapiens
tagtcaatgtgcttagttccttaattagttttgtatatggacattattccttgaacctaagcaaggaatgtattcatactaaaataggtggctttctgaaaggtgatttaaattttgtaaggtaatgtgggtgttgaacattgaacagtgggtctcaacatttcttctggatgattcagtaagttagttgctgttaccttaaacatccctctctaaaagttgaccacttgtagtccaatattactgatttggggaaatggaaaagagcaattcacacacattagaaatcttttctaaatgttgagtactttcctgggatttgtttctcttcctcagatgttcttaaaataactgatttatcattttagacaattgaaagctttgctgcacaagaaaaacaaatggaagtttgtgaagtatgtggagcctttttaatagtaggagatgcccagtcccgggtagatgaccatttgatgggaaaacaacacatgggctatgccaaaattaaagctactgtagaagaattaaaagtaagtttttttgtttgttttgaggcagattcttgctctgtcacctagagtgcagtgacgcgatctcagctcactgccacctccacctcccaggtttaagcaattctcatgcctcagcctcctgagtagctgggagtacaggcatgtgccaccaggcctggctaatttttgtttgtttgtttgtttgtttatttttgagacagtctcgctttgttacccaggctgaagtacagtggcgtgatctcggctcaccgcaacctccacctctggggttcaagcaattctcatgcctcagcttcctgagtagctgggattacaggcacacactaccacgcccggctgatttttgtattttttttaatagagacggggttttttcctgttggccaggctggtcttgaactcctgcctcaggtgatccgtcctcctcagcctcccaaagtgctgagccactgcgctcggccagcgtaaatttcttctaaagatacattttagc

SEQ ID NO: 19947 - DNA, 1790 bp, Homo sapiens
atggcttaaatggagatatgaccctctcattgatattttcctatgtgtaattatttttgaagcattgtgagttctgtgaaattttgctatttattgaactatgaaagcacttgattttcttaactcttgagtgccagaaatttgggaagaatattcctgaggattagacaaataatgataccttgtgtatatacatggtgttggaatgtctacatttcccttaagggcatcaattccataagttggtctacagataacttcacattagttgaccattgtttaacaatgctttaaagttacatttgcataagaatccaacttgatttttctaggaaaagttaaggaaaagaaccgaagaacctgatcgtgatgagcgtctaaaaaaggagaagcaagaaagagaagaaagagaaaaagaacgggagagagaaagggaagaaagagaaaggaaaagacgaagggaagaggaagaaagagaaaaagaaagggctcgtgacagagaaagaagaaagagaagtcgttcacgaagtagacactcaagccgaacatcagacagaagatgcagcaggtctcgggaccacaaaaggtcacgaagtagagaaagaaggcggagcaggtatatataaaacaccctaagactgtccagctcataatgggtgtgcaataacaataataactactagtattattccttggaatggtacttgggaagctcttaagcatctttaagtgataggatgggttgcgagagcggaatcagtgaataaaatagttccatcttcggggcaacttctgtgccatttcccacctgtctaggaaatttcacccaacctttttacaaagttagagtacctgatggtctcttaagtgcttgtctcactgattccgagaaataaaatatgaaatcagccatactgttttaattataattacaaattgaagaagagtcttaaagagcacaacgataaccatcttagcactattggagatgaatttagaaagattttcaataatttttagttcttaagatttctaatgtaaatatgttttagagggtaagttttgcctagtcttgttaattaatagcatctactccaaggcctttacttattgtaatactggctgaagttgccttttggttttaaattattaagaagtagagatcgacgaagaagcagaagccatgatcgatcagaaagaaaacacagatctcgaagtcgggatcgaagaagatcaaaaagccgggatcgaaagtcatataagcacaggagcaaaagtcgggacagagaacaagatagaaaatccaaggagaaaggttagtttatatgagaattcagttcattaagaaacttttcacaccctaatcgccccactcacttttctccagacacaggcaaagatccatttcatacatactccttttcactttgaggaatgccattcagtaggagacaggcattctttccccctctcctacttagatttgtgaaaatgacagtttatctggtgttttcttagatgttaaaaacatctttcagttgataaacctgaaggtttttaatgtagcttcttttaagtgttatattacctttcggggttattaggtgtaggatttattatattaccttggttattggctccttttttttttacacactgcagtgtttcataatacgtcttataaagtgagtgtacattgttgcattaatcttcatttgtagcattcatttaagttagtaattaacatctaagtacctagaagttgaattgcttacatgtgtcttacccac

SEQ ID NO: 19948 - DNA, 3381 bp, Homo sapiens
tcaaatatatataaaaataatgttttgcattgaaaaatatgtagttgtagtttttaaaacatgcctgttataaacattcaactttttttcaccttttggggtctccatttttacccttctaacttaataattgaacctcatgtgaacatagttttgtatgctgtcttttatacctttcccagtgctttttgatgttttttacccacaatgaaatttacttaaatattatattctgcaatgtgcttaatagcttctcaccaattgagagaatttacccactattttaccttttgcttccttgaattccccttcctgccttctctctcatatattacaaattttatccctttggtaaattcaccaaaccgttgcttgcagtctgtgggaaatgattgtctctcatctctcagttgtttcactttttttcaaaatcatgtctttattgtattttactttaaaatccatggtcaatgtcttcttttatggcagaaaagaggggatctgatgataaaaaaagtagtgtgaagtccggtagtcgagaaaagcagagtgaagacacaaacactgaatcgaaggaaagtgatactaagaatgaggtcaatgggaccagtgaagacattaaatctgaaggtgacactcagtccaattaaaactgatctgataagacctcagatcagacagaggtaagtgtattgtttctcactttgattagggctttttgttactgtttgacagtgcagcgtaagtatgcacagatgaagatggaactaagccgagtaagaagacatacaaaagcctcttctgaaggaaaagacagtgtagtcctgcaaaacattttgaggtacattgttttgtctcagctattttgtagcagactcgtgcccccattagtgtgcctctttggaaattatcgcccacatttgtaatatagtcgccattgaaaagttaattatcctttttttagggattttgatgtcatttcttttttttttttaataaaaaggttgaactgtttttttttttctttttggtattaagtccatcttgtgttggtacattggcagagacatatgctttaaaaacttaaatatttcggaggcacatgttggactactttgttttaattaaactgctagtatttctttgtcaaggatgtttctagttttttgctttattgccttgcattctaatgcagtttgttctgtaactcgagagccagtagcattggattgatggaagtgtagggtttatgaattattgcagctgactaccatacctcacacagcgttggtgttgtgagcggcccatgaaaagccaaattaaaaatcaaggattcagtcaaactaagcaggtactcatgccaggtactcctttctctacccacatccatgtttgaatgctattgcctgtgatctttacgcttaactgttgtgtatcttttttgttctttacaagaagtgcagaggggttttttgtgtattgcgtgaaaacttataaaacaaatgttaacagaatggaattttttttcaactgtatgtagggctgcagtggtggccagaattagatatctttaaagaattttaaatacaataaacacttcatattattcgccttgttacactcaatgcaattctcaagtctataagaggtatgtgcttaatatttcctactgtgtaggagaatttgcagtcagccataggtatgtaggaatagtcactcactggctgatacatttaaagcagcagtgtgaatagcaaggacagacaccttcaatttgtgaaatcaaagaactgatgcactatatagaacgaatttgggtttttaaagaaatattaaaagttaggtactgtaagtgttcttaaaacctgtaaacttcattctgtgggctagtggtgtgggacaaaatattcctaatgaaaggaagtaccaattagttgatttgttggtggcattccccttttgggaaagcaatgtaaggttatgtctgtgtatgtcattcacacttaggcaagcatacacaggcacatggctttaagaaccacactgatgccttgataattaaaaagaatacaagcattccatgtacacatgttaattagcagttagtgactgggccaacactttctcataaaaattggccttttacatgttgtctaattatcatttttccccaaattttgcgttgtaggactactgttcgaagatttttggaagaatactgagaacggcataaagtgaagatcgacatttaaaaaatgaggtgaaagaaagctatagtggcatagaaaaagtataaagctcagttagtttttttattattattattattaaaagttaattcaggactgatgtgacctaccagatttcagaacatgtgttaatagtatatatgccactgaaaacttaggtcctgtatcatacttttttctttaagactttttaagaaatattacttaaacatgtggcttgctcagtgtttaattgcaagttttcaatcttggactttgaaaacaggattaaacgttagtattcgtgtgaatcagactaagtgggatttcatttttacaactctgctctacttagcctttggatttagaagtaaaaataaagtatctctgactttctgttacaaagttgattgtctctgtcattgaaaagttttagtattaatctttttctaataaagttattgactctgaactagtcccctgttttaaatacaagagttacactattactagaggtgttggtgtacagttttatctgatttgttctgtttaagactaatttttatagactttctaatgttttaaataatggtgcttcaattttaggtggttatgaataaatttgaattttgcttttaatagcaaagatgtgcagtgaactagaatatatttttacatccctgagagattcatttagtagaaaattccaagtatcctgacaagcactctttagctggctagctatgggatgatgtagaaaagcattcaagagctagtttttgttaagtcctgtatcaagattaacccagctgtgtcagtttataaatgtatttgtgtatagggtgtgtagtatatatggcaagggttttttccccccacttaagtgattatttttgtgtcacatctaggaaaaccggcagcatgtttctatctatagccagcttcttcgactgtataaaagtattctctccagctacgtatatacacacatacatatatatcatagcaattccttgtggtttataacttgcaaatactgctatcagtttataggtaaagaaacagtgtgttaaatgacttatccagggagggtcctgtggcttcatgtttatggagttgctaggtctctgcctcatggtccagtgcctgttaa

SEQ ID NO: 19949 - DNA, 1031 bp, Homo sapiens
ttgtttttggttttctgtaatgacaagtccatctgtaataaaagtgagttatttttagttttctaattaagcacagaaatttcaagaaactagacaggatatccttggaatgccttaccaaaagaaacacttcatttttcacgtgttctagaagcacaacttcttttaccattaggcaaataatggtactgtaccaaacatctagaactgcgggaccatgtgtcttgattagtaattttatattgggggggcatattaggcatggctgagactaaaatgtctaaagatagatgaattgtaattttgtcaaacttatctgtacttttcaataattctctaaagagaagggacaagttctcttttctgaatgtcttcaatctgtaattccagatttgaaatatgagagcagtcatctgataggtactgattaaatatcagtagcattaaaagcatttttaagtcagaaatgtagatgtcaaaaatttatgagttattgctgcttggcctaggagtgtaagaagatgtctgaccaaatataaacacacacacacacaccacacaaacaacacacacggaggccccatggcatactggaaaaagcaatgaagggtgggtactgggaggtctgagtttcacaccagtttcaataaacttttagttttctcacctataaaaagggttgaattagatcatatctaatgtctccttcaattaaaaaaaaattccacacttggctgggagcagtggcttacgcctgtaatcccagcactttgggaggctgaggcaggcagattacctgagctcaggaatttgagaccagcctggccaacacggtgaaaccccgtctctactgaaaatacaaaaattagccgggtgtagtggcacacgcctgtaatcccagctacttgggaggctgaggcaggagaattgcttgagcctgggagatggaggttgcagtgcgccgcgatcgtgccactgcactcctgctggccgacagagcgagactctctctcaaaaaaataaataaataa

SEQ ID NO: 19950 - DNA, 1035 bp, Homo sapiens
gtgatggtgttagaagagataatatgcatgtggccacccccacaaacctttaggaatgcagtgcataattaggactaaaggcactgatttggatgtggtgggtgataggtggtctgtgggagtaaatgagatgaatgagacactagaagtaggttggaaatagaatcctggggacaagaatcagtggagaaagaggtgactgtgaaggaatcaggatgcaagaagagtcagtaaagtttagccttcaagaagtcaacagaagggggagaatttgaattctgttttcaacctgtttggttggaggttctataggacatctgtggctatagtggtgatagctggtctctttgtaacatgattcctgtaaataccagtttgtggggttaaatctatattcacttaggttgtgaaagcccttttacttggtttttaatctattttaatccttttctctttgtagttctaattgtggagtggtaaatatatacaatcaagattcttgtctccaagaaacaaacccaaagccaataaaagctataatgaacttggttacaggtgttacttctctgaccttcaatcctactacagaaatcttggcaattgcttcagaaaaaatgaaagaagcagtcagattggtaaatatttcattacccctttattattgttattttttaaatttaagttgaaaacatgcaagagtaacaggaaaggagagcgttgaattatttttaaaacagtggcttcttttgatataggaattattagtattgtagcttttggatgtggttgttggaaggatgcacagtagccaccacatttgattatgtcacttctttcagtaaagctttgctgtccattctcaccattcctaaagtggtcctcattttcagaggtttcttttagtattaatgttaaggactatatttaaggcagacacttcattccttcacaattttctttcctcatttacctttttaaggcctgttgtcttaacagaacggaggcaattctcgggttttgaaagtaagttgaact

SEQ ID NO: 19951 - DNA, 1035 bp, Homo sapiens
gcagtggccacccttgtaagcagacctttctgttttttttgttttttttttttttgagaccaagtctcactctgttgcccaggctggactgcagtggtgtgatctcggctcactgcagcctccgcctcctgggttcaagcgattcttctgcctcagtctcctgagtagctgggattataggcatgcgccaccacgcccagctcatttttgtattttttttttttttttaagtagagacggggtttcaccattttggtcaggctggtctcgaactcccgacctcatggtccacctgcctcgggctcccaaagtgctgggattacaggagtgagccgccgtgcccagcccagaactttctaaggatagcagccttgggcctatgtaaactcttttctgcccaacatcagagctcactttcagtgtcaccccatctctgtgaagtttcctaatcttcaggcagagccaattttctcattcatttaacaattttttgctcaaggcaccaggtatacagaaggcatagaactttgaatagcagaattatgtttgctgctatgtgtgtactaccagattgtacgcactttacaaagtgtgttatttttattgtgctcacttggcaaaaagccttgcatctgccatcagctttgtattagaatatatcgtttacaaagatttacaaagagttctacaaaaagtttgagccaagtaacagttcttcagaggattaacttaaccaaagtaaacagttaataaagggcagaattgtgatttagattccacatttttttctagcagttcattggttttctggctgaattccacagagccctagattctgcacagggctttatatggcatgtagggcaaggaggaggctaagctccttaacttgtatcatgtagagcagtgtcattgttgtctgtggtatatatattgggattctgcatatgatttccttaagaaatgttttgttgcgctgggcacggtggctcagacctgtaatcccggcactttgggaggctgaggtgggtggat

SEQ ID NO: 19952 - DNA, 1027 bp, Homo sapiens
agtaaagaggcccagatttggaaaatttagatcacagctctactaactgctgtgacaccgaacacaccacttaaacagaaccttagtttacacatccttataagatggtcagagtagctaccattgaggagatgctttcccttaatggctgtgcttttttggatattagaatgaaccccaagcagaaatggattcagactgtgtcttcataggcaaacgaaacttcagcagttcttctgcttaattttttaattctgtaaacatggactaactgtcagctatgtgcctggacctggatcaggcactggtgaggccaaggtgagacgtggtctcaaacctgagggaactcactttcttgtagagaagacgggcacagttttgtgtggcacctttgcaatgcaagaaaatgcaaaacacacaaaacttaggagaagggagaaatgaattctgcgtggcttttgaagggtgaataggagttttcttttctagggaggtaagctttgtccattcggtgccagattcaagttttttgttgttgttgttttgtttttgtttttgtttttgttttgagacggggagtgacacccaggctggagtgcagtagctctcggcacactgcaacctccgcctaccgggttcaagcacttctccttcctcagcctcccgagtagctgggactacaggcacatgccaccacgccaggctaatttttgtatttttagtagagatggagtttcaccatgctggccaggctggtctcgacctcctgacctcaggtgatctacccacctcggcctcccaaagtgattgggattacaggcgggagccaccgggccccgcctcaagtggttcttttcctggattgaaagcaagctaaactttggggttcccccaagcaagtccttattcttccccttctctatcttttttgtttttttctccatttcccccagaacccggtgttttcatgcttagggatcttgtccttctcttaggaagatgttagcgcattcatactgagtgttcc

SEQ ID NO: 19953 - DNA, 1028 bp, Homo sapiens
tccagtgtccccaatttacctatatcaggatgcctctactagagacagaccagaatacttatctcccccttcataacttacccatttttccacatttatatatttttcatacaatttatctgtctagaatatagctctatactcatttttactgttcttagccattttgcaaagcccagcttccagttagccttttccaaaagtcttgtaagaccacctagccctaaataatcactcttgcctataagggcctatagctggggtgactgtgtaatttatcatccaaaccaggacatttttgaaagtgaaagggtgtgtcatcattaataaacaggacattgggaatatacctgtgctaccctgggtaaactgggacagatattattccatccatagctcatatgtttggcctgcacgtcccttcagcatttagcatttagtactctgcattggtgttaatgcccttctggatgtgctgggactcctcaataagtctgtcctccagactgttacattatgctcatacttccacatatccccagaacctaacattttgccatatattttagtagatactaaattatgtttgttaattaggatgctgatggaacccattatttagcagtttttcccttacatttttaggaggtggttttgccagataaatataatgtttaattttttttctaatttagcttattgacatgtgtgtgcagaactgtggtccaagtttccagtctctgattgtgaagaaggaatttgttaaagagaatttagttaagctactgaatcccagatacaacttgccattagacattcagaatagaatcttgaatttcattaaggtaagtctgttgtatacctcatgggatggtaaatttctaagattagggatttaatagcttacctcctgattgtttcacttatcttttatatatctaggattgagctagaaaagcatttttgctattttagtttctgtgtaataataattttttggcattggatggtgccctttttctgaagaa

SEQ ID NO: 19954 - DNA, 1034 bp, Homo sapiens
gatatgcattcataatttggagtggttttaatggtatagattacttgccttaataacttaatgttattaacgttaatgttaaactgttaatgtaatgtaaagttaatgttatgaagttattaataagaagcaggaacctatgtaggtggtaagatgggattcatactaatgttgctcgttgagtggagaattcttccttaaaatgcatccaaataggatcctcccctctacaaaggagaaagtatggggagaaagctgtgataaactacatgacacttttttttttttttgctttgttttcagactaccagtgagccttctgccccatctcaagatctcctcgacctaagtcccagtccccggatgcctagggccactctgggagaactcaacaccatgaataatcaactttcaggcttaagtaaataaacactcaggtcttttcagaccagcagaagagcttgatgttaaacagttctccttaattacgtgattaaataccacctaagaaggactgaagtcaggttgaatgtcagagcgctatgttaggagatgtgattacttcccggcaaatggttgagtcaaacccagtatagcaatgggatgtgtctgggcgaggaggtccttgaaactcatcctactcacttagaatctcatggaattcacctggcctgctttgtagaagttgttcagcccaatggccaatacttaaagtctactgtgaacctacacactattatcattgggtttttctgctatacctcagcatcaggtaagggagtatctctgatgcaagcggagaaattcagggattacaaggtatgaactgagtggttgtgaaatgtagaaggaaaaacacaggctttaaagtcagagaagtccaagttgaaatgccagttctgccacctctcagccacctaacttttgagagtctcactttataaaatgggaacaatgattgccttaaagggtggttgtcaaggttaacaaactaatgtttataaaatgcattgtagcaaagcttacaatgcatt

SEQ ID NO: 19955 - DNA, 1050 bp, Homo sapiens
aaaattagccgggagtggtggtgggcgcctataatcccagctactcaggaggctgaggcagaagaatcacttgaactcaggaggtggaggttgtggtgagccgagatcgtgccactgcactccagtctgggtgacaaagtgagactccatctcaaaaaaaaaaaaaaaaaaaaaagattatggactggagcttgaggtgaaggtagagctcagtatgtactgtaattttttacttttgtgctaggcagaacaagatgtaaaatcctttgcattctggatcagcttgggattttagaaaatccaatacaataatatttgttacccttacaacaacttcttctcatggcagggaaattctttctctctctacctaccataaatgatgctttttaatttctcttagagctaggaaatctcatgattttagggtgacagaaatatctaaattaatctcttttatttggtgggtttttcttttttttttctttttcttttttctttttttttgtttttactgtagaaaatccagcataactgactgacaaaatgttttaaagccaaacaagtccattttgtgttttagatttcagccttccaagttctgatgtaacaaacaacttaaaacccagtcttcatccacagatgaacttgctagccttggagaatacagagatacccccgtaagtatgtcagtaacactgcagaactaatatcatgacatttagattccttacaattaagaaaacctgatggctgggcgcagtgacttacatctgtaatcctagcactttgggaggccaaggcacatggatcacttgagcccaggagtttgagaccagcctgggcaacatggcaaaacctcatctctagtaaaaatacaaaaattagttgggcattgtggcatatgcctataattccaactacttgggaggctgaggcatgagaatcacttgaacctgggaggtagaggttgcagtgcagtgcagtgcaggcgatatagcacttggtacatagtaagccttcaataaattgtctctgtttatttttagt

SEQ ID NO: 19956 - DNA, 1065 bp, Homo sapiens
cagaaactctgattcagcagcaagaatctttaacatgcattccaggaggatcataatgcagtggttttcctatcatacattgagaaaccctatgatgaacatctataccaagattcgagggcgtatacctggtttaaatcatatgcctaagatcacttgtgagaggcaaaatcagccattaaaatgtcttataatgttgagattttttccatccctttgtttgcagtttaatttattcaccatcacagaaaaagtgggtgatgcagtttttcataacagaaagaatccttaaaaaacaataacaaagaagacaggataaaacataggtcattttttttttgagacagagtcttactttgtcacccagactggagtgccgtagttcgattttggccaactgcaacctccaccttccaggttcaagcgagtctcctgcctcagcctcccaagtagctgggattacaggcacccgccaccacacccatctaatttttttttttttttgtatttttagtagagacctggttttaccatgttggccaggctgtggtctcaaactcctgacctacggtgatctgcccacctcggcttcctgaagtgctgggattacaggcatgagccactgtgcccggctcataggccatatttatgacccatttactaacaggcaacaagctaagaagtatagaaatgcttactaattacttaacctatgaggtatgtgccaccatcattttcattttaaacaagaggaaaccaaggctgaggaagattaacttgccagtggttgtccagctagtactgagacaggattcaaatttaaatgggattcaaaatcaaattctgatttcagtaacttctctctttttgtttttagttttgtactttaattttatttctaaaattttcatatactaaaattgaccttttttgttttggtttggtgtacagttttatttattttaacatacgtatagattcaaataactacccccagtcaggatacagaatagttccgtcactcagcaaaactgccgtgtgctattcctttatagtcacaccctt

SEQ ID NO: 19957 - DNA, 1044 bp, Homo sapiens
atttttatatattctcataatctcttttaattgatatgttaggcaatttacatttaatttaattgtatgtagagtttaggtctactgttatatagttattctatgtgttcctttttttctgtttcctttttcctgctttcttttggattattagaatatttttagtgctccattttagtttattgtgattttgactgtatctttgtataatggtgtgtgtgtgtgtgtgtgtgtgtgtgtgtgtgtgtgtgaaataaagttgcttggtaaataatgtggtttaaagtagctgattcttttcctgttattttgctaattttgttagcaaaatatatatatgtatatatgtttatatatacatgtacacacacacatatatataaagagagtttgctttagtgattgcagtatacttatttttcagtctacctaaaatcaatgctttactacttgaaagtaaaaacctgggccgggcgcagtggctcacacctgtaatcccagcattttgggaggctgaggcgggcagatcatgagatcaggagatcgagaccatcctagctaatacggtgaaaccctgtctctactacaaatacaaaaaattagctgggcgtggtggcaggcacctgtaatcccagctactcagagactaaggcaggggaatcacttgaacccgggaggcggaggttgcagtgagccgagattacagccactgcactccagcctgagtgacagaaagagactctgtctcaaataaataaataaataaatacataaataaataaaaggaagtaaaaaccttatcaccatatagattccccttttctataatagttatcttatatattactcctctatacattgaaaagaaaccactaacagatgatgctgtaatttttgcttacaaccctgagatatattgcaaagaattcaagaagtggccgggcgtggtggctcatgcctgtaatcccaacactttgggaggacgaggtgggtggatcacttgaggccaggagtttgagaccagcgtggccaaaatggtgaaac

SEQ ID NO: 19958 - DNA, 1072 bp, Homo sapiens
gactgcaaactgggtggtttaaaaccacagaaatttattatctcacagttctggaggcaagaggtctgaaattcagcagagtcacactccctccacaactattacggggacatctgttccctgcctcttccagattccaatgacttgtgggtactccttggatttcttagcttttggtcatgtcactccaattcttgcctgtaccttcacctggctttttcctgtatgtgtcccaaatctccctctgcctttctaaggtgatttgtcattggatttatggcccacccagataatacaggatggtatcctcatcttaagatccttagttacatttgcaaagaccatttttccaattaagataacatttataacattcacatattctgagaattaggacatgagcatagcatttggggggccaccatttaacccactaatggaacttcttgaatgtggtttgtggctttatgtctttcaccaaacttgtgatgtttttagtctttcttttcttcagaactacagtctttctgctctcctgctggaaccctgatgacacaaatgttgacctgtgccattgtctcataggtgtttggggtcctgtttgtttgtttctttgttttactctttgcttctctctgtttagattggacactttctgtgatttatgttcaagttcaccgactgtttcctctgtcatttccattttgctattgagctcattctgttaagttttttttttaattcagttattgtagtttttagttctgaaatttcattttggttctttatatcttgtgtttttgctgagactttctatttttcaggtttttttttctaaagattgtttgcagttctttggagcatgtgtacaatagctgccttaaatatctctgagataatttcaacatctgtgtcctcttggcatcgatatctgttattgtcttctcatgcaagttgaagttttcatggttcttcatatgcctcataattttggattctatcttggacatttttaatgttttattaggagactcttggtcttaatttaaatcacatcaagaatgttattttg

SEQ ID NO: 19959 - DNA, 1050 bp, Homo sapiens
actatgcttatgtctgactaaatggcaggacagaaaggaaaaaagctgtgggtatcacagctcctattgaagaggaagattcttctgtgtttcaatttcctacaagtcccattgcctcggctgtcgctacagccactttggggttgcctgtggtttgggttgtgagaaaacagagagaagaggacaaaaaagggacaagagatttctacattctgagtgttaggattgtttccctttcctgcttcttgagtgagaatgagaacccttctcctagagctctgtctgttctcattgatgcctggggttcagactgcattgcatttggtcaggaaatatgaagaggcaaaaaacggtaaattcaccaacagttcagtgatacttgaattctggtcttctttcccaatcaggctgctcctattattcagagtcctcaaatacttgctctatgcattccgtccacctttaagtgacattcagtggagagacagagtgcagtacgtttgctccgctttatcctggaccggagacctcacagctttcttcttaacctgtgttctatactacttctcatcctttaagaaacgatggggtggtagctacactgatggaaagactaaaggctctggtcttagtgttccgtgcacactccacagtctcagggctcccaccacccatggcatcataacctgatgtgcactaaaaccaattgttttataaacagttattacaaaatgacactttatgcagtctgaaggtaccttttaggttttgtttttagactaggaaaattatcttactttttgcatttgtgttctcactgtagggtaatcattctgtgttatcacactatcctaggtttgcccaaaggaccagccaaaacctcacctcaagccacgcatatgataatgtaagtaacaaaactcttttctagcagtgcatctagtcagcagattattgtagccagaaaagaactcatggtcattaattcccatgttctgctcagtattgtgttgatgcgcagcccctgttagcaagatggtaaggatcaaa

SEQ ID NO: 19960 - DNA, 1025 bp, Homo sapiens
accaaatacatgtttacaaaatttgtgttaatgttatgaaagaatatggcaacttgaaagtttgtaacagaactaatttaaatgaggattagagaaagcttcaggtagcattaatgctgaggcctgcaattcttagttaagtgaaaagtttggaaatgagtattgtaggcccaaggaacaacctgtacaaagacccagaggacagagctctggcacattcaaggaaatggaaatgctaaaaccaagagtaaagaaagttaacagggagctcagtaccagatgaggaaaatgtaatttggaagcaaaaaggagcgagtacaactgtgaagaacagtgccaggggcagacaagtaagataagaactgaaaactagataatggattggagatcattgatgattttagtaaaagctactttgatggactgatgaagacagaacccaaatttcagtgcatttgaaaagcacatgagagattaagtagagacagtaagtacagataacttcttagaacttaaatatgaagcagtgatgaaaacaggtttggggccgggcacggtggctcacgcctataatcccagcactttgagaggccaaggcaggcggatcgcctgaagtcaggagtttgagaccagcctggccaacatggcaaaaccctgtctctactaaaaatacaaaaattagccaggcgtggtagcgggtgtctgtaattccaactattcgggaggatgaataggagaatcgtttgaacccaggaggtagaggctgcagtgagctgagatcccactattgcactctagcgtgggcaacaagagtgaaactccatctcaaaaaaaaaaaaaaaaaaggggttgttggtagctagaggatactaaggcatttactacaagaagagatggaattaaaggctgtactttgtataaaatgggagacatgggagatgctggagaatctgtgaatgttgaagaataggatctggcatagaaggagaggttgaagactcaggaagggaagaataactgaatgg

SEQ ID NO: 19961 - DNA, 1058 bp, Homo sapiens
tgtaataataaagtgcacaagaaatgtagtgcatttgaatcatcccgaaaccatcacccctctgcaaccccattccctctccccccaccttggaaaaattgtcttccatgaaacaagtccctggtaccaaaaaaggtgaggggttgctgctctagatctcagattttgatttaataagtagtttaaagaaaaaaataggtgcagatctctagactaacctgtgtgtgctaatttactttatcttagggatcctgcctttcagatgattacaattgccaaggaaacaggccttggcctgaaggtactaggaggaattaaccggaatgaaggcccattggtatatattcaggaaattattcctggaggagactgttataaggtaaaaatatgtcccatgcccaccaaaaatacaaacaaaaagacccaccagtggtaaagtttattttttcttctttattagtgaatttatatccactgtgaccatacctcagtgaaaaatacaaaggaattagaagataagactattgccctcaaggagctttaaactaagaaataaataggttcttcttctatgaaaataatagatatttctgactgtaagataaggttattatttttaaattacatgctgttcaacttttatcctgtatctgattgagagaaattatatttgatgacttgttatctttctactactttgagtttttattaagttggatcagtagaactttaattacattcatttagcctctactaaatgcaaaacaaaacagaaacagcaaacaaaatctaatttctgaattcgcagttcttgtagcttgagctaatgagttttatcactcattaaaaccagaaaatgtctttttttaggaattagaaagtcttactctcctcttcagtgtaagaaatatataatgagctccctttcactttggttggtaggaagctcagacccaaatttgaaggacaaccccagcagtttaacaaactagttactatatttaaattctcattcttcttggatttcatttgctgtttctgttttactaaagtgatta

SEQ ID NO: 19962 - DNA, 1035 bp, Homo sapiens
ttcgtcataggcacatatttttaaaattattttattaaataaggtatagtatattgataattatttaatttttattaaatagaaaatatttacaccaaaaggaaagaaaatttgttttgctaccttagtttttataatctcaacctctagaggaagccattgttgcaaatatattatttatcttttcatagatttttctctacacagaaaattatattttttaaaaataggcagggcatgatggctgacacctttaatcgcagtactttgggaggctgaggcaagaggattacttgagctcaggagtttaacatcagcctgggcaacatagcaggaccccatctctactatttaaaacataaaaacaaaaataaataaatatatgtatatgtggggacagggagtatgtgagaaatttctgtactttcccttcaattttgctatgaatccaaaactgcttcaaaaaataataaagccttaaaaaatttttttccagtatgtgtgtattttcacttctatgtaagtcacttcatccacacttttttttttacaacttgccttctttttttttctctctctctctctttataagaattatatctcaggcagcttttcaggttaatatacacagatctaccaaattcttttcaataactgtcctatacattaaatagttatttggccagttccctattgatggacattagactatttccagtttttaaaaataatttcatcttcagcagctttgtagatgtatctttgggcatttgtacagtatatacacagaatgaatgtctgaaaatataattgctttattaaaagatatagacacttaaaattttgcatatgttaccatattccctttgaaaaggttttgccaattcacattccttcctaaagtatatgagcatttcactactataagagtattttatatatttcttttcttacctttgaaaccgctatctttccacattttttagtgcaacaattgttttgatggaaaataaaaatttagttttaaaaatacat

SEQ ID NO: 19963 - DNA, 1045 bp, Homo sapiens
agtaaagatagaaagcctaaaaggccattttctgtagaagagataaagtaagttatcaagaaactattctagataaaaggaccaggcaagatggtttcacagagaaatttaaccaaacctttgacagtctcaaaactatataaattgtttcagggtataaaaaatgaaagaaattttccaaattcttttcatgaagcaagtatagcgttgatgtataaacttaataaaaatggcacaaaaaagaagatacagttagactagaaaagcaattagaggcatatgacttggaaaagaaaaaataaaactgtctttttttgcagatgatatggtagtaatctggaataccctagagagtgataaaagtaactcagtaagttgataagctagcaagatataaaattaagatgcaaaactaaattgcatccatatacacaaataataaccagttagaagttttaatagttaaagagaaaccaaaattatatagaaaaataggcaaaagacctgaacagataattcatcaaaaaagctataaaaatgtccattaaacaaatgaaaagatactcaatctctttctctcataataaaagaaatgccagttaaatctatactaccatagaacttctagcttctaaaatcattaagtcaaaccgtctaaagaatgatgacattcattgggggatgacggaggacatcccccaataaaaaataactccagaacctaaacatttaataataagcaactaccaaaggaactggagaatgaacatcatcagacaaattgctcctcctggaagagaagcagaatattaacatgtacctagaagtaagaagtaaaaattacatgaaatggtattctttttgtttgtttgtttttgttttagacaaagtcttgttccatccaggctgtagtgcagggacacgatctcagctcactgcaacctccacctcccgggtacaagcgattctcctgcctcagcctcccaagtagctgggattacaggtgtgcaccaccatgcccagctaattttagtatttttagtag

SEQ ID NO: 19964 - DNA, 1059 bp, Homo sapiens
tggagaacccccgactctacaaaaaatattagcatcaaattcaaggagtattacaaataacaaaagcaactctaaatttagcagtatgaagaaagcatacttcaaaattttttcagttttcatagccaatttatgtaacactatcaataattaagatctgcatattagcttatagtagaaaaataggtaaagtcattattttttatttatattatgaaaaagttcaatttcactataaactcttatacttatctagcttcataaactttccttttccttgtagtttgtagtttaactcatttacatgcactgatattagtgagaaaatgtaaatcacactgccattttcttttgtctggttactgaataatagatgcaccttccttttgtttaagaaaacctttaattggagttaaaagtacagaaaatcttcgtaaatctctttcataactcagccaagaagtattggcaaataacatagcatcagaaaatgtattgtcctccttttttcttttaacagttttataaactactgatgactcaatttacgtgcgtatactaaacagtgttagcaactgtatctatgatgcttttcataaaatcagcttgagaaaactaagcacaaatattttcaatatgtatcatacagtggaataaaacaataaagcagcctctttcttctttgaaaatgtcaatacattcaaatttggttgttgttgttgtttctaattttactttgagttctgggatacatgtgcagaacgtgcaggtttattacataggtatacatatcccatggtggtttgctgcacctatcaacccgacatctaggttttaagccttgcatgcagtaggtattatctttatgctctccctccccttgctccaccgcccgacaggccccagtgtgtgatgttcccctccctgtgtacatgtgttctcattgttcaactctcacttaagagtgagaatatgcagtatttggttttctgttcctgtgttagtttgctgagaatgatggtttccagcttcatccatgtatctgcaaaggacatgaag

SEQ ID NO: 19965 - DNA, 1028 bp, Homo sapiens
gggaatgggagcaggggagtctaggaatgggtttgctctttgattagagcattcaaggaagtattaaagtgaaggaatgtttgcctaaggcctagataattaatgggaagaaactgagtttgaattttttttaatgtgaggtgtactaaagtagtttccaatagatgattttccagtttcaatagcaaaatactgaatgcttttcagaaggcagtgcgaactttttgttgttgttgacacagagtttcactcttgtcgcccaggctggagtgcaatggcatgatctcagctcactgcaacctccgcctcccaggttcaagtgattctcctgcctcagcctcccaagtagctgcggttacagacacctgccaccacacccagctaattttttgtatttttgtagagacagggtttcaccatcttggccaggctggtcttgacctcctgacctcaggtgatccaccagtctcggccttccaaagtgctgggattacaggcatgagccaccacgcctggacagtgcaaacttttttatgcaatttttttttacataatacatactatattcagtgaagaggcttcaaaaatctataatagtcatatatttttacttcactgaattaaggtagaaaatcgagtaaattgaaataaatattcatacatttgttcacttacaaacataactggttatgtatatctctaatccaatcagtttctaagagaacataaagaaaatctgaataatttatgactatttaaacattaaaaagttaaatactttaaatatagcatgtgaaaatgaaactagtgttacaaatgcaaaataccaaagaaaatttgaaatctgttaaaagtcactaaactatttctcacattattcacttaaaccaattccacaagaaggctgaagttcccatcaccctttgataataccacaaggcgaagaggaaaacatatagtttacaaatcagcaatatttaggaatattacatatttgttatttgtgacctggtttttacattctgaaa

SEQ ID NO: 19966 - DNA, 1050 bp, Homo sapiens
gaggaagaacagaatcaactcttgtgtatatagatcctaagtaggtaccacgtaccatctgctgagactttctgattaaaatatttctgtcgaagattatacctttttttcagagcaacacaccttatagaaggggaataagactacagacaaagtttcctgtacagaaagtcatgactatgagtgaggatgatacaccataatgagcatgagagatgaaaaaagggagaaactaaagtaaaaccattagagtgaacctcaaccagcccaggcataaaaggagcatgaatgatgccttctgaaagtggatcattagtgcctgccaacctgttgcaatactgaagcactgcaactattttattatctgctggaattgtatttctaccaaaagatactaaagagggtgtgattgtttaattatgtacatatctggatatatattacagactccatgggcacagttttgttttgtcttgttttgttttaaacttggctaaaatgaatttattatcatgtttagagactgtggatgggaacgtagcttgtagggtaagaaatcctaaaaggttaacactaccgtgtacaattacttatagcctcaataaggaaaaagcgtgaaagtactcaagtaaatcaagggaagcttcacagaattctttgatgaacttacatgtttaaacaaatatacaaaagatggacaaagaaacaacctagaactaacaaaaacttttacacatagtgttagggaagttaaggccaggattaacttaaactttgaaaaataaaggtgagaagaactacatttaaagcagtaatgacaaagtagaagacttggtttttaaaggtaatataaaggggaagagtctaagtgttgtgttggacagactctttgggtggtttccatgattcctgtttcctgatgttcatgcctttgtgtgatcctctcccttggagtatgtttgagacctgtgatttgcttgtaactatacaatacagcaaagtcacaggttgtacatgactatattgcatgagattttagtgccaattttg

SEQ ID NO: 19967 - DNA, 1083 bp, Homo sapiens
aagtctttaatccatcttgaattaatttttgtataaggtgtaaggaagggatccagtttcagttttctacatatggctagccagttttcccaacaccgtttattaaatagggaatcctttctccattgcttgtttttgtcaggtttgtcaaaaatcagatggttgtagtgtatagcattatttttgagacctctgttctgttccattggtctatatatctcttttggtaccagtattatgctgttttggttactgtggccttgtagtatagtttgaagtcaggtagcatgatgcctccagttttgttttttttttgcttaggattgtcttggctgtatgggctcttttttggttccatatgaaatttaaagtagtttttttctaattctgtgaagaaagtcaatggtagcttgatggggatagcattgaatctataagttactttgtgcagtatggccattttcacagtattgattctcctatccatgagcatggaatgtttttccatttgtttgtgtcctctaatttccttgagcagtttgtagttttccttgaacaggcccttcacctccattgtaagttgtagtcttaggtattttattctctttgtagcaattgtgaatgggacttcacttacgttgcagctctctgtttgtctattattggtgtataggaatgcttgtgatttttgcacattgattttgtatcctgagactgctgaagttgcttatcagcttgaggagattttttggctgagacagtggggttttctaaatatacaatcatgtcatttgcaaacagagacaatttgacttcctctattcctattcgaataccctttatttctttctcttgcctgattttcctagccagaatttccaatattatgttgaatggggtggtgagagacggcatccttgtcttgtgccagttttcaaaggaaatgcttccagcttttgcccattcagtatgatattggctgtgggtctgtcataaatagcttttatgattttgagatatgatccatcaatacctagtttattgggagtttttagcatgaatgggtgttgaattttatggaag

SEQ ID NO: 19968 - DNA, 1050 bp, Homo sapiens
agcaaatgaagagtagatgactgggaagagaggaaactcatggagaagggaatttcaaagaaggagtgataaatgctgataacaaggggacaacatgtgaaaaaaggattggctgaaatcgtaaacatttgtgacttttagaagagaaatttcagtagattggtgagggcacaaatacaatttactcgaacaccattttgaatgtcaatttaatctttcttttatgattcatatggcatttcagtacctcttaggacctcttggtcatttcataaatattggttatgtaacactgcagtttaaaagatacaggattaagaaaaatggtataggatattgtatattgaaaatttgctaggagagtagattttaggtgctcttaccacacacacacacacacacacacacacacacacacacacacacacgaggtagctatagaaggtgatggctatattaatttgcttacttgtagtaatcatttcaccatgtatttgtataccaaaacatcatgttgtacactttaaatacatacaataaaaatgaattaaaagaaaaaaggtatgggaaattccactgaatctatactgatcctgtaacatatgttaaaagttacttgatttggacaaattcctgcttatgcccagatttctgtgactttctagtgagatgtgctctgatagctgtcatcgaagtgtggtttaactgtatgcatagttttgctaaattgagaagtgctatcataagagggaaaatgttagttaggccagcaatatttttattttattttctgctgatataaaaaaaaagtgttaaactttatttttgttattttgaaaagacctggaaagaatgaataagccggaaaaactgctcataacccaccatggagaggcaatcgtcatttacattttggcctaattacttttagtccttttctaacttgctaacacttttgtgtgttgtttgtttgtttgggtttgggtttttttggtgttttttgttttttgcataatgaaagaagcagcatatagtggctaacagcatggg

SEQ ID NO: 19969 - DNA, 1039 bp, Homo sapiens
aagtgattttactgctccttgcagggttgggggatggttaggaaggcatcctgaaagaggtgcagtacaaaacctcttttccatccacaagatgaaacattttcgagtttgtgttttttttcttaattgggcctcgaagtggccacaccttggggtttgctaattacaacatgctgcagtagttgctgcattgcctgagtgcagtacccgggttctgggtggtatccttgcccgtgtcttttcctacttcattccctaacagattagaaaccaccaccctagttcctccctacaaagatttgtaatagcaaattgtttaactgctcgtcatttgatgacattttttaaaattaaaaagcatctctccttgcagaaactgacagggcctttcaggagctcatagtgtatctgcttctgcagtgaccaggcccatatctctgccgaccatcaccttcagtttctttctcaggagaagcagccaaaaaattccagggcggtgtatgaggggacatttcagcttctaagaaggagagtctaccattgggacattaaaaccctcagggtcgatcatttataataataatagtgtgaacttgatcataacctgatgacttggactatcttttctacaagaatggagaaaaccctgacatcacagagcacaggttcccattgctctgtgatttatattcttcttaccctttctgttttttcctcctacaccttgtagttgggtggatatttatctatcaagaaaaatgcattccattaaagaatataattatttatatgtttaattaattgaaggactaatctggtcataggtatgaggtagctaccttcattactaggttgaagtgatacaattccacaaagcaaaagtatttataactttctttagcctgtttggggaaagagaggtggggaggaggccaaagatttgcagatgagagcaacgaggaggagcaggaaatgttacgtccagaggacatgaaacttagtggattaacattttttgtgttagggtgaaaatatgaaa

SEQ ID NO: 19970 - DNA, 1064 bp, Homo sapiens
ctcaaaaaaaaaaaaaaaaggctaaattgagaagaggtcaagggtgtgttggaacgaaggatggtgttgagtacagtcattgaaatgattgaccttggaatccaggccgcactgggaagtaagataaattaaggtgagaccagtagcctgggttgggactaatagaagctgagagcttggaggctgtgataaatgtaaagagcaaatgtaatgggaacacaggcatgaaaagcctggaagcatcaagtagagccattctagatggtaaggtctgaggtgtagcatataaaacagaaatggaagatgagattcacatctgtagttatcagccttaaatggaagctttatttctggtaacttcactggacagtataaaatagccatgtgaaaagtaaatgcagaaagcatctccattgtcaaaagaacacaaagactaagattgacatttaattatgactcaagcttaggtggaaccatagtctgttgcttattcttaccctttctcacaggaattcacaatgaacaactatttttctgttggacctgatgctctcatggctctcaattttcatgctcatcgtgagaaggcaccatctctgttttctagcagaattcttaataaggtgtgttggataaaataacatttcctgcttatcaccgaaggtacagtaaaaatcaatagttcaattatatttagcactcctagattcagatttaactaacttacagaaatatttacctgctctgttttgtgtagggttgtcaaattagatcttttttttttttaattagatctttaaatgtgctttatcaggccaggcacagtggctcatgcctgtaatcctagcacttttgggaggcggaggcaggtggatcacttgaggtcaggagttcaagaccagcctggccaacatggtgaaaccctgtctctactaaaaatacaaatttagccgggcatggtggcaggtgtctgtaatcccagccactcgggaggctgaggtaggagaatctcttgaaaccaggaggcaaaagttgcagtgagccgagatcataccactgcactc

SEQ ID NO: 19971 - DNA, 1039 bp, Homo sapiens
ggcatccagcctggtgtttttctgacacatggcccaggctttgtggtctttcatgacattaatctctgaaagatcagaatgtatcccccaaaataccattagctatctttgagggtctattatgaatctgtcatccatgaattgccataaacctaagtttgcctcacctcaggcccagaccatgttttcaaagagcaacttagtaatgtatacagtagtcagtacattttatgaaatactctattttgctaaattaacctcttgcagatctcctcaggtgatcttaaattctagtcttgagaaactttgtgagcagatctgttttcagcttctttatatacctttcatggtaagtaaccatggcagtgaggatggcagagttttgttttttttttttttaatgggccaatcatgttctgagtattatgaagtttatcctttcattcatgatcaaaattgttaaagacatcacattttataaatacactgttaaatccactttgctgtaggttatagtttacctgttatataattcgtagtgctaattgtagtagaagcaaatcaatttaggatgttggaacgaaaataatcacaataactaatacagctttttaattgtgaaaactacaattaaaaattataattttaataccaaccataatattacactgtatttagaacaggcttatgtaaaatgccctcatttatctaaataagttgattttttggttattgtaatctagtaaggtttttgcatcactactggtctgtcatgaagtttttctgctggcttattcacttatttagacttcatttagggaagctatttcagaataccatctcataaaatgtatcattatcttgtttttgcaaaattcacttactttttgggcacatttacccagcatttcaaataagtgtataggcatgtgccttgtttaagtacaatttataagacttcatgtttgcaagttacatattagggtagtgattgtttatattaccagggattctacactttaccaaaaaaaattgccat

SEQ ID NO: 19972 - DNA, 1034 bp, Homo sapiens
ttggagggcagggaaggcggaggagatggctccagctctaccctgttgactgtcttgcatgtgcggttgccagtatcctcctacctggctctgtaacatccctcctccccgctctcctgctctccccaggtgtaattacttcaagcctccaggatggcaatccagttccgttcgctcttccccttggcattgcctgggatgctggcgctcctcggctggtggtggtttttctctcgtaaaaaaggccatgtcagcagccatgatgagcagcaggtggaggctggtgctgtgcagctgagggctgaccctgccatcaaggaacctctccccgtggaagacgtctgtcccaaagtagtgtccacaccccccagtgtcacagagcctccagaaaaggaactgtccaccgtgagcaagctgcctgcagagcccccagcattgctccagacacacccaccttgccgaagatcagagtcctcgggcattcttcctaacaccacagacatgagattgcgaccaggaacacgcagagatgacagtacaaagctggagctagccctgacaggtggtgaagccaaatcgattcctctagagtgccccctttcatccccaaagggtgtactattctccagcaaatcagctgaggtgtgtaagcaagattcccccttcagcagggtgccaaggaaggtccagccaggctaccccgtagtccccgcagagaagcgtagctctggggagagggcaagagagacaggtggggccgaagggactggtgatgccgtgttgggggaaaaggtgcttgaagaagctctgttgtctcgggagcatgtcttggaattggagaacagcaagggccccagcctggcctctttagagggggaagaagataaggggaagagcagctcatcccaggtggtggggccagtgcaggaggaagagtatgtagcagagaagttgccaagtaggttcatcgagtcggctcacacagagctggcaaaggacgatgcggcgccagcacccccagtcgcagacgccaa

SEQ ID NO: 19973 - DNA, 1034 bp, Homo sapiens
gagcatagaactttaagtcgaccctgatttatttatcgattatctcccttcaataaaacttctgtgtttttgtgttcaggtcacagtggcagagggaaccctgcccctcctcgtgggatgggcgaggagcttgtaaatgatatgtcagtgtgtgtttcagttaaaatgagtttctctgctttctggctgtccctccttgctaacgctcgccagagaaatattccgtggaggtgttaaaacaagactagtggaaagaaatggtaacttaaaaagaaagaaaatccatggcagtgaagaacagatttcatattagtactgtcataatattctctaatgtatcatataaataaaaatctgtttagaccagaattttaataagtcaccaaaggaaggttttgaatcctacagtttatgtatccccctttgcgatgtaaatgttcacatctcaagtgaagtagagtggggagacgcttcggagactagaggctgttaattagtgaggtatattttgatcagggcaagaagactggttcattctatatcttcgtatttctctggatgattatttcattttgtaaaatatgtaagagttcccccccagccccttatctttttaaaaattaaaatggtcatgctcttctaaaaagatgacttaatttgaaggctttggagacatgaggatgatggggatccatcactccctgttctttgctccctttggactggagtgttggctgtctggaagagttttgcttgagctcgtgggttattttcttctatgtggaggaaccaagagactctttagcatctttcagcaagagcgaggtctgggtgtactcaccatctgtcttaattatccttgtgtataagaaaacattcccatcttttcccaattgccatttccttccttaacttttagaggccagaacctcatctgttgatgcagggagatctcacttctttaacctatttctagttgccttcagtcacagcggggtggccaggggcgagtcacttaagcctccccaaggctc

SEQ ID NO: 19974 - DNA, 1040 bp, Homo sapiens
cccccagaccccttggggcatcccctgtatgtgggtccctttcacttcatgtccactgggtggaatttaccaggtattgctgggaacggggaacaagatcatgattataagtggatcctggacaggggatggagtgcgtgtgaatgttagtgtgtagaggacggaaagggaaggagagaaggggtggccaggaggagggaaatagcagtagattacattgactaattatagggaaaaagccatatttgctgctccattaagtgatcactaggctatgaagcagtttattgtaattaatgcagaaacagcaagtaagtgtttgagtttggagtggagggtcttcaggaccccctccctccttcagttctctgtgctcactgtctccctcccctccctcaaattcattatccttggagagaaagagtcttgggggagcatctctttgggaagggctgtttagcacagtcttggaccagttttctactggtttattttgacaaagaaggaagatcttttacctgacctccttcagaagattctgtaggggtttttatgttttctaaggctgaaggaggagggacaaacccatgtcatcattgctattcttgccacaatcattttaatttcagcacatgaaagtggcaggttacacatccaagtccatcgagttatgggccgtgtggagttgtgattgctttccttgatgatttcttgttcaaatcagcagtgctcttaattttccagatgaagtaaaaagaaaattggagactcccctcccgcctggcgtctcttcatccaaggttttctgagcatgactctgatttggagggttaatattaattaggagccagtttagacctcagttgcttgatgaggtagcttcaactgttgtcacgaatgtggctcctttttgcttgtgcctgcttttggtgaaagtttctgggtttaaaagccaaaggaagaaatatgcagagaaagatagaggaggggacaattactaaagaagtgcaaagcattctcttagaacttgagggaggaac

SEQ ID NO: 19975 - DNA, 1031 bp, Homo sapiens
agtaggtgttttgaattctgtgggatggaactgaatgtttaaaaacagttacaggaacgtctccccaagtaggtattcctgagaatttctgtgtacatggaactctattttcttagcaagcatcattatatttttagaaatgttttcttttctccttgcccgtcagttagccaagcctcctaccactcactttctgttgtgtagttctgattttccgaacaggtgtttagatgatgaggggttatattaagaaagtactaaagaatacgtcttatcacgtgaatcagtatctttttattcaacatggatggagtgggagtggagaccaatctgttttatattcctgcaatctgatgagggtaagaaaaagttcatgctgttcatattagctagccagcctctttctgtctttccctcccttccttctttcttctttattttttctttctttcttttgtctaatacctaattccttatctcatttttgggattttgagagaataattttcatgtggggcgacagaactagtggttgtagtttcacttgtttttttgacattaaggaaacaacaaatagtctttttttttttttcctcagactgagcacacattttaagtgttttagggggaagctctgaaggcagtttgtggtgatttttaaaaaaatgtttttaaagctttagtctctcctggaagctttgtgtgtccctgcattttcctcgacggtcgctaataagaactgctggtctaaatcagtgtctctgagagtcattgattcactaattgctcatcatcgagtcctggcttccccctcctgctgagagcacttttgttttctgctattctgcaaggacttggacagatttctggagtgtttaagaggtaaccaataaaagagtttggcgtgcccctgttggtaattgtgcttctcggaggtgaccacgtcattggtatccgggctccataaacaaggggctgccttaccagtgacctttcccgcctaaaaccgaaggccccaaggtcgcttgtct

SEQ ID NO: 19976 - DNA, 1040 bp, Homo sapiens
tcgttaggactgggggcagcagcagatgagggaagacttgtctcctctggcccatggagtgtccctgtttttcagctcagccagcatcccatactcaattctgccggcgagagctgtgggcctgttttgcaggttgtgtcgtttcagcgggtaactggtatgtgtgtgcatgcgtgcaaaagaaaacatcaaaatgtttggggagtgttttaggaaaatagcaaggagcagattgccaagattcgcttatatgtttctttttctttccttttcgctgtgtacatgtgtgatcagcatcccggagtgttctgaaatacagctttggctttcttaccccaactattcttccgtatagcagagaggatacaattcaccaccaataataccgagcaataaataacccagagaagatgaatagccttgtgtggtggtaaattaaagttgatttattgcacataatatatacaggtgctcctaatgtaattaagcagcgaggcttttaatgttgcagaatctgaaagaagacccaagaaaattgggtcttaataaggcttattgaaataacagctaaacatgctgcttagtaccattaggggatgctgaaagatggatcgactctgctgctttttcttatgtgtggagatgacacacctgacctgttgtcagcaggtcccgcacttgaattgttttctctacggtaggactggattgttttgagctgtcaatataccctggccttgtcctgcttgtggccagaagtttaagtggctgcctattgaataggttttttttgagtgaaggacgggggagctggaactgaagaccccactgtctacagccataccaccctgaatgtgcccgatctcatctgaagaccccagcctcattctcccccgccattctaactaaccaggccaggcaggagaggatttgttcatggagtgaactcactgattgagcctttaccatgggcagagtgctgtgctggagattgggagtcagggatggaaacaaaagctagacagtccccctcctcagga

SEQ ID NO: 19977 - DNA, 1034 bp, Homo sapiens
gtattgggttttctctcttctcctgaaaggctcttgttgacagcagacagcttctcagagcctctggtcaccgacctgttcttcccttcctttctcctgtgctgttttcaagacagaaagcccagctgtggcaactgcaggtctttggattagtttgacacctggggggttcccaggtgaaaatgagggctgcagggcagggagcaaagcccacttgggagttatgtgttgtgttggtgagaaacaggttgagaaagaagcagctgctgagaataatctagtgtatattggggcggggagcatattggtggggggagagggactgtgttggtcgtgagtgaccctgagtgatgggtaccgggggttcattctctcaatctcatgacttttgtgaaagtttgcaaaggtcagaagccagaaagaaagatcaaaagccaaaaagaaagggagcagctgaccccaagattcccacccccaaggcattacccccttgaatcaggtgtaggtctgtttcctcatctgttccacacagattgagtctacaaagacccaggtctcatatcctgcaggaaagtggagaagaaaaaatgtgagactgattttttttcagagttttgactgagagagtccgttttcccatggacttctggacatccatgcctgagaagcaccttgggttttccctgctcccaagtcggactgagctcagggaatctccagggaaatgcgggggtccgctgggcacttgggccctcccaaagatccaggttccccattccagtggaagcctttgccctcctgtccctgcagcctccttggttggtgccgcctccctgggacaggtgctcctgcgtccctggcagggccaggattgggctccagagggcctgcatctgcctgtgctgcgctgccaagctccgtggaggagcagttgcctaggtcagcgtcctgtggcctcaccaggggagacttgtcttagttgccaggatgggcagagaagaggggatggagcagacacactgtctgccgctgtg

SEQ ID NO: 19978 - DNA, 1024 bp, Homo sapiens
cgctgttgtaggcactggggatggagcagtgaacttaacaaaatgctgagatgtgtgtatagtagtcaattagcgataagtgctgtgactgaataaaacagtaaaggcatggagactgaaacggggtgaaacggggagtgttattttaggtaggattgtcagacaaggcccttgtgagtgctcttcagggacagtgctccaggttgggagcacagtgatggcaaaggcctagaggcagaagctggcatgtgtgaggagtagcagggaggtccaggtagactatttggggctagtggaaggagctgaggctggacagacaggaagatcagatcctgtaagactctcataaggacttgggcatttattcggtgtgcaaggggaagccacagtggggttctgagcagagaggacttcagagcagagtttgacaagagaggacttctgtgtaggaggcccaccagttactgcatggcatagaaacagcagagggcacgggtaacggtgaagagggcaggtgggagctgctgcacttatccaagggccagggtggtggtgaggacggtggtgagaagtggttagattccagctatgtcttgaaggttgagctatgggatctgctgaagactgggatgtaggaagttctgggaaaggactattaagagtaaggccaaggcttttggcctgagcaaataaaagccttttcctatgatgggagaagactgtgaggaatagctttggaggtgaaagtcagcgtttggaaacctttccacattcccagttttcttcttctcttactcgttttctttgggaaagagttggaggaatgactccatctactttactgcttcttttttcggggtaatacaggacttgaatagtagttaaatcacctgtgttaccaatggtctttaaaccaaaactgcattactcaatcaggaaatatatacaggtaacctgcctttccttcattctgagacttatttcttgttcataatgcttgtgaaatctgaatgcatttaaataa

SEQ ID NO: 19979 - DNA, 1025 bp, Homo sapiens
aagatgatatgttgctagggcccagccctagcaacgtatcatcttttgaggagtgttcctcatactttgagattggttttatagagggctgttccttatactttgcgattggttttatagagggcaactctgttcacccacaaaagtctcttgatgccattgctggccagaacttgggtgggagaatgggaactgttcagcagagcaggtgaacaggtggtcctgccatcccagtggcaggggccccttcctttctcccgccactcccggaggaatgaccctgcatcttatgcactctctccgattccccaaatcccctaggtcccactgcttgggtttggggagtggggcacatctctgctgagagccagcccatcaagctgtctgggtctcatggtggcatatctttgttccaactcaatatgggcattttaatctttatttatttttaaaatttaattttattgaattcagctttaatattattgaattcagctacaagggagatagaatagggtgattgatagttaagagcatgggtcttaaagtcagaaagacaaaggctccaagtccagttaccaacttctgtaattctgtaattctggggggcggacttacctgtctgagtcttagtttcttcaactataaaatggatgtcccagtactgcctccctgccaaggttgtctgagtgagtcctcaataaaagctggtagtgagattaatagcacttgatggcaaagtttgtacccagtcatgggtaggggaattgcatctgccatccagtggctgaggtcaagtgatgacaccccaaactataggatcctggcagctacagcaggcattgctgcttccctttcggaaatcccaattgttgaggccctggctgaagccctgtcgagcccttggtgaccccactaccatttcctttatggttggcttactctgctttcttttgcaatgaatatagtttaaaatttctttatgagtgttctcctatttgctgccttagcctgtcacccactat

SEQ ID NO: 19980 - DNA, 1029 bp, Homo sapiens
ccaaatgtccattgatacacgaatggataaacaaaatgtgatagacatatgattaaatagtattcagccttgaaaaggaaggcaattccgatagatgctacaatgtggatggaccttgaagacgtgctaagtgaaatcagcctgttacaaaaggagattatggctcctcctatatgaggttcctagagcagtcaaatccatagagctccccaccccttatgacatcactcagcaactttatttattaggtcacaagggggtggggagctctgtgacaaaaagagctctgtgacagaaagagtggcgattttatgttatggatattttaccactgtaaaaacataataggctgggcatggtagctcacgtctataatcccagccctttgggaggctgaagtgggcagatcacttgaggtcaggagttcgagaccagcatggccaacacggagaaaccctgtctctactaaaaagtaaagaaattagctgggtgtggtggcgcacgcctgtaatcccagctactcaggaggctgagggatgagaattgcttgagcctgggaggcaggggttgtagtgagccgaattggcaccactgcactccagcctgggcaacagagtgagattctgtctgaaacaacaacagcagcagcaacaacaacaacaacaaacaacaacaacaacaacaaacaacaacaacaacaaaacataataaatgaaggctgatgggaagccttatgtgggtggggttaatgtctctcttaagccagacaggtgagaactgccctctagatgtcctttgaaaatatagcactgcccaggctggtctgtcaatattagccagctaacgtggtccttaggtcccaggccacttcccaggtaaggggctccatccccgtgctgacctgcattttccttctaggtggggatttcaggtctagaagcagctcccacctgaaacctatgttcttggttgctttatgtgataattattgtgttctattttaagccactcctctgagtttggtaaccg

SEQ ID NO: 19981 - DNA, 1037 bp, Homo sapiens
tgctttgctctactgatggttggtagcattgtttacctctggtggtgggaatgacagggtgctgtttgtaccattttcggttcttttgttgagagtgacgtcacagttgtcctgcagcaagccagggttatgccaccctgtcagctatgccagaatggcagcaggtgtcactggacacataccattccttctttacaccatctatcaacctacagtggggaaaggggcaagaatacagcataatgagaggggcagccagttgtagctcggggaccttggattctaagcagcatgaccttgggaagggtcttgagtctttgagcctgtttgtcctcttaggaataaagcaggttggacagaccttacttaataggcatgcttaaatctgccagggaaagggaccctcctgttgatgaataattcattctggttttgttcctagaaagtattccatggggcacacactttctcagctgctcttggttttgcaaaggaagatactgacatgttcagattaagaaatcgtaaagcttctgaactactaaggaagggaaaagaggggcccagggcccacatgtgtgccaggtgctgatctgagggttttttgtgactcatctcatttaatggtcacgctgttcctgtgagtaaaagctgtcatcccattttatagatgaagaaacagaggcacagagaggttaccttaatttgcccaaggtcacacagaatcctggtgttcaggcctcatgccttctgttcttaactccatatcctgtgtccctgggaaaggaaggggccatagtctggagtggtttccaggagaaaagagccagagtaatctctgctcttcatttcttaacaagaatagaagacagaataaagggcacagggataaaggattgttaaccagactggcaaatcagtagactaattaaaaatcaaacaccttaaaacactgtcgctgggttaattgtaaaccaacaatgaaacgttaaaatttgcccagcccatgagtttgaatgattaactgagtgagttaa

SEQ ID NO: 19982 - DNA, 1049 bp, Homo sapiens
aggctgctgtcccatctgtggcctctgttgctctctcatgttcttttctgcccagagaccaggtctgggggtgttatcaggagttagtcctaagactggaatgagactcctgggattcaatgatggccagttgaccacaagatgtttctgttaggttttaagttgagattctgctacgcctgctttgatggctaggtaacactcctcagcaccaggtgatggatttaacctctgtgagctgtgtttctaacctgactgggcccagggatcatgctgggaaagttatggaccctttacccagagacttgcgctacaacacagccacatacagctttgcactgagggtcaggatgcacagatccctggtgctcagacatgaatggccttattagagtgaagaaaccctgtgttgaagtcaccaaacagctggactttaaatgttaatgttaatatttcactgtgacttatatagcattttattttttccagagttccttacaagacaatctgatttgatccgcaggagaatcctgtaaggtcaattatatagtcgctcttttatatatgacgcatgcagtaggctcagtatcttccctgagtgttgctgttttcttgttaatttgctaaatgggcttttaaaaaggagataaatgtaaatttcagccccgtaaaatagatacatctcaaatgctcgtgactcaaattaattaattaaaaaacagaataaaacaccactccagccacaaaacatggcaaggttgtaatgtttattccattcagccagttgatggggtaaaattacgagattggtctgtgataaaaatgtttttaactccaacttagacgtttacagaaaggagagacttgggcagtttgtttatttagaacattgattactgcttctgccatgttcctccaatcacaaacacttgggaaaattttggaaaactgcaagaactaagtaaaaatccccccaacgccactatttaccattcagagataactgctatgaacatttcggtacatttttttctgtcctttttcatggc

SEQ ID NO: 19983 - DNA, 1023 bp, Homo sapiens
tctgtagtctcggccattccttctaacatggtttctcagcctgtctgtgatgtttcccaaatgtcatagtgaaggactcagaggttccccaagatgatagatcgggggtggctatttacttctgtttacagggaactttgacatgctcaacttttgtgtagaaaccattttccctggtagttgctacccagataaatggaaatgttttgggaaaagagcaatttgggagctctgagcttgtcaccaaggttgtgtgttcctaaatcctgcagcctgtacttgggctggtttcttttaccctgagcacagccggtgtgaagagcctcaggcatttctcagcgtgggaataggcactgaggagattccagccaggaggagaagctgggagaaaggttgcgctggaggagacagaacccttgtgtggatggtgttctcagggttacgatttcacatttgttgtttcagcttgtgttatttcagccagtgtcctaggcctgttttatagaacggagaacgtgaggctcggaactgttaggagacttgacccaacctcatctgagaaaccagggtcagttatttagcatgtctcagtttacataggtgtgcttgaaaatgggaacttcctattattgttgtatttgcatcatttctgtaggcagaatgaccttgggcctgtgctttagtcatgggaccctgagaccatcgtgccaccatttctagggccctacccctcaccgtgagtcatctgtgcatcttcagaagaattccaccctgggtgggcaactcgggctcccactgctggagtgacaggcacagatggaaagactgagttcataccaaccccaccatcctgtctggctctttctttcccacctctttctgaggtttattaagaatctgctttggctgcctttctcatgctggggctttagaggggcctcttttgtatgcagaaatgcacgacttcctcgcagattcaaaaacagtgaaggtttcttacttaattttgcttaataccactgt

SEQ ID NO: 19984 - DNA, 1029 bp, Homo sapiens
acacccatgcatgtgcatatacatgtgtgtgcaccctcacgtgtccatagaaaccttgcatagtattgatgggaattcgaggacctccatttagtcccactgaaagtcaggacacaacatcccagccccatccccttcctgccctcctcagtagccatggagatggcaaggaaaccgagagaagaatgtgtgactctagggttctctgcctctcgtgtccctcaccagaatgcaaattgtggagcaggccacagtccatttggcagtcatgctggcagcattctcaaagtaaatcacttccatttcccccagcatgcccctggcgggagaggtcactgtgcacagccctgtcgcccccatagctgtgcccccttctcctaaagccgagacactggtgagcagctaaccaagggttgcccatgtttccactggccttttcacgtttggaaggttttgattaaaacagtttctttcagtgtttgctgaggagtgggatccatcactgtatctgagctggtccctggagaggatgttttagtaacttggacactttggtgcattgtctgggacctggaatttctcatccttttttaaaaaaaggtgttttaaaggccttttggggactgtgtagatttatagctgaatggctgcctctgtgtttagggctctggctaggcaggtttatggctataaggcaacggtggagggtgtatgaagagatattttcatttcaccagttattggggaatgaacaatctgttgacttctgttatttggaatgaagacatgttgtttgttgaattctctgggaccacatgaacgtttggaatatagacagggctgctgtatacccgcccgactctaaacagtgtataaatgagaccatggggttcagattatagtatggctctccagagtttcttcaaattgagaactctactagtgtatgttggtagatcacgttagtgtttctttacagacatttaattacttggctggggtaagggaaaaaaaggaatgaaaaatcta

SEQ ID NO: 19985 - DNA, 2378 bp, Homo sapiens
tgcatctttgagtaattgtggacatcgcgtgggagcccaggtctgggacagtctcctcctgacaggtttgggtcttccctgctgaagggctgacatgggagagagctgctgaggcgtcctgagaagacacagtgcccgtgctaagctccatcacttgtttcctcccacgatgggtgtcgtgcttgccatgggtacaaaggcacagccacccactggccaggctgaaggttctgtgctgttggtttgcccagggtgataggcagctatgaccctgtccccaggtgtgtctgtttgtgaactactgtctgggatgagggccatgacctttattcagcctcaaaatggagatgttcttgtctctggtattaatttctgcctggataggagaccgtgcaacaaagagaagccagcctcctccagcccagccttgcattctgagtggctctgagctgcccttccaggttggttttgaaaaggcctcccccatggccctttctggtattgtcagctggggatggattcattctggctgggtctaaagaatagccaagtgtgttgatgactgtgtacgttatagcacttctctcttccagactgatgtaaagcagtaagggggatttgtccatcacccagccccaccctgcctagggagagggattggaaataattaaatgagacaggtccggcttgcataatggaaagctctggagggtgagccctctttgctatctttctgcttttaaaacaagtccaggggtagtgtttgcaaacatgaagtgggatttctttttcgagccataacctgccttggaatctcatgggcctatttgtgtcagaaaagtcggtgctgcccagatgggcttttagagtattccagacaggcttctacttgccaacacatagcacatctctgcacgtccccaacccttggtttctttctgtctctctctctctctttcttcctttctgtatttctgtttctctctctgttgtttttcattaacacttatcattgtgacccagtatgcctccagtaagacacactgcaagctttggccatgcccacagtggccaccattgctgcccttagaacagttgtccttttgtctgagaagcagtcacaaaccatcttccctggcatggcactcgctgggtctgaagctgcccagttaattttgcagtaatgtttgtggactctggcaggatgtgcagacttatcaagtgttttattaaaagaccaaagaggcttttgaatgtatcaaagccataatgctcttcaatgctcatattttagtagcttttttttcatacataggttctgtgcattatttgtgtctgtctgcagaatggcttatttctcatttggctggtggcttgtgttactgtgtgtgtccccttgggcaggactcaccacctctcaggattctggcataacttatttgaatccagaatgatcaaagtcagggagactctgctgctgggccttgggagcactacaatgattaaatccagtggttgtgaaaggaggtaacaggtaaattgacagactgcctctccccttcggtactttatactctggttgaaggaaacagaatgaatgtgcacacacacacacacacacacacacacacacttgcatgaagtatattcacacacatgtgtacaccccctgtgcacacacatttctaactgtatgaaattgtttttgactctctttaaccaactgcaatttaatgaggtgtatgcgagtgcaaagtgtgggatactaggccaggccatttactcacattatctcatttaatttttctctggggggctggtagtggtattctccatgttgtagactgttaagtggggtcttgatgggattgtctcttggactcaaggtcacagctctccaggaggtagagctgggtgtggactccccctccaggcttgtctgataacagcatctgaactctgcaccctgtgccaactgctgatcagtccccaagatggactgacgatgggcaagatgcaaaggacaggaagatattgtgcccttcagtgtgccccggagtgctggggacctggacattcatcacctcattttacctgtgcagcagatattggtatcctccagtctatttggcgaaggtagacagtcagggccagggaggctgagtgtcagcagaggtcacccaggtaagacagtgtaagagccagaattcataccctacttccttttcctccaagtctagaactttcctttcacagcttccatgcaaggtgtaccactctctttttaggtctccttgccgtcattcctctctcctctccctcatcccatcctgcccgaggtggcagcttctccaactgtttatttcaggtggcaatca

SEQ ID NO: 19986 - DNA, 1119 bp, Homo sapiens
atttgtaaggatggaactccctgcaatgtcttgaggttgttagcgtgtgaccatgagtactagtacacagtgcccattcattggaaattctgtagccaccgaagaaaactcacctcaaagtgaagtgatgctcttttgatggtaaacaccattgttttgctgcacagtaattaggcatgaatggcaaacagttcacatcagtgattgtaattaattagtataaacattttttttttccagccaaatctcagtccgccttctttctcttatcatgtggttgtctggtgttggtaatcagtgtccacactgcccctggggcaagttccttgaaggcaggaatggcagtttcttctttgtaccccctgccccactcctggtctggcaaatgggggctcaggaagtgctggtgctgcaggacagctgttccttcattcactcaaaagttctcgttaatatgcatgcctctaaagcaatggccttattttcattggatttatttttcttgttcttgctcttcacctctcattttcccatatgagagactccggggctgcactcaacagattctgtctgtctgtcttcttctcaaggctggagatctctaagcacccacttttccctggcccatgtgctggtggccctgagtttctagacttagcttgccctctgacccaaggatggtggcccaagttggcagaggtggtgggaggaagcaaggctgtggtggtggttgggtggaggaatcagagcatagggggtcctctgaccatgaagatgaaggagttttcactgtttatagaatctgcattggctgtcctgcccgcctcttcttcctgaatttggcactggttatgattttaggagcacggagaagactcctccaagaattagaaacaaacaaattccatttcctctctctttggctgtaaagcctttaactgaggaccacgtgttttattccacaattgggtgaaatgccctcagttgctgaaacccattccatgtcagatggtatctcctgcccattcattgtgaccctcccgttttgaagaatttatccctccaggcccagtttttctgtaactggcacagattcacaggtgggagcccaggcaggct

SEQ ID NO: 19987 - DNA, 1025 bp, Homo sapiens
tggcccagaagaaactggagctggtgtccctctttccgtgccttgtcccactgcctccttatggaggaggctgtattcctgggctcatagccattctcaggtttctgcggtgtgcatttctctagtggttcccagcattggggttgggtttttaggtggacgcagtcacatgtgggcatttgaagggctgccctctctggaatcaggcagtctgtccttgggatgagatgctagctggccctttggcttcttccttagagatgtttatgctcatggcctcggccactctccctcttcctccaggtttccgccggcagcccaggcctctccctgtctgactcccccactccctttctgctgggcatttccatttgaatgttccaggctcatctcaccttcgccctcctcacactgacctcactgactccagtctggtctcctgccctgagtccctgtctaggagaagaatggcgtttctgacagctcttcctgactcactcgttgagaccgatgcttatctgctaagcgattcctgtgttcactccttctctcttctgtctgctgtccccatcacaagcaagactgaaccccttctgcttcctgatgtgattccttgtcacggtccctcttgctccaacctgtgttgccctttgctaccagacgcgacttcctgaaatcctgttttcagcagacgatcctctgttcccaacttgcagtggctccctacttcctgccacagtgaatctacagtcctctcaactcagttcacgtccgtgggcccttccagagtgacaggcaccatgatcagtgctgccacctccctttcgagaaaggatttgagacctgtgtggaacaactcggaaagggaggctcagacactgcaggcggcttctctaaggtgacacgccaagttgttgggtgtactgggttgaatggtgttctctcccaaattcgtgttcacctggaacctcagaatgtgaccttatttgtaaatagggtctttgcagatataattaggtaacatg

SEQ ID NO: 19988 - DNA, 1034 bp, Homo sapiens
gggaaaatcaatttaatttctgtggctccgtgacaaggaggggtggcaagcaggaaggtcaggcctgttttgaaagccacagttcagttaagaaaataaaacactccctctaaggaatttttaaaaatacagtattttaggagggggaaaatggaagtgggtcaagatgagggatttagtcggaggagcagagcagacccatggcaatcccagtctgaccggagcctagggcctgagggttgcaggtctcccataggaattttttttttttttgagactgcgtttgtttcattcttgttgcccaggctggagtgcaatggcgcaggttgctcactgcaacccccgcctcctggattcaagcaattgtcctgcctcagcctcccaagtagctaggattacaggcacctgccaccacgcccggctatttgttttgcatttttagtagaaatggagtttcaccatgttggccaggctggtctcaaactcctgacctcaggtgatccgcagaggcataagccaccatgcccggcctaggaattttgttgtatgtctgttgagttgagttgctcaggacttgttgcagtaggggacactttcattaggtttctgtttcccgaggcatgatttaaggcacatttctccgtccctctggttgatgctggggaaggcttggcttctggcagtttttgattgctcagatcaagcctatgtgattcatgggattttacaggttggaggctgagaggtatttgtaggtctggatgaggatttgcactcaacctggttgtggcatgtcgtagtcaaactatggcctcacctgatttagaggacgaggaggactctgcagaaagcacttccttggctgttggtagagattagatatttgcgggcagagagttgggtcaacccaagccttcatcaacatcccacagggacctcccttgaggtgactttcattcattagatggaggatggcattgcaggtcctgtgccaggcactggggagataggctttgtctttttttttttttttt

SEQ ID NO: 19989 - DNA, 1030 bp, Homo sapiens
gctgctcaggaggctgaggccggagaatggcgtgaaactgggaggcggagcttgcagtgagccaagattgcgccactgcactccagcctgggcaacagagcgagactctatctcaaaaaaaaaaaaaaaaaacaagcagtggctggcacattgtactcaaacgcaatacatgtagcatttattgttgttactactgaaagttgtgggactgacatctcttgaagaagagatagcaagaatcctggcttctgagaggatcctcaggcacacagcacactgcttgctgaggtcttgagctgtcatcagtgccgggggatgcagtcggtgtggtagagtggctgcccagaacgcgggtctcttgggcctcatccgggcatcctgtgagctctgttgtaaagagcagctgaggatggcgagcgctggggagatgctgtagggggcccgagaggagtcattagctgacctctctctccttgagacagaatcttttcccttctgcttttgttcttataactgaccctctgacagtttttcctcccttgaaagcagaggccttgagtctcctccagctgtcagtttgcgtgttcccctgggcataaactccaacacaggctgcccgataccagctctcaccttcgtttctgccctggagaaaggctgctttcaagttggtaaaagcctcaggagaccatggctggctccaagagcctctttgtgctctgaaatccagaacagccctggccttgttggctcagaggagccttccagaaaaacagaagtcctcgacttctgcctcatcttctagctcctgttcttttctattttaaagcccttaagaaaggaggtgcgaagtccatggtctgtaagcataaaggatttttaaactaaacaagaaaaccaattatttttcttaactgctttagtccttcaaatctttcactgtaatggagatttagaacccatcacagttgggctattatttctgtgtaaacagtgtcatgccctattgcaccaagcaaacagtcaattt

SEQ ID NO: 19990 - DNA, 1048 bp, Homo sapiens
aacgcagagcacaattagaatacagttatatatcctcatagttattgaagcttggattaacatgacataaagttttgtctagggagtcttttgctatggctcagggagcattttttgtgacagtaataggctacagttaatatacttgaatgatactagaatctgtgttataaggcagaacaaaaggggtttatctgaagctgaattacaaaggtggaattatcactgcgaatgatccacagagatctggggcttaattattgtcgcttgtgtcatttcggcataatatgggtagttactggagcagagtagaagtgcgggagggccagcctgtcaatcacccggtggatgccaggattcccaccccttacacttagcgccacgccagccgtgtgccctacagagccacaggaatggatccctttggccatctgtggctatgtggtactttcagttttcttaatgttttaatgactcccctgtcctacctccagcccaatccccctctccccacttaggtcctttgccctcttggccctgtcgaaccttccaggaggctgatgaacggtctcatacactgatggcattttctcagcccggtgaggccgccaccaccttccagagcctaattgttttgacaagcgaaggaggcaagctaatgtgctctgtcagccatttggtcacatttggtcaaagccaggtgtctggctgcaaataggtgcactcaggtaaaccacatccccgtgtgctccgggaggacagagcacgcaggaggcgggagtgttgcgggcagcccttccccatccctggctccagcgcattcattctcctcccaggctccagtcaagtctgagggtgaagggtgggaacaagacagttcagcacctgaacagggcagggcacccaagggcttttagaaatgctgttagatttatagggaccatcatcctcttcttactatttttattatcatttttcattatccacctgctaggtgtacaattacaacttgttttgttggtggctaaattcagctgtcctcctcacc

SEQ ID NO: 19991 - DNA, 1034 bp, Homo sapiens
tcaccagtctggcgtcatcttggttgcttgctttttgttttgttttgtttttgagacagagtttcactcttgtcgcccaggctggagtgcaatggtgtgatcttggctcactgcaacctccgcctcccgggttcaagtgactctcctgcctcagcctcctgagtagctgggattacacacatctgccaccatgcccggctaatttttgtatttttagtagagatggtgtttcaccatgttggccaggctggtctcgaacacctgacctcaggtgatgcacccacctcggcctcccaaagtgctgggattacaggcgtgagccaccatgcccagctggttgcttgctttttgctccttcttcaactccaaacccaaggcattgccaagcaaatgcagtccccccatgattaattcagttgtctctaccacatgacaccttcacaaggtcttttctgctttttcaaaactttcccatcctttacgattagtgtcattcctgaagatttttggccaaatggcagtttctccattccttctgttgtagcacctgattgtgccacaatcagtcactgcatttgcccattggtttaaatgtctgtttcagcttgcctcttcacctggggcatgggaggcagaaagggtgcatttttcatgtgtgctgggcctgccacgtatttgttgtcagtttgttcttaattgcgctgtttgtcacaccaccgttctgccccacgaggtttccccatctactccttcctctgtcttggtcccataggactttcagccttttgtgtggctgggttttctgcaggcctctttgggggctggtatggatggccttgggtggggagggtgcctgggcccctgaggccctcttgatgaggtgggatgttgtgaatggtggccccatccccagggagccctctcgtttcttcctaccctgatattttataacaagatgctcataagcctttggttccactggcgtgagctcctaaataatgttgcactcctcttgtttttttttttgtttgttt

SEQ ID NO: 19992 - DNA, 1049 bp, Homo sapiens
gatagtagtatacatgatatactaacctggaaattgtttgccatattgtaatgttacaggttaacaaaaggacaaattccatatactatatgatttaaactatattgaaatagtcatagttttttctttctttagaaaaaaaatactccaggcctggagcagtggctcacacctataatctcagcgctttgaaaggctgctgcaggaggatcacttgagcccaggagttcaagaccagtctgagcaacatagtgggaccctgtctctaaaaaaataaaataaaataactgggcatgatggtacatgcctgtagtcccagctactcaggaagctgaggcaggaggattgcttgagctcaggaggtcgagactgcagtgagccgtgatggtgccactgcactctagcctgggtgacagagtgagaccctgtctcaaaaaataaaaagcagacactaaagggaactatataaaatgttaactgtatacaacggtgtggagtggaaagaccactgtttttttttctttctacttttttgcattttcaaatattttttgataagcaactattacttctgtaatggaaactaccccctcaccccccgacatgcatataatgttttgtgtactttcttaaaattcctaaggcagcctgtattctatatttgttttgcaggtggaagatgcaatgctgatgtttgataaaactaccaacaggcacagaggtaagattaccccagtgtaagagggttgcgttcaccctctcctggcctctctgtctgtcatccccagtcccactgacaaaagatacagtgaagagtccagagtcaagcaggtagaggtgaccatccattgaagatctttattcacggagagtcccagtagcacaaagagttccagtactggatagctgaaaaaccatttccttctggcctaggaactcctgtttagttatgcagccatccctgacacacatattcagatgtacctctctaatcctgcctttctgggtcccttgctaacctcggcactaagcgatccaagtggaaatta

SEQ ID NO: 19993 - DNA, 1059 bp, Homo sapiens
cagaggcaaaggaacaggagacacggggagagaaataaagattagtgtgatggatgactcttctgccagcagttagcagttgcttattaaatgcaatgctaatggctttggagaggaataacagccctgagacccactggaagggggtgggatggttttgtgagccccagcgagcaccatcagtggcaggcctcttgaactaagagggtcctttcccagagtggctgtggtttatcccagttcctgggctggaaaggtgcagtggttggggatccagccagagggaggagcatccaggcaggtggccggagagcttgggttcttcctggagcttgctcagtctctgtcccgaaaagcagctggccaaagtttaaggtctttgtaatttgcgtaatcggtttatttattaaaatggtgccagtaagatgtaacttaagctgtgatagaagataatgcttttctaaggaggaagaacagcccttaatgttttgaatacctgccagacactcacttttgaaattgacctctgaagtccagattgactcttttatgtacgatgtataaagatgcctaagaattgcactgtcattatttgtttattggtgtctattactcaaaaaaaaaaagagggcatagaaaaaagtttcacaaaggtgtaggttacattttaaaataatttaaagcattgcttcacttgtaggtgtgggatgtcagacataatgtatgcatgtccttcctaatgagagtctaacattctgactttatttacctagggaagaacgttgggactgtataagctgtacatgtgactttgtaggatggaggaataagtgtatttgacaaaaacgatcagaccctctggccagaaagggcacagtccaagaagaagggttgttggagggagtagaaagtatgataaggatgtgtagaatcacagctggtgatgacacttttgctgatgtgacaggagggcagcctgcaaaagattggctcccacgctgccctcgtttggggtctggagcaggatttgctgcctgtcttccctgctggcattttacc

SEQ ID NO: 19994 - DNA, 1200 bp, Homo sapiens
gagatacagagacggagggaatctttttattatatactcatttactttttgaattttttttttttttttgagacggagtctggctctgttgcccaggctggagtgcagtggcgcaatcttggctcgctgcaatactttttgaatttttgtaccttatgcacttattacctattcatttacttctttagtgtgagcttttaaaatttattccaatttgaattgtcaatgcagtgatagaacaacgtgaaagagactttttgaaagaaagaaaatttaccagccgggcacagtggctcacggctgtaatcccagcactttcggaggccaaggtgggcagatcacttgaggtcaggagttcaagaccagcctagccaacagggtgaaaccccatctctactgaaaatacaaaaattagccaggaacggtggcacgtgcctgtaatcccagctactcaggaggctgaggcaggaaaattgcttgaacctggagacagaggttgctttttgtttccataaacagatgatctgatggatagatgaggattttcttagtagtttctgctcttcccagacaacgtgctattattagaatagccagactggccctggtctgaaaagaagcctggtttgcgccagttcatccaagaccagaggggaggagggccagaacagggaggtcctccatcccaggagctcaaagtgcttcgtaattcaagtttaaaaaaagttaaaagcatttttctaccccaagttatgactagtaaacacgtggggaccttacacagcgtggcaaatgcagaatcttcctctgcattcccattgtttatggcttaggagtcaaggcaacacccggttaatgatgcttgtgaagtgtctgggccatgtggcaaagggataagagcttaggtccagattcccactgcaggactcactttccagagcaaccactaatcaattgctgtgtgaccctggacaagttactaaatctctctgaacctcagttttctcatctattaaatggtgttaatgttattaactcatggacttgggaagtttaagtgagatagtttatctgtgtgaaacatctgatgcttggaaggctatctgtaaatgttaactttgtcattatcatattaattattgttattttactactaagaatactgtgactgtcattacttcgggaatggaggctcaggct

SEQ ID NO: 19995 - DNA, 1038 bp, Homo sapiens
gtggaccgtggggtgggcggtgagtgaattgaacagacaaagattctttgggcaaaggttatctgcgctgaagatgaaactcccatatgtcctttgctatgaattggaactgggtggatggatggaccagacagatggatagcagtgaaccagctaccatatttatagctaggagcacgtgcccttctcaactccagacatccccacccctgtatcccaccttgttctgttccagacacatcagagcagagccccctttagttgcagcagctatggcagccgactgcccaaagatggaaacttctgtgtgtgtgttttgtctagagatctccttttatccacaaagggcatcaccgatggggggaccagtaaatagagctgtctgaagtagcaggccgttgaaattctagtattgtgacttaatgaactcttgtctttaattcctatgacttggagaagacagccattctctccccataatggagctcgttaacccatctctgtactgactggtgcttttattattattatgacgactggagaacataagtctgaatgttagaataacaggtttcccaagtgcctggcagagaagggggtgtataatgatgatgatctttcgtgggaataacagcggccaccggcttatctggcgcaggcattattacatctgagtcgcctgaagtgccatttgtgaagacctggtatttattgtcctagattattggggtgggggagggtgaggcagcagaggggacacttatcatcccgtcagggctcgacagccgaggggcagctgctgggtgcgaaggccacagtcagcgggaggcccctgtgtgtaactggagattccggggcgattatgcccaatttatcacgcacctcatgaaaatacaatccaccaccaaaatgactgcttttggaaactgtcttgtctcttttgagccgagactggagacaaccagacaaggttcggtggtaatgaataaagaaacattactttctgaacacaatcttctgtcaccagtcacttttcaa

SEQ ID NO: 19996 - DNA, 1023 bp, Homo sapiens
tcattggcacttctgagagtggatgctgatctgtccatgtgttccctttgggtttccccaggatggccaggctgtagcctcccgctgtggggcagagtgaaaccccctgccccaggagaggtacatctgtgcttgaggctctggggcttcatgctcttgtcccacggccactgtgtcctgggcccttccatgttccaggtgcaatgctagttctggcagtactgcagggaacaaggcaggccaaatcccagccctcctgagctcatgttctgcggggagaaggaacatacatcacacgatttcaggtactgctgagggctaagaagaagagaaaatagggagctgttggcgagggggcctgggcctactctgtttaggtgggtagctgggagtggcctccctgaggaataggccttggacttgggaggcagagaactgtgagaaaggcattccaaggagcagataacagcaagtgtgcaggacctggcatgggaaggaactgattgatgtgttggtaggacaggtggagggctggggcctccaagagggacagtggtagagatgactgagagaggcagacaagcgctggatggtaaatgacttgtgagccaggcaaggcagatgggaaccctcaggaggaggtcagaagggcagaggcatatggctggtgctctagaaagatcccagtggctccctgaattaaggaaggacggggatgcatgtttggaagcagggtggccagtggaagtttattggagaagtgcagtggagagctgatggcgtcttgggtgagggttgtacagtggaggtggggagaggcagtgggatttaaaatttatatttggagacaagttatggtagattctgatggattggaaatgggttatgaggtgaggggagagagaaaaattagagtgaactctaggttcttgggttgagctcttgagggatggtagtgctattcaatagtatggggactgctttggtggaaggaacacattttaagaagaaaatcagttgttc

SEQ ID NO: 19997 - DNA, 1052 bp, Homo sapiens
gaaaattaacattccctcccttgccatcaattaatttctgccctcttgatcagctgcttccttccctctctttggctctttaaagttcctttttctgccacagcagcctcaagaggaagggaggttggattactggaagtttgggaagtcgtgtaggcctcccagatcagtggccaccagagggtgccatatcatgcatagcatttgcacactcacaaactcctttcttcggattgagtaggagggtgagaattcccttctttgttggttccagaaaaatagaagctcagcaggtgtttctggaaccagtcctttggagcaaaaacattttggttggccacgagagcctccagcctcaagagaagagggagggcaaatctgtgtttcaattgcagctgtaactttaatattttcttccttttgtcaaaacatttcttgcttctaaaacatgcgttcagacatgcattgtatattggtctgatatgtgttcaccaactttaaattcaataatagagcttttagtgtggataagatcaaagcaatctgcttagcatgtggcgctacaggcctgattcaatatttgacttgctaattttttcccagggcactaaaataatattgttcgtattgttccttgccatcatatgcatctgaaatgaaaatactctttttttgcgtactgtatgttggaggcatcaactcagacattaaaatggtaggagggagataagtgtgacagaataacacaggtcccctcataggctttctcagctccccagatgtccgtgcaagtttacagttggtacttttctcttggtaggttactacttgctattttttttttttaattgagacagagtcttgctttgttgccctggctggaatgcagtggcacgatctcggctcactgcaacctccgcctcccgggctcaagcaattctcctgcctcagcctcccaagtagctgggactacaggcatgtgccagcacacccagctaatttttgtatttttagtagagacggggtttcaccatgttggccaggctgatctc

SEQ ID NO: 19998 - DNA, 1048 bp, Homo sapiens
cctggtcctcaggcccctcctgtgtcctgcgaagggcctgtcctggagacagcctgtgccctccgtcaccacagccttaggctcaggccaccaggatgtttctttggcctctggcagccccagctggggtgcccctagtccacccaacacatgcacaacacacatgtactcaacacacacatctacatatacccaacacatgtacacaatacgtacactcaatatacaacacacacacccaatacatacatacactcaacacacacatccacatacacccaacacaggtacacaatacgtacactcaacaaacacaacacacacaacacatacatacactcaacacacatccacatacgcccaacacatatacacaacacataacacacatgtactcaacacacacatccatacacccaacacatgtacacaacacattcaatacacacacacacacatccaatacatacactcaacacacacatccacatacacccaacacacatacacccaacaaacacacattacacacatacacctgacacacatacacttaacacatacccaacacacatacacttaacacatacacacccaacacacacaccccttgtatctgtgcttgcccatctcccgcaagcccagccaccaagaagaggcctggccctgggaactcagtatcaggggcctgtctgccaggtcatatggaaaatgtatttggcgggtgaggggtgactggtgaggctggatggcctaatggaacaggagggggatggcgaggagcagcagaagggggccaggaggacggctgtgcaggatgctggtgcaagctccatcccttccctaccaggaggctcccaaggggctaggccaggttttggcaaggccctggtgtttcagatgtagggcacagaggcagtggggtggcgactatggagctgctgcccgtgctgtgtgagggacagattgggcagccctgctccttcagcccctcttctcacaccctccctctccagggtggagatgaaattccagccctcagcagtgt

SEQ ID NO: 19999 - DNA, 1325 bp, Homo sapiens
acaaaagttccagagcctccctcgaaggttctctactactgtattctgtacataatgtaccatcccatgtggaatctgtgagtgtcctcttaagtagcgtgggctagccaatctgccgttcatggtgtattgtaaactccgaattccatatgtaataggatgcaagtctaagcgtttcatgtggacataaatgtatctaaataaaactttccctagcactgtggctgacctcacccttacttttatactttagtatgaaactgatgagaactttggtagtgagtattttttttatatatatacatatatatgtactatctatatatatatctcaagcatctttcaggtctttgtgtgtggctttcttaaagccctgttgtaaaaaattactatgtggatggcagtctctcacatcacagatgtggaaagtataattttatatttgtattttcaaataaataagtttgtgaaaggtttccatcctctactgtggtccagaaatcaatgtgtttgtctgacaaaaaaaaaaataaaataaaataaactgttttgaacagagttgtttggtgttctttcacttgcagaggaggtctggggtctgggagagctgttgttttgcttgggcgggagaggatatcatcaaatcgcacctgccaccctcacccctcagcatgaatgctggccgtgggcctccagcagcgaagaagtccctgccttgtccccagggagcttgtggcaccatttttatgaagtggcaagagagcactaagatggaagagcagacgggagaggggtgtagattaacagcagaaggtacacagaacccatgagtggacagggaataaaccccaaaggtcctgcggatcagaggacccagatggtggaaggagctaaggggccctcccgggtgctgccctcagttatcaacagtgctgggagaaggcgccaaaccgcattccacgacccctgagtaggggtctgaataggtatcagacctctgccctcaaggagttttaagttttgcctactggaaatcattacaatcacaaaactaaagatgtagagatagatcatctacaatactttccacccctctctctaccaaacaaacgagaggatacaaaagaattgagacccagtacattgagggcaagtcccaatacctggtgatgacggctacagcatgctctgaatcagtggattcctcagctttgaagccctggagagaaacaccaggccaagaggagtgcaagggatgaagcgtggatgaaggacagtggcccttagctgcttcctcaaggcccccaggaaagctgtattctcca

SEQ ID NO: 20000 - DNA, 1018 bp, Homo sapiens
ggaagagtgaaaaaaatcaggaggagctccttgagaaaccagctggcaacatgtctcttacgaagagtacatgaaaacatggagacattttataacaaggctggaaacagcagttacactaacatttgtatatgctagaatttcaaccattggctgaagatgatggagacagtgcatttcaaaagaaaatgaacagaatgaaatagacgaaaatggatttatgctcgtgtttcggtgatagaactatgactagattttttttttattttccccttcttttgtatttttcaagagttctttgatgaggtgttttacttttaaaatggaaaataagtatgggtcttcaaattagaaaatccatcaagagtttttgatctaacctcaaaatgaaaagtttttcatggaagtcatttttccagaatttatttcattccactgaaaagtctattggcttggaagttctggatgtgagggcgatctggctgcaacgtctgtcaccccattgatcgtcagggttgattcggctgatctggctggctaggtgggtgtccacttcctccctcagcactccatgtgcgtccctccggaggctgaagaggatgaccatccccgacagaggaggaccgatcttcggtcaagggcatatgagtagctgtgctcccttgctagaacctccaaacaagctctcaggttatgccactggaagtatattaacacatctttgctccctgaaaatgcccatgcttcctgagctttcatctccaaacaggagggatattgagtgggggcagaagcaattatggtatatacagccaactacagactgctgtttacacaggaacaccccaagaaagtcaggataaagccttgcaccagatgacctgatttacctaaaatactgcctctctttatgggcagtcccaggcagatctttcaggagtacccgtcttttgtgttgcagacacagatatgagaggacccagaaacggaggaggaataagagtttgagtatgagaac

SEQ ID NO: 20001 - DNA, 1105 bp, Homo sapiens
ttcacatttcatcagggatgagtgtctccagggccaaagctcatctactttcttccctgatgaaagaggcagtccaggtggcatctgtgaacaacacattcctgcacaggtaggtgcacagtgctcatctggaagactaatcctgcagggcttcctggaggagatgagcctccacttttcggggcccaggatgggaaagtatgtgagcatgtgtcactgaagggactgtggaaagcagatggaaattgtggaattctctcggaacaatgcagccattattagaactgtgcccataggagcatcaatatccctgctccttgtatcctgttctccagtcttctggggaccccctttgactgaacccaaccaaatggcagatgacaaggcagacccaggatgcagtctgtagggttcagtccccctccccactgggaacagcaggaaagggcaaggtggtgacaatctaagggaggcaaatggataataaccagcatggtagggaatcttctttgttgctgtggcactgtcgatctctgttccctgaactctagtgtcctccagactagatttaaggtgtggttccccgctaaattattctctcacctcctttcagtctttgctcaaacatccttttatcagagaggctttctgacatcctgtgcaagatagcacctctcccccatcgctgttatccttacccagtttaattccacgtagcatctgccaacgcttgacatatttgttttttgtttactttctggcctgtgacaactagaatataagctctgtgagagcatttttctcttaactgcttatcttcaagtaaacagaacagtgcctgtcctgtaggaagtgtttgatacatacagattgctcaaatgaaaaaagaagggtgcgagcaagcctggacaggcctggtgccccagggcagccttgccttttctgaagagaatggctgccttaggcacggctctccttgctgcccaagccttgccaccttgaaaggcgtgagagggtcactcccaggtgtattcaagcaagagtgcctgagccactcttgcttggcagtatgggaggatgaaatagtgtgttcataaagtgcatt

SEQ ID NO: 20002 - DNA, 1097 bp, Homo sapiens
catgagaaatgctcatgacataggttaattaggaaaatcaacaaaatacaagaatacacatgtacacacctttcaattttaactttgaaaataataatgtataggtaaatacttattcatgatcattcacatatctatcttgtaaacaaattatagatatattctgctttctaaaaatccaatctgtacttttcagctgctgaattggggataatttgttatgtagcaatatgtgatcagttacattttctatttgtctcacctatttttctccttttctttgtggctttcttttgtgttgtttttggttttggtttggagttgtttttttttttctctttgagacaaggtgtcgctccttcacccaggctgaagtgcactggcatgatcgcagcacactgtagcctcaacctcctgtgttcaagccatcttcccacctcagcctcccaagtagctaggactacagggatgtgccaaaatgcctggctaatttttttactttttgtagacatgtggtttgagacccagactggtctgaaactcctgggctcaagcaatctgcccatctcggctttccagtgtgctgggattacaggcgtgagccactgcgactagactttcttttgaatagatcaattttttaatcattctgttgtttttctctgtcattttggaaactataaattattttcttatgtttttagcagttactcaaagacaacatatgcattaatatatcgatgtctataattaatacctatatatatagaccttaaaaacacttttaaactccacttatccccttccaacttgtacattttatgggattgtattataattcatattattattgcattccacaattattttagctcactttttaattcttcattcattattgcatctcaaaagtatataattactttcattatttttcttttgtgaggtttatttcttttttcttctcttttccctttcaccttctctccccttcttccttttgtcttcattcctttcttcctctctctctgcatattgtcatcccatccaattgttttaatatcatttctcaaaagactcttttttctccattaaat

SEQ ID NO: 20003 - DNA, 1049 bp, Homo sapiens
tcaccatataggcaagtcaggtcttgaactcctgacctcaggtgatctgcccacctcggcctcccaaagtgctgggattataggcgtgagccaccacgcccagccttaaacagttttttgaaagataatttataggccgggtgcagtgtctcattcctgtaaacccagcactttgggaggccgaggcgggcggatcacctgaagtcaggagccatggcgaaaccccgtctgtactaaaaatacaaaaaattagccgagcatggtggcaggtacctgtaatcccagctactcaggaggatgaggcaggagaatcgcttgaacccaggaggcggaggttgcagtgagccgagatcgtgccactgcactccattctgggcgacaaaagtgaaactccttctcaaaaaaaaaaaaggaaatttatattcaagttcttattctttcaattacttataaattaaatggcttatgggttgactgttttcttatttatttatttattttaagatggagttgcgctctgtcacccaggctggagtgcagtggcatgatctcagctcactgcaacctctgcctgctgggttcaagcaattctcctgcctcagcctcctgagtagctgggactacgggcatgtgccacaatgcccggctaattttttgtttttttagcagagatggagtttcaccatgctggccaggctggtctcgaactcctgaccttgtgatcttcccgcctcggcctcccaaagtgctgggattacaggcatgagctacagcgcccggcctattgttttctttttctttgttttatttattttttggatgtgcggtctttattctttccaataaaagttttaaaaaaaatgcttttcataagatttcctttaaatgagtatatttcctttaaatgagtgtagtcagctggatttttttttttcatggaggtactaagtgtcccatttcgctgatgaccagcatggttactgaaagccctttggaccctagcagaatatgccaccctgaaatatgccactttggcataaggattattt

SEQ ID NO: 20004 - DNA, 1115 bp, Homo sapiens
ctgtaatcccaggcgtgaatttgggaagctgaggtgagcagatcacttgaggtcaggagttcaagaccggcctggccaacaaggtgaaaccccgtctctactaaaaatacaaaaattagctgggcatggtggcgagtgactgtaatcccagctactcaagaggctgaggcaggacagtcgcttgagcccaggaggcagaggttgcagtgtgccaagatcgcatcactgcactccagcctgggtgacagagtgagactttatctaaaaaaaaaaaaaaaaaatcaagtggctgggcacagtggtttatgcctgtaatcccagtgctttgggaggctggggcaggaggatcccttgagcctaggaattcgaggttgcagcgagctatgattgtgccactgtgctccagcctgggcgtcagagtgagaccttatctctaaacagattaagagagacatcaggtggggggcggcgacggatagcattaggagatatacctaatataaatgacgagttaatgggtacagcacaccaaaatggcacatgtatacatatgtaacctgcacgttgtgcacatgtaccctagaactttaattaaaagatcaggaattatgaactgtttatagtaattttgctataatttgtcatctttcagttaaagaattttgttatccaaaggagaacattttgttattaaaaagcattgtttttctacaattgccaatacatccaaacaggtaaaactaattaagagtgttttgttgtttcagaacaccgaaaagctttggaggatttcactcttgataatattctttctcatatttattattttcgctgtcgtgactacacagagttactggcacaagtttatcttcttccagatttcctttcagaacactcaaaggtatgagtcagactactgaaatgtaactaaccaagtattttttgaggtgtttgataagcatgaaaaaataaccagtacagtagcataaaatcaaagtcaaagccaattgagaaaatctcttccttccttgacctacaatttatttatatttatatttgttttgtgtatgtatatgtatatatagtttatgctcagagtaagaaattgaaataat

SEQ ID NO: 20005 - DNA, 1076 bp, Homo sapiens
agttttataacaaagtcaagactgtataaaatgttaatgtctagaaatgtcaaaatagcgtttgcctgacaaataatatagacatgcagttttgagtaaagttacgtttggttggtttccattaaaaaattctggtcataagtgtcagttttcctggaaaataacaagcataattaatggactttgtggttgagcgcggtagctcgtgcctgtaatcccagcactttgggaggccgaggcaggtggatcatgaggtcaggagtttgagaccaccctcgccaacatggtgaaaccctgtctctactaaaaaaaaaaaaaaaaaaaaaaaaccaaaaattagcccggtgtggtggcatgcccctgtaatcccacctactcgggaggctgaggtaggagaatcacttgaacccaggaggcggaggttacagtgggtggagaacgcgccatcacactccagcctgggcagcagcaagactccgtctcaaggcaaaaaaaaaaaaaaaggactttgtttgataaagaaatgccacctttgttaattgcagtgtcttctttgtttaaatatactttggatgtttttcaggttaactcttccaacatccctggttttcttctcctttgagtctttgattattatgtggtatgtaatcacagattcagatggattgaaacataaccggtgtaaacaacctagatgctttgaggtagagctaaataactcttgaagatttgaaatgtgaggagagaagtaaatatcggctcagaagggaagagatttttttttttaaagttttacctcactcctctttaactgcttgtttgccattacttcccaccctgaatccacatcccaccactgacacaaatacacacatttgtctgggagtaagatgtaaggtcaaactgcttaacttgatttctttgtctttaccttaattagagagaccttagcacatacctgtaatacatcataagtaaataaagaacttcctcagtaaagtcattttaaagcatacttttttctttgaatttccaattttttttgccatatgctgaaaagcatagtgccctgtgtt

SEQ ID NO: 20006 - DNA, 1041 bp, Homo sapiens
accaactttgggtaccagtcttttatttatttatttatatctttgagacggagtctcgctctgtcgcccaggttggagtgccatggcgcgatcttggctcactgcaacctgtgcctcctgggttcaagagattctcctgcctcagcctcccgagtagctggaactacaggcgcgtgccaccatgcccggctaattttttatatttttagtagagatgggtttcactgtgttagccaggatggtctcgatctcctgacctcgtgatccacccgcctcagcctcccaaagtgctgggattatacgcgtgagccaccacgcccagctaggtaccagtcttttaaatctttgccaaattgatatggagaaagtcctttaaaaatatgttttttggattattggcataattttttaaacagccttaatgacatatatgattcatccttgcagtgtgcacaattcagtgattttcagtgtatccacagagttttgcaaacatcaccactgtataattttagaatatttccgtcatcctaaaaaagaaaccccaacctcacagtgaatttcagaatatttaaaatgtctgctccttcagtgtcacgtttcaaatctcatgcaaatttttcttgcggtcaactataactttgtaccctatggagaaagtaattctggttctgggaaacacacagttccagattattaaaaaaaaaaaaacaaaaaaaaacaaaaaacctcttttcagctgggtgcaatagctcacccctgtaattccagcactttgggaggccaaggtgggtggatcacctgaggtcaggagttcacaaccagcctggccaacatggtgaaaccccatctctactaaaaatacaaaaaaattagccagttgtggtggcaggtgcctgtaatcccagctactcaggaggctgaggcaggagaattgcttgaacccaggaggcggaggttgcagcaagccaggaccgcgccattgcactccagcctgggcaacaagagcgaaactctgtctcaaaaaaaaaaaaaaaaaaa

SEQ ID NO: 20007 - DNA, 2217 bp, Homo sapiens
ctgtctaaaacagaattcagtcctccaaccctctttacggcccccaaaacaaacaaaaccaaaacctgatactctttctggtgggtccatccctgacttctcctttccctgacttctcctttcacctctcacattcagtcacatcttgttaattctacctcgtaaatacctcttaaatatgtctttcttcattcccactgtcattgtcatctcttgccagtcttacccttctgcaatatattttccccagtgtagccaaaatgtttaattgtcacactgcttaaacatttttaccctttacccagagttagccaaactctaaggttaagggcacagtcttctactctgccaagtctgctcaagacttctgatcctattgtaaggggttagggtgcaactacaaatttcaaatgaagatgctatgcaaaacctcacttctaacatcaactgcaagtttgggggtttccccaaaccaccctcagattcagtaatgcactagaaaaactcatagaactcactgaaagctattatacttagagatacagttcattacaaagacaagctacaaattagtcaaaggaagagagatgcctagggtatagtctaagagggttgcagatatgaaacttccattgttctcagggaatataccttccataccctcccagcatgaatgtgtggatgtatggaaatacacacaaggtattgcccacccaagaagttcacctaaactttagtgtgtctggagtttgtgttttgttttttaaagagatggggtctcactatattccctacgctggattcaaactcctggctcaaatgatcttcttacctcagcagagttttcattgagatttattgattgtttgcatggttgaactcagtttccagtctcccctctccagaggttaggctgatactatgtggttcaagggacccatcatgaatagtaagaatactcatattactccagaaattccaggggcttagaggttacctcccaggagctgggggcaacatctggacctctctttggacaagttttttactccacatccttcatcacctatctctcttttgccctctagataaaatccaaaggtaagggcttataatcttacttcattagttttatttctggaatcactatccacccacttcatcccagctctacccctccagaaactacacttcagctatattaaactaatgtatttctttgaaggtattgtgttatcttttgcctctgcacctttgcacatagtatatttttccctctgcttggaatactatgttcccccaatagccactcccaacacaatccaatttcttacccgttttttagttctctgtttaacacctcttccttgaggaagcctttgcttaccgtcctcacactcatcatgagttaggggtcccttctacgttcctttccataatacccaatgccattcctcttgtaagtacttggtttaatttattattttttgtcagcaaatatttatatctccgtcactagaccagaggtctccaaagtcaattgcacctaaaatacttcatttcggcaaaggaagaaaacattatcatctgtttatttgtgtataacatacgaaattaagtgctataaatatttgacatgtttattgagattggcaacttgttctgtatgacgactgatttcatgtgaagcatggtaagtgtggtattctgagggagtgcaaattccacagcttatgggggttgaccgtggcatcctttctccaatttttaggccattacaaactattacagtttatctgtgcctgagtaaatagatttatggattatatttcctggttttaacaaaattagccctcatgaaatggaaaattggctttaaaagttcctgtgaagatggctgggcttggtggctcattcctgtaatcccaacactttgggaggctgaggcaggcagattgcttgagtcttggagttcgagaccagactgggcaacatggcaaggccccgtctctacaaaacttagttcagctactcaggaggctgagatgggaggactgcttgagcccaggaggttgaggttgcagtgaaccatgatcatgtcactgcactccagcctgggtaacagagtgagaccttgtttcaaaaaaaaaaagtttctatgacaaaatcatgagttaaacataatattgataatgcaagtgtaagaaacataaaagt

SEQ ID NO: 20008 - DNA, 1057 bp, Homo sapiens
acaaaaacagttttgtgtctaataaaaaccctttgcccaggatattctctcatcttggattgataagtatctttctgtaagagttaacagtgtaaacttgcagagggtcagcattgtctacacccaaaataacaattgtacaagtatgaatagtagacacctgttcctgtttctcttgctgctgtgtactatattcagtgagacctcgtttaggcattgttttatatttattacctcttttaatcatcataaaaatatatgataaagatttttatcattaacctgttttgcagatgaaaaagctgaggcacacagaatttaaagaacaagttttcaccatcagcagtgtcaccaggacattaacctaggcagtcagacttgggagattataattatgatgttcattttatgattctcatgctacattacaaacatttcctacggggaaaaatttcaatgcaaatgtagaaattgaattttgattactgccatttgcttagctcaggcttttatcacttcttgccttgattaccttagtagcctcccaacaaatttccctgacactggtcttttttccttttaatctagcttcactggattttccagcattattgaacttactatggttctcttttaaaattatttatttatttatttatttggagatggagtttcgctcttgttgctcaggctggagtgcaatggcacgatctcagctcaccgcaacctccgcctcctgggttcaagtgattctcctgccttaggctcccgagtagctgggattacaggcatgcaccaccacgctgggctaattttgtatttttagtagagatggggtttctccatgtcggtcagactggtctcgaactcccgacctcaggtgatccgcccacctcggcctcccaaagtgctgggattacaggtgtgagccaccacgcccagcctaaaatttatacttatttatttatttagagacagagtctcactctgttacccaggctggagtgcagtggtgcgatcttggctcactgcagcctccacctcctaggttcaaagg

SEQ ID NO: 20009 - DNA, 1049 bp, Homo sapiens
gttataatcaggacagctcagaagaagagaactaaattagagagaaacccagaatggaaaataagggagagtttaatgcttagaataaagagttagaaaagaggaggtgggctataggaatctttaataagaagattatagggctgggtgcagtggctcatgactgtaatcccaacactttggaggatgaagcaggaagattgcttgaaccctggagtttgagaccagcctgggcaacatagcaagtccccggctttacaaaaaaaattaaccaggcatggtagtgcctgcctgtactcctagctacatggcaggctgaggaaggaggatcccttaagctctgaacttggaggctgcagtgaaccattcaaccaccattgaaccccagcttgggtgacagagtgagaccttgtccccccacctcaaaaaaatcatagatatgcccaaacattttgctcttaatagcataattaagatatttttattttcaatgcaaatttgtaatcttaaattgaaaaactttatgaacattgaattatccgtggaactcaaaggaaaaaggatcactgtaattttatattttacaggagaaaagatttcttgaacttttttgctttgatctatattttgtcatttcattgagagtagaaaaagaatgcatcactttttataaacaaaatatttttcttttctaaatatgacaccagtatgaaacttacccaaggtgtttaagtgtttaaaatgtaaactgaagatttgattgttattaaagtatcattttacctgttggctgagaggattcagcatagtgcgagggagtgggaacaagtacctataagtatacatagggcaattaataactgttgaaagaatgataatatcctgtttctcaaataaacagaattttaccttactacacaaagaatttaattcaatttagtctatggagtttcctactagaatataagctccagactttcttttgctcaccatcctatcctcagtacctaggatactgaatgcttaggacatagaaggttttcagaaag

SEQ ID NO: 20010 - DNA, 1034 bp, Homo sapiens
cctgacctcgtgatccgcctgcctcagcctcccaaagtgctgggattacaggcatgagccaccatgcctagccttacccattttttaaattgggttatttatcttttattatttgaattgtaagagttctctatatattctggacagaagtcccttatcatatatgcttagcaagtattttctcccattctgtgagttcttcactttcttgatggtatcatttgcaaccaaagattttcaattttgatatagtccaatttatatattttttcttttgtcacatgtcctttggtgttgcccaatccaaggtcatgaagatttactatgtgttctcttaagagttgtatagttttagcttttcatttaggtctaagatttattttgagataatttgtgtatatagaggagttggagttcaatttgattcttttgcaagtggacatctagttatcctagcaccatatgttggaaaaacttgttctttccctcactgaattgtcctggcactcgaatttttagaagaataatataacttttatttatttatttatttatttatttatttatttattttgagacagagtctcactctgttgcccaggcaagagtgcagtggtataatcatagttcactgcaatcttgaactcccaggttcaattcttctgcctcagcctcccagagtagctagatgtaccacacctggctaatttatatatatatatatatatatatatatatatagtagaaccaggatctctttatgttgcccatgctggtcttgaactcctggcctctagtgattttcctgcctcagcctcccaaagtgccgggattacaggcatgagccaccttgcccagccataacttttattttttataaaaaatataataaaaactatggaagataggagagaaagtacagtaaccacgacccccccagtcttagggggatgcgttccaagacccccagtggatgactgaactacagatagtaccagacccagttgctgattgtattaattgaaacacgtttc

SEQ ID NO: 20011 - DNA, 1082 bp, Homo sapiens
tagctttctattgcttaattttctttgacacatttctgaaaggatttcttctaaacatatattgaaaaccactaggggttagttacataattttgattttgaaaattctgaagtagagggtgttaaataaattggcccatttaacattacaatagcagctgatgcggacctctggctgtgggtcaggcaatgtgccaaatagttgtgtgcataatcatatttagttcttactcaaattctattagataaggaattcaaggctcagaaaagtttgataacttgcccaaagtcatataactagtaaatggcaaagatggcatacagggctgtgtgactctcaaacctcagtggctcccatactggacataaacagttatgatggcaagattcccacagtaatacattagattaaatattttgtacagaaattctctgaatacacatgacttaagtactaatgcattattggcccaaatttttcttttttttcttttcttcttttttttttaacccacagctaatatgatagcttaatatttgtttggtaaaaatggaaatctaaaaatggatttttctctggagatttaataattcgttattcttggacccatggactaatcattttgtattatttccatgtgtgtagcacttaccattccaaagagtctagagagtatacataaccatacagaagttgtttcacttatgagtactttagtaaagaaatggggccaggcacggtggctcacacctgtaatcccagcactttgggaggccgaggcgggcggatcaccaggtcaggagatgagaccatcctggctaacagggtgaaaccccatctctactaaaaatacaaaaaattagccaggcgtggtggcaggcgcctgtagtcccagctactcgggaggctgaggcaggagaatggtgtgaacctgggaggtggagcttgcagtgagccgagatcgcaccactgcactccagcctgggcaacagagtaagactctgtctaaaaaaaaaaaaaaaagaaaagaaagaaaaaaatggttttggccgtgttcagagttttctttaaaacatgaaaa

SEQ ID NO: 20012 - DNA, 1023 bp, Homo sapiens
cactgtgcccagcgcggctcttgtcttgagtttatgatctagtgagaaaggcaggtattaaacaaatacatggccagttatgatggtctataatggacatcatcagttccttctctttgtgtatatgcatgctatttttcatgtctagaaatagagtctaattcccctctccttgaatctgggctggtcaatagaatgtggcagaaataaacattttggaactttgaggctagaccttaaggctgtaaagcttgtgtctgggtctctggaaatatttttcttgagataatccctcttaaaacccagtcactctgttgcaagaagctcaagccacatggagaggccttgtgtaggtaacgctgatcaatagccccagctgaacttcaatggccagaatcaactggtcctgtgagtgacccattgtgaacatccagtccagtccagcctttagatgacttcatgccccctactgtcttactgcattcatgtgtgagaagatcgagaactacagatctgagctttgtcaatccacaaaatcttgagagataataaatttttttttttttgagatggagtctcactctgttgcccaggctggagtacagtggcaccaccacagctcactgcaacctccacctcctgggctcaagtgattctcctgcctcagcctccggagtaactgggactacaggtgcccgccaccctgcccggctaatttttttgtatttttagtagagatggggtttcaccatgttggccaggctggtcttgaactcctgacctcaagtgatccacccacctcagcctcccaaagtgcagggattacaggtgtgagccaccgtgcctggcctgagaatgaattgttttaagccactaaatttgagtggtttattatgcagcagtataatacattttggttatctaaccagaatgtaaattatcagattatcagattatgataaatgctataatggacatgaacaggaataaaaggaaaacctaatttagatgattcggagatgg

SEQ ID NO: 20013 - DNA, 1976 bp, Homo sapiens
taatttaattctgctggggtcagagaacataccctatattattttgattcttttatttttattaaaatttattttatttcacaatatattctatcttggtgaacatgccatgtacacttggaaagaaagtgtattctggccttgctggatgtagtgttctataaatgttgattaggtcatgttggttgttagtgtttttcaaatcgtatacgttttcattgatattgttaagtgagaggagagtgttgaaatctccaattgtgattgtaatttagtccactttttcctttgattctgtcaatatgcttcacatagtttgaaacttgtttgacaaacatacatatttatgactgttgtttgtttgttccttatgaattaaccattttatttttagataaatgtccccctttatctctgataatattgtctttttccccttcagtctttttttttttttttttttgaggtggagtctctttctattgcctagactggaatgcagtggcacgatctcggctcactgcaacttccgcctccctggttcaagtgattctcttgcctcagcctcccaagtacctgggactacaggcacgtgccaccaggcctggataattttttctatttttagtagagacggggtttcaccatgttagccaggatggtcttgatctcttgacctcgtgatctgtctgcctcaacctcccaaagtgttgggattacaggtttgagccaccacgctcggctccccttcagtttttttttaatttttattttttttgagacagagtcttgctctgttgcccaggctggagtgcagtggcatgatctcggctcactgcattttccgccttctgggtttaagctattcttgtgcctcagcctcctgagtaactgggattacaggcacatgccaccacctccaggtaattttttgtattttcagtagagacagggtttcactatgtttgccaggctggtcctgaactcctgatctcaagtgatccacccacctcagcctcccaaagtcctggaattacaggcgtgagccatcatgcttggcctccccttcagttttattgaggtgtgattgacaaacaaaaaattattgccaaggccagttgtcaaagagctttcccctgtgttttcaactaggagttttatagtttcagatcttatgtttaagtttttcatccattttgagtagatttttatgtatggtttaataagggtccaacttcatattttttgaatagggatatccagttttcctaccaccatttattaaagaaactatcctttccctgttgtatcttcttggtacctttgttgaagatttgttgaccatataggtttgggtttctttctgggctttctattctgttccattggtttctatgtctgtttttatgccagtgccatactgctttgattactgtagttctatcatataatttggaatcaggaagtgtgatgcctccagctttgttcttctttctctagattgctttagctactcgggatcttttgttgtactattaatatacaaatgttaggggttttttttctattttttgtggaaaataccattggaattttgatagagattgcattgaatctgtagattacattggattgtgtaggtattttaacaatattcttccaatccatgaacacaggatatctttccatttatttgtgtcttcaattttttaatcaatgttttatagtttttcatattcagatatttcacctctttggttaaatttgttcctaaaactattttattacttttgatgttactgtaagtgggatttttatcttcattgttttcatgtagttcactgttagtatatagtaatgcaactgatttttgtgtgtttttttttatcctacaaatttgcagaatcatttattagttctaacagttcttttgtggagtctttagggtttcatatatattagatcatgccatctgc

SEQ ID NO: 20014 - DNA, 1089 bp, Homo sapiens
ttttgaaaataattttctggactgtatttctccatttatttaggtctgtcttaatgtctttaatttaattttacaattttctttataaacttatcatagtcttttgttatatttcttcctatgtatttatgtgtacgtgtgtctgtgtgtttgtgagacagagagagggagggaggaaagggggagtggaaggaggagagagaaaaagagtataaaattaaacatcaactaaaaaaacagctttattgaggtacaatttacataccataaaatttactcattttatgtgtacagttcagtgatttttagtaaatcttcagagttgtgcaatgatcactacaatctaattttagaacatttctgtcaccctaaaaagaaagcttgtgccagtcactcttggcacacttgttggcagtcactccttgttcccatccctagcccgaggaaaccaccatgtagtttaaaaaaaaaaacttattttaagcctttttagtatgaacacttaaaaatacacaaagttgacaaaatagaacaatgactctcaaacaaccaataaggacaatcttctaacttctcacctggattgttttaaaacaagtctcatttcttctataagtatgtcagtatgtgtctccaaggtatgatgatttcttcttaaattgaagtataattttagtttcattatcacacctaaaaagattaacaattttttttttaagagatagggacttgctctgtcactcaggctgtaagtgcagtggtgagatcatagcttactgcagccttgaatttctgggctcaagcctgcttcagcttcctgagtagctagaactacaggtgcgaactaccatatctagctaattaaaaaaaatttttttaatggagaagggtcttactatattgcccaggctggtcttgaactcctggcctcaagcgatcctcccaccttagcctcccaaagtgttgggattacaagtgtgaaccactgtacctggccaaattaacaaaattttttttttgagatagggtcttactgtgttgcccaggtgggagtgcagtggcgcggcttaactgcagccttacctccca

SEQ ID NO: 20015 - DNA, 1028 bp, Homo sapiens
ttttttgagacagagccttactctctcacccaggctggagtacagtggcacaatcttggctctgtgcaacttccacctcccgggttcaagcgattctcctgcttcagcctcccgagtaggtgggattacaggcacgcgctactatgcctggaaaatttttgtatttttggtagagacggggtttcgccatgttgaccaggctggtctcgaattcctgacctcaagtgatccacccgccttggcctcccaaaatgctgggattacaggtgtgagtcacctcacccagccttgttttgtgaatttggattgtgcatttttatgttcactgatactgtatctcaagatgattttcatattttagctagcatttttaggtgacatgttgaaaggtattcagggtaaattagtgttctatttatctggaatggacggtgttaaatattaatatttttatttaattcattagggaaaaatgggtgaactaatatatctgtaataccataaaataggactctgccttttaacgcagaaaatttggaatttatcctttgcactattgtctcaaaagtgacaatcttcttggcaaccaaattgcattacatcttcaatatctgttattaatttgtatgcattgcgcaatctgaacagaagtggtagaaaaaaattgagacttttttcttttgtattgttaactgttatgttaaactgtaggcatctatgtgactgtgaagtatctttttacctgtctcaataaaatgttactaattattctttaacaggtacaaagtgaattaatttgtgctgtttttcttttttttttgagacagagtctcactcagtcgccaggccggaatatggtggtgcgatctcagccctctgcaacctccacctcccggggtcaagcaattctcctgcctcagcctcccgagtagctgggactataggcgtgtgccaccatgcccagataatttttgtatttttagtagagacagggtttcaccatgttgatcaggatggtctcgatctct

SEQ ID NO: 20016 - DNA, 1103 bp, Homo sapiens
ttgtatttttagtagagacggggtttcaccgtgttagccaggatggtctcgatctcctgaccttctgatccgcccgtctcggcctcccaaagtgctgggattacaggcgtgagccaccgcgcccggccagctttgtatttttctaattatctggagaggagataggagtttactagaaaaagaagaaagttttttcatttcaatatgaagattcctacattcaagccccttttccaataggcgccactcagagatcagaataatgacacattctttggtatagatacacacactctgggtgtttaagttagcttacggcagggcaggaacttgcccgatataatagaaagaattcctttgattgagaagcggatactggttagcaaggaccttggaaaactagtagaagagatggaaatagagtaataaccgaagtcttctttaacaatgaagaaacttattttgagactccaggggttggagaaagggttttcctgggctttagaactccattgttatttggtaaaggctgggaggggagtgggctgaaagtatgaaaactgtcctttcccaaatttctcccccatcttgtctaaaatgaccaattattcaacgcttatgcagcttttagtataaactagtttagtcaactagcttttctaataactaactgagatatatcaaggtaatgagattttgaaaggcgatcaaggaaaaagcaaaatatcgttttaaagcataagttgttgatgaacacaaagctttaagtgggagctggcagcttcaggaaggaatctggcaggaagaagaccaagatagcccagagagtgatgaggattactaaaacaagagatggaaagaagaatgtagtaaaggagttgagcaagtaacaacagcaaaaaaagtgaaaagagaccaaagaaaaggaggcactgaagcatagcattgaatgaagtacatatgcaactaggagcaagcattataaaatatgagcagcagtgtgggttgtttacttagaagtaaagttgctaagtctgaatttatttttatttatttatttatttatttatttatttatttatttatttatttattttttgacg

SEQ ID NO: 20017 - DNA, 1046 bp, Homo sapiens
acttgtttgcccactttttaattggactgcttacttatttacagttgaggttagggatttccttattgattctagatataaattatttctcaaatatatgtgatttgcaaatattttctcccaatctgtggcttcttttctcattttcttaatatctttcacagaggaaaagttttaattatgatgaagtctaatttattaattttttcctttatgggttgtacttttggtgtcatatctaagaacattttccctaaatttaggtcacacagagtttctcttgttttttccctaagagtcttatagttcaacatctgataaaattatgcatttgaagtttgttaattttggtataaattgtgaggtttaggtcaaggtccattttgtctcctacaggagaccagttgtcccatcaccacttgttaaaacgactatccttgcttcattaaattgcttttatgcctttgtcaaaaattggttgtctgtacaagtgtgagtttatttttttgctcttttttgttctattgatctgtgtgtctgtctcccaatacgaccgtttaactgttgtgcctctatagtaagtctttaaaaagctaatgtgattacccttattttattctttttttcaaaattcttttagctattctagttcctttgcctttccatataaattttagaatcagcttgttcatgtataaaaatctgttaggatttttataggaattgcattaaaccaactgcagatcaatttcgagagaattgatgtctttactctctaaagcctccgaatccatgagaatgccacatctctccagttatttaggtcattaaaacctttttttggcctggtgcagtgactcatgcctataatcccagcactttgagagactgaggtgggaggatcacttgagcacaggagttcgagaccagcctcagcaacatagtgagacctcatctctacaaaaaatagaaaaattcgccaaccatggtggcacgtgcctgtagtcccagctactggggaggctaaggcgaggtgattgattgag

SEQ ID NO: 20018 - DNA, 1035 bp, Homo sapiens
tcagtggttgtcgggttgtggacagtagtgagggagggatgaataggtgaagcagagtggtattttaggtggtgaaactattctgtacgcactgtaatggtgggtacatgacattatgcatttgttaaagtctgtagaactttacagcacaaaaagttaacctcagtgtgtacaaatttaacaatagctttcacaggtaggcatggtggcttctgcctgtaatcccagctacttgggaggctgaggtaagaagatcactggaggccaagagttcaagtccagcttgggacttgagttcaagtccagcaacatggcaagaccttgtctctaaaaaaaaaaatttttttaaggaaaaaataatataattcaggaggccacgggatttgggaaagaaagcagactgtgacaagagcatctaactgtattacaaatatatgaaacaacctcaccgaagggatggggagaaaagtgctaccctaactttgaaaatgactggagtctgtaaaactaaaggccaaaggaactgtacaagagtacttactcaagttgataaagtttttctgcatgggtttataggttaataaatgcattgttgctatacttgtatactaacattgaacaataagaaaatagatagcagatagtgggagccaggtttctcactgttggagtggaaattttatgtacactaacattgaccaagaagaaaatagatagcagatagtgggagccaggtttttcactgttggagtgaaaattttacaaatcaacaagggaggaagctagaatgacccatgtggtaatggattaacgttgaggatactagaacagctcatatatagttagatagttgcttgtggaaatttttatagatgggtatgtgcacaagttagtatacatactataaagtttagaagtttacaacaccaccaccacttctgactccaattgtaagtttaggggtccccaagatcaccctcatgttgaataattccctagaggtactcacagaactcactgaaagctgctatattt

SEQ ID NO: 20019 - DNA, 1050 bp, Homo sapiens
gccagcgtcatcagtggtaaaataatttgctgaaacagctgtgagttaataattgtaataataagtaagtgtattagagagaaagtatgttgcaaggaagcattgggcagcacagcagagaaaaagctgtctgcaaaggggcagggctggagggaagttttataggctggacctggagggactacatgtagaacaaggtattcgggaacaggatattgtgcaaacgggatgtttgtagttagctgtttctcagaacaattgttctcactcaccctggggcaccccccttgttgttgctaacttatcaggactccacaatgagttcatactgatatataaataattggataaattaataaatggaagtgaatagacaaatctttccatatggaataatgctaattatattatctagatacttcatcctgaggatgggaggttaattctccactccttaagtgtgggctgtgcatagtgacttccttccagagtcccttatgaaaagtggagagtgggaggaaaggaataacttcatgggagagacgtgacaaacacaccttcaagccaagtgattatggtcaatataaacagtcataaatcatgttgatatcatatataccctcaatatgctatgatgaaaaatggcactttatctctgtgatctttgtcacaaaagtctgtaacaccaatctaaccatgagaaaaacaaatactttttttttttttttttgaggcggagtcttgctctgtctcccagactggagtgcagtgcagtggtgcaatcttgactcactgcagcctccacctcccaggttcaagcaattctcctgcctcagcctcccgagtagctgggattacaggtgcacaccaccgtgaccagctaatttttgtgggtttttttgtttgtttttcatttcgagacagagtcttactctgttgcccaggctggagtgcagtggcatgacctcggctcactgcaacctctgcctcttgggttcaagcgattctcctgcctcagcctcctgagtagctaggactacaggtgtgcac

SEQ ID NO: 20020 - DNA, 1061 bp, Homo sapiens
aattttgatttgtgttttcctaatgattagtgatactgaacttttttttttaaatgtgctttatgaccatttatgtatcttctttttttgtttttttttgtttttttttttgagatggagtctcactctgtcaccaggctggagtgcagtggcgtgatctcggctcactgcaacttccacctcctgggttcaagtgattctcctggctcggcctcccgagtagctgggactacaggtgcacaccaccacatccagctaatttttatatttttattagagacggggtttcaccgtgttggccaggatggtctcgatctcttgacctcgtgattcgcctaccttggccttccaaagtgctgggattacaggtgtgagccaccacgcctggtctaccatttgtatatcttctttggagaaatgtctattcaagtcatttgcccactttttaattgggtggtttggtttttatattgttgagttctgtattaactccttgtcagatatatgatttgcaaatatgttctctcattctgtgggttgtctttctactctgttgatagtgtcttttgatgcacaacatttttaaattttcataaagtccagtttgtctattttgttgttgttgcctgtatctttgatgtcatatctaagaaagcattgctacatctaaggttgtgctttcttctttcttgccttatgttttttaaaataataattttatagtattaggtcttatatttaggtcatggagccatttggggttaattttagtatatagtatgaggtaaggtccaatttcattcttttgcttgtggatatccagtttttccagatccatttgttgaaaaggctgtatttttctccactggatggtcttgacacccttgtcaaaaatcactttaccatatatgcaaggatgcatttctggactccctattgtatttagttgttctacatatgtgtctgtctttatgtcagtactattctgccttgattactgtagctttgtagtaacttttgaaatcagaaagtgtggctgggcttggtggctcatgcctgta

SEQ ID NO: 20021 - DNA, 1021 bp, Homo sapiens
tgggagcatgcaggtgagcagttgcaggagccagggcaaacaaatgctggaacgagccggccacttctctccagtgggagcaggtcctgtgcaggccccacagcaggatccaagtgtgttacaatgctcttttagctctgccatctggagggagtgccggctacccctagagccccagagggcatatcactagctcagtgggctttttgcctcattgtgaggggcagctgccctctgccagtgagggcaaagggccagtgtgacagcctttttgggttcctgcacccagtggtcctgaaatcttgtccaatgcccaagaggaatgaggtcacacagacttgaaggatggtgaatgcagagattttattgagcaatggaagtggctcttagtgtgctggggtgctggaaaggggatggagtgggaaagtggtcttcccctggagttcaggtgtcccaaccgaacacctctccgaccatccccagctgaactcctctctgactgtagtctctgatgttcagctacttcttctactctgaatgttcaggtgcttctctcttctgtgtgtccactgagtttggggtctggggttcttatgggcacaggatagggggtgtggtgggctaaaagagaacatttaggtggggaaatggggatgtgaagttctcatttagggctgcaggtccaggcttgagggtggaacctttgccagggaccccgcccttctatctagtatttccctgccttctgtccatatcaacaggaggatcacttgagcccaggagttcaagaccagtctgggcaacatagtgagaccctgtctcaaaaaaaaaaaattctctttgtttccataccactccaaagtcatgagctactctgacagcatatctgctgcctgtataaatattagcagttatttcttttgtccacgacaagttctaactaatgctattaactctgcttgttgagctgaggttgcttttggaagacgagaactttctgtttcctcagttaagatactgt

SEQ ID NO: 20022 - DNA, 1048 bp, Homo sapiens
taaggatgttttattccttttggtatagggagggtgtctttcacatgggaatttcatctcctgcttttaagaaacagaaaagaggctagaaggatctttttgcacctgctgcttttcaagtgcctttaattcaaaatagtcaatatgtcagagtggtatatttttaactccttcagcttaaatggaagattcatgttttcttgaaaggattaggaatatgaagtttcctgcagaattttacaccaaagatgtataaacataagaactttaccagaatagggcagtgagagtctgaaacaatctttcagggaaaatctgacgatatctcctgaacatgtatgtaatcttttggctagactcacagacttcctaaaaagtatgatggtaaggagaaaaatttttcttctgattctgttgtgaaagagtttgtttgtttgtttgtttgtttgttttcttttgagacaggatcttactctgtcgcccaggctggagtgcagtgacacgatctcggctcactgcagcctcgacatccagggctaaagtgatcatcccacctcagtctcctgggtagctgggaccatgggcacatgccaccactgctagctaattttttttggtatattttgtagagatggggttttgccgtattgcccaggctggtctcaaactcctgagctcaagcaatttttttttaaactggtgatggttcacaacttgtgatacctaagtttgtgtatatatcaataatatatataaacaacatgcaatattcatttcctgtatattttattctatgttaagttttttggaggtaactttgtctactcagcaagtagaatgttacgcagcaagtaaagtcattattgttttgtttagtcttgctttgtttttgcaatcctaattaaggataatattcacttcccatccagagagtataccaatcctttttattctgcttttcactttcccgtttccttctttttctttctcttttaaaacttacacaaatgtcatacatgaaaacactgccattgcaaaaacttccaga

SEQ ID NO: 20023 - DNA, 1023 bp, Homo sapiens
ttcaatttctcgcctgggcaataaagtggaagtgtttcgggtcagtggtggggtggagtgggagagtgggtaggggaattaagtcccaccctttggtatttcaagaaatccatttgttttctatctatctgtcctacgtctactctattttgcctagtgtcctcatgtctggaatacccctcttcaatttctcaagaggatacactgccattctccaaccaagtcaggggtgtatacacttagctgctagcattctacacatgggagtagggaggagaatcaactgttcacatacacagacttttatcctggtttttcactttgtgcttcctcactacccactgggtacttccaaggtcagaggttttcccagattctttgggggtgaattggctttcttctcaccaatgtccccctttgtaatttcctgagattatagcttcctccactataacaagtcagataccactcctccatttgttctcccttttctaaaaatatgttatccactgtaaaacatgctatgtactccctcttctatttgattgtccttgaggatttaaaccttttaaattatgttgccatcattttattaggggagcagagaaatacatatgcttgatcttccttttctttttgacagaagtcatcagatgaatgttattttaaaatattattgcatttaactatactatttaattatataatgagctggcattccctagtacacctggaaaaagtagtccagatttgttcatatagatgtagagtttggctgccatgaccacaccctcctctttataacaagcaagtggtagtgaacaaactcaggtcacaggatccaatggaaagagtttgaattcccatagccggggcaggttcctttacctatggttaatgttctagagcttgactttccccatctctgctagaaacagactttactcagccacaattccattttcttttatttccccttttgcctttactagcttgaattactggcattaactgaggattctt

SEQ ID NO: 20024 - DNA, 1027 bp, Homo sapiens
ggcttacgcctgtaatcccggcactttgagagactgaggcaagtggatcacgaggtcaggagatcgagaccatcctggctaacacagtgaaaccccgtgtctactaaaaatacacacacaaaaaaaaatttagtcgagcgtggtggcacatgcctgaagtctcagctacttgggaggctgaggcaggagaatcgcttgaacccaggaggcgaaggctgcagtgagccaggatcgcgccaccgtactccagactgggagacacgatgagactccatctaaaaaaaaaaaagaaagaagtgaattgttttatctccacatatttggggattttccaattatctttatgatactcatttctagtttaattctgctgtgatctgaataagacattgtataatttttattcatttaaatttcttaatgcatgttttatggcccagaatgtggtctatctggatgaatgttccctatgagtttgagaagaatgtgtattctgctgttggatgaagtagtctgtagatgtaaattatattcagttgatggatggtgttgttgagttcaactatgtccttactaattttctgcctgctgcattttgtccatttctgagagagggatgttgaagtctccaactatagtagtggattcatctctttgtccttgttgttctaccagtttttgcctcacgtattttgatgcactcttactagaaacacacacttaaaggattatcatattttcttggggaattgactcctttatcattatgtaatgcccttcttcagccctgataacattccttgctttgaaatctactctgtctgaaattaagtatctacttctgctttcttttgattagtgttatcatggtatttttctctattttctttcatctatatgtgtctttatatttaaagtggatttcttgtagacaacatatagttgggtcttgtttttttaatccattctgacaatcatttaatttgtgcatttagactattaatgttcaaagtgattattgatatac

SEQ ID NO: 20025 - DNA, 1041 bp, Homo sapiens
aatttttttttccattggctgccccctcctctctactttcaattttgtagttagggctctgcagagaagagcttgagattggtgcaattggaagaagagccaaccaatcacaccagagcttccaccgacagcagaggggacgtaacacaccttctttcccctccggctttccttccccttctctcccgccttctccttattcataccagaagcgcctcagctctgattggctggagctctgtgctatctcagccaatcacaagccgggctgtgctcctacaccatccgaagagcgaatcgtgcagagaccgtgtctacgattggcctctccctgacaaggatttaattttgaatttttctttatggcgtgggagaggccacagcccggactccatcgactcccccggctcttagactagtaagtgcaggaacgattatttctttgttatctgagctcgcgtcttgagtagctgggcctgttgctgcttgtgtttttatggtttagggaggtggggactttggctggacacgaaggggaaatggaaaggaggaaggggaggtttggggctggggaagaagtgctcggcctggcttcatcttaaccatacttctatttaattaacacttcgcaagatacgttttggagcaaagcatctgccttccttttgaacatttctttacatatttgctgctcaatgcaagtccacagatcagcggcatccgcatctcttgtttgcttgttacaaatgcaaattatcggactccacccaaatttactaaatcagaatatacattttaacaagatttccctgagtgatttctatgcacattaaagtttaagttggtacatttcttgactgggaatattactatgttactcgatattgtctggcatgctgttagagtgtcaattttaaatgcgtgtcctgtttactgagtgcctaatactgtgcgggatgagactttagggagctgcagtctctttggaaaaacaagacagaacaaaaacagcaatgcttaaaaaaaaaaaagcataaaaca

SEQ ID NO: 20026 - DNA, 1043 bp, Homo sapiens
ctatcatgtagctataagtgtaatacatatattaagtatcatagataaaaggagtgctcccttcagcagcacatgtaaccatagatacaaagatttaaatataaaagatttaggataaaaagaatcctctcttaaaaaggaaaacaaaattatatgtatatagcagctatgacacccatctcacaactttacaggaacagtatccaaaaataccagtattttcaaaatatttaaaataaatgtagtaataattctatgcccatctttttcaaaataaaccaataaaatatatagtatatattagacatgttagtatatctaagacatgttaaaaattacaactgaattctcacaattcagtcacaaatctaaacagcaaataaaaatttctatgacaggaacttagggtaactaccaatagctataaatagaagagattattatgtaagtatcatagataaaaagtgtactcgcttcaggggcacatataataatacagaaaacatttaaagataaaagatttaggataaaaaggattctctgttgaaatgaaaattatctttatatatatatatacataacagctataactcatgaaaaaatctacaggaacagcatattttcaaaagtacaacaattttgaagctatttgaaataaacctattaataattcgatggccaacattttccaaacaaaccaataaatgcatagtgtgtatgaagctatctgttacagtctatggcactcatatttttacaaagaattctgtgctaatctgagtgtctgcactgtgccttcaaatgctcttggactgtggcaaccaagtccataggaaagaggacctccaggttccgccccagggaggttggaattcagcggtataaaaatagaggtggtggtgcagaaaggggtggaaccagaaacacccctggtttctcactgttctctatggattcctagaagtgagaggtgacagcgtgctggcagccctcgctcgctttccgtgcctcctcacctgggcgcccactctggccagccttga

SEQ ID NO: 20027 - DNA, 1027 bp, Homo sapiens
cccattctgcttgaagctctggaaggaattcagggactgagaatacacttcctcagactcttctctggctggtttggggaggaaggatctacttgcaagggacgggggatttgaatcctggttttggtcctctctaattgtgtgatcttgggcaaattgttcctttttctgtgtctggaaagcaggggtcatcatcataatgcctgtctccctgggttgttgtgaggattaattgagatatgacccctcatagacgcataacagggaattaataaattgtagaatcctggaggtttatctgcagttgttccagggtctctctcccaaactgcccccacttcctaccttcctccaaccaaggcttactgagctttctgagctcctcttgccaagctttgggctgcgtatgagggctgattaaccagacatggtctcatgtctgattaaccatggccaggaatggtttgcaatctagtgggaagtctgactgagaaacaactaattttgtggaactttttttttttttttgagatggagtttcactcttgttgcccaagctggagtacaatggtgtgatctcagctcactgcaatctccacccccccaggttcaagcgatcgtcctgccccagcctccagagtagctgggattacaggcacctgccactacgcccggctaatttttgtatttttagtagagacagggtttcactacgttggccaggctggtctcgaactcctgacctcaggtgatccacccgccttggcctcccaaagtgctgggattacaggcgtgagccaccgtgcccagctggaactttatttattttttttttttgagacagagtcttgctctgtcgcccaggctggagtgcagtggtgcgatctcagctcactgcaggctccgccctccaggttcacgccattctcctgcctcagcctcccaagtagctgggactacaggcacccgccacctcgctcggctaattttttatactttcagtagagacggggtttcaccgtgttag

SEQ ID NO: 20028 - DNA, 1031 bp, Homo sapiens
gtcctgtgaattctagccaccttggtcttcctggactcccagctttctctccctaacccagggagttctctgagttccatttgggctttacttccctgtaccttggtctgcagtctttatcaaggctgaagttggggcagttgttgggcgtactgcgtttatttcctgtctctgtcctttattgcctgatattacagtgttttggaaatcattatttcatgtattttttccatttttttggtttcaggtggaagggtaaatctggtctctcttaatctatgttggccagaaacagaggtctttagaaatgtggatttttcaaaataaaagattatttcaaattgtactatgagatttaccactctctacatattctttttatagcaaagtgatttcccaaaagagacctttgaaggccctaaacatgaagtactacgaagatgtctttgtgcgggctatttcaaaaatgtagctcgaaggtaagcaataaagacttgagagatggatcaagatataatactgtatttgactataatattggactatttaatattaaacattgaagatttgatttaagctctgtgatgattatgacatgaattacagtgacgagggagagctacagtgacgagggagagctgcagtggctcagaatgtggtattagagctcaagtagggtaggaggggtatgtttgtagggtggctgtccagcatgggttatcttcacttaaggcaagtaacaagagttttctttcagagaggtggccctgtgtatagtgtgaaagccaagtaggttgagcatagcatccctgaggaagggtagcttggcatggagtgctagggcttgagcaaggtggggaggggttatttggtttggggcatcagtcagagtgtagtgaggaaggcatctttatagagaaaggggtaacagtgatggtgatggagattcattaaatacagaggaattgaacacataactctgtgagtgataatggtgaagggagttagaaatagcgaaagtgagaaaatag

SEQ ID NO: 20029 - DNA, 1796 bp, Homo sapiens
tttagagtcacacagctagtgagcagtcagacttttaatatttattctttcatttggctcattgcctcatttggtaaatggtctgtatcatttgaattgcaaaatgtaccacaattgtttatatctatgctgtgatgttctttgattctagtagtactgtcgtttgtttatcgtgaaatattttttatattatgagaaaagtaggagacagcaaactaacatctgactttatgccttgaatgattatttagctgtatcttttttaaggactttatcctgtttcctattggaaaattgtgcaggatgattgggatccggttaacttgtaaccaggattgtctgcatccctctcataagactgaacttgtcacacttttctatagactttttcttactgaaaagaatgagtgtgttccagtctgaagccacttgtgaaaggaggaaacttctgctttctattttactgtaaattcatgtttttgtgtttatgccaagaaatagaagcttgaactcaacgaaggcagttgtgcatgaaagggataggaaatgaaggtgacaatggaatatatttgctcattttgagtagcatcatggtagaaaggaaaatggttacagacttgtagggttgtgctttggaggcagactgccagtactgttaatacttcttgttcctaatccttaggtaaataaggattttcttcaagttctgaagtaagacggttttaaagattattgctgaaagaataggaaccagatccattaaagccatattttgtcacattaaaaaactctgcagtgtgctattctggaaaatgtctcagatgtttaatctgggcttatctattgattatgtcaggttttcaacttgtctcaacttcctcatttattaaaacaatatttcctggcaattttaaagttagactacagtatgtttttgtatttgtagtataatatttagccccttaaccccttacaggcactcgaatattagttcttcccctccaccctggaagagtttccctttgtccacttgagttgaatatatgtgccgtactaaaggagaaaaactaccatctacccagttattgaagccaagatcttgaagttacaccagactctctaatttctcattttctgcatccgtcgatttctggagttcctcagtgatgcacactgggggtctcagggatgacagtttttcatgaccctaggttgaaactgggagtcatagaagacgaaaaaacgagaattggattgggagttgactctgttgcccaggctggagtacggtggtgcaatcttggttcactgcaacttccgcctcccaggttcaagcaattctcctgcctcagcctcctgagtagctgggactacaggggcccgccaccaggcctggcgaattttttttgtatttttagtagagatggggtttcaccatgttggccaggctggtctcaaactcctgacctcaaataatctaccctcctcagcttcccaaagtgctgggattacaggcgtgagccatcgtgcctggccaacttgcatttatttctgattagctgctcatctgagaaaggtggcttaaaaaaaaccaccaaagtggacagactgaagctaaagactgtcagtatatatgctctgcttggcaaacagctgactttggatagatctcattatttaaagatgaataataagggggaaaaacgtgtagagagaacatggtttacaaaaacccatctctttctccagtctctgcaatattctatatttggtcatattgaactatgaaaatctaa

SEQ ID NO: 20030 - DNA, 1029 bp, Homo sapiens
gtatctctaattgcttaggggagaagggtattactggaaagacggggtgggtgacttttcatagtataaccttttgtaagattttagtgctttactgtatgcacgtgataactattcaaaaaaacaagcccctttttttggacccagtttattgactccatattcttataacagcaaaataaaaattcttttaagttaaaaaaaactttatcataggaatttccaagcatatgttaaaataggatatctccagcttcaacactaatggcattttgcagattgagaggataataaaatgtagctgtagtttggatacatgtatccagatatattacatgtatttcagatatgtcctctgaaaatacctgcaagtttatagagaatgttgtatatgtcctttgactttatccatgcttagttccatagtgtataattcagtttatggctgggtacagtggttcatacctgtaatcccaacactgggaggtcgagctgggaggattacttgagcccaggagttcgagaccagcctgggtaacatagggagaacctgtctcttaaaaaaaaaaaaaaattagccaggcatggtggcgcctgtagtctcaggtactgaggaggctgaggtaggaagatcacttgagcctgggaggtcgaggctgcagtggtaccactgcactccagcctgggcaacagggcaagaccctgtctcaataaataaagaataaaaatacaattcagtttctgtggtatagcttatatgccatcacacctttataactgactgagaatactttatggttactatgtgctgttttgaaaataaaacctgtttaaaaatatgttgcattttaaaagttttaatctatattgatattactagacatagttatatagtttggccaccctgttacatgctcctactgtaagggtatacctaaaccagacttgcagttaataagagtgacttgtcctattattgtgtgctttggcatatttctcttttgagtatataacaggaaaatatgggaa

SEQ ID NO: 20031 - DNA, 1102 bp, Homo sapiens
gtattaagcttccttcagactctttaaagaatttaaattcaggtccttagcaattcccatgcctctctattaaaaggccatcattttaattttgccaaaattcttttctatttttaatgttattgttatcttatcacatttcttaatgctttcttatgtgtgcagatggtgagttatcttaaattagattgtattagttattgtcctgttctataaaaagaataaattgaaaagattttcggagcattgtacaataacatcatagatttgtccctatatgtctgcactatggagtcaagctgtcatcccttgtccccctccccaagaccaccccacttatgtatatattccaacccctaataatctgggagttgaggaaggcagcaaaggaaagtaagtcattccaaaatactgcttccctctgaagccagttttgaaccccttggcttctttttataaacaggactgtaactctcacaatttttcaagtctggttgtggtttacatactgtgtgggatgggaataacattcttcattttatgaaagaaatttttgcacatgtgttacggagggttgtagtacaaagctgtatgttttgccccccttctttgtccccccagcacccgaatcttaaaattttggtccttcaggagccagattctctgtgtctcaggaatggtgtttttcttagtctttaaagactaatcttgatagcctagtgatagttgtaggctttggcctctattaatttataccaaatcacattttgaactgatggatttcaaactacaagtacaagcctttgcatctgactcagtggactcttaacactcaaggcaaatttcatccttttttaactaaatgcttgctttcttaattggatgaagcttgcactttgttcttatctccagtatattaacagcatctgaaactatcctcttcctttgtctccctctcctttcctccagcacctctaccttccctttgttatcttaagccggttaaatgtagcaggcacttctcttacgtgctagtggcaacaagacagaattgaagcagatcctctttttaaaaagcagtttccacaagatttatttagat

SEQ ID NO: 20032 - DNA, 1964 bp, Homo sapiens
tccaaagaaggcagtggatgtcttctttcctccagaagcacaaaatgattttcctgttgcaatgcaggtattttaagcaaaataaatgactttttaaaaatctctcctcttaaaagaaattaacccaaagactattcatggtagatataatttaagtgatgcttaaaagaatacttttttaaagtttattagtgaagctttgtaaaataataccttggcttttcatgtacaggactaccttaggcctattatgaggtttggctccagaccaccacaataaagtaaataccacaacaaagtgagtcataagaattctttggtttcccagtgcagatcaaagttacacttaacactatgctgtagtctactgtaaagtgtgaaatagcattgtctagaaaaacagtatacatactgtaatttaaaaatactttattgctaaaaaatgttaatgattatttgagcctttagtgagttgtaatctttttgcttgtggaaagtcttttctcaatgtcgatggctgctgaataatcagagtggtggttgctgaaggttgaggtggctgtggcagtttcgtaaaataagacagcaaagaagtttgctgcatcaattgactctttcacaaaagatttctctgtgcattgctgtttgatagcattttacccacagtagatctttcagaattggagtcagttctttcaaaccctgccactgctttattagctaagtttctgtaataatctaaatcctttgttgtcattcagcaatgttcacagcacctttaccagcagtagattttatctcaagaaacctcttttctttgcccatccttaagaagcagctcctttactaggagattacagtaattcagtcacatttttaggctctatttctaattctggttttcttgctatttctaccacatctccacttacttgctccactcaagtcttgaactcctcagtcatccatgaaggttggaatcagcctcttccaaactccttttaatgttgatattttgacttcctcccatgaatcatcagtgttcttagtggcatctagaatgatgaatcctttccagattgaccgttacttaaatttactgtggtgaatcctttccagattcacttaaatttactttgcccagatccatcagatgaatcactgttcagggcagctgtggtcttatgaaataatatttcttaaataagaagacttgtaagtcaaaattacttctttggtccataggcttcagagtggatgctgtcttcgcagacatgaaagcaatattaatctccttgtatatctccattagagctcttgggtgactatgtgcattgtcgatgagcagtaacattttgaaaggaatctttttttttctgagcagtaggtctcaacagtaggcataaaaagatttagtaaaccatgctgtaaacagatgtgctgtcatcagggctttgctgttccatttctatagcataggcaaagtagatttagcataattcttgaaggtcctaggatttttggaatagcagatgagcattggcttcaccttaaagtcaccagcatcattagttcctaataagagagtcagcctgtccattaaagccaggcattgacttctctgtagagaaaatctgttgtttagtgtagccaccttcaatgatcttagctagatcttccatataacttgctgcagtttctacatcagtacttggtttttcaccttgcacttttatgttatagagatggtttatttgcttaaacctcatgaatcaacttatgctaccttcaaatttttcttctgttgctttctcacctctctgagccttcacagaattgaggagagttagggccttaaactagattaggctttggcttaagagaatgttgtagctggttggatcttttattttatttatttgtttatttatttatttatttattttatttatttttttttttga

SEQ ID NO: 20033 - DNA, 1050 bp, Homo sapiens
ggtagaacacatagaggcaattgtagttattatattggcctaatattgttgtgtctcaggtaatagggaggcctgaggaaagggaaagaaacgggagaacagctggttggtggagcagtcagaacacacacaatatttatcagttcagtttgctgtcttatgtgggtgcaattcatcacaccccaaaataatagttacatcaaagatgactggccacagatcaacatgacagatacaataatgaaaaggtttgaaatattgtgagaattaatgaaaacgtgacacagagacactgaagagagcacatgctgttggaaaatagtgccaataggcttgctcgatgcagggttgccataaaccttccattcgtaaagattcatctgcactgcaaagtgcagtaaaatgaggtatccctgtaatacgtaaactgtgctatctaagttttgaattgtctttcctcttatcagtttcatgttatataagagcttgggatatccatatttaaatgtgctgtagaaatgaaggaaactttaaatattagcttataatttttcaaataaccctcttgttctggaattttaccatctctaaaatggaattagactgaatgtttttattttctgtttgtagattcattattttactaaagtgttgattttctttctgtagatcagtgaaaagcatgatgtggtgttcttgataaccaagtatggttatatccacctctatgatcttgagactggtacctgcatctacatgaatagaatcagtggagaaacaatttttgttactgcacctcatgaagccacagctggaataattggagtaaacagaaagggacaagtaaggaaaccttgaaacttaagcaataaaataagataacctgatgagttgggaacaatcctgtccttttgagaaattactccccaagattaaaaaatagaaaataaacatattactgttagtttttttccaaaaagtaaatagtaactttggatattagaaaataatatatatcaaagcacgatgtaagctgataaaaaagaaaat

SEQ ID NO: 20034 - DNA, 1018 bp, Homo sapiens
tctccatagtatcttaaaacaatttcttttaaatctttttttgtagattgtagatgtctttatggaatacaatctaattcagcagtgtactgcattcttgcttgatgctctgaagaataatcgcccatctgaaggtcctttacagacgcggttacttgagatgaaccttatgcatgcgcctcaagtatgtgttttaatgctttttaggcatgtttccaacattgttttagtaattgtgcagcgcctctcagattgttatgcaaagctactgaggggcctactccttattaaagaaaatgtagctattataatattcttttgtactttaacagttcactattaaaccttaatctgtaatacggatattgaattactcatgtaagtggagtggacaataaacttgccttgtttgtggttttacaggttgcagatgctattctaggcaatcagatgttcacacattatgaccgggctcatattgctcaactgtgtgaaaaggctggcctactgcagcgtgcattagaacatttcactgatttatatgatataaaacgtgcagtggttcacacccatcttcttaaccctgaggtatttcagtttcttacctaatagatggtgttagttgtgattaataggtacactgaaaatgtgtttgtggtactaaatattaataatttcataccaccatgaggttcaacattatttcatttattcattcattcatttattttgtcttgtagtggttagtcaactactttggttccttatcagtagaagactccctagaatgtctcagagccatgctgtctgccaacatccgtcagaatctgcagatttgtgttcaggtggcttctaaatatcatgaacaactgtcaactcagtctctgattgaactttttgaatctttcaagagttttgaaggtaattaggagtttttgagtttttaaaaaaagtacttaaggtagccaagaagaggtatgcttatgatcaggctgttggaaattttgtttttctaaaa

SEQ ID NO: 20035 - DNA, 1073 bp, Homo sapiens
tagctttagctttattcttgtaactgccagttactttgtgatggaaataaagctttaaaattgatagctatctataaaaggctaggaaaactacagaacacttagattactgctctctcactgcctattatgtgtgtgtgtgtacactatatatatatataatgattcctgagactttatagaaagttctgaagtattttttgtcttggaagaattttacattacaagtaaaaccaaaatgtttttgtagaacacagtatagaaagtaggcttttcctactcccagattatcatcatttgtgtgtgtggttgcattggcagattgttcttttgaagaatttactacctgggctctagattaaatagcaaaacccttaggggttttagtgtaatgaagtagtcaaaatgttgaaactgctctacattttagattaaaagatacacttttcaaaaaagtatagctttaaaatgtcttggccatcatgaatattctgggtaacctagctgtgctatgtttggaccaaaactttctggtgtcaaaaaacccctccaaatgagaaagatttgatactctgtgcttgactagtgtacccatactactgattcacttccttctttgagtatcattactatttcctttaaaaaaaacaacaacaaaaaaaactactactagattcttttgggggcagggggtgttgggtttttttttttgtttttctttttaagcttttaagttcaggggtgcgtgggcaggtttgttatataggtaaactgtgtcatgggggtttgttgtacagattgtttcgtcatccaggtattaagcctacaacccattagttattttttctgatcctctccctcctcccatcctccacccttcagtaggccccagtgtctgttgttcctctctgtgtccatgtgttctcatcatttatctcccacttgctagtgagaacatgcagtatttggttttctgttcctgtgttaatactaccagattcttaaatgatttctttttgtttttattgagccctcagcttctatgcttaaattgtaacttctttagctttgga

SEQ ID NO: 20036 - DNA, 1033 bp, Homo sapiens
taaagataacaaaaatattttatatgtgtataggtaagatgactagtgtgttgatccatacttttttgatgttcatttagtaggaaaaacatgacatactaaaatttttacatagatagatgcagacagattctagaaatgatcgtaacagctattagtgcagagtttccatggtgttaaacaatacttattttagaaaaccttccttaatgtggaaaatctgcagctttacagacatttttattttttaatttaggatggctatattaaaattaagatttaccttggtgttcttgggacacttcatagactagtcttcgtattatttataatcgagtaactaatatcccctagtctcaggagccatttaattctaaccttgaaaataatgttcttagtggccatcactggggaaagttctaccctacttagttctgcttccctagtagactgtgttagaggaatcatttattgaggaatgtttcactgtgtataaatgaattcctgatggaaactgttgttttttgtgctctaccttatgtctgtggaatgtaacaggacatgtatcaggtaaatgcccagtacaggttttacttacctgtctataacatcttctatgtcagtctataagtaggattgtagtttggtatctgtaatggaatgataaaagcagttggcaatttaaagatatcttttctttaaatgctgggtttttttttttgtagggggtgggttttcttatggccacatgtggtcaccatcatgctgctccttgtaggctttgttataatagagtattagaggctggttgtatagattggatgtggggagggatagaaaatcattagtttgaaacaaatgtaagccatttatgccatatgtttgacaatgtgactatagttattaagttgattttaaatacggtagaagtgttattaccagtgaaagtcccagtatggtgaatttatcatctgagagccactggctcaggtatcttaatttgttactcttgttttttggtaaagggtgtgta

SEQ ID NO: 20037 - DNA, 1012 bp, Homo sapiens
cggttgtggtggcacgtgcctgtagtagcagctactcgggaggctgaggccggagaatcgcttgaaccctagaggcaggttgcagtgagcccagattgcatcaccactgcactccagcctgggcaacagagggagactccatctcaaaaaaaaagaaaaaaatcttgccctccaaattagaaatattgtccatttcatagccatatgttagtccttgatagtgaaaatcttggagaaaatggtatctttaggtaaaatgaaaaatcataccttttgatgcttgaatctaggtgtcatattacatgttaccatctaaggggctcattgattgagaacggaatataatgttaaacaaaatactgatctggcatttggatggctttttttttttaaggctctgcgaacatcaatagatgcttatgacaactttgacaatatctcgcttgctcagcgtttggaaaaacatgaactcattgagttcaggagaattgctgcttatctcttcaaaggcaacaatcgctggaaacagagtgtagagctgtgcaagaaagacagcctttacaaggttgataaagttgcggggcaggggctgttttaaaccaggcctaaaatggtgttacaagtgattataatctataaataaaagtattggttttgtgaatatgagagctgactttaaggcaatttaagttaatggatttcttgattctaggggctctcttatgttaaggtcaaacttgtctggggaaaaaaaagcttttagcttatctcttctttgaaaattttaatttaaatgatacaactaggaggcttttttccccttgcaaaaccagatttatattggaaagtttccattgtttttcttggtttactagttcagtatgtggggtctaatgtttttgactttcactatttctttgaataggatgcaatgcagtatgcttctgaatctaaagatactgaattggctgaagaactcctgcagtggtttttgcaggaagaaaaaagagag

SEQ ID NO: 20038 - DNA, 1245 bp, Homo sapiens
cttctgtctgatactatccactttgaagagtagctagcatatagtagccatttacttttggctcaattaaaagcaaacatttttgggacaaaatcaggctttcctgattacttcttagataacagagcccacacagtattaaaacatgcagcctttctttatgcaaaaagattgaatatggagccacttgaatcttaaacttcagtctgcagctataaccaatatcatcagaagttatacacaattggcaaaagaatagcttattctgcccaaatacttgtccagtcactaggatcatttcacttttttgaataccatttgctttggggagggaagtattgccagaccatgaattcattattacctctgatcagttttaaacttcatttgaaaagtggttccttctcgttttctccctccctcaggctgcatcctagcatgcccagttttagtctggcatgagcttttatggcattttgaatccctccttcctgagggtttataatgacagtgctgaaaaccacctggactgaagtatgaacattgccattgaatttgagggggactgagaatgttctttctagtctgttttattttgacagaatttaacatactaaggcttttccactttctgccataaacctaggtttataatacttttggggtgctaattaacatgatgtgtttttctccaggtggataaattagatgcttcagaatcactgagaaaagaagaagaacaagctacagagacacaacccattgtttatggtaatctctctctgtaacctcaaaaaattcattagacaaatatttaattacttagagactgtgcctcaaaatagaatacaacaagcttctaaagtgcaaaaggctttctaagaaatactgctctctactgtctgattttttttctgagaagtcataaagcaggtgttgatattattcactaaaataatcttaaatacaagaaaactcaaaaatagtcatttaaaatcataacatgaatctttcctatcatctggtccctcacgcattacctgctcataaattactgaaaaagaaatattgatgaattccattttcaaaagagcaaaaggtgagagaacatgccaaggctgtctttagtatgctttacataaagaatacatcctcattttaaattctaactggggcagagaactgggtagagtttccatttgagaactttccagagagataggatcttcaaactctcaagtgaat

SEQ ID NO: 20039 - DNA, 1050 bp, Homo sapiens
attttagccttttattgaagtgatgtgctttttgagtagaaagttttgctttactaacacctgaagaatgatacaatcacaggcaatctggtttttatatgttgtattacattaaagtaaaagcactgatacctgtagtatgaaatgaagcatgttataaataaagtacatttaactatcttaaacatttcaagtttggtttttttttttgcccatatcattttattcagtagaattgtttcctaaataaaactggtctatgatcttagatttatgtatcaacagttgcagcatcttttgtagtatattctatttttatataataatgttaaagggaatatgaaagaaaactgtaaaaaggtaaaatgataagattaattttgagtacacagtagtatgatatttaattgtaaattagaaggagttagactttatagtgtgttaacatttggagttactagtgcttgatatcctccttctgtggacagattacctccaaatttcaatctggaagatccctgaaataactactaggaaaaggtttacaactatatggcttttatatttttactatttgtattagaatatctatataaattgttcaatagaataactaaattgttcaaattttggttataaaagaaaaaaagtgtaaacacatcatacatatcatgtggcttattactgtgatgttattcctgtattcagttttattcagtcacagctacacagcagaagtttgtaatgtattgctggattttattttgctgtattagctcctcaagagttactgatctatgaaatggcagagaatggaaaaaattgtgaccagagacgtgtagcaatgaacaaggaacatcataatggaaatttcacaggtaaattttgatggtttgcagggaggagtgctatgggtttaaatgatatacttttcattggaataaaatagagatatattacttcttttatttttaatcttatattatcttcttagtaaattaaattatgggtcagtcagggcctgtaaggtgatatttcacagtgatggca

SEQ ID NO: 20040 - DNA, 1023 bp, Homo sapiens
cagcctcccgagtagctggaattaaaggcatgcgccaccacgcccagccaatttttgtatttttagtagagatgggatttcaccatgttggccagggtggtcttgaactcctgacctcgggtgatccacccaccttggcctcccaaagtgctgggattacaggcatgagccaccgcgcccggcctcatttgtttgttaatcaccatattgccttgcagaggacattttgcagcactgatctgacttttgggttactttggttgtcagtaaacttggcaatttcaccaagagtttcaggattcagagatgggcattgcatacatcatagtgtcttcccattaggagcttttgtgtgctatttttttctttccttttagagagcacatacatttgtatattcttcctcttctgctcaccccattggaatttaaaattaacattagcatgtcaaacttactcttctgtaccaggtgttttttaatattttagagattatgctataactgtacatgaaaaactgattcttaggctgggcgtggtgattcacgcctgtaatcccaacactttgggaggccaaggcggaaggatctcttgagcccaggagtttgagaccagccaggacaacacagggaaacctcatctctgcaaaagattttaaaaatttgctggatgtgatcgtatgcgcctgtagttctagctagctactcaagttctagctagctactggaaagactgaggtgagagtatcgatttagcccacaaggctgcagtgagctgcgatcacaccactgcactccagcctgggtgacagagcaagaccctgtcccccaaaaaaaaaaatttattctttattatggctgcttagtttttctttccattgtacgagtgtgctgtactttaatcactcttctgtcctctattggtaatatataagttattgattattttttgctagtacaaataatgctgtggtcaataaagttgtgcaagtcatttcaccttatacctaatcattcctagaaa

SEQ ID NO: 20041 - DNA, 1027 bp, Homo sapiens
tttcttgctatggcttggcaaagagaagatttttaatgctttcaatcatgaatttgttttaggccctttgcttattttatgttttacagatctgcatattttttaattatacaagtaattttagtaataagattcttacattccaaaagtattataaagtaaaaagtgaaagctcacacaccttctccccagtgtagggtaataatcactgtattccagactgctttctttgcatacataactttttataaaaattagaatcataccataaattttagtcacaagttcctttttcacagtatcatagacatgtgataccaatgttattataaaattattttttattacgaagtgatacatctcattgtagaaaattggtgagtgccctttagtcttttctctataaatatttatatacctaagagtgaaatcatattgtttgttgttttgtgacttgatttgaatctaaaaacgtgaacatttttccacgccatcaaatattttcacatctttgctataacgggtttttttcttactacaaagtaagtttattataatgaaatgctgaaaatacaaataaagaagaaatagaatgttcatctaacaggtgcatatatcttttttatgatatatttttcattttcttactggtttacatatttaagaagatgctctttgtcatatgctgccagtattattccttattcccagtagtttttccatgtcatttactgggtatgttttgttacatgttactttttttagacagagtctcgctctgtcgcctatgctggagtgcagtggtgtgatcttggctcactgcaacctctgcctcccgggttcaagtggttctcctaactcagcctcccaagtagctaggattacaggcacatgtcaccacgcccagctaatttttgtatttttagtagagatggggtttcaccatgttggccaggctagtctcgagctcccgacctcaagtgatctgccagccttggcctcccaaagttctggaattacaggcatg

SEQ ID NO: 20042 - DNA, 1034 bp, Homo sapiens
ctaaatctgtggtaatggaagccaatgttagtggttattttgcagggagtaattactaggagtgccaccagcagggtttctggagttccggtaatgttctgtatctggatctcagtagtggttacatgggtgtgttgtaaatttccattaagaggtatattttagatttgtatgctttactgtatacgttatgccttagtttaaaaaactactcatactgttttctcctgcaacctgcccatgtaaatttggtaacggaaatacatctatacatcgagaaatccacttaatcctgatcttgacccagaaatagttgatagctccctatttttggcacaacactctgaaatgtgtggtgttcacagtggattatgtatttcctgtgtgtatacatgaaaaaaatttgtgttgatcagttctcacgtaacttttgaaaagtgtaatttggataaagcatcatgagacctactacagtcacagctgcctctagatcaatgacttttttacttctttttttaaactgtagccaacaatacaaaatacattgtacttagcaacccagagccaatttgtgtgtaactagaataaatgtttcgtgaaatagtatttacttccattgcttgtgaggtctcaccattttattctgttcattaaaacacaagatgtaaggccgggcacggtggctcacgcctgtaatcccagcactctgggaggccaaggcaggcggatcacctgaggtcgggagttccagaccagcctgaccaacatggagaaaccccgtctccactaaaaatacaaaattagccaggtgtggtggcgcatgcctgtaatcccagctactcgggaggctgaggcaggagaattgcttgaacccaggaggcagaggttgcagtgagccgagattgtgccattacactccagcctgagcaacaagagcgaaactccgtctcaaaagaaaaaaataaaaagaaaaagcaagatgtaatttgttaccaactaaattttcacaccgcattttaatttaatgaaactgc

SEQ ID NO: 20043 - DNA, 1031 bp, Homo sapiens
ctcattgcctttaaaattgcgtggtgctgggattggcaggtgccaactgtttgctcattctctttgacccactagccttgcagtttgctgtgtgggtgttgatactcctaaattaaagcagggaaggggtggttttagatggcttttaacacctgctctccacccaagcaccctggattcatttgatatctggattctaattctgtagtcaggagactggcccaaactgtggcccagagagaagtgagtcagttgcaagtggctagctgactctatgggaacagaaataaaatgcagcttagagagtttgtcagccaaatccacaaatgtgtggctttttgaaacattggacatctgttcctcttaatttaaaataaactttttttttttttttttttaagcacaaagttgcttggctccttgtttctttgtgtcagcagcagttgctgctctaatttaggaaccctaggatctgatttaggacatttggaatctttaaggcacattcgatctagaaagtggaactgaattgctttgggaaggcaagaggatgattttacagtatagggtttgtgtggaaatccccttcagcagtaatcaacccaggtgtccaacctgtttgttaaccatttccaaatgactcagaggacctagagggagggcttgaacacactccagcactgtttctacaatttagcctttatttgcattggaaaccacattcctgaattcttgagggggcaggctctggcttattctgggcaactgacttcaagtgggacccctgagctacctatgtaagcaaagagtcagccatctctggagagttaccagggaggaggatctttctgtgaacttgctttgatgacctccacccaaagccctttgaggaacagttttgtttattcaaggagcccttggcaggtcactcctcccctaccacaaatctaatccaaatgcgacattttcctttgaggccatctatcccttttgggggacaaaacacatcagcttttcccttcagaccactt

SEQ ID NO: 20044 - DNA, 1026 bp, Homo sapiens
gggtacaagcaagtaggattttgagaaggtgtgaggaggaggtcagaaaaattggtggaaataggaaagagaaagaaatatggccccgattttggggagagaaagtctggggaaagagcaaaggcaattaaagaggattttgaggaagagacttctgtaaaatatgtcttagcaacactttttggagttgaaaatatttctttttagtgtgttattttttctaagaggtgcctcaagatggataatggaagatttggagtacgattgggttgacaatccaaggagattcggtgacatccagattaccctgaaataaaaaaaaaaaaaaattctggaaaatgagagaagtttagattcttagaaaatcttctgatagtttctatttgtgaatttatagactttaatttattacacaaagtttttaaacattggtgcatatcagttttcctcattttatagtaaggaaactgaggcataggccatatgatagccaaagatcacatagtggtagtgtcttctgacttaattcagcaggcttcattgcacaggttcttcattgcatttactagttgtgtttataatgttcctctttgtggtatgtcaaaagtgaattcagattcctttggccatactcactctgtgacctggagtaaattccttaatctctaatgttttctataacatgagggttacattaaataagtacgtaaagtacagtactctcaaaatatcctggcgtattaagcaattagctagttcacagaaattcagcttgtcttgtcattgctaaggaaccaatcattcaggtttaacctcgtatacctagagacttaataattgcagttaaactcgaggtgctgtatttttacaactgtagtatcatagtgtgtatttttttttaaaactaattgatcccgtttagagagatgtgcctttcaaggtacgttacagagtgactatgcgttagtaaatataggtatttccatagtttatttaattagagattaaaagatgagactaaatgat

SEQ ID NO: 20045 - DNA, 1068 bp, Homo sapiens
ctgtaatcccagcactttgggaggccgaggcaggtggatcacgatgtcaggagcaggagaccagcctggccaatatggtgaaacccagtttctactaaaaatacaaaaattagccaggcatggtggtgcacacctctagtcccagctattcaggaggctgaggcaggagaatctcttgaacctgggaggtggaggttgcagtgagccaagatcataccactgcactccagcctgggcgacacagtgagattccgtctcaaaaaaaaaaaaaaaagattctgtttaaatatctcagaggaatataatcaaagcctattggtaagaggggagtttttgggcggagggtgtcttttttgtttgtttttttgtttcactgttgatgatatcatttggggcagtaaattgaaactaaggaaaagttttccttcagagaatttagattgcaaaaatgttggaatcttctctgctctctatagcattaagagtagtagaaaactgtaatgcaatttaaaaaattctcactttgtactctaattcaaaatttgaaataatcacgcaggcttactgtacaagtttcagattgggacatcagatttttattgagtaaaaggtttaaaatttttgaaaaccaaagtgctatatagatagtatatactcaaatattcatgattatgaaaaattatagaaaaaatatcaatacttatcttgctttgtaatatatacttactataaagcagcaacttttttttattttttatttttttgagacggagttttgctcttgtggcccaggctggagtgcagtggtgcgatctcggctcactgcaacctctgcctcctgggttcaagctattctcctgcctcagcctcccgagtagctgggattacaggtgccgactaccacacccagctaattttttgtatttttttggtagagacggggtttcaccatgttggccaggctggtctcaaactcttgacttcaggcgatacacctgcctcggcctcccaaagtgctgggattacaggcatgagccaccgtgcccggccagcagcaactatttttaa

SEQ ID NO: 20046 - DNA, 1048 bp, Homo sapiens
gctaattttttatatttttagtagagacggggtttcaccacattggcctggctgattttgaactcctgacctcaggtcatccacccgcctcagcctcccaaagtgttgggattacaggtgtgagccactgcgcctggcccttgggaggaccttttttttattattatttttttgagacagaatcttgctctgttgcccaggctggagtggaactcccaggcttaggtgatcatcctgcctcagcctcctcgatagctgggactacaggcatacaacaccacactcagctcgagttttatagttttagctcctgtatttaggtctttgctccattttgagttaatttttgtgtatagtgtgaagtagcatatagatatccagttgtcctagcatcattatttgatttgtatgtggatatccagttgttccaacacatttattgaaagattgcctcttgcctaatgaatatttttggcagttttatcaaaaattagttgacaatataaatgtaagagtttatttctgggctcttaattctattctgttgatctatatgtctttctttatgccagtaccacactgccttgatggctgtagctttgtaacatgttttgaaattgggaagtgtcagtcctccacctttgttctttttcaagattgtatcagttattttgggtcccttgcctcccttccccttccccttccccttccctttcgacagagtctagctttgttgcccaggctggagtgtgcagtggcgcgatctcggctcactgcaacctctgcctcctgggttcaagccattcttctgcctcagccctgagtagctgggattacaagcatggatgaccactccagttaatttttgtatttttagtagagatggggtttcaccatattggccaggctggtcttgaactcctgacctcgagtaatccacctatcttggcctcctaaagtgctagaattacaggtgtgagccaccacacccggcctggctcctttgcatttctttctttctttacttttttttgtttgtttgttttga

SEQ ID NO: 20047 - DNA, 1021 bp, Homo sapiens
gctggtctcgaactcaggtgatctgcccgccttggcctcccaaagtgctgggattacaggcatgagccaccatgcccagccaactgctatctttttaattcagcagttttcaatttttttttttagacggagcctcactctgttgcccaggctggagtgcagtggcgtgatctcagctcactgcaacctccacctcccaggttaaagcgattcctctgcttcagcttcctgagtgtctgggattacaggcgcccaccaccacacccggctaatttttgtatttttagtagagatgcggtttcgccatattggcatgctggtgtcgaactcctgacctcgggggatcggcccgccttgacctcccaaagtgttgggattacaggcgtgagccaccgagcctggcagtattaactttcttttatgcgagttaaggatttgtttcttgtttacttcaccctcctttatcctcatcctctcattttgttttgctttctttgaatctactattgtcctctgatgtcttccaacaactttgtaaaacacctttcagtctaatgttctttgatcaggcttataagataatctatcagttccatttatttcccagaggcatatcttaggaactttctatccacctgttcccatctggagtggtagctctttagtcacaactgttatgactggactctttcttcaccacaaccctggaatcctcttggctccttcagtgttggatcttttgtttcctggatcccatatcttcattttttccctttttcttagtttatgtccttgttttggtgacactatactagtggctccctcagacaaggtatataaagatacatttataataaaaatatatccatattgcatatttgagaatttctttacatttttatttacttgattgtttatgttattggagttgaaaattattttcacttagaattttgctcagttttcttctattcttgagagtttctgttgaagtgctttggcattctgattcccagtcgtt

SEQ ID NO: 20048 - DNA, 1062 bp, Homo sapiens
gatctttgtgtaaggtggtaagttttttactttctggatcagtgatgattgattcatactatctagcaattttctttctttcccctaattggtagcattgggcagaatgagctaccttgttataatgagtttctgagaccattttaaggactcttcacagttcactgtgataaaagctatatatttgaagtactgtctcacacctttgttcaaaaggtacagagtatgtttattggggtctgtgtacgtaaactagacttcataaaacagttttcccaggatttttctttttcaggatggtagagaattttgtatatacttaaagctagagccttaaacaggttatttcacttttttctctatctttattttctctttactagatagattgtatcattggcaaaaggtgactttgccctagccttaaacagttagcatcccattttatggatggtaccttgttcttgacatctgcaagaaaatttgaggcaagaaaagttaaatggaaggatagattaaagtattatgtgacatgttcaaacactgcacatacttataattcggagaataatcatgctgtaatctttcattgtaggtcatgtgaaactaacagactttggactatgcaaagaatctattcatgatggaacagtcacacacacattttgtggaacaatagaatacatgtgagctacatgttaaacataattggtttgggggtaatagctaattttacctgttttaaggaatagtatctgttttctgtaccctcattgactctgtatattgtttttaaaattctaattcagatgatatgcaaatgggtgaatttttaagcatattattttcctcattgtagggcccctgaaatcttgatgagaagtggccacaatcgtgctgtggattggtggagtttgggagcattaatgtatgacatgctgactggagcagtaggtgcacagttaaaagctgcatgtattattggtctgtgctgagtcactatagcaagagacctgtcctgtgctttctgaacatgttaccagtggagttttcaaagcccaa

SEQ ID NO: 20049 - DNA, 1019 bp, Homo sapiens
tgctgggattacagacgtgagccaccatgcccagtcgatatattcacatttttaataggaataactgtatactaaaatctattttagtgcatgtttaagatttgaagatgtaatttgactcagtactttccacctacatttttttcttcattctgtgcctgctaagactattctaatactttattatagttaacccccgtgaaaagagctcccagagcttacagtgcatttgattgatgtaacatggactatttattattttctaaattattttgtttgtataaagcaatctgaagaggatgtaagtcagtttgattccaagtttacacgtcagacacctgtcgacagcccagatgactcaactctcagtgaaagtgccaatcaggtctttctggtaagtgaaagaatttccatgtagtcatgggaaattttagtgtgaggatgggctcttcaaagaaaattcagtttgcttgctttgcagttcatgtaggtaacctggcccacttttttttttttttttaaataagccatgcctttataacttattgatgcctacaaaatttattttcataatccaacattttattttagcaattagagtgggaatgtacaaatctttggaaagtatgattcccttttttttttaggccacagacttaaaatgatgtttggcttagcatctcaaccaaaaattagtcatagcagtcggggagaaaaacctcactgactacatgtattttattcctgaaacagctatagatttttggtactttttttttttttttttttgagacagggtctcaccttgtagcctaggctgggtgtagtgtagtggtgtgatcacagttcactgcagccttgacctcccaggctcaagtgatccacccatttcagccttgtgagtacctgtaccacaggtgtgtgccacatgcagctaattttttatttttttgtagagacagagtctcactattttactcctggactcaagctatcttcctgccttggcttcccaaagt

SEQ ID NO: 20050 - DNA, 1049 bp, Homo sapiens
ctaaagctcgcagatattctgaagaagtgcccagacaagattattactgggtgaagtggggaataagtgaaagggtatcaccagagacaggttaactttgaagggaaagcagtaattttggatataatagccaaagagggcattggttaaaaggtgacgtataaaccaaacgtgaaccaagtgcccagagcgttggaactcatagccctaccctccacttccagggagagaagagggactaaaggccaccaatggccaatgacttaatgagtcgtgactgtgtaatgaggcctctataaaaaccagaaggatcgagtgcagggggcttccaagaagttgaagaaaaatacatctacgtgtctaaaaggcagttcaccccaacttcatgaggatggaagtttttacacttgggacccttctggacctcctcaccctatgtatctcttaatctggctgttcattttgtcaacctaaaatagttaagagggtgagaatctagtttatttatgtatttattgagacagggtcttgctgtattgtccaggctggagtgctcaagtaatcctcccactttgacctcccaaagcactggcattacaggtgtgacccacctcacccagccagagtctggtttaaagagagtttattcaagcatagagtttaaggacagcctcctgggaaacacagattccaaaggatggaagtcagtgttttgtgaatgtgaagtttggattgtttatatagacagattggggaagcttaacagaatttcaacatctgtctctccagggtcttattttttgtgtaggctgtagtccagtggtacaatcatagctcactgcagcttctaactgccgggctcaagggatcttcctacctcagcctcctgagtatctgggattacaggtgccaaccactacatccagctctatataaggcttaatgcatagttacaacaatctgattagtcaggtggtctttttctttcaggaaaggtgtatttaatactacacactgaagatgtagcagtcgtggggtcttttgcaccc

SEQ ID NO: 20051 - DNA, 1045 bp, Homo sapiens
ctttggcctaccccccgtctcccaggcttccccactatccttctccagagtgtttgttataatcaatcagtgaacctacactgacatactgttatcacctggtgtccatagtttacattagggttcactccgggtgttatacattttatgggttttgacaaatacgtcatgacacgtatccatcattatagtatcatgcagattagtttcatcaccgtaagagtcctctgtactttgtctgttcatccctcccccacttactcctggcaaccactgctctttttactgccttcataattttgctttttccagaatgtcatatagttggaaccatatagtatgtagcccctatgcatgactttttaatatatgcatttattgtttgtaatatactaggtcactgagttatacagatcttgcaaatattgacactttttattatactatataatatccagtcatgcagcctctcaaaaaactccactgtatacatgtggtcttagtagtattatgaaaaaaaaaaatggaccttggagacaccctgaaaaagtctgtagtaacctgccaggggcccctaaaccacattttgagaaccactttgccagtactcgtatggtttcatcatcttttatattttaatctttaatccttctggaattttaagatctaagctatgtagtaaataggcaagttaactttttttctagatggctactagtagccacttgaataattatacatcttttcattactgagtagcagggtgaccaggcttaagacccttctttagtgggaagatgaccttgaatttaccctcttcttgtatttctctggtgaagataaatgtgaaatatcacctctgttgtaagacagcattgcttattgtagaatgatccctgaatggaattgcatcttggtagggaagttgttgaatggactgtacatttctattcggaagcacaggccttggcttccttgtatgcatgcagtttgtcttgtgtagggaccaagaaactgtagtcatgtgctatttattacattggtt

SEQ ID NO: 20052 - DNA, 1050 bp, Homo sapiens
ctgtcaacccccaattgtttactaattaggtagtgttgctttttttttgacatggtatttatacttacttttcttcacattacattcatttggttatactgcctattccagtaatctcaaaattttccactttgaatctaccctaattcctctctgaacaggaattttggcttatgcatctttgtatttgaaacacataagacattattttgtaataatgtagtcttattttattagtgatttaatatactgagctatcttagttgttgtattttaatcatttagattatttatgtgaactctttatttttagtgtaatgaacaagtctggggtgaatcgtgtagtttggaaacgacctcgactcactcacaatggacctgttagaaggagcacagttattgaccagattccttttctggcagtagcaagagcacttggtaagtaggacttaatttggtgaaattatattgaattttctacaatatatggtggcaaaataaaagaggagacagaactaaacccttacttggcatatagtgagggtagagatatcatgatattctattaactgctttagaacctaatcgaagccatgcatggtggctcacgcttataatcccagcactttgggaggctgaggtgggcggatctcttgaggtcaggagtttgagaccagcctagccaacatggtgaaactgcatcttcactaaaaaatacaaaaattagctgggcatagtgatgtgtagctgtagtcctagctactcaagaggctgagtcaggagaattgcttgaaagcaggaggcagaggttgcagtgatcgcatcactgcactccagcctgggcgacagagcaagactctaaaaaaaagcctaattgaggggaaggtttaggtatataattcactgacagttgccctttgttcatgagtcacgttcaatgttttgctaatttctatctctgtttagggaagtatatgcatatctaggcttaatgttacccttgaaactatttttaagtatcccattctcctttagcccttaatagtcctc

SEQ ID NO: 20053 - DNA, 1299 bp, Homo sapiens
aagtgttcccccagcctcagcttcccaagtagctggggctacaggtgcatgccatcacacccaactaatttttaaaaattttttgtagagacgtctcgctttgcccaggttggtctcaaattcctggcttcaagcgatctgcccacctcagcctcccaaagtgcatgtgcgacagcgctcagcctactcatgatttttttttttttttttttagacagaatttcgcttttattgcccaggttggcgtgcagtgatgtgatctcagctcactgcaaccttcacctcctgggttcaagcaattctgctgcctcagcctcccaagtagctgggattataggcgtgcgcccccacgcccggctaattttgtatttttagtaaagacctgtgagtgtctggggccacagaatgtaggcagaagtaacaaatgtaagggttctcattactcatgaatttttctcttttttctttttctttctttctttttttgtttttttgagatgaggtctcactctgtgccacaggggtttcaccatgttggtcaggctggtctccaactcctgacctcaagtgatctacccacttcggcctctcagagtactgggattacaggcatgagccactgtgccccgctcctactcagtatttttaactgagcagctggaaaaatggagttgccactaagtgataaagaaatgactggaacatcagtgtaaaggagaggtcggaagttcagttttggacacattaccctttcggcatgttttagacattaaggtggtgatacctatttggcttcccattataagaattgatttcaggtgttgtctagggtggagctttcaatttgggggagccagtagcatatagatagtatacaaagtcttgaggtcatgtagggattgagtgcagatagaaaaggggacaaggtctagtggctgagccctgagatactctcactgttaagactcgggggatgtgctctggtttcatttgagggttggattaaaattaaaaaaaaatctaaaagagttaggggatgtgaatggaagaacaaggtaaaacaactaacagctgtaagtcaaataggaaatttgggttagcgtaccctggaagctaagtgaagaaagtgtttccagaaagaaagtgtttcaaatactgttgtcatttaggtggagggaggattgaaaaatgaccatgggatttaggaatgtggaggtcattggtgaccttgaaaaagaaggtagcttttggtggaatagcaagaccacaaccatgattggggttattgaagaaagaact

SEQ ID NO: 20054 - DNA, 1059 bp, Homo sapiens
tgtgcctgtagtttcagctacttgggaggctgaggtgggaggattgcttgagcctgggaggtctaggctgcagtgagccgagatcgtgccactgcactccagcctgggtgatggagtgcaaccctgtctaaaaataaataaataaatacagttaaataagtaagtaaataaaaaaaaatcatttataaaaggctggatgggctgagcactttggctcatgcttgcagtcccagcactttgggaggctgaggtgggaggatcacatgaggtcaggagttcaagaccagcctggccaacatggtgaaacctcgtctctactaaaaatacaaaattagtcgggcatagtggcacactcctgcagccctagctgctcaggaagctgaggcaggagaatcgcttgaacccaggaggtggaggctgcagtgagccgagattgtgccactgcattccagcctgggcgacagagcgagactttgtctcaaaaaaacaaaaacaaaaacaaaaacaaaacaaaagggagtctcactctgtcgcccaggctggagtgcagtggaatgatcttggcttactgcaacctgcgcctcctgggttcaggtgattctcctgtctcagccccctgagtagctgggattacaggtgctcgccatcacgcccagctaatttttgtatttttagtagagacgaggtttcaccatgttggttaggctggtctcaatctcctgacctcaggtaattcacctgcctcggcctcccaaagtgctgggattacaggtgtgagccactgcgcccagcctcctatctctttgagactctacttttgagaattgctggcttatatagtaatgctgtttttaatgttttgaggaaccaccatggttttcctcagtgaacgtaccatttttcattcccaccaacaatgtacaagggtcccaacttctccacaccctttccaacacttgttagtttcctctctctctctctctctctttttggtagtagccatcctaatgggactgggttgtggttttgatttggattttcctgatgattagtaatgtt

SEQ ID NO: 20055 - DNA, 1090 bp, Homo sapiens
actaaaaaaacaaaaattagctgggcgtggtggcatgcgcctgtagtcacagctacttgggaggctgaggcaggagaattgcttgaacacaggaggtggaggatgcaacaagccgagactgtgccactgcactccagcctggtgacagagtgagattccatctcaaaaaaaaaaaatttattgatcattaaaaattgagacaaggtctcactgtgttgcctaggtgtcgaacttctgggctcaagccatccttctgtctcagcctccgaaagtgttgggattttaggcgtgagccaccatgcatggtcttaattttttttttttttttggtagagatgaggtgttgctgtgttgcccaggctgatcttaaactcaagtgatcctcccacctcggtgtcccaaagtgctgggattgcatgtgtgggcaacaatggccatcatcattttaaagtatattgtcagtattgttaaataatttacattgtcgtacaaccagtcttcagaattcttcattgtgcaaaactgaaactctgtacccattgcacaacaactccacagtctctacctcctcccagcccctggcaaccaccactctactttctgtttctatgatttttaactactttagggacctcacatgggtagaatgatagattatttgcctttttgtgattacctatttcacttaacataatgttctcaaggttcattcatgttgtagcatgtgtcagaattttcttcctttttaaggctgaatcatgcttcattgtatgtatataccacatttttttttttttttttttgagatggagtctcgctctgtcacccaggctggagtgcagtggcgtgatctcagctcactgaaacctccatctcccaggttcaagcgattctcctgcctcggcctccttagcatctgggactacaggcgtgcgccatcacacctagctaatttttgtatttttgtagagacggggtttcatcatgttggccaggatggtctcttgacctcgtgatctgcccacctcggcctcccaaagtgttgggattgcaggtgtgagccaccgcgcccagccctgtaccacatttt

SEQ ID NO: 20056 - DNA, 1137 bp, Homo sapiens
acgtcatttttctgacggatgtaagaagagctgttcagctttttacctgtggtcagatctaagtgaagtcttctgagctgcatgtgttggcctggaaactgaaagtctgaatgttcacaaatcagtgtatttcagcttcgaaggacattgtgttgctagaacctaatcattgcaccttagtttgagggaaggattggtcattattgtatttggaattaagatatgaatttcattatgtacaaaaaaactctacttattccaagagctgcttaatcgagtccttgaatctcattaatatcctgtactatcatacctatctgtggtccttcaggacaaaagtcttacatcatctgccctcatggagggccattataataaagactaattatttatatatttactttgaggcagcattacatatccattggagactgatttatgcatttcagttaccatgcatctattgatttaaatccataatttttggacacctaccagaatggctgacactaaatattggctaggatgtggagcagatagaactcttgtacgttgctggtggaagtgtaaattggtacaatcacattggaaaattaaatctacaaaagatacacatgtgcctgccctaatatacagaagtagttactctactagatatatatccaagagaaatacatatacatgtttactaaaagacatttgtgagaatgtttacatcaatattctttattatgttgttttcaaaatggtaaaacagtgatctcatacaactatataagggacagatatcctgcattttttttaactcattgattagggatttgggatgttattatagctggttccaagaagaaggtgaatatcacagagaagcaattaggaatactgaaataaattttctaatagatacaagcttggttaatattctgttgggcactaaaatgtactgtttggaataatcttttctacagagtggaattcacttgtatctctaccagacaaaattcatttgcatttctgtgcacaagaatcaattgcattactatcagtttttgacagctcagagtattgtacagtagcccagtcaaagacaaagtgtggatcccctatagaatcagataaccccaaagggtctgc

SEQ ID NO: 20057 - DNA, 1027 bp, Homo sapiens
gagttttggcgatgacctcttaagtacaacaccgaaagcgcaatcataaatgaaaaaatcagtaagttgggctttattaaaattaaaaacttttgctccgtgaaagattattttaagagagtgagaagatgggctgcagatggtgaggaaatattggtgaaagacacgtctgactaaagaactaaaaaactcttaaacctgaacagtaagaaaatgaacaatcctattaaaaaatgagcaaaagggtctcagcagctcgggctgcaggaggagtggcagcagccaggcagcccagcttcgcaaaggctctcggcatgctgcggcccgcaggcacctggcacacgtcctccccgccaccaggatgcccgagaggaaggtcagctccaccgaaggggccgccaaggaagaggccaagaggagatcgccgcggttgtcagctaaacttgctcctgcaaaaatggaagcgaagccgaaaaaggcagcagcaaagcattgaaaccaccatctgtaaagctctacatgttcttcacggggtgaataatttctacccaaaacttgggttaaagcttgaaacgaggaagtacaaataaaagggcaaaggggagcaaagggaaaacaggctgaaagaaactaaagaagatttacctgcagaaaagggggaaatgaaaactgaggggagtccagcctctgatgaagcaggagagaaagaagccaagtctgattaataccatataccatgtcttatcagtggtccctgtctcccttcttgtacaatccagaggaatatttttatcaactattttgtaaatgcaagttttttagtagctctagaaacatttttaagaagggaatctcacctcatcccattttttaagtgtaaatgcttttttttaagaggtgaaatcatttgctggttgtttattttttggtacaaccagaaaatagtgtgggatattgaattatgggaagctttgactgtcttgggtgtcagcttaacatttcatagatgggggatagttttcatatc

SEQ ID NO: 20058 - DNA, 1017 bp, Homo sapiens
agtcattgaaagatggcaatccctgatagatgaagaacaaatgagaggatgcctatggttgccccagtttattgctttgaaagagtttccagtcatggtgcaggaagggggaaccctagtggagcctagcagtctccctgaattgatgaggtattgctaagagtcctgggaggccaagatcatagattctcaatacactggaccagagacatgggagctgcagagagagaatcccagagatctgcagaggagacatgcgaacaaagaaagaactaccgtcagatcagaaaggcaagagtaaaactatcttttattcaaaaatgacatgattgtctatgttgaaaaactaaaggattttattttatttttaaaaaactaataaatgattttaacaaggttacaggatattagatcaatatacaaaaatcagttgcatttctatatactaacaacaatgaattgatcatttaaaaaatccagaagtgtatactactgacattcaataagcaagacttgtactctgaaagctagaaaatattgctcagagtaaagacctaaataaatggagaattaaaccattttcttgtgctagaatacttaccatcattaaaatgtcagttcttcccagatttatccatagactcgatgtaatctgcatcaacatcccagcagggttttcttttggttaaacattaacaagataattctaaaattcacatgaaaatgcacaacacttatgagcaaaataattttgaaaaagaaaaagttggagaaatgtcactacctatatcaagacttactaaaactacaataatcagtagggatcctgtgaccattcccacacatgtggagacaacttatttttgacaaaggtgcaaagatacaaagtggagaaagattagtcttttccacaaattaacaaattaactcaaattagatcatagacttaaatgtagaacctacaactatgaagttattagagcaccaaaagaaaccttcgtgacttgggttagggac

SEQ ID NO: 20059 - DNA, 1053 bp, Homo sapiens
ctgcttgtggaattttgcaagtccagtagctgccttcttcttctttttctttttttttttttaatcatgcctttgtgcctttcagtccaagatggcggtgtttctgcagatactacattctcaaaaaccttgtgtatctcctgtgtatgtcatggggatccatgccatcagacaagaggacactccacagatctttcttgcatttgtctctctattcctggcttctgctgattgagtggatccatgaaacacatgcctgatgtcttcagcagaatgttgtcaagctatactcctggccttcagagcacattttcccaaccatgaaactcctcatagtaacatctttttctccttggtaggatattcaaataccagaagatccaaaggaagtattattgaatggtaaaataagaagcactctgaatggcagtaagggagacatttgaggtcagggagaaattttgaaaaacttatatcataaattttgtcatttagctatgatggaatgataggaactggattaaacctctgtatccgttaaggttctaccagagaaacagaatcagtagggcattacagaggtttatcagcatacatgattctggcggctggctaggctagtctgaaatcagtagggctggccagaaggaatgtccaggtggaaactgtcatgcaggagctgctgcttcaatctataggatcacaatagtcacattagcagaatgaacctcgagattacccagatgtagtaaattataaaaattattttatttttaaaataaattttcaattttggaatcattttagagttacagaaaagttgcaaagatagtatagaaagtttctataccatatcaaatttctccttttttatacttaaaaaaatatacatataaaatttactatctttaccatttttaagtgtacagttcagtggtaataaatacatttctattccttttcttccccttcattcaccctgccccacacttcctggcctctgataactgccattctactctctatcttcatgaggcccactgcttttttttt

SEQ ID NO: 20060 - DNA, 1038 bp, Homo sapiens
gtcaagaagtcagagcttttcaactacagaattaacttagttaaactccttggtatattttagatttttatccctgtcaattccacagcaagatattaaaaacagtccaaaagctttgctcttctgtagaagacaaaagtttaccaaaaaataaaaaataaaaaaataaaaaaaaaggccccgtagaactcatcatctagtttttatttttgaaagatatgatatagggaatagaacatctacatgatgtcttagaataggtaaagtgttgcaaagagggcaaaaataaaggagatatttgggactggggctgtttccgtagaattgtcttctgaggagtgccagagagtcacattgacctcgggcttcagtgtggctcagtaatccgatttcaaaatgcaagagttccaaataggagaccaaagacactaggtgaggagcttatatcctagaacaatagtgggtgttgtagataagtgtatggagaggtgatgagaacagaatttaatacagtcgtaggagtctagagtactgagttataggaaggtgtctattgtaaaccttcagaaaagtggagtgcctaaagtggataaggtctgtgtctgtggtaagaataagtgggatgatatgtggacctcctaataacactgctctttcacagggcaccattgcttagtgtcctttagctctttttgcaaatgaagctttgccgtttctatacttatctctaatactctaatactatacttacctcatatgtctaatgacaacagaaggacagtgctctttttatcctccaaatgtttcacttgacccactttattccattgtaggtcttagtttctcataccttctgttcctaaagaatctttctttgtcctccattaacaataacttttagaaacctgtaacaaaaatttctctctctctctggtatgacactcctttaaggtactttctgatctacaactattgtcatttgattccttaatgttattttaactgattttatgtcctttggttcacaatatggtaaga

SEQ ID NO: 20061 - DNA, 1035 bp, Homo sapiens
ctagattcttactgtctctctgtaaaatacatatagagtatttttgattttcagcagttctataactgcttgatgagtagatgttattcccataacatctgtctcatcttgtctttggtgattctaatgacaccataccagctgggcgcagtggatcacaactataatcctagcactttgggaggccgaagcggtggatcacttgaggtcaggtgtttgagaccagcctggctaacatggcaaaaccccgtccctaataaaaatacaaaaattagctgggcatggtttcacatggctgtaatcccagctactcaggaggctgaggcacaagaattgcttgaacccgggaggcagaggttgcagtgagctgagattgcaccagtgcactctagcctgggtgaccgagcaaggctctgtctcaaaaagacaaaacaaaacgaaacaaaacaaaaaccatcctacctaaaatttgtgggggttaaataattgtaagatgttccattgttggctgaggagatcattttggaaatggacacattataggattttaacctaagacacaggctacccagaacaaatgggatttggggcagttgctcactttttcccatatccagctgatgaacaacaatgtcgatgaatcattgatagtatttctagccaaagcactgcatcaatttattcattttcctgtatgttcattttggctagatagctaagaatttctttctattctttgtaccttataacctgtgcccttcttttgataaagatgtaggacctctaaagagaaagcagaaagacagctgtcaatgtcttgttggaactttgttttccagattgctgactattcttgttccaaaacttgaaggctatacctaatagataacctttccttgcttctgagtcatcaaatcaaagagcctagaaagatctggttcacccctgagtttgtttgtcctgatttgtggttttactatggagatggatgtttactaacaaagaactcagataattgagatcgaaagacaaact

SEQ ID NO: 20062 - DNA, 1035 bp, Homo sapiens
ttttcactgtagtttactttagcatatatggtctcaagaataaaaataaggaattactaaggaacctcctgaatgcaatactattaacattcacaaaaatagctatatgcaaattagtagatgtccttagctgagacaaaattattttgaggttgtgatcatgaaaattaacgtaagctgatataattttgaattgtatgcatctgttttcatgaaagaaacctatttggagaggtttattcttgaaaaattatggaattaaaagttaaataggattcttaacatctgtttttaaatcttgaattatatgcagctcatagagtttctctcctgtatgcatattaaatgatatataatgaactatcagtggttttaggtaacatttggttactgaatacactatgctaagcatttcacgtgcattatcacctgtattcacaaaatattatgaggtaaaagcactgttacaatttccatttttttcagaagaaggtgtgatttagagaaattaagtactgtatactacctcccaactttggcagtgtcatctgaatttttttgtcatgaacatgttttacatagcttgttgttaaagtccatttttgataaattttttgaatagacgtgtgtaatgcaagtgcatgagctttgtggttaggtgtagatttcattcccatttctgtagctgactgggtacatgaccttgagtttctttgtccataagaagagtataggaacatctgtctctgatgttgtaaaaattaatagataataaaaatcttctggccatagttcaggtacataacaaggactcattaaatgtcagttgtcaccaccttaccttctttccgtaaaatatttcctttctgtctgtcccaaagttttagttttgctcttcacgtgtatcataatgtattatgagcatcctaagaagataggttatactattgtccccattttacagttgagaaaacagactgaaatgttgtagattcctggttgaatccctatagcagtctgattccagagcctgtg

SEQ ID NO: 20063 - DNA, 1048 bp, Homo sapiens
tgtttaatttttcaagaaacttccaaactattttccatactgtctgtattattttataatcctaccatcaatatatgagaaatctacctgttgagaaagaattattgaagtctccagctataactgtaggtatgtctatttcttccttcagttccgtcagggtttgcttcatatgttttgtagctctgtttttagtgcatgcgcatctcgggttgctgtgttttctttgtgtaactttttatcattatataatgtctttctcttatctggtaattttcttttctctaaagtctactttatcttgtattaaggtagccacccccactttccttcctgtaacttttacgtgatatatctttttctaacattttagtttcagtgtgtctgtatcattatatttgatatgttttaaatgaatttcctgtaaaaaacatatagttgagtcatgtgttttagtccattcttccaatatctgtcttttaattagtgtttgtagaccatttacattgaatataattatttatctgtcagggcttaagtctgccattttattttttattttctatttgatctctgctttttctttctctgtttttttgtttgtttaggctcgatttggtttttcttttttgcctgccttcctgtaggttatggaacattttctaaaattctatcttgatttgtctatagtggttttttttttttttaatttcaataggcttttggggaacaggtggtgtttggttacatgaataagttctttggtggtgatttctgagatttttggtgcacccatcacccgagcagtgtacactgtatccaatgtgtcatattttatcctttgccacccctcactctttcccctgagtcctgatagtcaaatgtatcattcttatgccttggcgtcctcttagcttagctcccacttatgagtgagaacatatgatgtttggttttccattcctgagttacttcacttagaataatactctccagctgggcacggcggctcatgcctgtaatcccggcactttaggtggctgaggtg

SEQ ID NO: 20064 - DNA, 1051 bp, Homo sapiens
gagtcattctgttggatgccttcctctgaaggaagactgtattgcatttgtgtggctttggggaagacattcagcaaagaacaccacaattcccattgagctcagaaaatgtgattaaggagtttgaatgtaattacccaaagtttggcttttcttttaaagaacccattcattttagagattccttgatactgtaaacctgacaactcaatctggttttcttttaggaagccttccaccaggaatagtgtgagtcaaggatgagtacatgaagatgaagcccatgcaatgaggacagcctaggccgtgttaggctttgacttaaatcagatttcatctacggctgagatgcagaggagagacttagtgaaatatgcagagctccattccagttcctttcttatttgtttgatgtacaggcttatttaagtgaaaggtgggacaccagtagatatacattcagacaaatcaccctgcagttattgctcaacagagtaataataatagatttggagaatgttctgtgttttcaaagacagaggttaacaagcaatggacaaaccttccgttcttctctatcccaaatcgtttgaatcgtttgactgctatacacaatccccagcacttataaaataaaaaaagtatggagagagagaaagcaagtaacccagcagagtttgtgacagaaactgttagccctcttttgtattgtttctgcatcgtcctgtcaaacatctggaaaccagcatattggcagtcgtctcacaacatgattttgcatttacatcatcgtgctagctggtagaattttttcccccaggaaaaaaaaatcggcaacttttggtctgtcacaaggtcaagtgatgattagtgatgtagtctctcctaaacacatggttagcacagaaaatttaaatcagttccccaaaatttggtaaccattaaattacttcctaagtcacttccggatgtcaggcctaaggtggagagggggacagggctatattgagttctccgcagttttctaacagagagatttagtttggcagct

SEQ ID NO: 20065 - DNA, 1094 bp, Homo sapiens
aaaataaaatccttatctgtacttaacaaagactgccaacacttttccatagaccaccaatgattcttgttttgtagctttttgtttataaaggcaatgttgtattccacagcatcattacacactgcttctgtgactcagacagctggcaggtccaagatagagcatatggatgatgctctaatgacatctgtccagttgttgtaatcacatatttggtggacagctaaaagacccactttcaccttaactgagtttatgtgactaattttaaatttactgtaaacacttttttatacgtctcatgcttattaatacttaataataattccacaagtatttctctcaattctaaatcccagagcaccatagaaactggcaaaatatcttcccaattaattatgagaaattcatctgtacaattttcttattaattctcgtatccaaaagaaccacaatacaacccaagaccccaatcattagaataaccacaaaaccgattcttaattacctcttgcctgggacactgcagaagtaaccaaatcggtcccacaaacataagcctctctaaccctgccacctcccccagtttatgttacgtaatatggtgagaatcttcttcctcaaatactttttatcctgtcatccctgttctcaagaatcttcagttgtatcccattttacaccaggaagttcaaatgtttgaatggagatttaaaaagtctagctatgcttcttgtacatcccctctaggagcacacccactctaatcaaactgacctttttagtttagctgggctccaaccagttctgttctagctcctgaagtcagcgtcaagaaatattggtcttggccaggagcggtgcctcacacctgtaatcccagcactttgggaggccaaggcgggctgatcacttgaggtcgggagttcgagacaagcctggccaacatgcaaaaccccgtctctgctaaagatataaaaattagcctggcctggtggcgggcacccgtaattccagctacttgggaggctgaggtgggagaatcacttgaacctgggaggcggaggttgcagtgagccgagattgcgcca

SEQ ID NO: 20066 - DNA, 1030 bp, Homo sapiens
tgaggcaggaaaatcacttgaacccggaaggcagagattgcagagccaagattgcaccagtgcattccagcctgggtgacagagcaagactccatctcaaaaagaaaaacaaaacaaaatgctaaaaactgaattatcagtagaacagcccatgtactctgtggacggtgatgggtttttgttttgtgggagttgttgttttggttgattcggtgtttcctttgagtccactgaggagccactgttttcttccatatctttagatcctgatatggtaggacatgcacaatctattttgaatcatcataaagattgaattttcagcctacaaaaacaaaagaaaattcttagggcatcagttctcatctttcagatagaacctaggacctgtgaggctggtaatctttggaatagcactgtatggtaaaactttctgtgataatggaaatgtggcgtatctgtgctgtccaatataatagtcacatgtggctgctgagtgctgggaatgtggctgttataaccaaggaactgaaattttaaatttcatttaattttaattgatttaaatttaaatagttgatgtggctattggctatcattttgaatagcacagctttagaaatcttagctttgacaaaaaccacaaacttaagtttatccccagcaaacatcttaggtgccagagacggcagatttggattgaataaattatccatgttgagtatctacgtgggaactcctagttatacagtgcagattcagagattactgttgtaccttggctatgtgacttacacacagaccaaattactctgctgggggtaaattcatactccagtgttacttcaacatttctgaacatctttttgtaagcaattttgcattttttactgacttgattgttgtagtaattacaaaataaattatccatttagggggcagtgttgaagcattgaggaataaaaggataaatgtggtatatttgattgttttcagtgtttaagaactcttattggaataagagacttac

SEQ ID NO: 20067 - DNA, 1373 bp, Homo sapiens
ctccaactcctgggctcaagcgatcctcccaccttggccttccaaagtgctgggattacaggcaggagctaccacgcccagccgagcacttccttaaagaatctatttattttgtgaaataggtaaatatttattgaatgcttattgtgtttttagcagtgtgggaggtgagaaaacttttcctttcctaattcaaggagccttagttaggaaagatgaggcataagtgcatttcaattacttaaaagatgaagaaataccacaaggcactatatgagtaattgcaaaattaatggcacagagagtaaatgcttatcgtaatattagaattgtaacactgataaagtccttatctagtcccacttccttaaaagaagataaaactcagaaagattagcaatacaggcttaaaattatacagcaagatattgccaggtctagaattcaaattcacatcttttgactaccagtctctcacctgaactaactctctccttgaactgtagatacttagatttttgagagggaaataaaatctcactatagatagttttaagcttctgacacaatctagcagatgtctgtgaaactgtgtgctataccctggacattaggcactaggtactagaaaagatggtcccctgactcaagtagtttacagtgtaatagggtagacctctaaaaaactggactacaaggtaaacttaaggaaatgacacagaagagctttacgtacatatgctgtgggagcccagacattggaggagaaaccctgtttatcaggactggggcttcttgtaggggatacctttgaacagatggcattgtttggaaggacatttcatacaaaggaaagggctgtgacttgcattttgtttgttagtgctttgatgattcgtagctattttctttttctagtctcatttttgttccccatgcctacttttcatcgtcttagccacctgtacacatgcctcagtgctaaaacctacatttcgatatttgctgtaactataggtttacttctctcctctttggtatcatacggcgctgcctgcctcctgatggtagacatcattttatttctccattggcttttatcactcattggaaacaaaggaaatttatgcccactgacaaaattaagcattggcttatttcatttgctgggtcaggtttgacttttcttttttcccatctgtctccttctgtatgtttttgatttctctaactctagactttttttctacccttccacaatttcccctctgttaactcccacactctggaagatctttttgatgactctttgatccaactctgtatttatatctatcatgcggacctctctcgttccttgagccttttctatt

SEQ ID NO: 20068 - DNA, 1079 bp, Homo sapiens
gcaagatctgagtcagcgatcaaggtcagtctcagttcattaacttcttctgaaggcttatagtcattgcaaatataactgcttataccttatgttatcattatatagtacggttttggaatgacttatgttcacctcaaatgtgtcctagagtaacagaaggatgctgaaatgtctagagtagtataaactgatttctgaccattttgcctagtttcctaatgcccacaaatggaaaagtctcacctctcaaggtataagtgtggataaatactctcacatgtgctgagatcagacaggggcctgcttttaaatgaatcatccaaaaatcattatttattttgaggagcaatatacaaggattctcactgtacttccagccaatacattatttaacattagaatatatttcatattattaaggtctcaccattaagaaagatgttttctcaacagttctaatacctatgtcattcttatgttcagacaataccaaaactctttttaactgtaaattgctacccttaagcccacttttaaatgatgtttaatatattccacttgaaacaaaatggcaaatcatattaagcttaacagtttttgagaagtctggaatgaaggtaacattttatgtgcccagtcctttacatagaagtagaataacttggtttgagatttttgtatgtggataacctagctgtgcaatgagataggattctttttccttttctttccttgttatttaaaaaaaattgagatggggttttgctatgttgaccaggctggtctcaaactcctggccttatgcaatcctcccatcttggcctcccaaagtgctaggattacatgtgtgagcccggccgagatagaattgtttcatttaaggattcctcagtgtactttagaagcactccacaccaacctttataaataaacagaaagtcagaaaaattgttatactttttcatttgttaaacatattttaaagaccatttgattttcagacagtggtggtggtgataagataatgtattgaggttgtttttaagccaagaatatctgtggatatgggaccattt

SEQ ID NO: 20069 - DNA, 1120 bp, Homo sapiens
gtgctatggcgtgatctcagctcactgcaccgactcccgggttcaagcgattctcctgcctcagcctcccaagtagctgggattataggcatgtgccaccacacctggctaattttgtatttttagtacagatggggtttcactgtgttggtcaggctggtctcgaactcctgacctcaagtgatccacccacctcagcctcccaaagtgcttggattaccggtgtgagccaccgtgcctggactacaaaaaaactttattaagtagctgggtgtgatggcatatgcctgtggtcccagctactcaaaagactgaggcaggatgattgcttgagcccaggagtttgaggttacaatgagctatgcatcaccactgtactccagcctgggtgacagagcaagacactgtcaaaataataataataataaatcagcctggggaacataaggagactctgtctctacaaaaaaataatttaaaaaaaaattacacatctactcagaaggctgatgtgggaggactgcttgagcccgggaggttgagactacagtgagctctgattgcaccactgcactccaacctgggtgccagagtgagaccctgtttccaaaacaaaagccataaagtaatactttaatatgaataaagacaaattagaaagtgagcaagtaggagataaattcactcaggtgataggacaataataaaacaattaaaaaatttaagatcctcaaaaggacaaagtaataactttacaaaacaagaaattatatagcaaaagcttgtagaaacgacgcaagataagaacaagtggatatgaaaaataatgacttaaggccaggcgcggtggctcacgcctgtaatcccagtgctttgggagtccgaggcgggcggatcacgaggtcaggagattgagaccatgctggctaacatggtgaaaccccgtctgtactaaaaatacaaaaaattagacaggtgtggtgacgggcgcctatagtcccagctacttgggagactgaggcaggagaatggcgtgaacctgggaggcagagcttgctgtgagccgagatcgcaccattgcactccagcctgggcaacagagtgagactccgtctcaaaa

SEQ ID NO: 20070 - DNA, 1026 bp, Homo sapiens
gggttttggcagcctgtcctcgggttgttcagcctggtgaccctagccgcctgtgatttactaactgttttacaaatgtttcctcgctctgggaggtttgatacactcttcatcctcctcagctcaccagagtcactcagtctctgagccaaacctgcctttgtttacaacttttccggaaattttcacagagggagagaaactctccctcctctttcagtgttttatttttaagtcaacacttttctcaagtttatttgtgctaaaccaaattctcctacaaggtattgctctgtattcaaatgggaattgctgcatttctataaatagaatgaaggtcatgtgaacgagttcagaagattctagatatcacattttacgggacctttacatttagttcactattttttgaaaataatattctatgtttggatttgtctttttttcccacattcatatttgactgcgcattatgtgaaaaattgaatttgggaaacattgagtggaatattttttaagctgaaatacccatgttaaaaataacaaaatgtgttgttgcttcatcattgtaactttcttaaaaacagaatttatagcccctttattaaatatttctagaatataattgcctctgaaaacacagtaccagggtttttttgttttcgtttttctttaaatctcattcccattaattgctcagtctttaccttggcggagaatgaaaaactgccttggaacttattaataagcatttagaaaaactcgacaaaaaattaaagaattggcctggcatggtggctcatgtctgtaatccaagcactttaggaggctgaggcacgcagatcagttgaggccaggagttcgagaccagcctgggcaacagggcaaaacaccttctcaacaaaaaatatagaaattagcctggcgtggcggcacatacctgtagtcccagctactcaggaggctgaagtggaaggatcacctgagcccagagaggttgaggctgcagtgagccatgattgtgcc

SEQ ID NO: 20071 - DNA, 1049 bp, Homo sapiens
gagtagctctttgaaagctgatttaaagtgagtgttgctccacctaagagctgttggctgaaaaaagcactgtctacaacagcagaggtggccgagaaaggcagacaggctctcctgaggctggtgttgcagatttgcattggtctagtaggaattatgcatcattagactgaacttcttatgtttgcatccaggtcatttctccataaaaaaaaaaaaaaaatgccactgacattacagccaaggaaccatcattgtacttacaccagtctgttcccacacatgaagtgttatgcttcaaataaccgctcaacagctcatctgaaggtccagagtatgtttactgggtaaaatatttcaggcatagacttggagagcaagctgcccaccagggcagggccttagcataaagttaatatcgtcaaagatctgactataatccatttcattcactgttgcagtttgctgtgtgggtgtttctacaatgtgggaaacttgtttcattgaagagtctgaatattttgtaaggatgtgaagagttgcaaataatcttttctgtaaggctatgaggagaaacaaagcagctaatgttagaaagaactggtacacgattgttttctgtcatttgtaaaacaaaataggaatattctggtctttacagatttatatcctcaacttgttgctccttaaggattatacaaaaagcatacctatgaaaagatctgttctactggaaggatatcctattttgaagctcaaatagttttatttttatttacgtatttattttcagaaatagcgtctccgtctgtcacccaggctggagtgcagcagtgtaatcatagctcactgcagcctcgaactcctgggctgaagtgatcctccatcctcagcctcccaaagcactgagataactagtgagggccaccacgcccagccttgaagctcaaataattttaaaatataagatgatatatgtaataaagcataattctttgtctatagaaaatgtgtctgtatgttcaaaaggctacctaaattttgttata

SEQ ID NO: 20072 - DNA, 1051 bp, Homo sapiens
cctcacagcagccatatgagattgctgttactgtatcacatttacgtattagggaactgagcttcagagagaaccacatttgttctgactgctgtcagtttgcctgcctatatcctataatatccctttcctttttaatttgttgcttctagtcctgaggaccagaaatccagataaataaaatatgctctggtgggccttcctgatgggaccctcgagggaggagaggatggagactgggagaggagttccaggttggggtgtatgaggtggttaactgtgtgcaacgcccctttcccataggttatggttactccatagttaagctgatgttacgcggttagccagaatgaactgattttggctagagccttttcttgtctaggaatggaggaattacctgaatgagttcccacagactgtcctagaggggccacagactgctctgagaagctagtgcaatttatgagtcctcttctgaaaaaaatgcagatactcatacatatacaatgtcgcatgtgctttcaggggtttcaggacccctctgaaatccatccctggatcccagattaaggtaattcatttggcctctgtgggtggatgttaatcactaatgctgttataacctaaacatgtccctaagaccagaaattataattaagaacagaggaactctagggactgtaagaagtttgaaacagaaaagggctttctttagcttttgggaggaatttgtgtttgcccatgaatgaagtgaaatgaccaggtagacagtagaaccaggcctgtgtgctggggagaccttctgtgccctaaggccacatggccgagagacaggtgggaagccaaggaagaataaattgggcataggtcctgttaatttacaccagcccatcaggttggagcacactcgggaaagttcttgctactccgaaggtgatttttagaatcagaaacctgtacttgagaaacataactttttgtgttatttatattttctgtaatgattttctgttgctctctgcttgattttatgtaaaatttgtactaa

SEQ ID NO: 20073 - DNA, 1023 bp, Homo sapiens
ctctaaagattattgcctccttcactgccttcatgaattaacaccaatttcttccaaatggaattctttaaaaaaaaacaaaaaaacccaaaaaactttattgagatatgattgacatacaaaaagctatacactttttttttttttgagacggagtcttgctctgtcaccatgtcaccaggttggagtgcaatggtgcgatctcggctcactgcaacctctgcctcttgggttcaagcaattctcctgcctcagcctcccaagtagctgggactacaggcgcgcaccaccacacccatctaatttttgtatttttagtagagatggggtttcaccatgttggccaagatggcctccatctcctgacctcgtgatccgcccgccacggcctcccaaagtgctgggattacaggcatgagccactgcgccctactgctatacacatttaatgtctacactgtgatgagtatggagatacgtatatacctatccatcacctccaaaagttacctgctgctctggcagaatctctttcttatttaaagctgagtaatattccattgtgtctatatactatattttctttatccattcattcatggatggacatttagtttgcttctacatcttgactattgtgcataatgctacagtgaacgttccatacagtgaagtggagatacctcttcgagatccacatttcagttccttttgatatatacacccagcagtgggactgctgggtcatatggtggttttatttttaattttttgaggaatgtcataagtgtgtctcaagaaaatataaagacagtataagaagacttagaattgagtacagtttgattgaatcaagggtaatcaccattatcctgattttcaggactttcattcacttccttcatgtagcacagttccctgccagaaatatccatcatggacgaagtgactgctagagacttcagggaaaataataacttataactattttatgtagttgagggatgagtgttttggttcttt

SEQ ID NO: 20074 - DNA, 1044 bp, Homo sapiens
agatgagatttgggtggagacacagccaaacgatatcagtaagtatttatttttatttattttttagagacagggtcttgttatgttgccaaggctggattcaactcctgggctcaagtgatcctctcacctcagccccccgagaagctggtactacaggcatgtactaccacactcggcttaattttaggaagtatttaagcaaatattattgagctgtataaaactgttcattttaaaaagtgaaaagttgtttccaaacaatgtgtcaattagtttttctctttggtagaaaaattgtatatgttcaaatcaaagttgtagaagtacctccctgcctaacattcaagtggtttcagatggtaggctttaacataacaagatgagctattgggctctcagaaaaagcagttcctaagggagcacctacatttagtacttctttttcatgttaatgaagttctgtctcattgaaagaaaaaaaaagagattgttgttgagtggaggtacctactgcctagtgcaaggtcaggaaggctgtggagctgatgggcagctcttcagaatccaggggtccattattggtgcactcagcgtgaggctgaagctggaaggtcacctcccctaacgtgaataaaactgaagctgtgagagctcaggtgatccacccagggttccacagtgattgggagggctgagactttagaattctgccttctaacacccagatttggcctacctcacacactgacaggaattctcttctatcctgggagagtcttacaactatcacgacctcataactgatctaagatggctttctggagatggtcaagtcaggaatagcttttaaataggttgctatggccgggtacagtggctcacgcttgtaatcccagcactttgggaggctgaggcaggcagatggcttgagtccaggagttcaagaccagcctgggcaacatgacgaaaccccatctctacaaaaaatacaaaaattagccagtcatggtggcatgtgcctgtagtcccagctattgagga

SEQ ID NO: 20075 - DNA, 1055 bp, Homo sapiens
gcccaggagacttaatatttaaaggctgtcaattatccccaagttaatctagaaattaaatgaaattcagatgaacatcctaagaagttttgaattactcaaagtcttagcaggaaaccaatggcacacacagaagtgttcaccgaggggagtcaatgaaggacctgtttacaaaggtgtggacaaagcttaaggaaaccaagaaaccaacaggggaaggtgaggcaccctaagctagcaaaagcaaagaagcactgttagcacccctgggcctgaagctgcaagcagatggaaccgttatcagaacccagacagtgctctagctttagctgtagagaggcccacctggcaggccttcggtagaggaacagctgctactaacctggacataggggtgagagagccaaggagagaaataccttgacctgttcctccttttgcccttcattctctttccattgactctcattagctgaatataagaaggagagacccagtcgatgctgcccatgcagaggtcagcctcatgggacacagaacaaggtgaagagtggaaagtgtttctgaaggagcaatcagagaatatccagtgcaggtgtttttcatagtatttttcaaggtgatcttgaacttcatgtggaagatcggaggattaaaaccagcaaggaaagtttttgaagcaacagacctattatgacttttatttaaaatctcaatttctttcctgccagatattaacatgtattataaagctgtaataattaaagcagaatggtattgtttcagagaaagacagacagtggaacataatgtacatatatgtagaaacttgatatattacaaaccagtgctgaaagatggactgttcagtaaattgtgctgcgacaaatgattatccacataggaaaaacttaggatttcattttagggtagcaaaaataaaaaattctgaccatgcatgttggcaagggttggatactcatacactgttggtagaagtataaatcgacataatcctatcagcgggtaatttacaatgtctagtaaagttatgt

SEQ ID NO: 20076 - DNA, 1030 bp, Homo sapiens
ggagccgcgaggccgggcggcgccggcgcgggacgcggggtgcgtcccaggccggggctggactccccctgccggccgctcccgcagctccgcgcaacgggcctgggcacccacccgggccgggaggagagcagccgagcggcctggactcctggcttctgactccctttccgggaaaccacactggaaacccatctcctttcaatgcttctgggtgggtgggctgggaggatgggtgttccttgtccaacctctcccttcggaggaggggtttggctgtgtcccacccccgtactccccgccaaatatcgctgagcctagaattctttcccctctctctgcctcctgaacctcaaagacaaacatttcctccgcgtcagggctgttggctagagtggcaaaatctggactaaaaggtcttactttaactcatctatctaaatccctcttgggagagtggagagtggggtcagtgggctatttccattcctgcctcagtttcccctgtataataatgggcttggctggggtctctccggggtccagctgtgtcagtctccattaggctggtccttccccgagacccactcctgcaaggacagctgcctcccaccccgcgccggtgagctccccctccttgcccagctagcaggtgtctccagcccccacttctagcagtgggagctgggcgggcactcctttagccctgggtctggtcggtcaccgagcacgccacctccttcccagttctctcctctttaagccttggggaccctgaacgccctgccccaacaggctgcccaccttgggcactgcacagggtggggcttggggagggtgctggcttccaaaacaccagggacgttgagatggaggaacggtgatggtgaaggtggaatggacagttgggcccccagactcccaggacgcctttgtgggccgatacatttgcaaggagcgagagagagagaaccaggcccgcctcttcaggatggtgctgcccccaggccacgccgaatgcggctggagc

SEQ ID NO: 20077 - DNA, 1146 bp, Homo sapiens
ttcccagaaaaccaccctgcctccttttaaagtgctgagttaaaatatcccttgaagaagtagattcctgtagacagccatatcattcccagtaccccttgcagcaactgccatagagaggattgcttgggaggtggggtcggccgcactctcagacaagatcctttaccagctctccgtggttgaaagggtctctggtcattgactccaagtgtcatactaaatcatcaatccaaacaaggtttgatttttggcaagggtgccaagatcattcagtgtgggaaggatagtcttttcaacaaatggtgtgggaaaaactggatgtccacatgcaaaagaatgaagttgaacccttaccttacatgatatacaaaattaacccccaaatgcatcaaagacctaaacttaagagcgaaagctataaaactcttagaagaaatcacagcggggaatcttcatgaccttgaatttggcaatggtttaaaaaatgtgactctaaaagcatagatgacaaaagaaaaaacagataaattgaacttcacaaaattaaattacttttgtgcacccaaacacactatcaagaaagtagaaatgcaactcacagaacggaaaaaaggatttctaaataatatatctgacaagaatttaatatcaaaatatataatttctacaacttaacaacaaaaagaaaaataactcaattacaaaatgggcaaaggacctcgaatagacactttttccaaagaggatatacaagtgaccagtaagaacatgaaaagatgctcaacatcattagtcattaaggaactgcaaatcaaaaccacgagatatcactccacacttaccaggatgcctagaatttaaagagagagtgagccaggaatggcagcgcacaactgtcatccaatctacttgggaggctgaggagggaaaatcacttaagcccaggatttataatctagcctgggcaaaatagtgagaccaccatctgtactagaaagaagaaagaaagagaaagagagagagagagagggagggagggaagaaggatggagggaagagggaaagggagggaagagaagggaaggaggaaagaaagaaagtccaaacaaattggcaaggatgtgaaggaaaaaaaaatttttt

SEQ ID NO: 20078 - DNA, 1029 bp, Homo sapiens
ttcttccttctctcttcttcttcttctttccagtgctggctgatatcctttcatttcaacctgaagaactttctttagtacttcttgtaagtagtaatgaactccctcagctggaaaagtatctctccttcctttcttaaaaatagatttcctatgtagaatattcttggttagcagttgtttttgttgtttcagcactttgaatgtgctagaacatcaactcataatgcaaatgttgttttgtttcatgttgtcccataagttacacaggcctttttcatcctttcttcttattgttgctctgattggataatttcaaatgatctgtctttgagtccactgcttctttcttctgcttgagtcccctgttgaagctctctattgaatttttcagttcattcatcatattctacagctccagaatttctgtttagttcttttttatgatttctatcttttggttgaatttctcattttgttcttgtattgttctcctgattttgtttagttgtctgtgttctcctgtacctcagtgagcttaagtcacttattttgaattatttatcaggcaattcataggtctcaatttctttgggatcagccacaggagctttattttgttcctttggtggtgtcatgttttcttaattcttcttgttccttgaagtgttgcatttctgtctttgaaaaagcagtctcctcttccagtctctactaactggctttggaagagaaagacattcaccagacaatcaagagtttgacgtctttcaggccttttctatggattcacctgccccactctcttgttcccccttgtgggggtaaggcttaggattgtgtgcctactctcaatcctgtaaagtcaggccaggtgtggagggcctcctcttaattttctccaggaaagtgccttgaagtgttcaagattgtgcaccttctctcaaccctgcaaagttgagatagctgctgatatctatgtgctgtctgtggggatttgcatgtgtcctctgtggtggcttgcactca

SEQ ID NO: 20079 - DNA, 1028 bp, Homo sapiens
gccaccacacctggctactttttgtatttttagtagagatggggtttaaccattttggccaggctggtctcaaactcctgacctcatgtgatccacctgcctcagcctcccaaagtgctggtattacaagcatgagccaccgcacccggccaggagcagggaactttcttacggcagaagcgggctgtcctcgggccccttcaggctgaaggcagtggatcgaggccacagctgtgagcaggcagctaatgtccttcagttctaactgaagcaagagtagaggagcttagatctcagacttggtgtgtcagttgaggaagtccactggctttttgggatatgctacagggaaagagaaccccgtctttaaggagacctgattgaccgtcattccctgctgctccacaggatgcagaaggctatcaacaggctgagcaggcttctgaaacctggcgggatgatgcttctgcgagattacggccgctatgacatggctcagcttcggtttaaaaaaggtattttgaaagtgctgaatcctaaccactagagatcatgtcctttgcagggacatggatgaagctggaaatcatcattctcagcaaactaacacaagaacagaaaaccaaacaccactttttctcactcataagtgggagttgaacaatgagaacacatggacacggggcggggggcatcacacactggggtctgtctgggggtgagggggctgggagagggatagcattagcagaaatacctaatgtagatgacgggttgatgggtgcagcaaacctccatggcacatgtatacatatgtaataaacctgcacgttctgcacatgtaccccagaacttaaagtataattaaaaaaaaaaaaaggtatttggccactataatcaaaaaatggtgctgccatcagaatagaaactctagaattagaactccttatataaagccatttaatatgtgacagagtagtatattttttaagaaaactgaagaggcttgtataatctagatattgagg

SEQ ID NO: 20080 - DNA, 1049 bp, Homo sapiens
cttactctgttgcccagactaaagtgcagtggtgcagtcatagctcactgctgtctcaaactcctggacttaagtgatcctcacaactcagccttctaagaagtgaagactacagtcatgcactaccatacccagattttttttttttttttttttttttttggtagagaccgggtctcactacattgctcaagctgtcttgaagtcctggcctcaagtggtcctcccgccttagactcccaaactgttgggattacaggcatgagccaccacatgcagctcaagacaccagttgtttttttcttcttcttttattctatttttttgtttttatttttgagacaccattttaaaaatgcttttaatacactgttttcaaatttttttgagacatattcttgctatgtcacccagaatgttgggtggaatgttgactcctgcatcttattgttataccaattccaggctggagcgcagtggtgcgatcaaggctgactgcaacctccgtctcttgggctcaattgatcttcctacctcagcctccttagtagctgggactgcaggtgcatgccatcatgcctggctaattatttattttttttgtagagatggggttttgccatgttgctcaggctggtctcaaactcctgggctcaagtgatcctcctgcctcggcctcccgaagtgctgggattacaggtgtgagcctccgcacccagtcaatacactttaatccaagtcagtgtctatttaaattttaagttagtttaactctgagccatgggcctgtaccttggaaatatgtaatttagagtcataagtaacagttatctagctgagagtcatatgtgggttataccaaatgtactgccatcatgtgattataggttagtagtgtaatttttggaattggcaggtcacagatgagattgccatggcttggtggaaagctctcccaactgtcttctccagacagataggtagaacctggaaccagtgctaggacgtgtgtgtatgtaggaggtagtcattggttatatgaacttaaa

SEQ ID NO: 20081 - DNA, 2064 bp, Homo sapiens
taattgtggctcactacagcctcaactgcttgggctcaagccatcctcccacctcagcctccccaaatagctgggactacaggtgtgtgccaccacgcccggctgattttttgtttgtttgtttgtttgtttgttgagcaaagtcttcctttgccactgaggctggagtgcagtggcatggatgtcagttcagtgcaacctctgcttcccagattcaagcaattctcctgcctcagccttctgagtagctaggattacaggctcacaccactgtgcctggctaatttttgtatctttagtagagacagagtttcaccatgttggccaggctggtcttgaactcctgacctcaagtgatctgcccgccttggcctcccagaatgctgggattacagtcatgagccaccacaccatgtcctaatttcttttgtagagacagggttttgctatgttggccagggtggtctggaactcctgagctcaagctatcagctcgctttggcttcccaaagtactgcgattataggcgtgagccactgcacccggctgagaaagttccctattttgagtttgttgattgttttttttttttttttacataatgaaaagggttttttatttcagagaaattttgttttactgtttctttgattatttcatttcctctgttcttttctctagaaagccattagatagtttcagggtctctgtgctattcatgtttcttttcttttgtgctccatttaaccttttgttttatcttctgggagattttcttattttctttttctttctttttttttttttttgagactgagtctcaccatgtcacccaggctggagtgcggtggcgtgatcttggctcactgcaacctctgccacccaggttcaagcgattcttctgcctcagcctcccgagtaattgggactataggcacataccaccacacccagctaatttttaaaaatatttttagtagagacggggtttcaccatgttggccaggctggtctcgaactcctgacctcaggtgatccacctgtctcggcctcccaaagtgctgggattacaggcatgagacaccgcacccggcctcttctgggagattttcttgacattgtcttttaggttactggctgtgtattcagctgtgtccattttgatatttaacccacctattaaatttttaaactttgataatcttattttgtcaatttgattattcatgttctttacttttttaatttttgtagctacagtatacttttgatcctctctgaacctattttatttttttcatcttaagaacctttaatacagttatctaaatgcagagtttcagtttatgaaatgaaccaaagcagtttgtcatttcatactataaactattgaaaatcaagtgctaaactgatactttacttttaaagttgtttattgaattatcttttaactcttatgattaggtattgttttttcgtcttggatttttccttttgtgctgttggggttgtcttgaaaatgtatttagcttagtggaatgagggattagagtgattaggtgttggcatggattttttttttttttctttttggtaacatagtctctttgttttccagtttggcatttctagattttaacacaggaccaggcacagagggtcacatttaatgttgaatgaatgatcagttacagcatttttttctctaacggatctgagcattgtcacatgagatccctatattgtgtagtaccttttaccttttgaaaacattgttttcattttcatgaggattttctgcttcccaactgaggaatttcctaactgccaacgtcctcagttaacttttgcatttttacttatcaatgagctatttatatgtgtatttttacagaaagctttaatttggaaacatctaacacccttagtttgctggaagacaacttagagtcagaaataagcatatttaaacccatataccatatatcaagaaatctgtaaagggcctttggatccctcttctatgggatctggcaacacagagccattcctacaactcccaaa

SEQ ID NO: 20082 - DNA, 1002 bp, Homo sapiens
actgggttttccatatacattaaatgatctttgcttcgtagattctttactatgaatttggtaatcacacttacccaaatgtagttacactctgtctttgataatatggttctgtacaaaaactaacaggaagaaattatgctgatggggagaggagaaacatttggagacagaagctgtttctcatgggttactttaaaaatgatgctatattatacaaaagaaaaaatgataaaaatttttaatgaagctacaaggtctcaaaaattgagtatcgtgtgatatcttctgtttgtgccttttagtattttaggaacacataacaggtttttctttttcataatttaagtgagtttttatgaggtaacattatttgctagaagagctgagatcttttttttaacacaaaaggaataaattcaggacttgcaagtcaaattcgtccttgggttagtggttctttccttctctgttattgcaggaggctttaagtttttagtccacactgtaggcttctgaccacagctaaattagctgtatatttacattctggcattcttgaaccaggacgttgtttgtttgttctgtcttttgtgggcatgggcgtgcctggcttctctggtgaggaacatttatgcaaatttatctttcttaaatgcgactagaaaaagaacaaagcaaacataaaattcagtaatttttttgtatgtgcttaatcactctttgtattttaaacattcattgtagtttattttttttttattttttatttttttttttgagatgaagtcttactctgtcacctaggctggagtgcagtggcgtgatcttggctcactgcagtcttcgcctttgagttcaagcgattctcccgcctcagcctcccgagtagctggaattacaggctcccgcaaccatgtgtggctaatttttttatatttagtagagatggggtttgaccacgcaggccaggctggtcttgaactcctgacctcaagtcat

SEQ ID NO: 20083 - DNA, 1079 bp, Homo sapiens
taatttgtaaactagttaatcacagaaaaatgtgacatcttattaggaaatactctaatggtaatggtgttagattaactgcagttgtaaaatatgttttatactaattcattttgtatactattccctaaggagttcttactagttggaagacttcgttgtgctttctccaaatgtatttttcttttaaaaacttaatctaggtgtcactgtatcagtgggcggggttgacgtgtagagtagtaatggctcccttagactagaataaaggataggtctaaaaagaaaatcttgtttactttctttagcatcctacaaacttggtatctttttacgtaaaactgagaagctttcatccaaagaaaaataaaatagaacttggaactttttacaacttttaaaatacgatttacttttaatgggttcagatcagagaattgtttccttagctgttaaaaaggaatcagaaaattgttccttctgagtcagaaaataaggtcacaatagaaatttgatatgttccttcctgtccactctgaaaatagtaataactagtgtcttaaagcacagactcattcccagaaaacatctatcaccaattatttggcccttccaatctgaagttaaaatcaaatctctacttgacttaaaggggcttattttttctgaaattggatacacaagtgacaaattgtgtgtgttccatagctgtggtaaaacttttgactttctttctttgtacaacgtcttttatatctctaggcaacaggaaaggataaattcacagagggaagagatagaaagacaacggaaaatgttagcaaagcggaaacctcctgccatgggtcaggcccctcctgcaaccaatgagcagaaacagcggaaaagcaagaccaatggagctgaaaatgaaacgtatgttctttattgacgtgaacgctgagacaccacaccctgcccccaaatacaaatgttgattgtcaccggcaatagttttaaattcttgaggtcactcaggtttaaaccttcttttcagttacattaatggatttgctcaactcatataaatgccatataaa

SEQ ID NO: 20084 - DNA, 1029 bp, Homo sapiens
gaattgctttgttccactgatgtcaggttttgcctatatctccccaagcttctgaacgttggagttcatggctcatttgctttagaggctatgcagacttaatttgctattaggttccccactgggcttagttttgtttccttgttgttggtacaagtattgaatcagacaagtcctgcccttgaaaggaggggacaggcttttttgacaaagcaaacacctcctttctataaaggcagtcttggttttttttggtgttttgtttgtttgtttgtttgttttataaataataatttggaaggggaaaaacagtggtctttgaagtagccctttagttggcttctagcctggtccaaggcaactcttgctctatacctcttgttcatcagggacccagaagttcttcctgttccagacagatgggcagtggtgctcagcactggagaagggaaggttcctgctacattaagagcaacagggcttagcagagggagaagggatgacctgtggcaccctgcgtgtgtttcttaggtgacaggcagctgcagtccagatgctcctgaggagcagttacattattataagaacattccagtcacttgatatgtagggatgagtggcacaccgtagtgagtgccaggagcacttcagagaaggaaagcacatgttgttctgaccagttataagtgagcaatgccactactgtattgagaccctaagaatgcctaagggtgttggaccagtacatgcttctctttaaaaatgccctgtagggcatttttatacatatacagatgtatatgtataaaatatacgtatacatctgtatatgtataaaatatacgtatacatctgtatatgtataaaatatacgtatacatctgtatatgtataaaatatacgtatacatctgtatatgtataaaatatacgtatacatctgtatatgtataaaatatacgtatacatctgtatatgtataaaatatacgtatacatctatacatatacatatttttatacatatacgt

SEQ ID NO: 20085 - DNA, 1034 bp, Homo sapiens
gtgctatgatcatacctatgaatagccactgcactccagcctcagcaacacagtgagaccctgtctcaaaaaaagaaaaagagaagggtggttgtgaggtttaagaggactggtagcacctaacccttggcagattctctagctagctgctctcactacccatgccacagctgccacccagagtcgatactgagggacttgaatacattgtctggtagatgtttaattctcctaatctgtcaggtttttcaagactatttctttatataacttttgtcaaattttcatgtttattcaataaataggtgaacaaatgtctccaaaactttagagtctgttagatgaacttgttgtgaagaatacagaagtatctccaaatgtttctgtgcattatctcctgtgtccctgtttctcctaatcctaccctcttctcttcctgtcctcccacaacaaatatttactgaatgcctgtgaaacactaagacactattccgggtagtggagatggaatcgaatatgtagcagtgaactctgcagaacagttccctacccttaaggagtttatattccacttatgagaaaaacaataaaacaaaaagtggatacatttcagatggtgacacatgttatgaagaaataaatcagagtagggggatgaggaggtggaaacctctttttttgatggcatggttagggaaggcctcaaagatgaagtgacagtttgagcagtatcttgaatggtatgaaggtgggagccatgatttgcaggagccgttagatctgcaggggaaagtattttagcagagagaagctcagatgtgagaatgagctttttgcaggtccacagagcaaatgggaaggtggtaagagaggcaggagggtgagggtaagtgtgagggaaggcagttgcaggttttaatcagggcaactatgtgagttgattgctgttttaagagctgacactggcagctacagagaaaattcaaggtaaatgaagtttacttggctgagtgccatggatcacacctgtaatc

SEQ ID NO: 20086 - DNA, 1007 bp, Homo sapiens
agaatgtcagtgctgcctattccctaagccctctctgctcctgtcatgctcatagattaggaagccataagcctgtcctgcccctagaaactgcatcttcctgctccggagtgtcctaattgggtaagtgagaatgggaccctctgccttggcttccttaaggttgctgtaaggcataaaggggttgtgggataaaacagagggtgaggctggtggccacttccatgtcacagtggccccaggagagatgtccagaggacatagatgtcccccagtgggggtcttggcttgtcatagtgtcagacgtgagccctttagcctggctcacatgccctaagagcagggcttgcctctgggcagcacatccaggaaggccttgctcctttgcatctgcaaccctctcaaccctccccacaaccttcacaccaatacccctcctccggcattctctgccacgtcagctggacaaaagtgcccagctttggcatcgtagaacaaggtcatagtacagccctgagtgaggactgcgctcacgccacaactccacaacttgctgtgtgaccttgagccaagcactcccactctgagctacaactgctgcatctatgaacttcatgcatccactcagacacacctgttgggccgttctgttaatgcactgggccaggatttgtgggtgataaaaaggcccctcagcttggctcctgccttaaggaagcttacagctgagaagctgagtgggagctgggaggtggggagttgcgtaagagcgagatgagaccctggggatggagagagggcacggagctgggccttgagagaggagcagagttcactaggctgaggaggggaacatagcagcaaagggtcttagaagcttcacaaacaatgtgtgtcactgcagggcccctatgatctcacacatcctggcctctgccagtgccgttccatcgctttggccgcctgagcatcttggagaactcagcttaggcgtcacctccagcctt

SEQ ID NO: 20087 - DNA, 1045 bp, Homo sapiens
taaaactcgtctccgcttttctgaaagcgggggaggagaggggaggaggagcgcgcctagaggtgggggaggacctgagtggaaccagatgtggcgggcggcgggggaggggagcccgggggactccagcagcctaggaggaagcgggtgggctcttgaggacccccgcgcaccgcgctcccggaccacccggcgccggcccgtcctcggcaggggacctgcagggcgcgcccggggagccagggctctctgtccgggagttcccgggcccagtctcctcgctctgccccaggactgatgcgttaggacggctttccaactatccgcgagggttcgtttcccccaccttccccccgccccctgcatctcgtgggcgttgatattttcttttccacacttagtcttcaaggaggcttgtggcgcgcggcatccgccccgcgtgagctcggcagccctgtgaggaggctcctgccactgggacgcagcaacaggctgggcgccgccgtgctgtgatgttgcgtagcgtgggcagctctgggcacactagtggccctccagaggggacagaccttgagcggcaaaagagctgctaaagattttaaaacccaacgaacaggaaacaaaacaaaaatcagaaaaccccaaaactgtgccattctcttcctgctccttattcaggggtaacagtgaagtgtggggacagacagatccctcgccaagaatctaagagttgaaaggaaagatccacttcctgggggagtgggggtgggggtgtctggagtgaccgggggaatcgcccggcccagcttggtcctgctggctgtttaattgggggatggggacagtccgtgcagtgtctgcagttttgtgcaaggaccagacagccccctggagagtctggggcctccagcctggcccgtgcttgctgggttggcctggcgtgacgtaggcacaagacacatatctgccagatgggaaaggtgggggccacggtgacccacattcacaccaaccggagacccccggggcaattctgggcccacct

SEQ ID NO: 20088 - DNA, 1053 bp, Homo sapiens
ggcgaggctctgcctccgcccccgcgctccgggtcccattcccgaattctgccctcagcggcctggtcaatgaggttggatcgttggcccagaaagccacttcctgccgcgactggagccagccgtcgttgtgaaaattccccccacggggaaggaagtggctcttgggctgtttattttggctgcgggctagcagacggcgccaggggcagcggccacgcagaccgggcatttgtctagctgggcgggaggcggcggagcgggaagtgccacagattgaggggcgcacggcggtggagggaggggcgcccagtggagagggggctcacggtgacagaggaagtggcgccgcttgggggggtgcacgatggcagggggaggggtgctcggtggagggaggggcacacggtggcggggggaggggcgtgccgcagattgagggcgaacggtggcttggggaggggcgctccttggagttgggggcgcacgatggcgggggcaggggtgccccttgggagcagaagcagagaagactcggaactccaagagcaggtggatctgggagccccagatcctgggcactgggttgggggagaaaggggtcaaggtgtgcccgcccccgggatgctcggactctggggatccaggcctggtgacccccggtgaggaagagccagtgggaggaaagggccgggcgctgcccggagcagaggctggaggcgagagcgattgctgcttgctgtagcgcggccgctctccagttcctccggcaaggggggcctgggggaggactggccgaaaatactgtgatgctttggtctaagacaaaagccagcaggggatgagatcaaacaccatgacactgcgaaggggaaggccagcgcgggtgaggatttgccttcccagagaaccccaggggcggggctagcttccactcagcccgcattacccccacccccgcccccacccccggggcggggtctggaggatcagcaaaaccgcgggaaaggtgacagtcgccttccccaccaccgcctgcatttagtaggtgga

SEQ ID NO: 20089 - DNA, 1049 bp, Homo sapiens
gggaagtttcctgggcagataaaggcagctcaatgaggtcacagattgttatcgttgccatgtcttcattgtagagcccagcgccctgccagaccatatggtgataagggctgggatcatgtctatattgttcacaataccctcagtgcctgatgccctgctggcatctatgaaattctcaatacatcattgttggatgaatgaatgaataaatgaatgaatcacacccagccagtgctcagtgcacagctccctgcctagcttcattcatttctccatttactcagtaagaacatattgagccacagcttgatgcgtagcactgtgctaggcatgggttgattgcctacaaaatgcaagaagtggtctttgtccttggggaggagaatcccaagatccttgtgaggggccctgcaccttctgtggggggcacttttgctccctgcactgacacctgatgctcccatgcatatggatgaggctggggggtgggtgaggctggaggggccctctctggatgggggtggggggcatcaggcctctgcactctgagctccctctgcccgctttgtatgtgcttgatgaagcacgggtacaaagaacacagagccagctctcaggacgccttttctctttccccagcagttccagcccagcctgagcgtgcactccccctccactaggccttggagaaagagcctcttttcattgagggcccaggcccaccggccacttcgggtggaaaatgctctcaagaaccccctgaccccggcttggcagagtccccccggatccacctacaggaatcccccctcagcttctcctttgctttgcagagctcctgcacgcctctcctctgctttttgattcctcagccttttctcatttgctgccaaatgagaaaatgcaagaggttgcctttgtcctcttttgctgccaaatgagaaaatgtgacctgtgttcttcagtgcctcctccacattgcagtcttcagatctctgcccagcggagtctctcggcccttgggaggcacagagctccttgtaacg

SEQ ID NO: 20090 - DNA, 1113 bp, Homo sapiens
tggaaaaaccccatctctactaaaaattcaaaaattagccaggtgtggtggagcatgcccatcatagtcccagctacttgggaggctgaggaaggagaatcgcttgaacccaggaggcagaggttgcactgagctgagattgcgccactgcactgtgcagcctgggtgacagagcaagactctgtccccccccccacaaaaaaaaaaagaaaagaaaagaaaaaagaaaaattaacttcaaagcatttaatttacttttgtaaaaattgcaaaatacatgcttgtaaagtcttcaaatagtatacaagtatataacataaaattaaatgaaaattcccttcccccaggcccactctccaggtgaaaccccattgtagccccccatgttgtcttaatgcctgtcttgcatgtggtgaatggggaccagagtcaccatgtgaggggctggcctcttgtggtggacagccccgtcctgggggggcctttcctgggagaccccctgagttccgagatagaactttgtggggacacagagcccatgggctgggtagctgagcagagattccaccgggctcagccctctgtgggtgacttggaggccctcttgcccagctggagtttggatgggattaggggtactagggagccccttcccagccctatgaggtgtgcagcaagacctctctctggttcctgggctgactcaacagcagaagaagccttaaagccactatggggtgccattgcctctcccacctgctgatccctgtgaacacccagcactctgggttttaggggatttctcctgagggtcgaggggcttggcagcctctggtgtccagatgccaagggcctggcccctgtccaccccctgcagaggtctacaccatccagggaaactcccacggaaagccgtgcaccatccccttcaaatatgacaaccagtggttccacggctgcaccagcacgggccgcgaggatggtcacctgtggtgtgccaccacccaggactacggcaaagacgagcgctggggcttctgccccatcaagagtgagagctgttggagccgtgggggcgggggcagtgttcctggagggaggctggtgctgagg

SEQ ID NO: 20091 - DNA, 1030 bp, Homo sapiens
ttttctctgttgaaggtcatttccttcagttgtccattagaacctaccccccctcaccttctcaaggatatgttcctgtaattcttcctcttttctccttttctgcattgctgtgaacataactctcagaccactagacctattattccccatttgcagctttcacattattctccttctttcttccctgaaagtctctagctttgtatctcatgtcatctgactatattacctacaacctcttattgttgttgactgtatctcctggttcattgtagggcattccctacaatgatttctgatactgactaccttgaattaggccagacttcacaagttaagggcacagtcctccgtaagactactcttcaaacactagctgcaaacttgggggatttcagaggcaccctcatttttgagcaactagctaaaatttagggattcttgctactccctcacgtttgataattcattagaacaactgatagaacaggaaagcactgtaggtttgattatggcttaattgtgtcataaaggatacaaatcagcatcatccaaaaagagacacataaggccgggagactcctaaatgtgaagcttctgatgtcttctccctgtggagtcaggatacatcaccctcctggcacaaagacatgtagcaaatcatacgttgtttacacagtgtccacaatcttctgtggcatttcatgtgtaagcatgactgattgaatcattggccgctgatggaagtaagtcttcatctccctgccccaccttggtcagtctcctatgggtcaaaatctcaactctttaattatgtggctgggttctctagcatagccagcacctatcctgcatcattttattaccacagactatttagggacctatcatgagtcatcttgttagcataaataatcagagctcaccatgaataacaaagacactcaggaaattcccaggatttagagactacctttcaggaactggggacaaaggttcagcaaaattctctattacacaggattcc

SEQ ID NO: 20092 - DNA, 1886 bp, Homo sapiens
tgaatgttactacatttgtttctcacaaccacatagagcattatgataacaatttcacagataaggaaactaagatacagataattaattttcctaaagtcatataaattgtaatagttcaaagattgagtccagctcaactctgctagacacccagcacgtacatattggctataatttcattatacagtcaagtggagggagctacattttatgcagaggagagagcataaattgatagcggccttataatatgtttgctttttgaatgtcattgagtagtttggtgctaccatagtataggggagtatattatttaggatttttatggttgcaagtaacagaaaatttgaatcagaatagcttgatataaggggttagcaaactttttctgtaaagtaccaggtagtaagtgttaacttatatcctatggtttattccctcttggtttataagatagcagccagcatattcaggggctccattgatcttttcccatgtttagggagatacataatcttttccagaatttctttctaatcacttgaacttaatcccatctttgttacaactactgaactctgccattgcaacacaaatacagtaaataatttatttgctgttatgactgtgtactaataaaactttatttgtgaacactaaaacttgaatttcaaatattttttgagtcacaaaatattgttttagttatttgcagtcatttaaaaatgtataaactattctgagctctccggctgtgcaaaaataggtggcaggccagatttggctcgcaagagtgtgctgacctctggtttttatgatgaagataatttattagattgtataactctagtccagagatagggtagttttcttcagtaattcagtgtcaacaacatccttgttatgttccatctcttcatataatctttgaaagtgttaatttatatctcatggtttattcccttctgtgtttacaagatggcagccagcatatccagggacctaccgtctttgtccatgtctagtgagagataaaaccttttccggaagttctttctaatctctattgaacttaatcccatcgggtttcacccctgccactccacagagagagaccatgctaaaccatttacactggctgaatgcagtgatcaattctcaatcttcatattacttgacctatcaatatttaatatttgatcttttccactccataaaaccccttctttgtttctatactctccttgtcttgttcctattctcacagtattctccccaggctttcagcctctacatgttcgattccacaccaagtcttagtcctctgacctcttttctctctttttgtgtctcattcttgtatatactctttccttggggatctcatgcagtttcatagtttaaatgggatttatttactaatgatttgtgtgccgatggcatatctatatttctatgcctatttgtctaataagcatttgaaacttagtatttccaaaactgaactccgcatagtctcctcatccccaaatcagttcttttgcagtctttcctgtcttagtaagttgcaagtccattttttaggcccaacatattagaattgtcctcaatttctttatcttactcttctgacagcagattctctttgccatatcttcagaatatatccagaatccaacctcttctcactacctccactaaccacttagtccaagtgttcattcttattctgaatttttgcagtagcctcttaattggtctctctgctttgtctacttctgctctcttccccttcagcagtagagagccttgaaaaagaacacagttttaaagccagacaattttgattttagtattgctacttactagtggtgtgatattgg

SEQ ID NO: 20093 - DNA, 1034 bp, Homo sapiens
ttatgctttgttcactgctgtatccttatgtgccaataataagtacatagtatatagtagtcactaaataaatggtgaatgaatgatctgaaagagaatgagttgagaacccaaaatgatgaaaaatagattataaaatttcagacaatcatttattgagtttggttttcaaagaatctttaatagcataaaataaaataaagctgagatttacagatgtgcagtttttaatcctgtaaaagcttcagatttatttattctataatcgtgtccctctttttctccaagtttgctcttcccagtttttagagctgtactatttttataaaactgtttgttgcagattaaaaagaggaataatatgagttgaaaattttaacttatgctaatacttaatcatacttaagtaataagcatgtattatgactatgtctggaatttatcttattcactcttattttccctgtaaacatattttgatataaaaatgagattatgtaaaactctaaaaataaaattagtacaaattactactaaaattgtaattattaaatgtcaaattttattaagtatcaaatatagatgtttgaaatcacttatctaatttactctgagctttgtcagttaaaatatttttcaaatcaatgagcgtaattgaattttattaacaaagctaaaacttcaaacaacaaaaccagggatttctgtgatccagaggacaactacgtgatctcaatttgaagtcaccaggaattgtatcattgttagagttaattgatagtaaaagcatgtttcttaactttttagagattttatttgtaatatctctttattcaaaagaaatatatatatttttttatatggaatcttgctttgtcgcctaggctggagtgcagagtgcaatggcttgatcttggctcactgcaacctccgcctcccgggttcaagcgattctcctgcctcagcctcctgggtagatgggattacaggcccggctttttttgtatttttagtggagatgagttttcaccata

SEQ ID NO: 20094 - DNA, 1046 bp, Homo sapiens
aaatttaaataaaagtataaaataggctgggtgtggtggctcatgcctgtaatcccagcactttgggaggccagtgtttgcggatcacttgaggtcaggagttcaagaccagcctggccaacatgctaaaaccccgtttctactaaaaaaaaaaaaaaaaaaaaaaaaaaaaaaaaaaaaaattagcccggcatggtggtgcacagctgtaatcccagctactccagaggctgaggtgggagaattgcatgaacccagaaggtgaggttgcagtgagcctagattgtgccactgcacttcagcctgggtgacagagcgagactctgtctcaagaaaaaaaaaaaagtatttttatttgtcgttacatagctttttttgaaagtgaggtaattgtttttagagctgtgtacctcacattagaactgggctctagcaagaagttttgcatcactaactaaaagaaataggccatctataagacccaacagaatgatcccatttcatcagtctttctaaaacaaaatttagggatgttttctcttccatttaaatactcattttaaaaaaaattgttacatttaattcttatttgagtgccaaataagatcagagcaaaattaaaagtttgtataaagctctataagaaaactaccgtctatagatgtaatgttggaaaaagtttttaaacttttttacttgataaacattaaaatggtatcattaatttttaaaacaaggcaaagtgtgatgatatttattttaattgattgaactaagttagaacaaactaaattcataagccagacattgctacagatttcttatacactgttggtataaagtctagccacatatatctgaagtaacttgattttctaagtcacttgctcctgtcccaacttctttcttaattttctggtggagtttgtaaaggagtgctattatttcttcttaaggcagttgttaggattcaccagtggtgacaactgagactgggcttttttgtggtaagatgtttaattactaattcagtttatttacttgtt

SEQ ID NO: 20095 - DNA, 1050 bp, Homo sapiens
tgaacatttgttatgtgtcttttgatgcacctattagtatacttttccttttttttatacaactagtagtggacttgctgagtcatatggtttctgtaaaatggcaaacattttccaaatttgaaaccatacattttttaaatgccaaaccttttatccaaatttgatgctaccagtttacattcccatcagcacagcagtgtttcagtgttcctttgccccctactgtcagatgctattttgtttgttttgtgtgccattctgcactgtatatgtgtagcagtatctcattggagttttgatttgcatttcccaataatattgaacacctttacatgtgcttattagctatttggatattctcttttgtaaatcctgtatagatcttttgtctattttttaattggattgtctttcttgttgatttgtagtagttatctcactctatggcttgcccttttaccttcttaatggtgtctttggtgaaaagattgactttgccaatcttttttcttaatggttgttgccttttgggcctttgtaagaaatatttacctagttctaggtcataaagttacactaaaaggtcgttttccagaagacttattgcttcactttttacctttgggtctataatctatatgaaacttattcttttaaggacaggatttacttttccatatggatatcatattgatctgtcaccaatacttgaaaacactctcatgttactgaaacactgcagtgaaacttttgttctgaatcaggtgattatatatagagagagatctgtttttggatttttaaactctgttccattgaccacctttttatctatgcttttgtctagctgtgtcttaattactttagctttatattaatctcgatattaagcagtatgcccttctctctctctctttttttttttttttttttgagacagtgtctcactcttgttgcccagcctggagtgcaatggcgcaacctcggctcactgcaacttccgcctcccaggtacaagtgattctcctgccccagcctcccgagtag

SEQ ID NO: 20096 - DNA, 1093 bp, Homo sapiens
acgtctttattagcagtgtgaaaatggactaataacagtctccataaatgttttgtaaaaatcagtgattttactattcttccacccaggcttcaccataactttgctgtttatccttgcttcaattttagcagaattcatgttgctctgatgagggcttttttcacactaatgtcttgttcttaatgcctcaaactatatcctgttcagacatcttataataagttagtatgaatttattttgatgcaaaaaatttttgaaattcatccatagttttttcataagatgcatttcaatgaactttttgaagactctcacatgtataaaaataattaagctatacaccaaagatttatatactctatatatgtaaatcataccagtttttaaaatatataaaatgtggcagggcacagtggcttacacctgtaatctcagcactttgggaggacaaggtgggtggatcacttgaggtcaggagttcgagaccagcctgaacaacatggtgaaaccccgtctctactaaaaatacaaaaattggccaggtgcagtggctgacacctgtaatcccagcacgttgagaggctgaggcagacgaatcacgaggtcaggagttcaagaccagcctggccaacatggtgaaactccgtctctactaaaaatacaaaaacttagctgggcgtggtggcaggggcctgtaatcccagctactcgggaggctgaggcacagagaatcccttgaacccgggaggtggaggttgcagtgagctgagatcgtgccactgcactccagcctgggcaacaaggcgggactccttatcaaaaaaaaaaaaaaaaaattacctgtgcatggtagcgtgcacctgtaatcccagctgctcaggagactgaggcacatgaattgcttgaacctgggaggcggaggttgcagtgagccaagattgcaccagtgcactccagcctgggatacagagtgagacgctgtctcaaaaaaaaaaaaaaaattatatgtatgtaggcctgttgtctctgcagaaggattttctcttttctttggtatagaaatagcagtcctaggaaacataacaagat

SEQ ID NO: 20097 - DNA, 1073 bp, Homo sapiens
tatctgttttttcttaacaaattaatttaaatttaattaattaaatttcttaacttaaagttccttgtagatgctgggtattagacttttgtcagagacatcgtttgcaaaattttctcccattctgtaggttgtctgttgactctgttgatagtgtcttttgctgtgcagaagctctttagtttaattggatcctgtttgtcaatttttgcttttgttggaattgcttttggtggcttcatcatgaaatctttaaatctttgcctatttctttatccagaatggtattgcctgggttgtcttccaggtttttatagtttggggttttacatttaagtctttaattcatcttgagtgaattttcttatgtggtgtaaggaagggatccagtttcagtctttgcatatggctagccagttatcccagcaccacttattaaatagggagtcctttccctattgcttgtttttgtcagttttattgaagaccaggtagttgtaggtttgcagtcttatttcctggttctctattatgttcggttggtctatgcgtctgtttgtaccagtaccatgctgttttggttattgcagtcctgtagtatagtttgaaatcaggtagtgtggtgcttccagcattgttctttttgcttaggattaccttggctatttgggctctctttttggttccatatgaattttaaaataattttttctggttttgtaaagagtgtcattggcagtttgataagaataacattgaatcttaccaattacttttggcagtatggccattttaacgacattgattcttcctattcatgagcatgaaattttttttatttgtttgtgtcatctctgatttctttgagcagtgttttgaagttctcctgatagagataattcacctacctggttaactgtattcctaggtattttattctgaaatagttttttaatcacaattctggttttaaatgatcctagagatggtagttaatgcttatatacactgtagtatacccagtagataactaagtttattgactgactgatttcaagtgtagagagtgtctg

SEQ ID NO: 20098 - DNA, 1030 bp, Homo sapiens
agtaggtctcagttttttagtgagcttgtgcctctgaactgtaagcttcataagtgttcctcaggtattgttttccttcccccccttcagtgggagaggaggactagagtgggagacagttgggtatttcccttctcccacaaggaatgcttcccttcagttaggcactgataatactccagcaggttgggctctggtgaactaggttcccctgagggcaggccttgttaagagcattgtgctttggcatgtttcaaaatggttacttttccccttcttctgctagaagcttgaggggatttttcttcagtatttactgtgagaacctggttgggctcctagaggtaagtcacacaaaatggtggcggcccccatctctgagtgcccctggagttgttaactctcagacttgtccacatggagcctccagcaatttgtcagtagcaagtcaggttttcctaccctggctctggttcccactgcattttccactctggtaagctgtgactccctgactgtactcagtgatttgccctgtgccctcacctcttatggatcctggaattgttgaatttttagtctgttcaggtttttacttgttgttaggatgaagtggtgacttccaagctccttacatgtgaaactggaaactggaagtctcccttcttacattgtggcctggaaatgctttcaaggcaataagtgggcagtcacaggatttgcctcatttgttttccatctgaggaaccactgtttttcattgccttatgtctgctgtcttaaaacctattgtttcatatattttgtgtaaaggtttgtttattgctttaggtgggagggttaatctagtgccgcttactccatcttggccagaagtggaaattcatgtcaaatttttaagaagaatgttatagatggagtagaccagaacataaaccagtgtctcattagaaggtaaccgtcttggtagttagaattaggttctccataagctacaatgcatattgtacttacaataatgaagagttaa

SEQ ID NO: 20099 - DNA, 1091 bp, Homo sapiens
ccttttataacaaaaccaacaatgcacagaatggccatttgctggaggacgattattacagcccccatgggatgctggctaacgggtctcgtggagacctcttggagcgagtcagccaggcctcctcctatcccgacgtgaaggtagctcggactctacctgtggctcaggcataccaggacaacctgtacaggcagctgtcccgagactctcggcaagggcagacatcccctatcaaaccaaagagaccgttcgtggagtctaatgtttaaaagacgttttgttggagtgagacccatatgttttcactgcacattttcaggcttggtttccacattcgaggtagttctctggcttaatttctcatgtagtttctgtgtggtgttcagaggtggcagcccacatgctgaaatcctttgcatgcagccgactgggaagcggcctcccgggagccaggacttcagtttctcttgtctgtgcccagccacatgctctctccctctcttcagatgccaacgaggagattttcgtgctgtgtgctttaacccagggagatcagacacactggtcagctttttccaggagacaatcgctttcactgatgttcttgttgtgtaattgtctttttccttttttaaaaaataaggtgttcttgttcgttttcttctagaaactttagaaagagtgcgatgcccctttgcctttgcatccttagccagtgtcacccacacagccagccgcagcgcattctcatgctgtggcccctccccagaccgccagcgccctgcagccaccaggtctgcagtgtgcattaggattattgctggtcttcctagggggtaaaaggatcagagagagaagaattaagtgctaaattggaagaaaaccccaatataattatgtaaaatgtcactacattgattttccaagaggcattgtaggaacatgtcaaaaacagccagccctttaaatattgcagtcagccaaggaaattagatgagaattgtggctattaagagaattcactgagagttattctctagatttttagccgacaattaaccactaaaagctgctgcttttccagggtg

SEQ ID NO: 20100 - DNA, 1025 bp, Homo sapiens
ttggcctagaacttggaggcccgctgctacagcacgctcgcctccaggccacccacgcccccaccacccgcactgagccgttatctgcctgactgacatcttggccaaccaatgacctttggggctgccaaagcgcctgcctccgagagttgggcggggcgagtagttgcaatgacaaacatttaacccaatagcgaggagatttcagacgctacggccgcaataaccaatgacaagaaagaatcctttcgaaaggacgtgtcaggcaaccaacggccggtgccgctgcgggggtccggcggcttccgttccgagagggcggggcggcgtcccaaaacggaaggtggttgtcgtccgttcccaagctggtttgaaactaggggtcgggctcggccgtcgtcgttgtttgtcgccgcatccccgcttccgggttaggccgttcctgcccgccccctcctctcctcccttcggacccatagatctcaggctcggctccccgcccgccgcagcccactgttgacccggcccgtactgcggccccgtggccaccatgtccctgcacggcaaacggaaggagatctacaagtatgaagcgccctggacagtctacgcgatgaactggagtgtgcggcccgataagcgctttcgcttggcgctgggcagcttcgtggaggagtacaacaacaaggtgggccgggcaggggctcggaacccagctggcggggagcgggccccgggagcgccctttccgggccggagcccaggcctcagaaccctcttgcggactcgccctagggccacggagcggttcctctgtctggccctgtgctgaaggtttcgtactcgttgtctgtctcctttaatccaggcagcattcttgtgtagtcggcagtgtagtggggaaactgaggcacggttttgtgacttgcctgggtcaggcagctatttcggggtggaaacaggtcttaaaaccgggtttacgccccaaagatactccatttattcatcccgtgctctccactcct

SEQ ID NO: 20101 - DNA, 1050 bp, Homo sapiens
caggaggtcaaggctgcagtgagccaagatcttgccactgaactcccgctggggtgacagagcgagaccgccatctcaaaaccaaaaaaacaaaacaaatggaatcagcacaatagctgtagaaagatgctattagaaaggatggggggaaatggaaaataagtggcagataaagtacccatactaaaaagatgtctttagcttggttgaaaaataattgtcagtcctaccactgtgagttcaaagaacttaagaaaatacagaacttcaagcagagatatagaggattgggtaaaataaggcatggcaaagagaaaatataacatcagctggcagagcacacaggaaagtagtggaagagaaaactaaaattatcacaggattaaaagccacattggaaacagaataaaggctgggcacagtggttcactcctgtaatcccagctacttgggacactgaggcaggagacttacttgaacctgggaagaggaggttgcagtgagccgagatcatgtcactgtactccagcctgggtgatgaagtgagactgtcaaaaaaaaaaagaaagaaagaaacagaataaagatgaacacacagtgctgaaaacagtaaaggttagggaggacagattgaaaaatgaaactgaagaaaacaatgagaacataatagatgcagaaagtaaaagagatctgacgtaagtataattggtgtccctcaagaagaggaccaaagaaatgaaacaaactcaaatatatggttaaagaagaacttagaagtaaagatttgaagtgataagttcaaattggcatgatttgaacttgccaaagatttgaagtgataagttcaaattggcatgaagtgataagaaaaattggcactgaacagttggcactgaaacatttcctaggaaaatttcttttttaaaaaatttatcttatttttcgtgtgttttgttttgttttgagacagtgtctcactctgttgcccaggctgggtgcagaggcatgatcccagctcactgcactcttgacctcctaggcttaatcgat

SEQ ID NO: 20102 - DNA, 1007 bp, Homo sapiens
aactatggactttagttgatatatcaatattgattaattaattgtaacaaaaagaaatataccatactaatgtaagatattaataataggggaaactggctgggtgtggtggctcatgcctgtaatcccagcactttgggaggctgaggtggacagattgcttgagcccaggagtttgagactagctgggcaacatggcaagaccccatctctacaaaaagttacaaattagcccagtgtggcgacatgtgcctgtttgtagtcccagctacatgggaggctgaggtaggagaatcaatcacctgtgcccgggaagtcaaggctgcagtgagccgtgatcgtaccactgcactccagcttgggtggcaggagtaagaccctgtctcaataataacaataataataataggggaaactgtacaaaggggagaaggatatatcagaactctgctctgtatgctcagtttttctgtaaatgtaaaactcttctaaaaataaaatttattaattaaaataatagagctacagcaaggtatgctgggctgtaggcaggaacaggtaaaaggatgtataaccctcccacaggggcagacaggactacaaacttcatagagcacttgggatactccagatccagttgaggaaatagtgtgggaagctggagaccacacatcagagcatggcaactctgctttagaggactcttgtcatggtaactgtttagaatttcaggggaacgagaaaaagaagatagtgaaaaactgctctcagtgcctgtgtgacacttaagttgtagcatagcatggtagttaagagtcaggcttccagggttcaaatcctacctcttcctttacaagcgatatgacctgaccttgggggaacttacttaatcttattgtaactcagttattttctgtaaaatagggataataatggtacttgttttgaggatcagtttaattaatatatgtaaacatgcttagaacaatgcttggtttgtggtaaat

SEQ ID NO: 20103 - DNA, 1031 bp, Homo sapiens
ggcttcagaaacacctctatctagagaatccatctagatagcacctaacagtatcactgcttgggacagttgatttggaagaaaaaaatataagaattacagtctgggccgggtgtggtggctcacgcctgtaatcccagcactttgggaggctgaggcgggcagataaaaaggtcaggagttcgagaccaatatggtgaaaccccgtctctactaaaaatacaaaaattagccgggcgtggtggccggcgtctgtagtcccagctactcgggaggctaaggcaggagaatcgcttgaacctgggaggtggaagttgcagtgagccgagttcgagccactgcactccagcctgggggacagagcgagactccatcacacacacacagaaaaaagaattacagtctcaatgggtttcctagtggagatgaaactaatttggttagcagtataatttccaaaaatgaaaggtggtgatggacaaaggaaaaaaacaggaaggaattaccttcttgagatgttaggctttgcgtgaaggatagattatggtttatattaatagtctatcaatgttgccctgtagaactttctgctataatggaaatgttctatatctgtgctgtccagtacacatatggctgctgtacatgtggctaatgagcacttgaaatgtggttggtgagacagaggaacctttttcttttaagacagggtctctgggccaggtacagaggctcacgcctgtaatcccagcactttgggaggctgaggcaggaagattacctgaggtcaggagttccagaccagcctggccaacatggtgaaaccctgtctctactaaaaatataaaaattagctgggtgtggtggtgcacacctgtagtcccagctactcgggaggctgaggcaggagaatggcatgaacctgggaggtggagcttgcagtgagccgagatcgtgccacttcagcctaggcgacagagcgagactccatctcaaaaaaaaaaaaaaaaagtagacaggatctctgttgc

SEQ ID NO: 20104 - DNA, 1145 bp, Homo sapiens
tgttcttttgatttcaaatctgtcatggacttttttttttttttttttttttttggagatggagtctcactctgtcgcccaggccggagtgcagtggcgtgatctcggctcactgcaacctccacctcccgggttcaagcaattcttctgcctcagcctcccgagaagctgggattacaggtgcacgacaccacgccccgctaatttttgtatttttagtagagaaggggtttcaccatgttggccagactggtcttgaactcctgaccttgtgatccgcccgccttggcctcccaaagtactgggacaggcatgagccactgtgcccggccgtaccagttctttttttaaatacaaaaactgagaagtgaaatggaaaaataaactagaggtatataaattataaggctacagttttcattagtagattcaataaacataaaatcactctgccaaattgctctaaagtttttcaaagggccctctccatttctttacttacttggtggaagagcaggacgagcagtataccagtgtgtggactggcaccagcccagatatcataccttaagtacactgctccaggatactatatcacctggtcttcatcacctccgctgatactgtcagtcactttgtttctccactttgaatttcctgcatttgtagcagttgcctcaccgccttttgttaccacctattcctttatttccctttttttttgagatgggatcttactctgtcacccaagctggagtgcagtggcgcagtgacagctcaccacagcctcaacctcccagactcaagttatcttcctcccatctcagcctcacaagtaactgggactacaggcgtgtgcccccatgcttggcttttctttttttttttttaattgtttgtagagacagggtcttgccatgttgcccaagctggtctcaaactcctgggctcaagcaatccttctgtctcagcctcgcaaagtgctgggattacaggtttgagccaccatacctggctgtttctcttcttgttcctgttttgaattgtgctatctctttcttctctttggattcttcttcttcttcttcttcttcttttctttttttttttatttgagatggagtttcactcttgttgcccaggct

SEQ ID NO: 20105 - DNA, 1041 bp, Homo sapiens
gcttagatcatttagctaatgagtggcaaagcctgatctgaacccacgtatatctaatttcaaagcttagtcttttctccgtgcacctcacttacctccttagagttgcttctgctgctgacaaatgttgctgacatgtggattgaattgccatagaacttgtggactaccaagatgtcatccaaagctaaaagtaggaagcaggcagtaggctaatttttataagcaaagggttaaatagtgctctctctgtgttttgtgacatgataagacttaggaaaaccatcctttttttacagttgcactggaattttgtgttacagtagcaagggaaacagccaggtacatgggtctgtgaggtctgggtcactggaaagtggagtagttcccttggtccagatttcccctaaacctccatcttgtctttgcctacaaaccctctgttggccaagcggcattttgtattcctggcctctgactcccaaatgaccatggagaaaacaactctgaatttgagctgcatgaaacatgccactgtggatgtggctcacacctgtaatccctgcactttgggaggctgaagcaggaggatcccttgagcccaaggagtttggggctacagtgagctatgaacacgccactgcactccaaagaaagaaagatacatggcactgtgcttcccctgtgctgccaggaagtccccacgttagcctccctcccacacctggcaggctgtcatatttccttgtggatgggatctccatcctccatagggattactcatgggggacagatggcctggccagttcaaggagaagttatgtcttgtgccactgtgttgagcagcatgcctgccctttttggaaataaattatggtccccaaattgccttggctgaactgtatgagagtcacaaagcctgttttctcgcttcggccccaccataaagtcactttatggctttggggcttgggtttccctctgcgcaatgtggatgatgataatgcaccaccactgcaggggtgtagtaagggttaaatg

SEQ ID NO: 20106 - DNA, 1143 bp, Homo sapiens
cgcacagcaggccggaggcacagccggcgagagacggccactcgctttggagcggcggcgaggccggcgccttcccgggcaccagggactgcgtggcttggccggaaatcaggctagaagcagctccgggaagcacagcccttagcccagcgccttcccacactgtggcaggaatagcactggcggcccacgcgcttgtcagggaacagaacagctctcgcccgacgcctggcaggggagcagggaggctgcagcttccccagcgaccagctgtttcccaggctggcggactccacggaccggctccgcgtctcctctccagccttctgttctctctagaggaagatctgcgttttgtctgcactgtgggccgactctctagtggggagcgtcagaccctctaaagtggctgcctctcgggaaagcttccacacctgtcatcagattctccaaaggggctgtttgatgcaagaaacgggaagccccgggggtactaggagcagggcttgctgccattgggcatggtgaggccccggcaccctgcccaggacgggcctgtgggctgagctgcagatgggcattgaggatgccccaacagcaaggtgcagaaggcatccagaagcaaaggaaactgatgaccagcgtcaaaaacaaacaaaaaaagggaacttggctcggcggtggctcacgcctgtagtcccagcactttgggaggcagagacaggtggatcacgaggtcagaagtccaagaccagcctggccaacatggtgaaatcccgtctctactaaaaatacaaaaattatccaggcgtggtggtgtgtgcctgtaatcctagctactcgggaggctgaggcagaagaatcgcttgaacccgggaggtggagcctacagtgagtcaacatgaagccagtgcacgccagcctgggcgacagactctgtgtttgtgtgtgtgtgggggggggagggcggggcgaggcgaagggaacttgaggtttaaagcagggggaggagggccggaaatgctccccgccgcccccgacactcactcgccccaggccccatcctagcccagggtcagtgtcattcccttcaccttagcctctcactgcccaaagaggcttacttttcttctttaaactgct

SEQ ID NO: 20107 - DNA, 1884 bp, Homo sapiens
cctataggcagttatccaatttcttgtggcttccctgtgttttctttttgtcaatgatgtttctatgtctgtcctctctcgtatacacacccaggacttcctcaagcgcagggactatgtcttaaggcgctttgcagagccaagctcatttctggcacataagaggtgagcaatgagtgtttcgtacaaaaattaatgtttatattttgacagctgggaaaagaaaatatatcttcctgtacctggaagaagcattgtgtagcctaatgtgcaattcgttcattcaaggggtatttttattggtgcctattctctagcgccgttctaggtgatagggataggtgttagacccctgcctttggggaacttaactttctagtagcgggaggagaggcaaacagatacatatattatactgaatgttagaagatgatcagtatcttagggaaaagaaagctggaaagggggttggggaggtggtggtgttggaatttgcaataaagtggtcagggaagtccatacagacaagctgatatttaagcggactagaaggtggagtgagagcctacgtttatctggggaaaggaacgttccaagctagagaataacaaacataaaagccttgaggaggacaaagctggcccgttaagagtgtgaagaccaacgcgtttggagcactgtgagctgagggagtattaggagataaggtcagggaagaattgggggaagggagtgagcggaacaaccaaagccttttaggctgttacttaggaaggatctgagggtttcgatcagaggaatgataatatctgatttatattgtaacaatttaatataagagaggagtgcagttatttaaatttgttttgttacattgatagtcatataatcagctcttagttgctttaagctgacaggagaagggatgcttctaaaataaccataacctagcatttacttgtatttggtttagaagaatgtgattacgttcttgagtttttatttagattctcatcaaagaactgacctgtatatagtgtgtgaggtactctcaaagtatatgtagagtagatgctaatcactgtcactagaactcttccttccacctccaaaaatacaagtgataaagtaatgtggcttatataatcagttgtttttagtccactatatttaaagtcatttagatcatatcttattttccgccattgccgaaaacacaaactagctaaattgtcttcctttataagtgtgttccacatttattctcacttcctagcctttgctagttcagtctttctccctggaatgtcttcgtctgcacgtctctacccagctttcatctttctgtgcctagcctggcttctgactctgttatgacacttgcccttgcttgttagctcatggtgatctctgacatcttcagtgttcttgtggcgcttatgtatgaaatacctgagttgaaagaagtctgatagtctcaatttaccgatgaagaaattggttcttcagaaataatgtaataatgaaaaacacgatggtagctgacatattgaacaagtacatttttgtgtatgaacttaatttttcacgccaactcttgagataggtgatagtctcatcttttttttttttttttgagatggtgtctggctgtgttgcccaggctggtcttgaactcctgagctcaagtaatccgcctgcctcagcctcccagagtgctgggattacaggcgtgagccaccacacacagcctcttaccattttttatagatgaggaaactgaacccagagaagctaaataacttccctgaggttcatatcaagttagtagcaaagatagtttacacatagcctgtgctactttactattctgttaagatttcc

SEQ ID NO: 20108 - DNA, 1030 bp, Homo sapiens
tcctgcctcagcctccggagtagctgggactacaggtgcccaccaccacgcctggctaatttttttgtatctttaatagagatggggtttcagcatgttagccaggattgtctcgatctcctgacttcgtgatccacccgtctcggcctcccaaagtgctgagattacaggcgtgagccaccgtgcccagccaggagatgccatttctttggggatatcatattcatgtctttaggagttggtatttgagatatgctttgaaggataggactttggtaggtactcacagtttataggaaagagatttgatgtgaaggggatccagttagagggaagaggattcactagagtgcttgttttcctggaaaactgagtacgtgtggagagaccctgggaaatatgaatggtaaagtagtttgatgccacaatggagggtctcattccagcatgattaactgtggagagctatggaattgaggagagtgacataatcagaaatgtgtgttctggaagaacctggaaagggttttcgataagcatctgaatactgacctcccttctgtgagactttttctggttccacggtattaacacacactatgctactctaccaaaggaggtaaaacttgcttttctcttttcactgtgtgtctcactattacttcatcattttatgctttactaaacagaatcacttctcatagactatggaagatttgctggttttagatgaagcatctggatgtacatccacattacttttccaataaaacagacattcttgggacagtagtcaggggaggattacctgtcaaatgtcattcatctcagagaggccttgcctgacttaagtctgcaatagcttgcctcttaccctcttgcttgcttttcatagcacttttgctacctggaattacatgatttagtttttctttctcctgggccagactgtgaactctgagtatggctgcatctgattccattactgtatccttagcaccttagagcagttactggcacaaaataggca

SEQ ID NO: 20109 - DNA, 1028 bp, Homo sapiens
tttatacctgcgttgctgcaacagccttctactttccttgcctctaccatgagtatctctcattctgtctttcaaaaacactgatctgaaaatttcccttctgtgtaaaattaacgattctttgtagctggcagaatacagttttgtatggtacgtcgttagcatagccttctaagctgttcatcttggccctacctgtctttctgaacatgtgtcctgcaaatttcccaaatgtgctactgaactctagctgcactgaactatttcttgttctctgtggtaacacttaacagatccttccatctgaaatgcccttctttaatgcctctttgatctaatgcctcttgaggtttcaaaatttaacatgtcatctctcagaacacttctatgcctttgctcccactcatggaccaccagtgaatgcactctgtatagtacgtctgttagaacgcatcatgttgttttcagctgcctcagactgcactgtctactccttgagaacagggactgtatctttcatgtatgaatgcctagcacatcatataccacctgaccttctcagcaagctttcagtaaaccattgaaagttttcctgctaggagattgtgtgattcttaaaatccacctgaacgtaaatgtctttccactatcctttctttgccttctcatccttatggcttattagctccttgttatacattgtatacactaggaaaaatgagattaaaattgagcccatcctttttgttgcttgggaacacctcttgtaaagatagcttatagattagtttaaaaacgtcagatgctgaaattttcttgcttgtaaagattcttactaaatttcatcacactggaattacgttgattccttgattgaaggaatccccttatgggattccgaaagacagcaggagatgaagttcaggtaaattagtacttactaaatacataccttagtcattctcactgttagagaaggaagtccaaaatgagtaaagacagtttctatctggagttaagggtctaag

SEQ ID NO: 20110 - DNA, 1018 bp, Homo sapiens
agctcctgagacatacagcaagtggtgatggtccccttctccatgtgaactgtttaagcgttttattcccaaactcataaaggagttaatgtagttttcactctgtccccatccctaaggtaactgcttttggctgaaaaccatttaccctagagctagaaactttggggacaataagaaggttgtgacctttctagtatatgccaaatacaagattttttttttctttttagtatgaaatacttttcacaaccgcattgtttgttgtatggattcacaaaactaggaccatttggtatctgtcttcagaaagtttttacgtctgatatccttgttggtaaccgctgtttctaggggtatcatatcatcccatttaaaagaaatgcaaactgcagattatagagtgcagctacacatatatataatggggtggatagtttatagtgtgctcattgctgctttgttattattagtgttgagagttcctgtgctgtgtggaattcaacactaatctgctgtaagtatggagctgggtatgtggaacatttgcagggaagtttgtttctccgcttgtttttccaggggtattcgagatgacattgaagaggaagatgaccaagtgagttcctatgcagtatttctatcttttatttttatccacaaagtctatactggggacaagctagagcttgccttcactcaaaatggccattcctgacattcagcagggaatgtcatttgatttgctccttttgtacctgtgtgaccaattggtaatacatagattcacatggctttcccccatattgaagatggaatttttgatcaactgtgacatccaaagcaaatacgagctttattcagcttgcttctttttaaatccaaaattaatgtttattctgataaatcaagtggtagagtagtgtgggatctattgatggcctctggtaacatctaacctctgtctcttagtaagtgtcctgtttgtggttcttgtatttcaagctggaacattaat

SEQ ID NO: 20111 - DNA, 1047 bp, Homo sapiens
tatactttttaggatctaagctgagaataaattaatttttttgctttctctagctggaatggctttacttgtgtaaaatttggaaaagattattttgcaataaaatcaaacttacagaattgactcttgaattctagactaactttgaataattggacctgcagattgactatccaccatttgaaaaaaacttttacaatgagcatgaagagataaccaacctcactccacagcagttaatagatctccggcataagctcaatcttcgggtaagcatcattaagctcaatattcttaatattaatgttaattagtccagatttagtattattggttatctaaactaataaccttgaatttcttttctaatggtctctgaactgtctttgccagagtaattattatatcccttctgttcatgtctcttaatttgattgttttagtcttctagatgctgttttaggataggatcattttcttgtttcatatttcagtcagttttatatgttctgtgctggatgggctagtgatgaagggtgggagtccccatctaaaggaagaggaaacaaaaggaatagatgttaacagatgatatcttagaatattttgaaatgaagataaacttgtctgtcaaattacatatagtatgctttattttaaaaattagaataaactaataccttttaaaaatatgcatgtactaatttcagaatggtttaaactgcctaccagaaagttttgggctgcacattggctacattggtttaaggtgctgatagatggtaaatgaaacacacagaaaaaatatgctatgctatctactctaatatagacaactttctcgcctgtgtgcaccttatcagttgctacacgatgtttaaactcctgttttccaggaggggtgtgtatttgtgtgtgtacacttgtctgttttccaagaggttactcatctccccagtgacccaagaaaaattttaagtaaaacccctgaaatcctgattggaaatatcaacatcaccagagaagcattgaaaggttaccactttg

SEQ ID NO: 20112 - DNA, 1021 bp, Homo sapiens
ttaaacaaaatggagttgtttctgttctgtaagtggtggctgatatccacgtaatgagaatgatgtcatttcctataaatcaagaagttaatgagaatgttggatattgatatttctatttcacaaccagtatgcatagcaccaggtatgttttgttccattgcaaataaaaatgttagtagtcatttatcattccccaggatttgcttcagtacatctttagaattgaaattttagagtggttatattttactttttctccagggtgtgcctgtggcattaagtggtagagacatgattggtattgccaaaacaggtagtgggaaaactgcagccttcatttggcccatgttgattcatataatggaccagaaggagttggaaccaggtgatggaccaattgcagtgattgtgtgtcctaccagggagctttgccagcaggtatgtgctttctatagaatgcctccttccatatgtggactagcaagggaccagccagtcaagtgaggtagaatgaccaggaaacttttttttttaattgtgataagatacacacaaaattgattatcttaaccatttttaatgtacagttcagtggcattaagtatattcacagtgttgtgctaccaggaaacttttggaaagtattatgtgttaaatattttctatataaccaaatacatattttcccctaaaaactactgtttttatttatttttatttatttgctttttttgagacagagtctcactcttttgcccaggctggagtgcagtggtgtgatctcagctcactgcaacctccacctcccagtttcaagcaattctcctgcctcagccgagaggctgggatcacgggcacacgccaccacacctggctaatttttttatttttagtagagacggggtttcaccatgttggccaggctggtctcaaactcctgacctcaagtgatctgcttgccttggcctcccacagtgctgggattacaggtgtgagccactgtgcccggccagaacta

SEQ ID NO: 20113 - DNA, 1075 bp, Homo sapiens
attatacagttttatcagtgggtagaagcagtgtacagtacagatctgctgatttgaaatcaagagtctttttctgaaccatactgacaacttgtcttaactaaaaatgtaataaaaatagaataagagcaaatctttccctagtgaatcagtttctaaactaaatttaaagttcaggtgagcttatgtaaaaaaactgaataatcctgaatgccaaagaagcttaatgggtatgcataaagatatcatattgtttctctaacagaatttatcttaccttttagctctcttatttagtgcaacttttcggaagaagattgaaaagttggccagagacatcctgatcgaccctattcgagtggtgcagggagatattggagaggtaaccctaagcagggctggatgggaccttaatgggtttatttctcatattatggaacacagaattaatttctcactattgagataaaaaaaaaagatgttatgtttatagatgcaacatgcttgagattgggtattttgcaagttgtggggatagacgtaacaagactggcaaaatgttgggaatcattgaagctaggtgatgggtatgagttgattttgttcattttgtgttttttttgttttattgaatgtctcaaaacttacaattgttttaaaaaggcttcaaagagacaaaaagatgtgcctggaagcatcagcgtattaggttggaactgacgttttaattattgtggtaggggcctacgcaggagggaaagggtgacctggaaggcctggaaaaaatcaggtttcatttcttacctgtacatatgcgctatgtgaaaaattactctgaattgggacttggaattcagttatggctgcttagagaatccttcagttgcttgccatggttattgttaaggaaagctctacaaagtagtggggcatacaaattaggtatgtacaccaggtggagagcaaggtgattggaaaggagaggtgagttttgagctgcacttgacttgctgaaggcccaaggagaactgggattgttcaaggtcttctcgatgcaggtagaaatataatgcct

SEQ ID NO: 20114 - DNA, 1050 bp, Homo sapiens
tttagtcctgggaaaatggagggttccaagggagggagggattagaacccagatcctgagcctccgaagtccaaactttttctactacgcaaagctacctggtgtcaagccttattcaaagtgccctgcaagtggctttaccccctcggatgtttaacctgtcgtttaagactcactctgtgtcttcagatggagctggaggaggggaaggcaggcagcggactccgccaatattatctgtccaagattgaagaactccaggtgaggacggactccagagggagctaggaagggtgatgatgggggatggaaacggacttccacaaatccatctaattcctttgggagtgcagtggaagaagctgctgcttctcctttcttgtttgtttcttagctagtagggtgtatgtatcagaagtaagcaatctcttgttctcctccagtcccatctctttgagggtcttagtgttcacagtttgttacacatcttcgagtcaaatcttaatagtaaaggtacctctagccaaaggtcaacccttttggaagaagcccgaatgaaaaggattcttataaaagggaaacataagctcaggagttgaaatttatcaccaagaggttgggtgagggtgaagtgagaatgtgaggaagggcatcattgagggatctggacaatgctaattccatagagactgaatgaaagaaattgggcaacccagagccctagcctaaagcgctaaaccatagaaaaaggaccgtttatgttgttaatcaaatgtttgtgttaccagtaaggcttccagcagtaaggtatggcttccagtagtaagccttacagacaacataaacagtagtctgttagtgttacgttatactgttacggtaggctgttagtagtttaactttggacaggtccatggattttcaatttcaccctaaccccctgcgttgttcaagtgtcaactgtaatataaattggatgggggaaagccacaaaagacaattctgaattccaagtgcatttgcaggtattatgtttagtttaccattttt

SEQ ID NO: 20115 - DNA, 1285 bp, Homo sapiens
acaggttattttgcacttggggacagtttttaactttccattctcaactcctatcctagctcctggcacagaacatgtcatccaagttaggcatcatcgtcgcctgctcttggtgaagttttcttttgcgtactgcggagagatgcgctcattaccagctggcggtggagtcgctgaaacgcaaatggatttgagactgagcgactcccatctctatggttggtatgtgacccatctatcctctggaggactcagcaaggactaccagtcaccagacaactttacgcgcacgtggtcgcaaggtgaacttgctattggttaatggcagtaaagcccgcccatcagcgctggtctgctcctttaaaagaacgccatcgacgctcccctgtctttcagcgcctgcaggttccgggaggtcaggttgtattcctggcgggtcgtctggctgggtgggccccggaggtcgtggctcgggagcagggaggcgtaggggggccggcctgctgtgatgacattccaattaaagcacgtgttagactgctgacgcgggtgatgcgaactggagtctgagcctgcccgagcggagctgggagggggctggcgggcgggcgcgcgcacacccgctgatctatcactctcgttcttgtagctcccagccgaggacgtcggatgtcatcgtccttgctgctttgccaccccattcccgtcaataaagtggtttgaacccaaccctggtgtcggtgtgtgtcgttggcgacgcgctgtctttgagcccccgccgagcttcctcgtggcgccgggggtcaatctgcagcgctagagcatgtgcttgcgcataactggggccgcctggcctcccgcgggcggcctttttaaccgcgagcgacaagaagtaacctgactgtccggctgctaggctgggcaattttccagctgttttgccacgacaggcctcaatccgtaataccaaggctggaatggcgtgttaggggggcggtggctgacggggatacgcggactcttgatgcgtaaggagtgcccctctgctcccatacgttccccagcccagccttccctgagtgtatcgcgcgcgctgtgccttcgccgtgagttcgacataagtcccaggctgtcgcgtctgccatcagacgcgcagatttagttgaaggcagcgtggaatggcgtctgcagggctgttgtgtacttgacataaacagattcggtgtggaactgcattgagttaactcctgactaaagggtaatcgacctgtttacaaataaccat

SEQ ID NO: 20116 - DNA, 1043 bp, Homo sapiens
taaagtgaagacaggcctaggaaatcacaagggtattgattggggaagtgataagtgtccatgaaatctttacaattcatgttcagagattgcagtaaagacaggcataagaagttataaaagtattaatttggggaactaataaatgtccatgaaatcttcacaatccacgttcttctgccatggcttcagccggtccctctgtttggggtccctgacttctcgcaacacctggccgtattgttttattttaaagcatactaatgctacttgtttgtgatagctaaaaattagaaacacctaaatgtccattagtagggattggttagataaatcatgatagctgcatacagtggactgctctgtggctgtaaaagatgactgaatatgctctttgtgcacaatgttccgtgttgggaacaatctctagcatatgtgatgcgagaaaaatgtagtacaattataatggtaatgtgcagagtagtatgctagtgtttgtaaaaacaaaggtgtgcagaagtatttgcagttgtttgcaatcggaagaactctctagaagcatatacaagaaactcgtaatactgattgcttccaacaaagggaacctcagggttgcaggacaaagggacaagaactttcagtgtatactttttgcacttgctgaattttgaaccatgttatctattcagaagtttttttctgtaattaaatctccaaaataaagtatactatactgtattctaaaactaagcataccaaatatatttataaatcactgtattatgtgtatttcatttatgtttagaaatgaatgattattccagtaagttatttcaagcttatgaatagagggaatattgacaatgtgaaactataatcacaaaaagaggatttatactgttgatttattctttgatagttgtaaaaggagataaatgttaatcaggataagtcctgatttacatctcttaatttgatactgacaagaacaaatttttgcgaagagaataaaatactcttctgtcttaagttttttaatgcag

SEQ ID NO: 20117 - DNA, 1086 bp, Homo sapiens
ttttgaaattatttccctagtgagttatagctactggtgaaagtatgtattcttcaagtatggtggggtggaaaaagactgatggtcttaagaaaaatttcatccaagccctgatacagcctgactcagcctaaggcatgattatcttggagcttgcattatgttgacacaatcacgttttctgtcaccttgatatacctcagacatcctttacagatggagaggtataaaaatattgaatggacctgccactgacttaaaaaataaaacattgctcatacaactgtagaccctgtttttaaagcaatattcttgtttctttgttactcgaataatacatgctcattacaggtgatttggttctttctgattgcactttcactagaaccctgtttaccatggcaagttaggggtgcctcactgtccttacctttccctgcctcttacatagaaaaagtagtattcacttaggggttttttggtattgtttttatctgttctgaacaggtgaaactgaacagtattttaaagaatctgatcgaggagaacgtttggaagagccagaaagtactaaagaatctaaatcatcatggaaaagagtttcttttgggaggtagcacttagtgtctctgaatttgatgaaaacaagttacgctttttggactaagaattaaaatcacacgtaatataccaagatggcaccaaaaaaagctaatgtgaaacttctactaacttctcatattttaaactttcctgagggagttttaagaaccttgagttacatataatacctaaatctcagtatcaactatctactcatttttatatttttctttttttttcttttttgagacggagtctcattctgttgcccaggctggagtgtggtggcatgatctcgactcactgcaaactctgcttcccaggttcaagggattctcctgcctcagcctcctgagtagctgggattacaggcacgcgccaccatgcccggctaatttttatatttttagtagagatggggtttcaccatgttggtcaggctggcctcgaactcctgatctcaggtgatccacctgccttgtc

SEQ ID NO: 20118 - DNA, 1541 bp, Homo sapiens
acatgctaagcagcaaaagggagagtcttttcctttttctgcacccagcagctctccaggtcctcaggggaagggccctctggtcaggctgggccctgagtgaaggagggaacttttccaggtgctccttgtcttctgagatgttgggcccctcttgggatggagatgaagcagaatccactggtgaaatcattagacttggagacacagcacacaccttttctctaagaagtaatggtgagtagttaaacctgaagtatcagttattattcaacatacaactataaaaatgtaaatggtatgtaggagtgtttaaaattgagaagaatagagtgctaactggacatgggatttgaaattccagaatatcccactacccattaaatatgaacacttatctgaagtcgcaggcatatgggcagataagtccaaggcaaataagtgtatgcaaggttattaggtaatttgcggttccttataacctgggaagagaattatggatgcagcttatagtctggtcacgctttcagggtattctttaattgtagtttcctgaactggtggttgactcacttttttcattgtttgaaccaataagttcgtatatgcagtagcaatttttcttctaggcttcaggccagatttccaacagcctattgcttgcacatagtagacccggatatctttcaagccccaattttgagcctccaaccttgccctcctccaatcatcctactccatcctgtccaccgtggcttcataaattactaaaccagtatatggaccacaagtcttggaatgttctcccttacttttggttcctggcaaactcaccctccagtagaccaaaaagctatgcttgccattgggataggcacagaaacggaaggaccagagtcaagtgtggatactacaaaaatgtttcttgaagtaggagaatcagatggattgattgggaatggaagggatggtgattgcagaaacgggttctgtgatgtcaagtgctatgtaaaaaagatgttactgtaaaatgaattacttattttaacattataagtagagaggggaattgtgtttaagagtaatgcaattaaggcaaaggaaaaaagattcagagagatgcctggccaaggtgtttgggtttgatgtgataaaagggcttatggcagcttcctttcatattgagatttaaagtgtcagataactgtcatatacattcacaggcatctaatttaagcttcaatatatggaccatagtctttttttttttttttttttgacactaggtcttgctctgtcacccagggtggagtgcggtggcgcaatctcggctcactgcaacctctgcctcagcctctcaagcggctgggattacaagtatgtgccacatgcccagctgatttttgtatttttagtagagatggggtttcgccatattggctaagctggtcttgaactaataacctcaagtgatctgcctgccttggcctcccaaagtactgagattacaggtatgagccactgcgcttggcctggaccat

SEQ ID NO: 20119 - DNA, 1032 bp, Homo sapiens
tgttagaccttttatttttattctgttttatatctgcttctaaggaaaaaatatacagaggagaagctgttcgtaaaggaactccagaatgtagtcagccctggaagatttactctagaaaaaccacaacgcagagtctaagaggtggcctcccaaagccaaataaagcagttccaagtaagaaccacagaattgtactttatggaaaactggcaacctttgaaagcatgtgcaacattccaaggacacagcactgaaagctaacatccaccagttagccgaagaaagttttttttttttcccaatcactgccatgtggctggttttccgtagagggctaaaactcttcaataaggaagtacttcagggaggcctatatattggcacccaaggaatgccaggactgccacctgctgctccagcgttagcctcactcgtgtgcttactcactttgactgcctttttgtctatttctgggaggttggtagaatgaaagggatgctccaaggcaagcagatggcctgtccacctcctatatattgacagtgccaatgagtgtagagtcttgttacaagaaacaaagtcatgagaaatgccaggcttcctgttacacccaaagactgctggccctcctactctatcctttagaccagaaactttttcttctaagcacttgcctaccgggaaggttgaggagtcttgttttaccgtacgtagagaatctacccacaggcactgaagcggctgagcaattaggatggacttcccaggaccagcatggcatcaatccagaactattgagcttatttttatccttaccagtagttggcttactccaatcagaggagtaatgcaaattattataagtacatttagaattgttcttttcaggatcaaaaccacatcacttacataagctttgatctaccagggatgttggatgacagttcttgtccacgtctcagattaagaacatcttattttaccttgcagtgaaagtaagtgaacacagtctcctgccccttatgctgg

SEQ ID NO: 20120 - DNA, 1123 bp, Homo sapiens
agccaggcgtggtggcacatgcctatagtcccagctatttgggtagccaaggtgggagaattgcttgagcctgggaggtcaaggctgcagtgagttgtgactgccccactacactccagcctgggtgacagagcaataacctgtctcagaaaaaggaggtacattttatggtatgtcaaaacatctgaataaaactagtatttaaaaaaaaaaaaccttgggaaatacaatcagtatatacctctagttggccaaaatgatattcctcaatgactatttttacgattaaataactgacagatatttaagaaactgtttgaagaaggtttaaacattcaaaagcaaagattacgagacctaagaaactatgccaaagaaaagcgagatgaacaaaggagacgccaccaggatgaactggactccatggagaactactataaggaccaggtgggctcctggcacttgcttacgctgttgtgcttagtcctgaccacttgcccttgtggcaaaacttgcttagtctgttgacaataaaccttgtgttaactgaagtttgcactctacagattagaggaccccatttcaagattgaaatttaagatcaaataatacctgaccatagtacagtatatttccctatttccattaaaatgattttaagcctgtgaacattaagaaatgttacatttggactacaaacattaaatataatatttgttttttttcttcctataaacagttttcattgctggcagaagccatatcacaggaacatcaagaacttaaagccagagagaaatctcaggcccaggtaataattaagatagaagccaagtcatgcactgcatggcaatgtttctttcagcaagggacctcgtacattggtggttggagcaataggctgtatcatatagccccggtgtgcagtggactgtactctctaggtttgtgtaagtacactgacattttgcacaacaacaaaatcatttaatgatgcatttcttggaacatatctccatcattaagtgacacatgactaatttacatttttaggaagtagaaaaccaaatgtattatacctgtaaagggaatggagagaagactaataaggcaatccatctat

SEQ ID NO: 20121 - DNA, 1032 bp, Homo sapiens
agactgttatggagagtaatttcttttttttttttttttgggcggggacggagtctcactcttgtcgcccaggctggagtgcagtggtgcgatctcggctcactgcaatctctgcctcccagattcaagcaattctcctgcctcagcctcccaagtagttggattacaggagtgcgccaccatgcccggctaaattttgtatttttagtagagacagggtttcaccacgttggccaggctggtctcgaactcctgacctcaggtgatccgcccacctcggcctcccaaagtgctgggattacaggtgtgagccaccatgcccagccaatttctttcttttaaagctctattaagtcattagtataaagttaaaaaggcactcaaaaagcaatggtatttgcctgctttatattgtatattaaaataagtgatagtagcatttcattattactgtatccctgtcagttatgatttctgtattcattatgtacttttttactgaaagattttaaaagtaggcacaattataaactgcactagtgctttaatataaaagagagatgggtctgcaaccagtaaagtactatcatgacagctgaacattactgattatcaaatagcatagaaaccacttccatacatttcaagatgctcttcagtactcagaatgcaatgtaaaaaaaacaaattgtttgagaggaaaaaggtaggcataagcatattaccactgcacagttacaactatgactagcttgcttgtggcagttgaatttggccaaatgaaatacattaaaatacttaaaaactacacaagtagttctcaacttttttaaagcagcaaaatctccactttttttatcccatccattcctccccgccccactgcaccccatgaaagcttacttgaaattccaatatacataagaaaaatgggctgttctgggtaaagggggtggggatatggagcctaaggcccctgctcaaataccaactaggccttccccctcgctccctctcattgcccctcttctc

SEQ ID NO: 20122 - DNA, 1023 bp, Homo sapiens
cctgaattcatatacttcttttttttttttaattttttatttgagacagagtcttgctctgtcgctcaaggtggggtacagtggtgtgatcttggctcactgtaacctccgcctactgggttcaagggattctcctgcctcagcctcctaagtagctgggattacaggcgcctgccaccacacctgactaatttttttgtatttttagtagagacagggtttcgccatgttggccaggctggtcttgaacacctgacctcaagtgatctgccacacttcagcctcccaaagtggtgggattacaggtgtgagccactccacctgcctcttaattcatttacatttaaatactgacctttgttgaccttcttggtgaatcctgttgtcatagggtcaggaaaagccctgttgttagaattttagagtaagaaaggaccgtagaggctgtctagcccaggttcttgaatttatacctgtagaactggctataagagttaagtgacttgctgtaaaccaaacccccagagagtggccacttaagtctccagcccctacctcctataggatgaccctgtgctatgaacctttgtacttgtactctgtagtcttgactctcaaatgccattcccagtgagtacaagtgcccatccaatactctattttttttttttaaaaaaagaaagcatgagggaatctgcaaacaaagcagacgtgagattccttttattttctttgaaaaacggcagtgccttttagagtcaaatatgcatctaaactctaggagttttaccaggtaaataaggattgtatatttagctttcataatttataggtgaacagtctagtaacaacataaagaactcgtattaaagaatattaaaaatgcttcagacttttgatttgtattggatgagaattcatgggcaaggaagatgaccgttcacgaaattgtatattttttctctctaattttaactctgtgattctctggcaacaggctatacagttctggtgttacttagt

SEQ ID NO: 20123 - DNA, 1138 bp, Homo sapiens
cttgatttgtctccagtttaggcctttgtcctcatctgtgtaaatgagggaattagactctagtagggatagcaaacatatgacattcttgccagatactatggcagataacactcattagtcacggtcttcattcagcttcagaattcttctcaaatttagggctccagtggccattacatattggttgattggaactgacatgggagacaacaatttgccattcctaggctacatcctttccaagtcccttcctagctacagatctcctctgtgaataaagaaaaatccttggaagctctaaattaccctgctagtcagtgtttctataacatatttcccccacttcttttaattcttccctggaagtgcagcatctcagaaaaacaactatgccagtaaaaatttttcctaaaaatgttatccattgaaatattgaacatttcatccaaagcaaaccattggtcattgtggattggccttaggccagaattgagttggtttagaatgggttggggagtgggggaagccaacaatcctttttatcccttgatgttatttttctttattagcagcatgtaaaatgttaaatttttctaatttttgttgggcccaagccgatgtttattacattcaatttatgggaactctttgcagttgaaatttggtatttgagtcacgtattgctttcatggtcttttacagagctctgtgacccaagtagtcactctgttgcctcccgccccactttaaaaaaaaatctggacaggaaataacaaaatactaggagtagacttgtgtttgaccttataggaaccataattaagggtgaaatagtgggatcctcaccccagcaatgcttgatgatagtaggggtagagtgtcctattcataaatccacaggagagaaagtcatgttggaaacagcaagtcaggaggctaatgttcctaaaaaccctttgagaacagggtgtagagaagagagaaaaagccctaaggggcgggtggttgtgatttattgaaagcttactccgaatcctttgagctacctagagagccctaggattactttgagtttataggactgcaagcttttgcatgcacaactcctatttttgaaaatttgacctttaaaatg

SEQ ID NO: 20124 - DNA, 1103 bp, Homo sapiens
tttttttttttgagacagggccttgctctgtcttccgggctggagtacagtggtgcgatcgcggctcgctgtaccctcaacctcctgggctcagttgatcctcccatctcagccttccaagtagtgggacaccatgcccggctaatttttgtatttttttgtagaagatgggatttcgccccattgtctggtcttgaactcctgagctcaagtgatccgcccacattggcttctcagagtgctgggattacctggctgacagcatttgttttaaagcagtaaatgaaaatttgggtattccttttaagtttttcaaaatttcaatctgcagtttttaatctatacaaaaaactgtggtaaaagacgcctaacataaaaattacaatcttaaccacttgcaagcctacagtttggtagtgttaagtagattcaccttttgaaacagacctccagaactttttcatcttgcaaaactgaaactgtttgcctatcaaacaacagctcttggtttcctcttcctcctaggctttggcagttactattctactttgtttctatgaatttgactgctttaactaactcataaatggactcatacagtatttgtctttttgtgattcgcttgtttcacttagcgtactatcctccaggctcacccacattgtagcatgtgacaggcttcctttccttttcagggctgaataatataacattatatatatggatatgtacattgaatatcccttatctgaaatgcttgggatcagaaatggttcagattggggatttttttagattttggaatatttgcataattcttccaggttgagcatccctaatccagaaatctgaaatgctctaatgagcatttccttgagcatcatgttggtacttaaaaagtttcgaattttggagcatttcagatttcagatttttgtgttagggatcttcaacatcattctatttttttaatctgtcaatgaataaaattacagttttaaccacttgtacacatacggtttggtagtagtgttaagtatattcacctttttttgttgttgtttgagatggagtctagctctgtcgcccaggctggagtgcag

SEQ ID NO: 20125 - DNA, 1077 bp, Homo sapiens
atgaagataaccagaacacagttcccgccctcaagggactgatgagaagtagccacgttttgtaggaacgggcaaatgaagtggcaaaggaaggtggccatgggttgccataggagcgcaggtgagggatgaggaaaggaagcactaaaccaggtcagcttgtgacgtgggataaagaaggcttcttgcaggtaaagccagagctgaatttggaagatggtaggagttcacctgctaacctgggaggtgtgagtggagtgcctgcggctggacccactttgagcaattggaaagcctgtataggaaaccataggtgacatgatgccaagtggacatgacattcagggagatgataggcagaaggtgaggccaaagaagttggctggatgtatgtcagagaacgtggtttttatgcaatcattgatggaaagctcatgacgcattcagtgatgtggacggctttgtgctctctgcagaccactctgagggcaatgtggaggtggaggcagagagattaggtaagaggtttttgtgaaagttcaagtgagataaggaatgaactagggcagtggtagtaagaatgaggagaagggagaaaacctgccaaatacttaaaaaaattagcagccatatgccggttaagtgtatgagtggtgagacagagggaacattgaagataacccacagatttctggcagtggttccgtgatctgaaattaggaatataagaatagacactgagggtggacaggatcaattcccttttggacattttgggtttgatgtgtctgtagaagacacaaatggtgatgtccagttcaccttgggtttgtgagtcaaatttgacagattcagatagagacacactcttggttcttattagatgtatgcagtagttaaaactatgaaagcagatccatcccctatgttggaggggcacaaagaaaaggagcagcccaccaaggagctggagaatgagaatcggggtggaccaagagggagtcgtgtctcaggggctggggaaagtagaaaggttccagaatgagtgagtggtcaggaacttcagatgtagcaaaa

SEQ ID NO: 20126 - DNA, 1067 bp, Homo sapiens
atttggaaggacgtgcaggtgtgaaggaaggacagttcttgctgaaaaagatgggaatggcttgcagatgtctgtggattaagcagatctaaaagctatgagaaaactgcctacttgtgtgtgtgcgcgtatgtgtatagtaaatgtatatatgcatatattttatattgacattctgtagatatgtttgaatacagaaacttgtttttactccgactactgaatccagaagtaccaaataatatacagtaaacagtaaaaccaagatttaaggttgtgtcaaaaaggtacagtgattcagtcatatccatttgtcatttgttttagccttttttttttttttgagatggagtcttgctctgtcaccaggctggagtgcagtggcgcgatctcagctcactgcaacctctgcctcccgggctcaagcaattctcctgcctcagcctcctaagtagctgggacttacaggtgcatgtcaccacgcctggctaatttttgtatttttagtagagacggggtttcaccatattggccagggtggcctcgatctcctgacctcaagtgatcttccagccccagcctcctaaagtgcgggattataggcacgagccactgctcccagccggtttcagcgtttttctttgtttgtttgttttttaagagggagtctcactctgttgcccaggctggagtgcagtggcgcgatctcggctcactgcaagctccgccttctgtgttcacgccattctcctacctcagcctcctgtgtagctgggactacaggcgcccaccatcacgcccggctaatttttttttttttttgtatttttagtagagaaggggtttcaccgtgttagccagtatggtcttgatctcctgacctcgtgatcgcccacctcagcctcccaaagtgctgggattacaggcttgagccactgcacctggcctcagcattttttgagtgtttttctttctgcagttgatcagttggatcctccatatcttgcgtatatacatgggctcaattattatgttaggataatcaaataagaatactagttcaatga

SEQ ID NO: 20127 - DNA, 1051 bp, Homo sapiens
ctgcggttggaagaagacctcagcacaggtgcactttttctcttgtggattagttattaccggatgactttcatccacacacttaacactctctttgcagggacagttttggggaagggtaggcgtctgctttcacagaaggtaattaccgcaaaagctggtaccagctcatgctgttctgatgttttggttacgcaatcatgggcccctgtactagtacatttgtcttcataagctgtgctgaattattttttaaaaccgctaactgatgcgattagtaaaacattttggtttttaacttttgatgaaaatagcactgtttggaactgtgatgcaggggtttactgctgagtgaagttctagaattttgctgaaagtaacatgacctgctctgtgggtctcactctgtctctctgttaagattgttgagtgaatggaagaaaaggaagacttggtgtgtttccagtgatctataaagaaatgatgaagtgaatatgttctgtggatctctgttctctctttgactctattaaccaagtaatatcttaatttaaaatgatgaaatttaggaaattagacattgctattcatcttagaagggaacaaagtatccatgctggtctagtgaagccacatattaaatcctcttaaaacttaaactgtgccttttttccagatttgatctacgtgtggatattctaatgattgaatataataggattccattctttaatttcaaaacttttagaatacggagttagaatttatttatttatttatttatttatttatttatttatttattacctaaaacaagttcagtggaagatgctttttgattattatcacattttgggcttttgtttttggtaacatgcaggccatatatgaatgaaattttgctctttcacagaatgatatgagcatctgtttcttctaattagaatacatctacaggagaagagggattttaattttcatgttgtagcgaatgtctaagggttgaccgggtattttggaggagtagttgtactttgatcatatttgtatt

SEQ ID NO: 20128 - DNA, 1047 bp, Homo sapiens
agagctgggcatccactggggagaaaaatcagagtagggcttcctgggactcttctgggttgttctgactaacattgggttttactcaaattttctctccctgatgtaaacacgcagatattttttaaggttttaagtgtgaccatttagcttacatgcaagtcagaatactttgggttttttcagatccaatagcaggagcatccaggcttttaaagctgtgggatatgatttctgtgtatttgggctaaattaatttgtttattgataacctcagttgttatcatgctaaactgtcagaattggatgtgaagccagtgcttatgtagactttatttatgtctggcttctttctgaaaacaattcctcctcatgccctagtttcatgttgtgattttagcagaattaatctgaaatgactcaaaattatacaattaattgcattcagcttcaattacagtctgctggatgaaccaagcccactgccctctctgggcagtcacttgcatgtggcagctttgtaggtgctaaggccctgtggactccctggtcagtgtgctggcttcctggggaaagcattttggggttgacagtcccaggggcctaatgcctcagttgcagacaaatgcaggctggacctggggctgcaaaaatgccaggtaacagcaaagaccatggaggtgagtgtcatggaatttgggataaatgataaaacattcttttcttttttagtagaaaacccagatttgggtgtttagggttggagaaggcaggatctgggtaggtgtattagtctgttttcatgctactgataaagacatacccgaaactgggcaatttacaaaagaaagaggtttaatggactcacagttccatgtgtctggggaggcctcacaatcatggcggaaggtgaaaggcacatccacatggcagcagacaagagtaagagccaagcgaaacaagtttccctttctaaaaccatcagatctcatgagacttcttcactactacgagaacagtccaccatgattcaattaataactccca

SEQ ID NO: 20129 - DNA, 1046 bp, Homo sapiens
atggtgcaaaatgttctaaattttgtttcccggtttctactttgggaaactgtcttacaatctgattctcctctccctcaacttcagagagtaagagccacagtttgtggccctgtcagtgctggcattttgggactctgttatctatgagtctaatcaataccaaatgttgctgattctagaatgaaatgccttctgattgctgtttataagattctgtctgtagtgaaattaaattgacttctaacagcaagtatctctgtttggaaaataaagctcgtatgttaaatcatgtctattctaattttagtttcctttttctctaccagtttgctgttttgtggtccacaagaggtgccatgaatttgttactttttcttgtccgggtgcggataagggacccgacactgatgtaagtagtcctgaaatcatgatttgatgtcaatgtggatttctgagctttaatttttttaacgcctgtgcaactgttagttttggcacttactgttaatgggaagactcaattctcatagagcgttggcttgtagtaatgagcagatttatagcccatatgagctctggactacatcttagagaatttctcagaggagaatttcttggtagcatgtactgttccactttgggcagctgcattgactaaatccaccaaatttattgtaatagctttcacaaacacaatgcagttgttgacagattttacaatgaacatttatcacccttcagtttatttccgttccctcccctcccctccccacccctcccgtcctcttcgatggagtctcactctgttgcccaggctggagtgcagtggcacgatctcagctcactgcaacctccgccttccaggttcaagcgattttcctgcctcagcctcctgagtagctggcactatagatgtgcaccaccacgcacagctaatttttgtatttttagtagagatggggtttcatcatgttggcaggctgttcttgaactcctgacctcaagcaatccactcgtcttggcctcccaaagtgctgggatta

SEQ ID NO: 20130 - DNA, 1031 bp, Homo sapiens
ttattgtgtgtgaggtattatgggaggcaaaggttaaaaaacacagttcttgtcttcaaacaacttatccttagtgggaagtcatgtatatgaataaatattactattcaaatagtcacttcagcggataacatacataaatgcactaggtatgcattattgttcccattgtacagatgtgcaaattgaggcttgaggtagttaagtgattctcccgagtgcagtagtaagtggagcactaagctttgaactggacctctcaacttccaaacctgttctttttccacagtaccacgtgactgaacagcaaagctaacttaggggcagttttctgtcagtgaaggttccatttttgtgggtggagtctggggtcattgtgactatgagaaatcttaaaatggtaaaagaaatttggaatcatacaatcctgagacattaacagtaaaaaccttcacaaggcagattagcaacgtgaactagtaaagacaggagcatgtagggctgatgggaccgggtgggagctggcagcagtttggagacttggtttaggtccttctgaagagggtacagagtgggacttttcaggacattgggtttctggaaagatccgtttcaagtgtctacaccctaagctgaaagccagcccagagagctttttggctcatgctggggcttattcctggattctgatgagtcatgttttttagaagctgaacttctaaacttctaagccgagtcccattcagttagctggtaccttcctcaccttggctttgttttctgtttttgctgcttaatacatttccagcaggagatttaggaagggtctgtggacagagaagtagatttcccaggatctaagaaaagaaggttggtttactgtgggtattctagctgtcattataactgtgttattttatttatttacaaagggatcatgagccagaaccaatcataacaatcaaatgaacccactcactgtttcagcctctgatggtggctaagagaaaacagcaagtggggagcacccc

SEQ ID NO: 20131 - DNA, 1029 bp, Homo sapiens
ctgcctgcaaaccctggagtggggcttgacgctggggggacggcgtgtgctggttttgctgctttgggggtgaggagaggatgaataatccaaagagggacgtctcccgagagcagggaccatctcataaatagcccagagcagtcagttgggtggcgggctgccgtgcgggggctgcagttagaagcagcactcggagtggagtggggcctcccagcggggccctgctgcactttgtgagtgctctgtggtcgaaggccagctgggcctgaaggcaaaacatctggattttgcagagggttcctaggctgagacggaattcaggctgtaggctctgtgagaccttgtgtgaaacccccggttctgtctctgtcacttgtttgagtctcccatttctctgtctatcaaaagattgaatatggtggcttacaacagaggcagtcgagggtaattattagtatcatggtttgacctcgagatctggcacttcctggacctattccgttgtatatttctctgtgcactccctgagcctcccttttctcagctgagaaaatggtcacacctatggtatcccacactgtggaaaatgaccaaataagacaaggtatgtgcaagtatttggtagaaccctacagaggtaggaagtggctgttactagctgtttccactggtattctctggccatctcagagctgtttagggaccattccagctacaggggagggcaagatttagagtagactctcaaatgagtctatctgattctttggaagcacgagctctagtaagatagtttgaacaaagatgtgaccatgaggggttttgttttattttttaactagattttgatatgttgtgtgccgcttctccactgcacagattgaccaagagttagctgcagattgtggctcagtaagaaggtcttgtggtacgtgctcctgcggcccccacctcaaactcttgcctctggtgttcttgaaagaaatgaggggacctttgcccgagccaagggaaaatgcaagattt

SEQ ID NO: 20132 - DNA, 1049 bp, Homo sapiens
ttgccgctaatcctctatgttcattggcttgtggctgcatctctccagtttccgcctctgtgttcacatggccatcttccctctgtgtgtgcctgccatttccaaatctttctttccttataaaaatagcaatcattggatttaggggctaccctaatccaatattggcctcatgttacttcattacatttgcaaagaccttatttccaaataacgtcacattcacgtagacctggagtaaaggcttcgagatattgttttggggaacacaatacgacccgcagcattagttttacctcttcgtgttttgttttgttttgtttgtggttgatctagggcttgtaatgtaaatctttaatcaatcagtctactttccaacaatattataccacatcacatatggtgtaagaaccttacaacagtttacttgtatttcccctcattttgccaagcataaaatactattgctttaagctactgtagcatctcccatatctgtcccctcctctgtattcctactactactgactaaggtgagctccttgttatttcttgccttttgtcttgagtagtctggagtttcaccagtttaccttagcgatcttgcccttacctatctaccttcctttctcacttaggtatcgtgtttatgtctccagatatgcctgtgtatgttacatctctgtactttgctcacactgaacttgaacaccctcccctccacttatctttcaaacagttatttccctttcaaaaccaagacaagtcttgccttctttgaatcactcaatgcagtcagctgtggtctccctctgtgccctgctatggatgacacacaatctcagtcccaatcccaggtcctgttacgttttactggataatttgtctatcctcttcctcccaaggggataggaaccttgtgagagtcatctcctagcatctaggatgtcaccagactgataatcactgttccatgaatgtacactaaatgaagttatcaatgaatcagtaagttgagtgctggtttcactagtccttactgtttactg

SEQ ID NO: 20133 - DNA, 2014 bp, Homo sapiens
gcactcttgaacacatttcctctatggcccctttcagatctgctgatgatacctggattccttctttcagagtgacccagccccatcccagggaacgggcagatgggctctgttgcccatctcaaagttcccttactttttttcttttgaggttttatcagtccagaagtggaaagaagatggatgccattagctttagaaatattttttatgttttagggagaaagaagcagagaatatacttttagatgagcacactttaaaataccagtaagacagacttgttggaagacaggcattgtgaagaactgttgttgttttttggttttttttttttttttttttttgcaacagctttccccactttgggaaatgagaacttatgccctcctgaatgttgtatttgatgggacttagatccatgggggaattttattttattttttaggaaaaggtaacctactaagtatagttatatccttctagcatgaaatataatcatttattagaccagaactgtttgttaattcagcagtgtgtcttgaaaaagagccaccctcaaatttaaagtagaaatagattcttcattctacacctttttgacatcagatttgctttcctggtctcagtgcaggtgcccctactgtttggtgtttgggacacagcctccgagtaagtccaaggagagcttggggttaggcagtataggccatgagccccttgccagcctcccagggactttgagaggagctgtttggggcaagatgcttaatgaaaggatgttttgtaatttagagagaaaaaagaaatttatcccatagataactaaaccctcaatgggaatattagaaaatacaattgtcacattatgtaatatttgtacattttccactgcaagtaagaatgcgtcctttccttaattttaaaatatggaaaaggtcgacctttctgctaccgtaaggaaaatcaagggaaagggaggttttatacatgatatggggaacttggtataattatttagctcagtatgaaattctgccacaggaatataaggtaattaatttctctaagtatgaaatgcaatcttgaaaaactaggaaacaggtgccgaggtgacaagataggaagagaagctgagtgttgtgcagtggcaccgaacaacttctggaacattccagagcgtggctttgtagctggagagagcctcctggcttctgtgtggcgaccgagactgacccctgctggcagattgttgctaagccgtggctgttaatgaagcagggcaataaggcccttaagcaggagatcctgccaggccacaggcaggtctgtctccgaggctatgccttgtaccagcccttgatgctgttgcctgaattcccagtgggaagaaaaatggacccagcagtttttagtgttttggtctcagtttccaccatctctcccctttcccagtctgggatgtcagtgtttgctctctcctccctaccctctgttacctcaagatttcatggaaataaaaagccctgctaacatcacaaagaggctgaaaattccagatccacctcggagccagacacttgagaaatttgatgccaaggtaacctgcgtttgggaaaacatccttattaggtttatttaagaacgatttgaaaaattcctataagtgaaaatcagatgggaagaagtccaaaaatctgattcatgccatgactgtgatacaaccaagatcttcgtgagccagtggatggggaagagagataatgtacaatatttctatgtgtttcctggaaaaattcttaaacggattataaaaagcactaagtgtaaaggaaaatgttaatacattggactgcattaaataatagaccagcagaggtctggcgtggtgactcatgcctgtaatcccagaactttgggaggctgaggcaggcagatcacttgaggtcagtagttcgagactggcctggccaacacgatgaaaccccatctctagtaaaattataaaattagc

SEQ ID NO: 20134 - DNA, 1033 bp, Homo sapiens
aatttttacaattatgattgcacttctaggatttagtaaacctttaaccaccaagagactggacttgggggtgcgttgcctgtgataggatgccaagttgtttcttggcagaaacatggagattgttaaaccaggatggtaaagagtgactttgtctgtgtcagctactctgaagctatccctgagtcccctggaagacataagcatcccttcctccatgaccccaaggctccttgtgaataataccacattagagcacttgtcacgtcatggtggaattttcatgtgtacatggggtttcatgtacacacgtgtgtatgtaaagggcacagactgcattgttttattccaagcatggggccaatgtattgcagtaacaaggacaaccttttattagatggctactgatcacagtgagaaaggcattagcaccatttcacaactgaggaccaagtagtttagaattccctctggtcactcaactcataagtggacccatgagacctgtgggactccaaagctggtgcttttctcattagaacatgatttccatgttggtgggaatacaccatatgtctcataaaagagttaattatcaaaatcacaatgacattcttcacactcactgggatggccatgatcaaaaaagataatagtaagtgttgatgaggatgtggaaaaattgaaaaccttgtaacttctggaatgtacattggtacagctcctttggaagagtatttggcagtcactcaaaaagttaaagttgccataagacccaacaattcctcttctaggtatataccgaagagaatgaaaacatatgttcttacaaaaattaatacaagaagggtcatagcagcatcattcatagtagccaaatgtccatcagctgatgaatggctaagtaagtgtgatatattcgtgcagttgaacatgattaggcaacaaaaaggaatgaaatacaacacatgctgcaacatagatggacctcagagacatcctgctccgtaaaagaagccagacgcagaaagtc

SEQ ID NO: 20135 - DNA, 1027 bp, Homo sapiens
gatcacctgaggtcaagagtttgaaaccagcctggtcaacatggtaaaaccctgtctctactaaaaatacaaaaattagctgggcatggtggcaggcgcctgtaatcccagctatttgggaggctgaggcaggagaattgcttgaacccaggagatggaggttgcagtgagccaagaccacaccattgcgctccagcctgggcaacaagagcgaaaatctgtctcaaaaaaaaaaaaaaaaaaaagactggaaaaaataacaaatattttaaacacccaagagacattattaacagtttgattgacttatagttccatgtaacctaattttagggctcattctggtagtggaagaaacctgacattggtaatatataaatagagtgcacacacagaatcctgaatccttttaatgcctattaggatgggtgctaagcctgctgggagaatactgagttagtggagataactgatttacattgagaacgttctgatatttgtgattttctcatactatataaattagagattcatatgtgcaattgagaatatttcactgattctgttggaggtttttttttttttgtctttagctaagttgtatggaaactcaagagataagtacctcatttgtggtattgtgaatttttccaggggaagaaaaccttttttctcttacaaacagttgaagaaaattatcttttctgtttttaaattatcataattgggtttctccatcacagatttgtcaaactatagagtatgtataaagtcatgtttattcatttgatattctcaacataagtattctaaacttgattatgttaattcagaagaatagaacattaagcttagaattaggcaaatatatacaagttgcaattgtgtacagggattgcttatatttccaggataaaatcaaatcttatccccaaatctaattagcagctgttcattggtgtatttgacatacagcagccgacttttctcacctcaataaaccactacatcatcaacagatgcagcg

SEQ ID NO: 20136 - DNA, 1044 bp, Homo sapiens
caagcgatttcgtattctgggaaatgttcaaattctgtactacatgcctacattctgcagggttaggctgggaacatagacctttgctgagaatctgaagagaattgctaaggcaactgtgtcccatatcctcaggtataaatcttccctccctccctcccttccttccttccatttgctcatttattcacctacccattgattatcataattctatcaacttttagaatcttgagactttccccaggaaatagatgaggagggggaacccatataagtaaagttgatctcattgggcataattagctcaaatattatatactcttccctcaagaactgagaatgtagggctttatagattttaaaaaatctcatagtcttggcatttttttttctggcaatccaagtcagctggagaagctagggtcgggaaactagttttgcaaactggcagaagtagtggttctttactaagatggctcaattgagtctctctcataaactgttagattatgggcgtcagagctgtttccaaaaggaaacaaattggagtccctctcctcactctctttcgtatcatctaggtaaattgtttaaaattggtctgtgactctggcaggtgtcaaccgctccaagtgactgtaggtttggggttgccctaaagccaaatgcgtagatgatgaaagcattaagaacttctaaacatgagagcaacagctgacgccatctacacggggctgttgggttttttcctctggaaggaagtgacagttggatgcctggcactttcacatggcctattttccccatgggaagttttataaaaatatccattaaggctggtttgtatatgcaacagaagggcataatatgcccctcaaatgaatatcattatctccatccatgaactaaaagcgtttgagggatggcaatgctgtgcaaattccacaaagccacagcttttggcagagctcaactatgtggaaaccgatctcttctctctccccgtctcagtgtctcaaggaaaaacctcattaagcagac

SEQ ID NO: 20137 - DNA, 1022 bp, Homo sapiens
agagcgtgtgtgcaggcaagagcacctgtggcggaataatagtgactctagaaagtgatataggtgttcactgtactgttctttcaacttcactcccaaaaacttgggcaatgatatctatgtctgaagctttgtttcagttgatcgtatttaaatgtactctgtagaggtcattcttggctagaaggaagcccctgctgaagcagccatcagagcgcctcagcagttaagcttccctgcctccaccctcttactctatgaccctcccctgcctctgtccatggccaccaacgcctttccttttgtggatggcagaccaaaggagacaattattctgcctcaacccaacgctgtgtttccttgtggttctgcactgaggctgggcccagaagcctggttcatgaagagcactcacctggcccctggcccctggcccccgttaaacaggtgagtcactgaccatttccttagagccacctgggactggctgcatgggacttgccatgacacagccggccagactgccacaggcaggttctgggaactgtacacttacatggatgggcaggggctgcctgggattgggagccactagtggtctatgtccccaagagcttgtatatgacccccattttccaaatagctcaggcagaaaagaaaatgtgagttaaacagctaaaggagtcatatgtaggtatgtgtacatatgtgtaagaagtaggctggacatggtgactcattcctgtagtcccagctactcaggaagctgaggcaggaggatctcttgagcccaggagtttgagacaagtctgggcaacagggcaagacctcgtctacacaaaaagaaaaaataaccagatgtggtggtgtgcacttgtagtcccagctactcaggaggctgaggcagaaggatcgcttgaacccaggagttcgaggtaacagggatctatgatggcgccactgcatgccagcctaggtgacagagcaaaaccccatctccaaaaaaatagtagttgtgggca

SEQ ID NO: 20138 - DNA, 1073 bp, Homo sapiens
tccctgctccccagagaacgtctttttaacattcagctgcagttacctttaggaagcctctcctcacattttatgccatgcctgaaaccaaccactttctctccatgccctttataacatgtattatgagatttcacctgtgtgtttatttacatgttgatctccttccactatgtcataagtcctttgaggtcagagatagtgtcttatctcctgtacccagcccagtgcctcaaatttgtaccaaatgtgtgtctgttgagccgatgatgatgatgatggaagtacacaatacagcatagaaactgactcaggcttttactgcactcctcaccccaaatccaggtgactctccccattttagccctacatctggatcaagttaaaatgatcctgttttaacccaattcataaagccacatggctctgggatcctttagagaaacatctatcagctaagaaaaaggttgcatcttctcagagacacatgattatttacattccgactgtggtacctcgtcctgactgatctgtggctcatcttaatgtcagatatgtacagacttgcagcatgccatcccacagattgttattcatgcttggttctctgtgcggggactccaacagagcttttcactctgggtgcttagtcactagatgtgcgtgggaggcagcaagattggaacaaggggcaaagagttgccagtgtcatttccttcatgcagcatttgtctttgttgtaaagcaccctggtatccatgctcatggtgacatagtttctctttctcctgcttaagataccccaagtccccagattctttatagggtcatcagtcatctgtcgtctttgacttcagtgactgctgccaggaggaagcactcttaaagataggctttgaatgcttacatccctggaagaggagaagcaaattatttctggggcctctttcaagattaccccattagcatacagagacattgatattgactgagcaggtcattcttgtgcaggattttaattgcttctaattataggattatcatttaagcacaagattaattgctgtgaaatt

SEQ ID NO: 20139 - DNA, 1058 bp, Homo sapiens
gcattcgagcaggaaaaggaataggtttccaaaaatgattaagtgcccaaagttctcgaacaatgctatgtcatggctgttgcagtgcgcactgggccttcctctaagccgggcatcagacgcaagtgtgccatcagctagctccctggtgggagaaaaacattgttgcagatggaaaaacttaaggtcattggtggggaatcctcatgtaagcctggagatttagcaattggggagaacgcggtacaagggcaaaccgcctttccaggaggtgtttagcaggtgagacaaggcgtgcaccaccaagattagcgatcctaacagatgtgtcaattatcaacagacaaatctgggaaacagggaaaaatttggttggctgcaaagaaaatcacacaccgggatactagaggtgaatattatgtggtatgaaaagaaccaagcacttcgcagtttccacatctggcaaagtgccaacacgtcagggtcccacgtttctccttggagaatggctcagttgccatgacaacggaggccctctcgctgcctgtgaatttattttaaccgtggcaacagccaaagtgggtgtgtccatgaaaatatttcttgttaagaaaacgattgaatgtgttgcccttacattttgctctgctgaatacatacttcattcaccaccattgtatggctgcaaaatttccttttcctgtgctgcctggcatagcaagcattgtggaagagcctgaatagtgatttaattctagtgctcttgagattcttaattgtcgctgttgtgatagattaagaagatacagacattgtactgaaatctaactgcaaatgaggatgagtgatttgagaacctgcgtgatacagggcaagggtcatcgaactgcaatccacagcccagaccccagcggctgcctgtcttcaccattaaggctttattggaacaccttccctcctttactcacttttgcagctttcgagctacaatggcagagttggagagttacaacagagacagtatttggcccacaaagccacaaatatttactatctgg

SEQ ID NO: 20140 - DNA, 1136 bp, Homo sapiens
aatttctggacagagggctattgtattagaggtcagaaatttctatttttatggtctgtctgattttccatatagtgtatattcattatataaaattcaaacatagcagagtgtctatggtattaagttaaaccctttgaaattgctgttaaggtgggttagactgtcacactgtcacagcttagcagctgcaaacttttaacctattagaaaatgaacgtctccagccatccagcccctcatagatatacaatgtaagtcatttgtcacaaccaccctcaattttaatttgaaaaaacccctaatagggagctgaatgtggagagcttctcacattacacatggatagcttcagacacagatgtttttacacatgtaccataacccccatgtaggcgaatttgggtttgcaatattcagattcattttgtatgatttgctttacagaatgccactgcaggagctctttgaattgttaatagcttcagtgattgcaaactattgtgacttttcaagaatgtatctgtggtataaagtgagacgtgtcagtcatcagtaaattttcaaatgaggagggaacactgcctggtctcacagcctggtcttccaagtggcatcacaatgccaaacttgaaccaaacgtgaatatgccattttttgaggaacctaaaaatcctggattctgggttgttgaatcatagccaataaactgtgaggtactttagtcccattttgaaaaaaagagcatgctacagcttctgcatttaatgtcacttcattctattcacaacattacatattgtagttcccatttttatttccttttaaaaatttgtgccattttattaagtcagggtcttttcctactgcagtcttaacccagaccccttagagggcttcagcaggctttccggaagtcagggtggatagctagagccaagacccattgcctctcctgccccccttaggagggtgtgggagcccacggggatgtgcctcaacctcacaacaggtcatgagctcctgcaaagcccatttgtagcctcacacatctctgcaggtcacaggtttctggtctgtgagttagcccacagaactctagcccaggcagcatgcagttgctcattgaatcccag

SEQ ID NO: 20141 - DNA, 1031 bp, Homo sapiens
ttgcatctcagtctcccccacaccctatcacagaatgaaaggggctgtgagcaatgtgtttgccacacaaggctccagtgggggcacactgcaatcccagattccacccagagtccgtgtcattcatgttttgtaacatctttaccaatgcctgatttctcttgggtccgttgcattcattgaagtttgaccaaatgggtaggaatatcaaaaacgacaaaggagttcattcctgaatccagagatcagaaagagggaggtagcttattaataacgttccttcgtccctcagagatcgatcacatgccttttacatgctagtgcttgcttcgcagggtgtaccctatgtctgtcctgcctcctcgctgaggaagggcctcatgcccactagttccctggatcctcacaacagcctgggaaggtggatggtcacatcaccatcttaccttcgcagagagatgcactgagtttgccaaagctatatacattggggctcttgatctctggccacatccttctcccctctgtgtccccactttcccttgggtgccgacatcgcctggtctcagggagttcagcagtcacacgctgactggttgggtctgaccaccccagtgccctcttcccctttatctctgtcccatacccatcgtgtggtacgtcacatcccagagggcaaaagcctcagtcggcaaaaggcgcgggtgacctttggaggtggagacagtgcgcacccagcccagttttgctcacaaggtataaatgttacttttagtggccatgtgctgttgggtggcctacagctctgaggccatggacagccacacctgcccgctgtcacagactgctgtagaggctgcccttccaatggaggtggtgatccacctgcctgcctcatccctgaggagtggcgggaggctgcctgcagtcatcttttactcattcacttggcgttcatgcagtcatgctaggtgccccctcagccctttagcctctttgcttcttcttgctccctgctcagctccaagatg

SEQ ID NO: 20142 - DNA, 1049 bp, Homo sapiens
tggacgatgattcatgaatgccataaagacaggactaaaaggaaagggtcagacctgtgcactctttttgcagaacacattgataaatttagagcaggacagacatccagcctagacgtctatctgtgcagccctaaattcatcaacgtgtcctgtgaaatggggagagaacattttactttgctttgctcatccttttagggactcagtccttttattagattttttccagaaattccttcttgctcatctttgcatggttagtgagtatcaagagaagcacagatgatctctcattaaaggagcacacatcccagcctctgggagccctgactgttgattcacttgaattcttccaggcaataagcattgatgaatcaggttccaaaaggatgttcccaatgccgactctactgagctgtcacacttgctccaaatgcttttgccttgtgacttctgccgcttctccattctccgctctcacatacggctgctcctgcctgattccctagtttggcttcatgtctgccctcactctgatcttaggacctactcagcctcacacagtagtcttgttatatccctgagtttctcagcagcaggtactgttgacatcttgagccagtcattctttggggcgggggcagtgtcctgggccttgcaggatgttccacaccatccctggcctctgcccccagatgccaggcttgtcccacccaagtcatgatgaccaaaaatgggttccctgggggaagaatcatccctggttgagaaccactggtataaccagaggagggctatttctttggctgttgtcatctgaatgtggaattccaaggaaagttggtttctgtttgtttaactgatgaattaagtacagactcccgattaatttctaggaagaaacagcatgcccttatttatttttcaaagagcctttctccgtgtttgcaaatggcctgtgcacatagggtgatgtgaattgcagattctgcctctgctgaccttggctttgaggtactttgtgctcttccaaggaaatacaccat

SEQ ID NO: 20143 - DNA, 1056 bp, Homo sapiens
ggcttttcagaaaataggtgtcaagtccactttataagaacctttttttctaaaataagataaaaggtggctttgcattttctgattaaacgactgtgtctttgtcacctctgcttaactttaggagtatccattcctgtgattgtagacttttgttgatattcttcctggaagaatatcattcttttcttgaagggttggtttactagaatattcaaaatcaatcatgaaggcagttactattttgagtctaaaggttttctaaaaattaacctcacatcccttctgttagggtctttcagaatatcttttataaacagaagcatttgaagtcattgcttttgctacatgatttgtgtgtgtgaaggacataccacgtttaaatcattaattgaaaaacatcatataagccccaactttgtttggaggaagagacggaggttgaggtttttccttctgtataagcacctactgacaaaatgtagaggccattcaaccgtcaaacaccatttggttatatcgcagaggagacggatgtgtaaattactgcattgctttttttttcagtttgtataacctctaatctccgtttgcatgatacgctttgttagaaacattaattgtagtttggaagcaagtgtgtatgaataaagataatgatcattcctttgtgtagttggccttatttacatccctttgcggtatggcaattatttttcctccagtgttcaaaaaatagcatttgacttcagacacactccgcagaacactttcatctcttcacctgtttttcaggcatgaccctccatttatagtggcattttttttttttttttttttttttttttacttaaaaaatatatcttgctttgaatcaaagcccagacagtgactgggatggcgttctggcaggtcctgcgttcattcattcatgcactgttcacagagcccctgcttagggccaggagttgtgtcaggccctggagaagaagaggctggcatggcccctgcctgcacggagcttacagtcttctgccccaaactgcaagggatgcc

SEQ ID NO: 20144 - DNA, 1032 bp, Homo sapiens
ccaggtggacgttaccccgcaaacccgaagcctggaggagaggagggaggggatttgcggcttccacttgtcaccccagcgggggagggcggcgctgggtggggcggcggactccgggtgggcttttcgggggcgcccagaatccagactgttggggatcactatgagccaaagggagtgggtgcgccccctccctccaaataagaaaatgaataaaccaaacccaagagcccccggcgcgcgctgtagctggggtttggggggcatcccgtcctggccgtgggcccagcctcccctccccgccctctgcggtcaggtaggggtgcgaggaggagccctgcgccctcgggatctgcacgccccgagccccgcgggaggaacctctgagcccttaggggaggtccctgcggggcccgacttctcgccgtcgccgcgggcttgggcgcagctcccggcacgtccgcccttcgaggctcgggacccggctgtgtcctttcgcaaaccgcctggctcggaaactttctgcgtctcttgtttcttccgccgcggggagcggcgcgcgagccgggagcggcgggggctgcgacgcggccacaggagggcgctccagcacgtggtgccggggccgcggctgccggctgggggcgccgggcgcggggcgggggctcgtcctccaagcgcggctctgctgtccttctcccgatcctgcgaagccgcgagctccagtattcaggaagtggtgactcagataggattattccggccccggcttccctttcttccccttcttcctccccacctttgtggtgattccacgactgctgagcgtctctgtccagggacagcgagggagcccaaagccaagcaaggcaacgtgaaactcactagtgtggtttggtgtggcaacacacatgaaatcagccacccagaccgtctttatatttaaatctggtgcctcgaaactatcagatatgtttttgagccactacttggtgagaggggcgatgtgctttgggagagaaaaagatgcat

SEQ ID NO: 20145 - DNA, 1090 bp, Homo sapiens
ccctcagaaatggtcacagcttattcaagtcctaaacccttgctatgggcaagggttgacaaactttttttttcttttctttcttcttcctgtcttctttcttttcctctctctttctctcactctttctctcccttcccctccctccctccctccttccttccttctctctcattcgctatttcttttctttctttcttttttttttagagacagggtcttgctctgtcacccgggctggagtgcagtggcgcaatcatgcctcattgcaactttgcactcctgggctcaagcgatcttcctgcctccacctcccaagtagctgggaccagaggcacacaccaccacgcttggctaattaaaaaaaaattttttttttaaagagatggggtctcactgtgttgcccaggctggtctcaaactcctagccttacgtgatcctttcacctcagcctcccagagtgctgggattacaggtgcaagccaccatgccaggcagcaaagtttttcttaaaaggccagaaagtaaatatttttgcctttgccgatcataaggtctatgtcacaaccactcaactctgccattgtagctcaaaagcaaccatagacaatagggtcaaggagtgagtgtgactgtgtttcaataaaactttatttaacacataggcctccctcctgcaatcccttttgctgatcacttcatagaccatcatacacttcctgtgctctttggagcttgaaaatcatactttggagtaagaaattcttttgaatataaattacatatgtttggctgtggagaaataggaatgcttttacactgttggtgggaaggtaaattcgttccaccattgtggaagacagtatggggattcctcaagactctagaaccagaaataccatttgacccagcaatcccattactgggtatatgccctaagaaatataaatcattctactataaagacacatgcacatgtatgtttattgtggcacgatttacaagagcaaacacatggaatcaacccaaatgcccatcaacgatagactggataaagaaaatgtggtacatatacaccatggaatacta

SEQ ID NO: 20146 - DNA, 1049 bp, Homo sapiens
ttgaccaggctggtctcaaactcctgaccttaagtgatccatccgcctcagcatcccaaagtgctgggattacagagtgagccaccgcacctggcctcatgtcttgtcttacctacggctttccccctctttctgcgttttctccaccctttaccgctgagtcagcctctgtataccattattcatgatgggaactcagcttgtctgacagttggttttaaggcacaattagaaaatattccttgatagtacaatgagtttgcagtttttaagttgtggttttggccagagatattaataagggtttggacgttgagtggaatactaagaataagaaaggggatgtgcttaaaatacatctcatgtgccttctgtttaattacacggtaatttgtaaaagagactggtttctgtggccttgaatactaatatagactttccctcaccacagcttatcttcgagtcataaacacagaggcatgcatagttcacacatctccatgtattttctgtttccaaggaagatatgatcactctgaagaaccaaaagatgagtcactctgaaaacttttcttcctttgtcttaatgtcatgactgtcttaacaattgactgtgtttatttcagcaacatttatctttagtctcttctctttggctcagtcagatgttttcagtttcacccagcacggaccacagccatattacctcctatatcccagtggataacttctgcaggaaaacttcagctacttgacactcttgggaaacgagctgggtgttcctgataagaaaggtttaccagaatcttgtaaagatggtttctctaataatagctaacatatttataagcgtgctatgttttagaacatgggtgtccaaacttttggcttccttgggccacattggaagaattgtcttggaccacatataaaatacactaacactggccgggtgcggtggctcacgcctgtaatcccagcactttgggaggccaaggcaggtggatcacgaggtcaggagatggagaccatcctggctaacacggtga

SEQ ID NO: 20147 - DNA, 1046 bp, Homo sapiens
tttgtatttttagtagagatggggtttcaccatgttggccagactggtctcgaactgctgacctcaagtgatccacctgcctcggccttccaaaatgctgggattacagacgtgagccaccgctcccagctgggtatctacatttttaaagctttggtgtatcttgcaaagttgtctcctaggaaagttgtatagttagtcattcccagatgatgtatggagcactgttgtttcaatgcccctcttatatttttacttggttactgggtttgtgaacttaaaaaattaaaacattcttattttaaaaacaattcaaatatataaaacatgtacagataataatgaaacgtacacttatgtacccagcagaaagattaaatcggtgttaacattttgctgtatttgcatttgttacttttaaaaaacacattccagattcaaaaacaagtctattattatcatcccattttacaagtgaggaaactggctcaaaaactttaagtaacttgtctaattcttaagaaccagtaagtgggctgtaaagaaccagttgatcctaatgatgcttttaccttaggcttttactgatattaatatagcccttccagtcttcttcccctttttggtcagtttctgtctggtacatgttttctaatgtctctacttttaagttttgtatgttgttgtattttagatgggcctcttgtaaatagcttatagctaaattaagaaaaaaatctcgagtctgggtttttaaaccagctattaataacctgttttttaaccagctatttcagtctgtttgcatttatagcaattgttgatgttttttgaattatttgtcttatttcatgctttctatttcccatactttttctgttttttctccatttcctgtctcctactgaattgagttttaccaggttttctctttttctctctactagctttgttatcctaaaaatattcaatgtgtatacttaaatagcagtcagaaattaccctatcacctcccccacccagtttttttcttatttagtgtttta

SEQ ID NO: 20148 - DNA, 1046 bp, Homo sapiens
ctttccctgaattatttattatttccaaaaaagtaacaggtttgttgaacaagtaattggcaacacagatgtagatcaaggtttgtcagcaggcaacaagtttcactactgtttccccttttgtgcatgttgataaccaggatggcattgtctaggagcgggggtctgcctgataccactgcttagggagtcattgacccatcctgttgctgacttggagagctggaaccttagttggtttccaggttgtctaacgatgaaacatgaatggaaattcatccaaaaatgtaattaatgaatgtaggcttgtaaatatctcgcagacagaatgacttaatacaggtgcccagaaagagggaacatctttgtttgcagggatatgttaagaatagagacctagaagaaaaataatttgacagatatgtaaaggtttatgtataagaatgttctctgcagtgctgtttatgacagaatttttgcaaggagacaactcaacgtccaacaatgaaagactggttagataaattctggtagatccaagcagtgaaatattatatcaccactgtaatgatatatatgtatttttgatctggaaaaatgtcaacatattaaataaaagatgatattaagtgagagagtctataaaccgatatggcttatttctgtaggaaaatacatgtatgtatttttttttgtaggcatagggaaaagtctagaaggaactaccccaaaatattaatagtggttatttaggggtagtaggatccagcatgacttttcttctgtctcacatattttgccatcattttcactgtaagtatgcttatgttatgaatctcagttaatacgactttctttctcatagaatgccatacctcttcttggaacaaagcacacatgggtagaaggctaagctgctgtaacaagagatccaacaacattgtgacttaaagaaataaatctcaggctgggtactgtggctcatgcctgtaatcccagcaatttgggaggctgaggtgggcggagcacctgacatcaggagttcg

SEQ ID NO: 20149 - DNA, 1031 bp, Homo sapiens
ttttgccttgaatcagattcttcaactctggagtttaggttagtagaacccaaaaatatgttgttttatgcacaaagcctcgcaaagtcaagtggtagattttgacctcttctttaacctaccctgaatgtagtcccttaaaacatgatggaatccacatttggtatttccctgctatttcatgagatgcaacaaaatgtttcaagggagacagtaggaaccatttggtgctttggtgatcttttcaggaaaatctggtttcggaagccccataaggcgagaattattgcaaataaggcccagatttgaaaattgctgttttgcaaattgtgcttattctaggaataatgatttctacagctgggaagaactttaaaaattgggtgaaccagttgcctgctttgacagatgaggtactgcaatgcagagaggtcaagctagttgctggggtcacctagctcatttgtgacaaaactaggaaccgtgggtctgactcagtcctctgccctgccgccctgtaccacagtaggcctctctatattatgccgcttggtagtcacccaccttgcttcctaccatcaaaaggaacttctggtagaaactcctttcacagcctcctgatctgcaggagtgatgaatttagcctgggatgaactgggagtggcagagccatctttaaaccccaggtcctttctggatgctttgtttgcagaagagctgcagagatcatgagggacatttcttgattcatattaatcagaaactcatttggggcagaatttgaacttgtagccaattttataaggaagtttcacagctaaaacctctctgtgttgtaaaaggaggtcatactaccctaaaatgtcacaaaacattttacttcttccaaaagtacaagtaatcctggtatccagataaagaagttttaatttgtttttattggtttaccttgcctcagagttctgagtgttggattttcactgtgacaacaaaaataaaatatttcctgcttattgtaaagcggtcaaaga

SEQ ID NO: 20150 - DNA, 1051 bp, Homo sapiens
ccttccttttcaggagtgaataatattccattgtacggatataccatgttttgttcatccatccatccctccgtggatggacatgggttgtttccaccttttgactattgtgaatagtactgccatgaacacagttatacaaatacctgtttgagcctctgctttctgttctttggggtactttcccagaattggaattgatgggtcatacggtaacagactccttttttaaaaaagaaaagtatcttgagaacttgggagagccaccctaggagtacttactgggctggattgtttgctccgtctccttttgcctccaggtacagcccataggcctctgtcctcacagatgtggtatggaagagtggccctgttccagggtgagatcaccagtgtagaccttctcagtttgaccctacatctgatgaacccccaaaagcacagagaggatctcagaatgaactaaagatcatgggctataaatgactccttccttctccttttcttccttggatgacaaagattgtggtcactatacagttatggtggcctcaagtctggtaaatcaatgatgtttcatgttagctgctcacgggattcaccttgtggcttattgatgtccagaccccgcctctgatcccgcctctagagattctgatttcattggtttgagtcctggcctcagcatggggacttttgaaagcttccaggcgagtctaatatgcagccagggttctgtagcacccaagtgaattactgaacccgaaccttttctcaatccctttcatgctgtctgttgtctttttggttatttcttttttctttttcttttttaatttgagatggagtctcgctctgtcccaggctagagtgcagtgataggatcttggctcactgaaacctcttcctgccaggttctagcaatcctcccaccttagcctcccgagtagctggtattacaggtgtgcaccaccacgcccggctaatttttgtatttttagtagagacggggtttcaccatgttggccaggctggtctcgaacctcaagtg

SEQ ID NO: 20151 - DNA, 1013 bp, Homo sapiens
cttcatggctcagcgacaacaaagtaataggtcattggctggcttacgtcgataggaattttactcttaagaagggccagtgtatagctgactctacatataatgtgtaatcagataatccaatagagaggaattgtccaaatagttttagtacctttctgatcatctgactcagtaggctaggagacaatctgtcatctgagccatagttcttgagatttaaaaagtctgtccagtgactgcaatctgattatgaataaactattttaactattcattcttgctgaaactgaagtgtacacaatagcacactgttggcatgctgaggcaaaacattgggttcttttgtgttctaccttcaaaacaatctgtttgcatttgaaatataagtgtttaagctttttaggagttagtgtaataagagaatgtgaatatgttgggaaattttcagatgccattaataattgtaattttgttgttaaattaacaaggactttaggataagcctcttgatgttttttgctttaaattgaaagcatgtctgtcaaattgcaagtctcccttcagtttctatatatcacccaggagagggtctctgagttggtgttgtacctgtaccactcacatgtagctcaagtgtaatttgtagtgtttacattcaagctgggatcttgattggttaaattaatccacataccactgccactgctgaaggaccaggtgttggaatacacagcattacagactataagcaaagcaaacaaaagttgatccttacatatgccatccttctgtgtcattttgtggctgttctgtgtttttcttcctagttatttattattgttaataacttactttttcttacattctgttgtaaataaaatacaaagcaatcttctttgcaagcgtagcttcctctctctctctctcgctcgccctctctctctctctctctctctcctctttagctattctcgagggaatgttagtaattgttcacctgtgggttgatg

SEQ ID NO: 20152 - DNA, 1034 bp, Homo sapiens
ccttcacggtgtaccttttagtcttccttttctttttcatttcgttattacccagactaattcattctctttatcagcatactcaattttttttgtgccttcctaattcttcttgaattggtttttatttttattttgcattgatctttcaaaaacacttcttgctatcaccaccatgctcataactatgtcataaagaaataaaaatggcgaatatactagtcaccatcatactagcctgcaggtatttgaaacattagtaagcctacatttgaggattggattcttggcaacatttcacatcatggaaatccactggacatgaacaccttgaaatgtgggaactaatagtgtacctttggactccgtgacttctgaacaggattctcatcgccaccttgcctccttacccaccaactccccgccagacttcctagtcagtcatgaagaacacgattgctccttgccagtgcaggatagcagaccccagccttcactagaaaactcagactctgtcgtttagcataagtcccttcacagcctagacctgtccaccttttccaaccttttctcccaaattctgagcaagaaccctctgctttattcaggcagtgctctctattgaccacacatttgatatgcccatcctcacctgtgtactttgttctgtgtttctcctgcttattattaacataggagcaaggctcaatgcctataatcccagcactttgggaggcctaggcaggcagatcacctgaggggagctcgagccagcctgaccaacatggagaaaccccgtctctattaaaaatacaaaattagctgggtgtggtggcgcatgcctgtaatcccagctactcagggggctgaggcaggaggatcgcttgaacctgggaggtggaggtcgcagtgagccaagatcacaccattgcactccagcctgggcaacaagagcgaaactccgtctcaaaaaaaaaaaagataggagctcctgccaggcacagtggctcacgcctgtaatcccagcacctggg

SEQ ID NO: 20153 - DNA, 1051 bp, Homo sapiens
atataaaattcttcttgaaagttgcttactttgcctcgtttttaatactgagcacttatacagtgagtgataaggctttattgagtcataccttagaagagaaaaaaatttgcttatgtttttgataactttttttgtagctctggtattatggagaacatttgtttatgctacatggaaaatctctaactgtgattccatacaagtgtgaagtgtcatcattagcaggtgctcttggaaaactcaagcatagtcaagatccaggtagaaacttacttctgtttgttttattaatacaaaccgttttattaacttgtagtttcgtacagattcccacagccttctatttgtaaagctttttcttaattttgaaatttaccgctgtttattgaaacttgtgaacaggccaggcacggtgtctcacccctgtaatcccagcacttaaggaggcagaggcgggaggatagcttgagcccgggagttcaagaccagcctgggcaacatagtaagaccctgtactccacagaaaatggaaaacaaaaaaaaaaaagtttgaaacttgtgaacagtccaaattgcaggttctgtggcaagctgaagagctacactgtgttttgaatgccagtgttctgattttaggggcaatgggagaacccccaaacaaaatcagtaatacctctgccctcccttgtttaccgatggcctcatctgttagcttaacgttgttggacatacagccttttcactatattatgattttcttatctgaggttatcagaattacatggacttcaaagcctctcttaaattgtatgagtggttttttttaaattgttctttgattgtttagttgggcaaaaagtaagtcaaaacattccagaaattgtgcattttgcattttcttaggaactcatgtcgtgtcccattttgtaaactgggagacacctcaaggatgtggacttgggttccagaactcagagcagtcaagaagaattgtaagtttcgtagttgaaattgaaacattagtgcaaatgttgaaaaacagaaaaag

SEQ ID NO: 20154 - DNA, 1050 bp, Homo sapiens
gcagtgagctgagatcgcgccactgcactccagtctgggcaacaagcaaaactctgtcccaaaaaaaaaaagcggggggaataagagaatacagattagtgaaaaaatattcccagagaatcccatggtagtccctctttaaaaataatacttatgctgggtgcggtggctcatgcctgtaatcccaacactttgagaggctgaggcgggtggatcacctgaggtcgggagttcaagaccagcctgaccaacatggagaaaccccgtctctactaaaaatacaaaattagccaggtgtggtggcatatgcctgtaatctcagctacctgggaggctgaggcaggagaatcacttgaacccgggagttggaggttgcggtgagccaagatggcaccattgcactccagcctgggcgacaagagtgatactccgtctcaaaaaaaaaaaaaaacttatttaaaaaacagtaagaaacatttaaaaataatgtatttaccctcctacaaaggcatgtctatagttccttgtctttggacatgtaagaattggaggcaaagaaatgtggacttggagaaatctggggccagcttgctctccgcaggctcaagatcaaccatcccacatagaagcagtaaaaacaataaattgttttggtttggtaatatgttattctaacgaaggattttaaacacttaagttggctattcttcatataaaaaataacttctttttttttttccttttcaagaaggcaaggtctcgctcaaccacactggagtgcagtgggaatcatagtttggggcagacatgaatcctgccctgaagcagtcctccccacttaccctcccaagtagctgggactgctggtacatgccaccacaccacatgaaaatacaatttttttttccttttttgagacggagtctcgctctgtctcccaggctagaatgcagtggcacgatctcggctcactgcaacctccgcctccagggttcaagtgattctcctgcctcagcctcctgagtagctgggactacaggcacaagccac

SEQ ID NO: 20155 - DNA, 1033 bp, Homo sapiens
accccatctctacaaaaattgctaaaaagtagctgggtatgatggtgcatctgtaatcccagcaactctggatgattgcagctactctgggaggttgaggcaggaggatcacttcagcccaggtgtttggaggctccagtgagctatgaattgtgccattgcattcctactccagcctgggtgacatagcaagatcccatctctaaaattttttttaattagaataaattttttaaaagccagaaatgagcctttttatatttcgtagaaattgctccatctctaaacaaaaatgttcagattttatttataaagacttatttttctcataactgtttatttatggactttgtaaagtgaattaacctgaagttaaatttaaaatcttaacttccttttcctattcatcttcagattatggattggatatgtctacttctggatgcaaattttactgttgttgtaatgatgccagaagcaaagaggctactgataaatctttacaagcttgtaaaatctcaggtttgtgattatttgatatatactgattttatttgtacccaagtatcacctgaattacaattattcttaaaatttgtccttaaataacttactcatggaagatttgtttctatgtagacattatggtaaaagttactctgaaactcttttctttagatatctgtttattctgagctcaacaagattgaagtaagttttcgggagctacagaaattaaatcaagaaaagaataatagaggattatattcaattgaagtgctggagctcttctgatattatcaattctccttcatagacattttataaagctcttttatgtgaactcttgcttcatccaggcaagaacggtgttttgtttgcgaccatctcagtgtcaagagaaacgtgtcagtgagtacctggaccatcacttaactgatgctccggggtaggactgcaggtttcacatgaacctgttctaggctgtggacattggtgtggagaggttctgcaattttttaaaaatatgtaa

SEQ ID NO: 20156 - DNA, 1021 bp, Homo sapiens
cctccaccagtggagagcagctgcctcatgtgatgggaagcagcagcagggccaagccagccctggagccttgggccagagcagggcaacaggactgatggtgttgttaacatggcattgtccatcaggctgcggacaaagggactaaaagagctaatttgcatgccgtaacaccccctctggggcttcagggtcatgggcacccctgcctgggtgccaccgtgttcccctcctctggatgccagagtccaccatgggagtcacttgtgacatgcctggtccagctacaagccccacatggagcccattcccctgccagcacttggaacggccagccagaccccacactccctcactcacacaccccgtcctgccaggggctaagcacacagtagtggcagctatgggacctgcactggagtgcaagccaggtgcagcccagcaggctgagtagacagggtgtctcctgcagcaagcccaggcctgagcaaggcctgggcaggggagttgccagctggaaatctccagctggcaaagtgactaagaaaaatcctgcatcaaaggtgggaggatctcttgagcacaggagtttgagaccagcctgggtaaccccgtctctacaaaaaataaaaaattagctggtcccagtggtgcctacctgtagtcccagccacttgggaggctgaggtgggaagatggcatgagcccaggagttccaggctgcagagagtggcatgccaccacactccagcctgtgtgacagagtgagagcctgtctcaaaaaaaataaaagagtttgatttctttgatgttaagtgtcctcaatgaacaggagcctgacccactttgttggttttcttttcttttcttttttttttttttgagacagtctcgctctgtcaccatgccagagtgtagtggcgcaatcttggctcactgcagcctctgcctcccaggttcaagcgattctcctgcctcagcctcccgagtagccaggactacaggtgcatgccaccatgcc

SEQ ID NO: 20157 - DNA, 1042 bp, Homo sapiens
gaggccagaagtttatgaccagcacgggcaacatagggagaccccatctctacaaaaaataaagaaagaaaaactaaggctcggcacactggctcatgcctataatcccagcactttgggaggccagggtggacagatcacctgaggccaggagtttgagaccagcctggccgacatggtaaaaccccatctctactaaaaatacaaaaaattagctgggcgtgatggcgcaaacctgtagtcccagctgcttgagaggatgaggcatgagactcacttgaaccctggaggcggaggttgcagtgagccgagattgcaccactgcactccagcctgggtgacagagtgagactctgtctaaaaaaataaataaataaataaataaaaattaattaattcaataaataaaaagtttccacgtactgatccatgctataacatggatgaatctagaaaacatgacgctgaatgaaagaagccagtttaaaaaggctgtgtgttgtatgactctagttgtatgaaatgttcagaagaggcaaattcatagagacagaaagcaggttaggggttgccaggggctggggctgcagcgggcaggcggtgggtcggggaaggatggggagtgactgctgaaagggtttggggttttccttctggggtgaggaaaaggttctggaactggataatgatgatagttgcacaacattgagtgtactaaatatcactgaattgtacacattaaaatggcaacttttgttttgtgaattttaccatttttttttctaaaaaaggtttaatgacttcttgttgcggtcttaaaatagaagccagggccgggaatggtggcttatgcccataagctgtgctttgggaggcggaggtgggtggattgcttgaggtcaggagttcgagaccagcctgggcaacatggcaaaaccctgtctctacaaaaaattagccaagtgtggtggcatgcgcccgtggtcccagctactagggaggctgaggtgggaggatcacttgtaccctggaggtggaggat

SEQ ID NO: 20158 - DNA, 1019 bp, Homo sapiens
acctgctgatctgaaagatagcgttaattccacactgtatttcatagatgggatgacgtggccagaggtgctgcgggtgtactgtgagagtgataaggagtaccatcacgttcttccttaccaagaggcagaggactacccatatggaccagtagagaacaagatcaaagttctacagtttctagtcgatcagtttcttacaacaaatattgctcgagaggaattgatgtctgaaggggtgatacagtatgatgaccattgtagggtttgtcacaaacttggggatttgctttgctgtgagacatgttcagcagtataccatttggaatgtgtgaagccacctcttgaggaggtgccagaggacgagtggcagtgtgaagtctgtgtagcacacaaggtgcctggtgtgactgactgtgttgctgaaatccaaaaaaataaaccatatattcgacatgaacctattggatatgatagaagtcggaggaaatactggttcttgaaccgaagactcataatgtaagtaaatctggtcttaattttttgtatgcatttaaaattagactagtttccttcgtgattgatgtagcagagctatgctgttgatgtggtataaacctttgtaacttaatagttatacagttaaataatttcttaattgaaggaatatgtgcattaaaatagcttttaagaaggtaaaggaaacatatatgaaagaagcaaaattccattgttttttgatgcctaggctaggaaatagaatgtttctagttgggactgggcacagcagctcacgcctgtaatcccagcactttgggaggccaaggtgggtggatcacctgaggttgagagttcgagaccagcctggccaatatggtgaaaccccacctctactgaaaatacaaaacttagccaggtgtggtggcgcacacctgtaatcccagctactcaggaggctgagacaggagaattgtttgaacctgggaggcaggggctgcagtgagctgagatcacaccac

SEQ ID NO: 20159 - DNA, 1088 bp, Homo sapiens
tataaagttagctgggtatcgtggcacatgtctgtaagtcctaactacttgggaggctgaggcaggagaattgcttgagcctaggagtctgagtacgcagtgaaccacgatggtgccactgcactctagcccgggcgacagagtgagaccctgtctctaaaataaatttattttattctaaaataattctaaatacattcttctcatcatattgttacattgatgatcttaaagttggttgagatgtagctgaaactggcttccacaaagtactctcacgtggttctgaattttgaggttatttttctttgtgtcatgttttttagatatcatttctcagagtaaatcaagtttgagtgagacctgcagggttttcttgtgagcgcctatattgagttttagtgcataagctttgttttaagttttcactgggtagatgaactgtcagataagtggcattatgtctaacatataaagtatttccccccatttttaaacagagaagaagatacagaaaatgaaaatgaaaagaaaatttggtattacagcacaaaggtccaacttgcagaattaattgactgtctagacaaagattattgggaagcagaactctgcaaaattctagaagaaatgcgtgaagaaatccaccgacacatggacataactgaagacctgaccaataaggctcggggcagtaacaaatcctttctggcggcagctaatggtgagaggggcattttctcattttatttttgttaagtctgagctaaaccgttggtatgaaatcactgcaaaatttgaaaatagattaaaattttcaagtacagtcgtgcattgcttaatgatggggatacattctgaaaaatgtgtcatttgacaatgtcatcattgtatgaacatcatagagtacacttacacaaaccatacacctaggttatacggcatagcctgttgctgctaggctgcaaacctgtacgtcatgtgactgtactgaatcccataagcagttgtagcacaatggcaggtatttgtgtatctaactatatctaaacatttaaaaaggtaatacgtataatcttatgtgatca

SEQ ID NO: 20160 - DNA, 1034 bp, Homo sapiens
atctgagggtaaaaaaattacttgattaaaaagaaatatttcattagtgttatttatgaaatctccagttttacttgcaaaatgaaagtgaaatattgcaagcagctacctaatttaatatttctaaagagatcaggataccgtcccctcttataacgtgtgtaacaattgtaatgagttttatgtattagtgaatttgctataatgttatattcatgtctctatttatacttcccattaagttgccatttccctatgaaaaagaactattctttaatattataccagagtatacacttttgtatgtgataaaatgttcatttttatattaattacttaagcattcttaatatattattaaatattcttaaatactctctgaattacctattgcagcaatatccgagaatctacttgctttaaaatggccgttcaatggaagcaggttttttgtgattatttagtagttgactgaatgtggccatttgccctgaagcaattttaaagaatatctttgaagttttgttgtgcattttgctgtagagccaacagaagttggggataaaggtaactctgtgtcagcaaatcttggcgacaacacaacaaatgcaacttcagaagagactagtccctctgaagggaggagccctgtggggtgtctctcagaaacccccgatagcagcaacatggcagagaagaaggtggcatctgagctcccccaggatgtgccaggtacagagggcagcgtatcaatgcctctgtaatggggggaatccttcccttttgtagtaaaagccgaatgtcacctaaaaccttaaactatgtgttcattcatgctgcttgcttacagtgccatccccatttgctaaattgtcacctaacatttggagtttgataaatgtcctcgcagttagtgcttgaaactcatcataattttcatgcttcttaaacttcatttagctgtttttgtttaatagatttatttttatattttatcaccagaccatagtggcagatattttggttttaattac

SEQ ID NO: 20161 - DNA, 1132 bp, Homo sapiens
aaagttgggcaatatttggggaaagattgctactatcacttttaaaagttaaaaagttaatctcttaatacctattcagtttcaactgtctttggcaagaatactttataaagaatgtgctggttaattgatattgtatcccatcaaaaggctcatggtatatggtttttgtaccttcagagatgcctagattgatcaacgagtttaggtggtgagattgcaagattctctgttaacctctcactcattaataatctttccataatcaaggttttttttttttttttttttttttttgagagacagagtctcgctctgtcacccaggctggagtgcagtggtgcgatcttatggcttactgcaacctccgcctcccaggttcaagcgattctcctgccttagcctcccgagtagccaggactatagacgcgcgccaccacatctggctaatttttgtatttatagtagagatggggtttcacatgttggccaggctggtcttgaacttctgaccttgtgatctgcccacctcggcctcccaaagtgctgagactgcaggtgtgagccacccacctggcccagaatcagttatttatttggagactgtaatatggagttttggggattttgggtttttgttttttttttttttttttttttttttgagacagggtcttgctctgtcacccaggctggagtgcagtggcacaatctcagctcactgcaacctccgcctcctgagtagctgggattacaggcgcccacaaccacacccagctaatttttgtatttttagtagagacaggatttcgccatgttggccaggctggtctcgaactcctgacctcaggtgatccgcccacttcagcctcccaaagtggtagaattacaggcgtgagctaccgtgctggccggacttcttgctttttagcagaataaaatgtttgaggcttatgttacacagtacctatcctgacttggaatcatttttttttcctccaagaagtcctggttccttttaatgggaaatgatatttagagaccacagtctagactcagggatactttttgttgttgggctctcactgtccctatgcttttttggtgggtagtgttatgaaagacatatttt

SEQ ID NO: 20162 - DNA, 1004 bp, Homo sapiens
cgccactgcactccagcctgggtgatagagccagacgttgtctaaaaaaaaaaaaaaaaaaagaaaagaaaaaagggctgggcttggtggctcacgcctataatcccagcgctttgggaggcccaggtgggcggatcacagatcaggagttcgagaccagcctggccattatagtgaaaccctgtctctactaaaaatacaaacaaaattagccgggcgtgatgatgggcgcctgtagtctcagctgctcaggaggctgaggcaggagaatcgcttgaacccaggaggcagaggttgcagtgagctgagatcacgccactgcacttcagcctgggcgacagagcgagactccatctaaaataataataataataataatcctttgtgtagttatgcacaacttgatacacagttcatttgtttcagtttaatttttagggattgtatttctataataacttttaattttttgaaaatgtagagcatttacattattataaattgaaaactatgtaacgggagatattcagagaattttgactttcattccttctctctctaggtaaccatgtctttcttttctaagtagccatttttattggtttttggttattcttgaatgttgcttgtttgttttgttttgtttgtgtgtgttttttgagacagagtatcactctgttgcccaggctggagtgcagtggcacggtcttggctcacagcaacctccgcccccctgggttcaagcagttcttctgcctcagcctcccaggtagctgggattacaggcgcctgccgctgtgcccagctaatttttgtatttttagtagagacggggtttcaccatgttggccaggctggtctcgaactcctgagctcatgttccacctgccttggcctcccaaagtactgcgattacaggcgtgaaccaccgcgcccggctcgttttgttttttataaataaaagtaaaatctgtttataaatttgtatttcctcctcttctcac

SEQ ID NO: 20163 - DNA, 1056 bp, Homo sapiens
gcaccactgcactccagcctgggcgacaagagcgaaactccatctcaaaaaaaagaaaaaaaacctccatgatctgagacccaagagaaaattgatagtctgaccaactgctttgctaccacacatccaaagtgacttgctttccagcctggggtggcaagatgctcagtaccctctctccattttgacttattatttaaggagggcaaagaggtgtgttctttctgtttaaaacaaaaatctgtggaatgtgagataattttaattaccataccttaaaaatcggggctggaaatttgtagaaatttctagacctacttttgaattgtattttctttatttccaaaactgtagtagtgtgatattttggagtcaaaatcttaaaatattctaccagattatttagaatttactggttttgatagaaatacatcaaacttgcttaaaaagggaattttattgacatacactattgagaagtccagtgttggtgacagcctcaggtgcattgttggatctagggagccaaatgaggttatcgaggctacttctgattttgccgtttcatatttttctgtttatttcttctttgtgatgggcttattgtttgctgttatcaacggttttctccatgttgtgggaataaaagtggccaacttctgatttacacccttcctgctcattagtacaaaaagcaaagaccccttctccatctctggattttaaaaactggaaaaggatgctgagaggattgagccaaagagccagtcctgggacagtcactgtggccagctagtggtgtgctttgtctggccacgctgggtcctgctgctcgctccaaaggggcaacatacttgatttgcagccctggcagaatcatatgattaaagtgtgggagggcggtggtgagggaagtatctccccaaaggaaagaaggggtatggaacaggtaaaattaacagatgtttacaaaattgtcttaattattttccccaaaatgcatagccagttttcccaatcctagtttttctctatttacttaaaatgccatcttta

SEQ ID NO: 20164 - DNA, 1032 bp, Homo sapiens
cctacacagataattatctaaattccctagtggaaaattcatgacatttatgtttataagctcaaaactatttggtatttaaacagaatttcagtggaaatctttcaaaaacttaaacctttttatacagaaatccatattgaatatataaggcaacactttgttagtttgctttttgagttattattatgtttgttacttgtaagtttgtagcagctcttcctgttttcaaacagatgagtttttaaacagataacccagcatgtttcaattttttgtggaataatagatgactcacagtaaagttacaacatattttcttttaagtaaaaaacttaaggaataatgatacttgctttgccattcaagggcctttttttatctgtttactttgtggatcttacacatacaccagatacgagttttggtgaaataaggtggttataattatttacttattgtcagcaattgctttgtggcctattcatttgacagtaggtgatttcaaatcggagaagtccaacggggagctaagtgaatctcctggagctggaaaaggagcatctggctcaactcgaatcatcaccagattgcggaatccagatagcaaacttagtcagctgaagagccagcaggtggcagccgctgcacatgaagcaaataaattatttaaggagggcaaagaggtgtgttctttctgtttaaaacaaaaatctgtggaatgtgagataattttaattaccacaccttaaaaataggggctggaaatttgtagaaatttgtagacctatttttgaattatattttctctgtttccgaaactgtagtagttaacaagactgaaagtattaggctttataagcatagttgcgtacccaaatttcagtcaaggcataaaaatgctataaatggctgatacactttcttactacatgaacagttttattctacatataattctaaagaattaaagccttctttacacatatgagtaggctattttgggttttatggtttattaaagaactgtag

SEQ ID NO: 20165 - DNA, 1033 bp, Homo sapiens
tttgtattctttggtcttcgttttttggaaggaaaaaactctggaaacaaagtattctttaacagtgacctggtttaataaattatggcatatccatgcaatggaatattttttaattccttaaaaaaatctgtatattttgataaggaaagatcttctagtgtaattatccattgattaaaaactgtggttgtgtgtgcactaaaaagtacatatgtgtgaatatgtaatggactatgtaaagagatacataaatgttggtatataccatatatacatgaaatgttttagaaataaatcataattatttcttatggaaaggatatagtatttcttgtttttgcctttttgtactctttatcttttcttgttaaggaattgtacaactacaactaagttttgtcagttggggttgtctggtttgtaggattataacagtctgctttgttttcctaatttttcagtattgcatttttatcttttctgtttatttttccaagttaacattgtctttctatgcatgaattcttaggttacaccggatgacatcaattgaaagagaagaaaaggagaaagtcaaaaaaaaagagaagaaacaggaagaagaagaaacgatgcagcaagcgacatgggtaaaatacacatttccagttaagcatcaggtaatttttacaacaaccctttaaaatagtgttagccatttctgagacttttattctgaaactttgaatacttactaattttatttttgacatagtctttgtattttatttatttatttatttattttgagacagagtctcgctctgttgcccagattggagtgcagtggcacaatcttggctcactacagcctccgcctcctgggttcaaacgattctcctgcctcagcctcccaagtagctgggattataggcgtgcaccaccacgcctggctaatttttgtatttttagtagagatggggtttcaccatgttagccaggtgagtcttggaactcctgacctcaggtgatcctcctgacttggcctccc

SEQ ID NO: 20166 - DNA, 1063 bp, Homo sapiens
gggcgtggtggctcatgcctgtaatctcagcactttgggaggctgaggtgggcggatcacctgaagtcaggagttcaagaccagcctggccaacattgcgaaaccctgtctctactgaaaattcaaaaataagccaggcatggtggcacatgcctataatcccagctacttgggaggctgaagcatgagaattgcttgaacccaggaggcggaggttgcagtgaactgagatcatgccactgcactccagcctgggcaacagagtgagactccatctcaaaaaaaaaaatatatatatataaattcctcctttcagagtaaaaattacatttatataaatgtctttgtttcacagatgtgaaggagctcttagattctgacagtgataaaccctgcaaggaagaaccaatggaagtagacgatgacatgaaaacagagtcacatgtaaattgtcaggagagttctcaagtagatgtggtcaatgttagtgagggttttcatctaaggactagttacaaaaagaaaacaaaatcatccaaactagatggacttcttgaaaggagaattaaacagtttacactggaagaaaaacagcgactcgaaaaaatcaagttggagggtggaattaagggtataggaaagacttctacaaattcttcaaaaaatctctctgaatcaccagtaataacgaaagcaaaagaagggtgtcagagtgactcgatgagacaagaacagagcccaaatgcaaataatgatcaacctgaggacttgattcagggatgttcagaaagtgattcctcagttcttagaatgagtgatcctagtcataccacaaacaaactttatccaaaagatcgagtgttagatgatgtctccattcggagcccagaaacaaaatgtccgaaacaaaattccattgaaaatgacatagaagaaaaagtctctgaccttgccagtagaggccaggaacccagtaagagtaaaacaaaaggaaatgattttttcatcgatgactctaaactagccagtgcagatgatattggtactttgatctgtaagaaca

SEQ ID NO: 20167 - DNA, 1027 bp, Homo sapiens
ctttttcatgtccttgtctttatcttttcacccctgtaattgagaaggatggaacataaacactgaaaacatgagagttctgggaacatctttagaaatcagaatcagtcatagttgcagttagattttgctaggaccctcaaattatttcagcgagttactgagccgttttcatttccccttaggcttcgtttttgtgtgtcttttaatatttttccaatttctttaaaaatcacacttttttggtttcctttatattaattacaatcagctagaaaaaaaagtaagtactctctataaaggaattcatttattaatacaaccagtcatagtttgtttgaccaagttttttataactcatcttttgatttgaaataaaatatcatcactccattacacattcaatagagacagctgaaaagtacaatttctctgcagggcctgcaatgaaggatttgcagaatcctgcagggaatcaaggaactcttcattacaattcatggatttataggattactctgcacttttctgctttcttcattgagagcggtcccaaaatgtatccttgactgtcctgcaggtaacttctttcccactggaaaagttactatgtacaaatactttaattaaagtgacctggcagttgtggaggccgacctttctgctctttgtattctaaaatggagggtaggctcaactgggaagcactcttctctgaactctccaggagagttaggcactggtcccaatcaagtgttgctcggggccctgttctgcacagctgaatttctggagctgaatttcatgtcttagtatgcactatggtacagtttatattacttgatttcacattttttaatgggaggaaataccttccattaaacattcattttaaactgatacagccttcaaatgtatgctaacgtcttaatttgccaaaacatatttgagagaagcataatcctttctgtctaatggaggcatgggtaaatatgtaaattgatcatgactttagaatgcatttttt

SEQ ID NO: 20168 - DNA, 1859 bp, Homo sapiens
agacagaaaatcaaggagatagcaaagaaacatataaaacaaaattacaaatgcagtgccagatgttcatttattactcttaatgagaatacattaaaactaccattttaaaagttgaagactggccaggctaggtgactctcccctgtaatcccactttggaaggccaagacaggagtatcacttgagcccaggagttcaagaccagcctggccaacatggcaaaatgccatctctactaaaaatattaaaaaattagctgggcgtggtgcctcatgcacctgtaatcccagctacttgggaggccgaggtggaagaatcgcttgaaaccaggaggcagaggttgcagtgagccaagatcatgccactgcactccagcttgggcaacagagtgagaccctgtctcaaaaaagaaaaaaaagttgaaaatgttaaagatttttttttaaaccctatacatttatgagaaatttagctaaaatcaaattactacaaaagctacaaaagataaaaaaactagagatggacacaggcacatgaaataaaggccataaaaagaaagaaaagacaaggatggccctactgatactgggcagaataaaattcaatgtttaataaaaaggaaaaatttatgaaaaagagtcattttttattggcttaaaggtaaaaaagatcagccaggcgcagttgctcatgcctgtaatcccagcactttgggaagccaaggcaggccagatcacctgaggtcaggagtttgagaccatcctggccaacatggggaaaccctatctctactaaaaatacaaaaattagctgggtgtggaggtgggcgcctgtaatcccagctactctactcgggaggctgaggcaggagagtcgcttgaacccaggaggcggaggttgcagtgagccgagattgtgccactgtactccagcctgggcaaaaagagtgagactccgtctgaaggaaaaaaaaaaaaaggtaaagatcatggccaggcacagtagctaaagcctgtaatcccaaaactttgggaggctgaggcaagaggatcacttgaagccaggagttggagaccagtctgggcaacatagggagaccccatctctacaaaaaataaaaatttagccaggcatcctggagcacgcctgtagtcccagctacttggtaggctgagatgggaggattgcttgagcccagacattggaggctgcagtgaagtatgctcatgctactgcactccagcctgggagacggagcacgacctgtttaaaaaaaaagaaaaaaagaaaaaaaagattgcagttaaggtataatcttgaatctttatgaattaagtaacatgtcatattaaagtgtaaaaagcaaaactatttgaaatcaaggagaaattaataggagcatagtaagccacaattaaactatgtatcaacttttgtgccttctgaaatacacattcatttaaaatatttgtaggcttaacccaggcgcagtggctcatgcctgtaatcccagcactccaggaggccgagatgggcagatcacctgaagtcaggagtttgagaccagcctggccaacatggtgaaaccccatctctactaaaaatataaaaattagccaggcctggtggtgggcaccttgggaggctgaggcaagagaattgctcgaactcaggaggtggaggttgccgtgagctgagaccctgccattgcactccaacgtgggcaacaagagtgaaactccatctcagaaaaaagaaaaaaaaaataataattcataggctttttggtggaaaagtagttcttgagtcatagataaaaccttgataaattccaaaaaataaaatgtgtataggcc

SEQ ID NO: 20169 - DNA, 1033 bp, Homo sapiens
acattttatttttaaggagacttcctctcacccccatggattgagaagcagtatgattagattatagttgttcttggccgggcatggtggctcatgcctgtaatcccagcactttgggaggccaaggtgggcggatcacaaggtcaggagatcagaccatcctggctaacacggtgaaaccccgtctctactaaaaatacaaaaaattagctgggcgtggtggcgggcgcctgtagtcctagctactccggaggttgaggcaggagaatggcatgaacccgggaggcagagcttgcagtgagccgagatggcgccactgcactccaacctgggcgagagtgtgagactccatcgcaaaaaaaaaaaaaaaaaaaaaagattatagttattcttttccttatgaaaaacaaaaaggggactgggcgtggtggctaacacctgtaatcccagcacttggggaggctgaggcgggtggatcacaaggtcaggagttcgagaccagactggccaaaaggatgaaaccccatctctctactaaaaatacaaaaaattagccaggtgcggtggggcgcaccagtaatcccaactactagggaggctgaggtaggagaatagcttgaacccgggaggcggaggttgcagtgagccaagatcgagccacggcactctagcccaggtgacagtgtgagactctgtctcagaaaaaaaagaaaaacgggatcgagatggtttgcaggattagcaagtgatagagatatattgaagacatagaaagccagtgtggttgctcacacctataatcccagcactgtgggaggccaaggcaggaggatcacttgagtcaatgagttagagaccaacctgggcagcaaagtgagaccccatctctacaaaaaaattttttaaaaatcagccaggtacggtggtgcacacctgtaatcccagctactaaggaggctgaggcaggagaatctcttgaacccgggaggcagaggttgcagtgagccaagatcgagccacggcactctagccc

SEQ ID NO: 20170 - DNA, 1023 bp, Homo sapiens
cttgagcccaggagtttgagaccagcctgggcaacatggggaaaccccatccctacagaaaatacaaaaaattagccgggcatggtggcatgtgcctgtagtcccagctacccaggaggctgaggtaggaggatcacctgagccctggaggttgaggctgcagtgagctgtgattgcgccactgcactccagactgtgctacagagtgagaccttgtttcaaaacaaaacaaaacaaaacaaaattacaatgtaaagagttgtataagggcaacttgctgttgcctttttagggaatttctattgttttccagatttaaggcagaatgaaacataactagccagttattgaaaattgatttatttatggattttcagaatttcctttgccatattttcccattttatgatctccagcattgtttgcacattgttttcattactgcactttgttataattcatcatttataccatccatattctttcttttcttacagattgtgatatctttagtctgaatttttaactggaatcagaactggatgttggggtcactctttgttttattgtacctcgtgattacctaattcaaaattgccccccaaaaagtcagattagttaatataattttttaatgttaaagatgtatcgtggtaaaaaatttactctagcagccatgttgaacaatgtatttaaaaattgtaaactcttggaatactgtatttatctgctatttcaatataaagtcctttgacttagtcctggtaactgtacagtaatttggtttactaatgaaagttgtgaataaaactgtgaaactagaagggagactttctggactttaatagaaaaatgtgattttaagattgctttttcttttgttttagcgtaatttttccctttatattcccctcatcaatgtaaataaacacacacacacacacacacacacacacacacacacacctttcaccacaatggtaatgcttctgtaaatgcctctatttgtccagttggctgaaa

SEQ ID NO: 20171 - DNA, 1134 bp, Homo sapiens
cgaggagctgggattacaggcatccgccaccatgcccagctaatttttctatttttagtagagatgtggtttcaccatgttgtccaggctggtctcgaactcctgaccttgagatccacccacctcggtctcccaaagtgctgggattacaggagtgagccaccgcgcctggcctagcctttagacatttaaaaattcaactttgatttgactggcctgagttatgcccgagttagttttttatcttaaagaaaactaactcaggaagtcttcattagctatgtactctatcaccaatagttcatgtaataatgctgctgactcccaaaaagcgattctagtaaaatttataagtttggacaaaactcatttttgaaaaatacttgaaaaatccctcagtagtgctttaccatggaacactcagaacctctcaaccctttattacctgtatgccccataattggaacaaataatagtatcagatattgtaatgttgggctattgcttcttggctcctgtgattccctagcgtcccatcctggatgtcctttaggtgcacagtgctactactgtgtgccatggacagtgtcaggacacattctgagcttcctgagtgcatcactgtgaggccaaataggctgttctctctccagtgaagattcctttctgtctttaggcagtcatcttcatctatgcattagtggtgtctctgttcaccatgcttcatataaactaaagtacagcctgatcttccgaaaaaatactcttttgtggactcaagtataaaatcaatatttaatttagctagtgattaaaccatttttttgttgttgttgtttgttttttgagatggagtttcgcttctgttgcccaggctggcatgcagtggtgtgatctcggctcactgcaacctccacctcccgggttcaagcgattctcctgtctcagcctcccaagtagctgggactacaggcacccaccaccacgcccggctaattttgtatttttagtagatacgggggtttctccatgttggtcaggctggtctcgaactcccaccctcaggtgatccgctggcctcggcctcccaaagtgctgggattaccagcatgagccaccacacccggccaatta

SEQ ID NO: 20172 - DNA, 1060 bp, Homo sapiens
agattcaagaacaagggaaaagacagtacagtgagtaccttctgttgctttcctgtggtggtatttaaatgggaagacatttggaaaggggtgaaaactgaggtatttaaaaaaaaaatgccctcacttagcaacaaaaactggtgtgataggtgaaacggcatgttatcttttctcaaggaaatgaggcgtcgcagaatagaggtcaatgtggagctgaggaaagctaagaaggatgaccagatgctgaagaggagaaatgtaagctcatttcctgatgatgctacttctccgctgcaggaaaaccgcaacaaccaggtaaaaaatgtattttagtttatgagttacgtgaaatccagaaaatcagtagggacttttcttagaaattcaagtaaacttaacatttctagtcttaacggttttaactatctgtgaacatctttttctctgtttgcaattagtaattgtcttctttcctgccttctgtaatccactgaagctgatttaggatcttcctttagctctgaccttccttcagacttccctgcatttctagctactagctgggtaccttggcctgaccagtgtgtccagagccagccagtttctggtttatttcttcttttttttttttttcccccgagatggagtcttgctctgttgctcaggctggagtgcagcagcacaatcggctcactgcaacctctgcctcatgggttcaagcaattctcctgccacagcctcctgagtagctgggattatgggtgcgcatcaccacgcttggctagtttttgtatttttttgtttttgtttctttgagacagagttttgctctgtcgcccaggctagcgtgcagtggtgcgatctccgctcactgcaagctccatctcccgggttcacgccattctcctgcctcagcctcctaagtagctgggactacaggcgcccgcaccctgtctggctaattttttgtatttttagtagagacggtgtttcaacatgttagccaggatggtctcgatctcctgacctcgtgatccacccgcctcagcctcccaaa

SEQ ID NO: 20173 - DNA, 1050 bp, Homo sapiens
tactgatggtccaaatgaacgaattggcatggtggtgaaaacaggagttgtgccccaacttgtgaagcttctaggagcttctgaattgccaattgtggtaagttatttacttgtagattaggacataagtataagaagcatgatcagggctgggcgtggtagtggtggctcacacctgtgtaatcccagcactttgggagaccaaggcaggtggatcacctgaggtcaggagttcgagaccagcctggccaacattgtgaaagcccatctctactaaaaatacaaagaaattatctggacatggtggcacgtgtctgtaatctcaactactcgggaggctaaggcaggagaattgcttgaatctgggaggcagaggctgcagtgacccgaaatcgtgccattatactccagtctctcaaaaaaaaaaaaaaaagcataatcagttgatagtaatattgaaatattgcctatttcaggccatgatgggcctcttgttaaaacttttagggtatagaatttctaaagtgctggggaaaaaataaccagcatcaacatattttttttttttcagactcctgccctaagagccatagggaatattgtcactggtacagatgaacagactcaggttgtgattgatgcaggagcactcgccgtctttcccagcctgctcaccaaccccaaaactaacattcagaaggaagctacgtggacaatgtcaaacatcacagccggccgccaggaccagatacagcaagttgtgaatcatggattagtcccattccttgtcagtgttctctctaaggtaacgaagtcttaggatttaatcaagtcatttttagtatttatagaaagctgtgcttgataagcttcttcacgtgcaagaatcttgggttctactaggagtcctttgctgaacaatacccagtaaccccttttacttaaggttggatagaaccttggtactttcagtcattgtttttgtgaaaaagtactcttggaatcttatttgtgcaactgttctgaaataaaaccatttccttatgttta

SEQ ID NO: 20174 - DNA, 1136 bp, Homo sapiens
gatagagaagtaggccaaactcatcaccatgctctgggcctaatacagtcttttcctattgaaaagtgacggttggggaagaaaaaaatctcggcctgtttgtgttactgtagtagctagcatttatgaattggcaaagtttcagagaccctccctcctctatgtcaaatactataatatcatacaggattaaaggtgtaatatgcagatcaagacctagagattaaatacagacttcaggtaggctgctgcttggaatacttatatcatttttatacttattttttaatatatttccaggaagaggaagatcaaaacgttgtaccagaaactacctctgaaggctacactttccaagttcaggatggggctcctgggacctttaacttttagatcatgtagctgagacataaatttgttgtgtactacgtttggtattttgtcttattgtttctctactaagaactctttcttaaatgtggtttgttactgtagcactttttacactgaaactatacttgaacagttccaactgtacatacatactgtatgaagcttgtcctctgactaggtttctaatttctatgtggaatttcctatcttgcagcatcctgtaaataaacattcaagtccacccttttcttgacttcaccatgcctatgtgttgctttctaatttggggcctttaatgttgctagtgaaaggtaacctgtccaaactgatgggattaaccagaggtagtcctggctgcagtttttgcagaagaatgaataacattttctggaaaccctcagccagtgtctccttaagtctccttggccagggagatgggctaaacaccgtaaatttaatcataaatctctgctggagctacaaatggaattctttcctcccaaacttcaaggccgaatggggttccaaggtaaatcacggctgcacatgggcctcatctgggaaagtacccagttctgtttcgttgatgaggggcatgagggtccaccatgtgtcttttttaaaaatgtaattcccaagggctcctgtacagtgtaggttgatagccactactctttgagatggtgtctcgctctgtcacccaggcgaaaccctgtctctagtaaaaatacaaaaaattagct

SEQ ID NO: 20175 - DNA, 1086 bp, Homo sapiens
tgcccgcgtgaaaaacctttactccccgccgccggccaccgctgccagggtcacacaccttaaactcacgtctctctgaggaggggagacaggttgacttccggtgtgcctgtctgatccgacggcttgggctcattgtacactgtgttttggaagtgtctgattgtagggtggcatgtttgggggttgttccttataggccgcagaacttgtgtctcacttctagctccagacctgctttaaaaacacacttttttttttggtgggggggcggagagggtacaattctaagtatgtcctcatacaaattttcgaacaaactttctgttactctccccaccctcccccttcctttttcgaaatggaaaagagtgtccagaggggttgctagatagaagactacacttacaaagtgtttatgattccaggtgcatgaaatctttaacattacaggtacgttttgcttacagtgccatttttggtattcttacagggacatgccacccccgttttaggagaacttgtatttggtttgagaaggaattggaatcacggcgttatcctaccttcaccatttacccctgataaattgtccacgtttatatttgggtgagtggtgagaaagataattttccgtagaggatttgtgtgtgcgtgcacatgtactaataaactgtaattatatttgcccacactagactttgagatttatttggactaattttgcagttgaatgcttgtgtgtcacatcccagtccactggctaaacttgctggatgaaaacttgcagtgaatttggtatttgagaatttagcttgaatgtgtatgttggctgcaatttagataatgtattaccttcatgacagttttcctttccctagggaaaattgccaggaatcattaactgagtggttcttaatggaaaacctggattggaggatacttatattcccccccaccccccattcagtgtccttatattgggaggagtcagtggaaacctttgtaggggatctttgttgctttggagtttatctgttgctgttactatctggagtcagtgattgtggaaagaacatgtgatcc

SEQ ID NO: 20176 - DNA, 1030 bp, Homo sapiens
gcccaggctggagtgcaatggtgcgatcttggctcactgcaacctccgcctcctgggttcaagcaattctcctgcctcagcctcccaggtagctgggattataggcctgcaccaccacacctagctaattttgtatttttagtagagacggggtttcgccatgttggtcaggctggtcttgaactcccaactgttacgtatgtccatgtgaggagagtccaccaacaggctttgtgtgagcaacaaggttgtttatttcacttgggtgcaagtggactgagtccacaaagagagtcagcaaagggagatggggtggagcagctttataggatttgggtaggtggtggaaaattacagttaaaggtagttatctcttgcagacagggcaggggtcacaaggtgcaggatggggagatcatgagactcattgtccaggggaggaatgtcacaaggccagttgattagttggggtggggcaggaacaaatcaccatggtggaatgtcatcagtgaaggcaggaactggctgtttcatttttttggtggttcttcagttgctccaggccacctggacgaatacctgcagatcacaggggttaacgatggcttagcttgggctcagcggcctgacattgaggatccttctttatctttttctgatgcccttctatgagaatgaatatgttttggaagaaaatgcaattaagattatccatcacaacaaccactatctccaaatctgtattcattgcttctattcattattcattataagtctcatctacctgatgaaataacttttttgaagataggaattgtatgctgtttaacagtgctttgattcttccacagttcagtcatccttgatatcttgcaggggattggttctaggataccgctgccacgccataccagaatctgtggatgctcagtcccttacatataatggtgcagtatttgcgtataaccaacacacatccccccatatactttattgacttagagacaagatcaccctctgttgctcagcc

SEQ ID NO: 20177 - DNA, 1048 bp, Homo sapiens
ttttcagtttgtgggttctgaatccacacaaagacaggattgctttctgaaaacctgaattaattattgtccttacctcaataagacaaaaaattagaatcaaaatcgttagtattacagtcacagatatcaccaagattagtttgttgttatagccatatcctggaacttctttcgtgagctaaaaaaaaaaaaaaagaaaaaaggaaagaacaattaaaaaaagagtgaaagctaacttttcaaaaccccagtattctagttgagtagcttacaggttcttttttttttttttttgagacagggtctcactctgtcacccaggctggagtacagtggtgtgatcacagttcactgcagactcgacctccctgggctcaggtgatcctcccacctcagcctctagagtagctggaattataggcacaagtcaccacacccaactaatttttgtattttttgtgaagatagggtttcactatattggtcaagctggtctcaaactcctctgacttcaagtgatctacccacctcggcctcccaaagtgctgggtttacaggcgtgagctaccatgcccagcctacagttcatcctgtgcactaatctgtttcactctctaaatgaacaaagtgggagatcactgtcatggccaaagttacatggccaagacaaactatggcctgggagtcccaggttctcctgtgtgggcactttcctggcatatgctaaatgatgggaaagtctgggtctcatgtttctgtgtggtcctcacctcactcgacttctgctctttctgttcactctgggcttctgtgctttcattaatatagttcttagttttccactggtctgtatcccattctgccttggacgcctttacttcctgctgctcactgagaagcctcatcaggaggcctgtcctggagatgagcttggcacaggtcacttgcacataggtctcggagcagtccgtcttcaaggtccagataacatgagaaatgaagcttctcacatcgttgttggggatgacggactgtagttgatggg

SEQ ID NO: 20178 - DNA, 1102 bp, Homo sapiens
cacacgggagtgagttttatgaaagtggtatttttttctggaatgtactactcgtttagcagccttcatattttttaactctagcctttgcattttctaaaattaaaatggtgtaggctaagtctttcaatctgtctatgacctgaggtagggcttttgcagttgtggaaggcagaaggcatgcccatggagaagggtttcagcaaagaggagactgttggcttctgctcttgggtgaatgaaggcttggtgtagacggcgtttcccgctacgttctcgggcccctgcactatgtgaggctattccagctcccttggggctggactcccgagccttttttctttggcagcattctccccaaatgcctgggcaccctgttccctcctgatactctgctttcccaccgctttgaagggccttttctggatgctccttgggcccatgaggactctgttcactctctgcaggtttttgcctacactttgaacctttgccaggctgttttcctgtggttggacagtttctaatttcttttcaaatatttggcatttaaatttgttacctagaaggctggactgcataagcatggcagttttttcttcccttttaacttcatcgatttttttcttgtatttctgcatctaacatcttttctagcaaatacacctttctcaatttattttcataagttgaattgttggatgcaggttgaaacaaggggctctttgtattgtttttcaaaacaggagcttatctccatcttgcacatttgaaaaaagcagtttaatgaatggtaacaacattgattccgcatctagatttcctgctgagaaataaggcaagatgtaatttagcgcagtgataacatcactcttatcataagtgtctagctgctcactcccaaagactgacaagttgatgccactgctgtctgaggctgcctccggctcagtagtcagctcaatgctcatgtgcttcttctgggcttgtaacaccttcatgaacactctttctggattccctacagatgcttcttcacctgtcaaaaaaaagagactgctttgatcatgaaagataatggaacggcatgcatcagtccaca

SEQ ID NO: 20179 - DNA, 1049 bp, Homo sapiens
agcttaaaattttatcatcaattaaaaataaatttaaaaacaaatacttaaaataatgtaacaatttatcaccaggcaatttggactcacgacaatgtgtggtgtttgtcagacatgcactgttgcaatgcagcttgactgtcttgcagacagcctcaatgctatttttaaattggcagaggcagcaggccatatggctaggtaagatcctataagatgaaaacacaaaacaataaatagtggtaaagcagttacttgagtaggcaaaggaggcaggccaacgctaccacagggctgggcagaaaggtgttactgaggcctgtggactggacagttgggtaggaaccagaagggcaatgggaaggaggacaaaggtgcccaactgaagggtaagcatggcagtgagtatggtatgcctagaataaaagtggttgggattagaattgggtgacactgatcagtagtttaattcagaagtatctcttcccaactcaaaagtctcactttgggctgaaagtacacaggaagaaagtagacttctaagaagagtctgaataagcccccaacttctggagtccctttctcaatttctgttggcagtgggaaatattagaaattactctgggcattaaaaatagctcagtttaacctggattgtggggttaaaaaaataacagattgcattggccaaatctcgacaatttgagcattcaaaagagtaacaataagctacaacataattaatatataaaaaagaatccatgaagaatgatatttaaaaagagagggagttgttctttaatgaaataatgccagctaatgaatgtagaaggaatgacagaattttaaaaagtgttactttgcaaccaccaatgtaataaaaattgattcagacaaggattgtcattgatggacacagctgggtgagaagacatttgagaacaggatctttactgatctcaaagtaccaccacacagatattttattaattaccaaagggaaaaattattttttatttttttatgagacaaagtctcactctgtcacc

SEQ ID NO: 20180 - DNA, 1099 bp, Homo sapiens
tcattaccattaaaaatgatctaacaagctttattttttatcattgttaaaaatcctcgttttgagtaacacaaccacaaagtaaagaatgttatcattgatttaaccagtaaaagacaatacttaacaataaaattttaaaaacatacgccagccggcttacctggtgaaaaaaatgattgcggctgcaagctgcatttgccagacaatggttttagatttgctgtgcacgctgaacgccatgaaaaatggactgcctggcctcttcataaggaaatcaattacttgcctctttctgagtgaaaagaatgaaaggatttaaaaaatcataataaccaaaatggggagaataaaacaaactgggcagagggatgggctactttgcgtcttcagcttctgaagtcttcaaagccctcttccagttcttagaattaggtcacatgaaaaaatctggtaggatgaaatgagtgtcagagcagggaatggaaaggagagtagaaactttatcaatgtgctgtcgagaggtctgaatccacactgattcttgattctttgtggctggaagcttacggaatcttcgctgtctatggtgttctgcagttttacagtgatacgcccttgtgtgggccactttcatccacgaggtatttttggtgggcgttttcaatctggcaattgtgtttgattctgagaacttctcctgacaacttcctcttttccctcttgtatttatcttgagctatgattttattgaacgttggacttcctattttggtcttctgacattcttatcatttctctccagttttcctctttgtctctttttctttttggggtatttgtatgtgttcaggtttttaagatttccttatcttggtcgtccaaccctactatccagtttttcctttctgctaccatatttttattatctaagagctcttttgtttttagaatcttcctttaaaaaaattagtaaaatcctgtttctgtgtcctggatatagtattttctcttacttttctgaggctattaatgacaggtttttttttttctcctctgtgcatggtctgtttcttctaagttgctgcttcctattctt

SEQ ID NO: 20181 - DNA, 1038 bp, Homo sapiens
accatgctcccacccaggggcttgtgttctgggcaagtgacttgtatgccactgaagcaatttcttgctttaaaactttaatatctgcttctccaattggccaggaacttcacacactctgccatctagcaacagtgaaccgatggtacaggtagttctgctaggtttattttgtgatttgggttcctcccccgcagcaccccgccaaatttcacagtttgtaggaaggcagggcccttcaaactgggaaacacacacttctgggagaatttaaagatttgccaaggggttctgaggcacagatagtgatgacgatgataataataatactacagagttgtgtgcatggcttagtacagttgctaagttaactgaattaacacgtgcaaggggcttagcactgggattggctcatggtcaggttccctaactcttggctgcgactctttcaacctgtgagtcctgggggattgaggaggatggcgatcagggaagccttcaactggcagagaggaccttgggagaactggcaaggggtgctgagccaagggagaggtgaacagcatgagaagaaggtaggaggtaggtgaggccattctgtatttggggacagtgaggtcaccttcccactcgtgtgtgtgggcggccgatgattgatttctgtcatacctgttaccatttggtgcagtatcgatgtatcgttggtgtctgtcattaactctgaagtaacttttacttgatcagtactgaatttcattcctaggcttctcagtcttcatagttgactgctcctgtagttttgccatttattactgcttaaaaattaaaaaaaaaaatagagaacatagcctccgggaggcttctataaattatctcaagcctgttgcaaaagtcctagaaaacaaacccaggctgagtgtgataatcctagtgcttttggcatgaaggcaggaggattgcttgaagaccaaacgtttgagaccagcctgggcaacacggcaagacaccacatctaagacaaatttttttttttttttt

SEQ ID NO: 20182 - DNA, 1027 bp, Homo sapiens
cttatatctcagatgaggaaattgaggttaagtaacacgcccagagttggtgagtggccaagccaatattcaaactcagatttcctcattctagagccttattctttcagggctgggcagaactggggaatcagcaaagagaatccatcaagatttggccagctttcccatatggctgtcaaagagcaggaggccaggcgtggtggttcacatctgtaattccagtactttgggagatcgaggcggaaggattgcttgagctcaggagtttgagagcagcctgggcaacatagcaagacttcatctctacaaaaaaatcaataaattagctgggcgtggtcctacctactccggaggcggagtcaggaggattgcttgagcccaggaggttgaggccacagtgagctatgatcgtgtcactgcactccagcctgggtgatggagtgaaatcctgtctcaaaaaaaaaaggagattggaatctcatcattttttttctccctttggtgctaatgaaggatttttgtgctgtccaagcataagaggcaacctgagaaatgggattgtatttagttatttattttaagatgaagtcttgctctatcgcctaggctggagtgcagtggcgcgatcttggctcactataacctctgcctcccaggttcaagtgattctcctgccttaacctctcgagtagctgggactacaagtgtgtgccaccatacctggctaatttttgtatttttagtagagacagcatttcaccatgttggccaggctgatcttgaactcgacctcaggtgatccacctgcctcggcctcccaaagtgctgggattacaaagtgcgtgggtggcacccaggcagaaatgggatttagatgtcagtcatcaaaatggttgatgcaaccatcgttcaggaggctcacccagccagggatgtgtgatggctgcagtttcaggtgcctgcaatcttatcctgcctactccagcttcatctccaaccctctcctcatgttcctcacattgca

SEQ ID NO: 20183 - DNA, 1133 bp, Homo sapiens
cctccattaaaaggaataacaaagaaccactaaaataattcatatttattgacttggaaacatttacatgaaatatttttaaatgaataaagcaggttccagtatggaacaatatgtaaagtatgattttattatataaaaataatcacatgtagactcaaaaaaatcttgaaagagtcaataaagggtaacaaaacattagcaataattacctctgggcagcggagggagagttgaaggggtgaatttccccccacaataaactggtattgtttgtttcatataaattaaatgtttaggaggtatttgtgtccaagaggttcagaggtggacctggcaagtttaccctcattgagggatgtgtggggcagaattttagatctgggactgtgtattagtccacagactaatacacacaatcgcaccattcttgaattagagggaaccaaaaaggtctatctgtctgtctgtctgccagttctatctaactgtcatctatctatctatctatcaattgatcgatcgatcgatcgaaacaccaatactccaagagataaaataaactcacattgctataaagaactacctgagacagggtaatttataaagaaaagaggtttaattgactcacagttctgtaggctgtacaggaagcatggctagggaggcctcaggaaacttacaatcatggcagaaggcgaaggggaagcgtgtatgtcctacatgtttggagcaggaggaagagagtgaaggggaaggcgccacacacttttaaacagccaaggctaatgagaattcactcaccatcatgagaacagcaaagggaaaatccgctctcatgacccagtcgccttccaccaggcccctcctccaacactggggattacaattcgtcatgagatttgggtggggacacagagccaaaccgtatcaggctgttttccctgctgtcaaactcaatcctgacctatgaccctcagctgtctccaggaggtctccactagcactcccgtcatcgtattagtctggcaggataattgtagttacctagaaactgaagcattgtgcgcctcaattctggtgcagagaaggaaatgctgatttttttttttttttttttttttttttttttt

SEQ ID NO: 20184 - DNA, 2091 bp, Homo sapiens
tgaagtgcgttaagctggaccgacctagatttgaacgtgttcttggcccatgctcagacatcctcaaacgaaacatccagcagtacaacagttttgtgtcactgtctgtctgaaatctgcctcctgtgcctcccttttctcctctccccaatccatgcttcactcatgcaaactgctttattttccctacttgcagcgccaagtggccactggcatcgcagcttcctgtctgtttatatattgaaagttgcttttattgcaccattttcaatttggagcattaactaaatgctcatacacagttaaataaatagaaagagttctatggagactttgctgttactgcttctctttgtgcagtgttagtattcaccctgggcagtgagtgccatgctttttggtgagggcagatcccagcacctattgaattaccatagagtaatgatgtaacagtgcaagattttttttttaagtgacataattgtccagttataagcgtatttagactgtggccatatatgctgtatttctttgtagaataaatggtttctcattaaactctaaagattagggaaaatggatatagaaaatcttagtatagtagaaagacatctgcctgtaattaaactagtttaagggtggaaaaatgcccatttttgctaattatcaatgggatatgattggttcagtttttttttttccagagttgttgtttgccaagctaatctgcctggttttatttatatcttgttattaatgtttcttctccaattctgaaatacttttgagtatggctatctatacctgccttttaagtttgaaactaactcatagattgcaaatattggttagtatttaactacatctgcctcggctcacaaattccgattagacctttatccagctagtgccaaataattgatcagatgctgaattgagaataagaatttgaggtctacattcttggttgttaatttagagcgtttggttaaagtatgtccttcagctgactccagtataatctcctctgctcattaaactgattccaggagattggatttgctgtgactagatacagatggagcaaatgtcctaacagagaaatagaggtgatgctgctaaagggagaaatgccaggcggacaaagttcagtgtcgggaattttccccgtgacattcactggggcatgagattttggaagaagttttttactttggtttagtctttttttccttcctttttattcagctagaatttctggtgggttgatggtagggtataatgtgtctgtgttgcttcaaattggtctgaaaggctatcctgctgaaagtcctgctttcctatctagcatttatttctctggcaaacttttctttcttttcttttttaaagtaaacttgtgtattgagtcttaactgtatttcagtattttccagccttatgtgttacattattccaatgatacccaacagtttatttttattatttttttaaacaaaatttcacagttctgtaatgtaggcacttttattttcattgtgatttatatataaggtaatgtagggttatatttgggagtgactgcaagcatttttccatctgtgtgcaactaactgactctgttattgatcccttctcctgccctttcccaggtaatttaaattggtcatggtagatttttttcatagatttgaaaaacttttaggttgttaccaagtatgaagtataaatctggggaagaggttttatttacattttagggtgggtaagaaagccaccttgttacaaattttttaatttccaaaataatctatattaaatgagggtttctgatctgtactttgtgtttagctacctttttatatttaaaaaattaaaaatgaaaattacgttcttacaagcttaaagcttgatttgatctttgtttaaatgccaaaatgtacttaaatgagttacttagaatgccataaaattgcagtttcatgtatgtatataatcatgctcatgtatatttagttacgtataatgctttctgagtgagttttactcttaaatcatttggttaaatcatttggcttgctgtttactccc

SEQ ID NO: 20185 - DNA, 1037 bp, Homo sapiens
ttagcatactctttggtttaaatttaatatatacatttaatgttacttagggatacttttatattttgcatatataaagcctcatatataaagccttatttctgatgctcttagatttctgaggagtgagatgattaagttgtattcattagtgtattggtatttcttcacatccagtgaaattggagatatgttgtatgttagaagagcattctttaaattgtgttgctttgaacatgtgtaccttttctagattcagtaatcccttccccccgtcctctggagtatgaaacctttagagtcacaataaaatgtaactaaagaaaatttctctgggttgacagtcctggttatagttgaattctctctaaacagtggcccaagtagactcttttttttgtttcttttattttttaatgatttaaatattgacatttaaaaattgaagtagcatgtcagttttcttcatactactttatctctaaccacaaataatagctgaaccttttgtacttatgttaggccctggcagtgtatgtttagatgggctaagacaacatcaagaagcaatggctagataaccatttaatttgtccccaaaggtacgtttttatctgtctatttgtctatttatcgatctgtctatctaagatggtctcactctgtcacccaggctagagtgaagtggcatgatcactgcagcctctctgcttcccagattcaagtgattcttgtacctcagcctctggaatagctgggactacagatgtgtgccatcacacccagctagttttttgtatttttagtagaggtggggttttgccatgtagcctaggctggtctcgaactcctaagctcagtttgcccaccttagcctcccaaagtgctagcattacaggtgtgagccagcgtgcccgtctcccaaaggtattattataatagctatcagtaaacgctgtagctatgtgaatttcttaaatctcttccttcctatgctatgtgatttttacatagaaagcagcattgttatgtacatg

SEQ ID NO: 20186 - DNA, 1044 bp, Homo sapiens
caccaataccaagtttcctgcttaagaagctttggtgacagtggctgattattttcaaaacccagcagttgagagggaagaaatagacattcttctgcaggtataaacagaagagaggggaatggttagcagaaccagaggtagtgcagatccagatgtccaaggatgaagaaaggtggggtatgagccaggaattggtaatggaaaagtggcccagaaatgcaacttagtatgctggggttgaagaacagaaaagttctgggtcttagggggatgtgggggaaatacgtggaccatcatcccctcagagaaacacagccggatcatgagggctgggggcagctggtgcagaggatattgatttatatacattaaatctctaatgaattcctgaaaagcgccaggctgcctgagagtggtggggcctgctgggtgtgtacattcatgaaagtgctttttaatccttaagggccttgtggtgtgagttctggcctctaggctgactttgcctcgaggctaataaacatggaagaatgatgatcttcgaataattttataatccactgtgtgggactgttgaaacgactgcaaggcgatttagatgtaaataaacgtgatgttgcagaaatctataaataagaagcactggcaatttaaaccgtgttgtgcattttgccaaaaaacacgagtgagtcctggaaaccacagtgaggtgctgccaaaagtagagattctattttaaaaggtgcagccaccgttacagcacaaccctccgtgctcaggcctggccagcttatcatcatcactggatgtccaggctagcaaggacaatccctcttcccagtctcattttaattcctgagtcccatctgtaggaacatatcatctttcagacaccttttaggttcttctaaaacattttctcatttttgtatgatgtaagataagaagtaattttaaattcaaaggttgtttttactttagatcagtgcttctcatactttgagaagcactaatgcacgtctcattgcacattatattgta

SEQ ID NO: 20187 - DNA, 1072 bp, Homo sapiens
gcactcctgcctgggtgacagagtgagatcctgtctcaaaaaaaaaaaaaaaaagaaaagaaagagttgtaaatggtagaatgtaaaattaagaaaggttgtgaagttttcaaggaaagaacagcattggctttgtgagttggtttagatctgatgttagtaaaagttaaaaaaaaaattttcttttcttttttagacagagtcttgctctgtcgcccaggctggagtgcagtggcgtgatctcggctcactgcaacctccaccaggttcaagtgattctcccgcctaagcctcctgagtagctgggattataggcacccgccaccatgcctggctaatttttatatttttagtagagatggggtttcgccatgttggctaggctggtctcgaacttttgacttcgggtgatctgccctctgtggcctcccaaagtgctgggattacaggcgtgagccactgtgcccagccgaaaaaacaataatttcaaatatgttccaatcatttggaatcgatttaaaataaaaaaaaaaaaaacaaatgtgctgccagcattagattgttagactgcaaacaacactttaaaagaagtgaacagctgtcacacttctctgtcctctgtagagatttagctttggaaagataacaagtttgtaaattaacagatctcatctaaattccatccttttcctggagcttctgctatcctaatccctcaccctccaagagcacagccctttgatttacttgatccaaagaacttttacttcctttcgctcactgctggatatgctaataggtagggttaaatgaaaattgataaaaaaaatactataattatttttgttttataatagtgattgtacagtaaatattttttatatagttttacaaaaatacctatatgggagtttgtgctttggttatttaaaccttggaaagaattttaagaattttaagaattttctatcttgtttacaatgttttatcctcagattcaggctcggtgcctggcacgtagtaggtggtcaacaagtacctttagaataaataaattatttttatcagtatc

SEQ ID NO: 20188 - DNA, 1033 bp, Homo sapiens
cagccactacagcgagcagcagcagcactcgccccaacagatcgcctacagccccttcaacctcccacactacagcccctcctacccgcccatcacccgctcacagtacgactacaccgaccaccagaactccagctcctactacagccacgcggcaggccagggcaccggcctctactccaccttcacctacatgaaccccgctcagcgccccatgtacacccccatcgccgacacctctggggtcccttccatcccgcagacccacagcccccagcactgggaacaacccgtctacacacagctcactcgaccttgaggaggcctcccacgaagggcgaagatggccgagatgatcctaaaaataaccgaagaaagagaggaccaaccagaattccctttggacatttgtgtttttttgtttttttattttgttttgttttttcttcttcttcttcttccttaaagacatttaagctaaaggcaactcgtacccaaatttccaagacacaaacatgacctatccaagcgcattacccacttgtggccaatcagtggccaggccaaccttggctaaatggagcagcgaaatcaacgagaaactggactttttaaaccctcttcagagcaagcgtggaggatgatggagaatcgtgtgatcagtgtgctaaatctctctgcctgtttggactttgtaattatttttttagcagtaattaaagaaaaaagtcctctgtgaggaatattctctattttaaatatttttagtatgtactgtgtatgattcattaccattttgaggggatttatacatatttttagataaaattaaatgctcttatttttccaacagctaaactactcttagttgaacagtgtgccctagcttttcttgcaaccagagtatttttgtacagatttgctttctcttacaaaaagaaaaaaaaaatcctgttgtattaacatttaaaaacagaattgtgttatgtgatcagttttgggggttaactttgcttaattcctcaggctttgc

SEQ ID NO: 20189 - DNA, 1024 bp, Homo sapiens
gtagatgtagggctaagtaaatggcagactgttcaagaagtcagttaaccattctttccttttgtagcataggctctgtgctaattagggaaccacttacttgccgtgaaatcagcagcataaaacacaggcacctcttcgagatcagcctcagaccgtggaggcagtaacagcaaattgcacttaaccaggggccttgtgtctgctgaacagtctgcctgtaagaagcgttgctgagaggggtcaaagtcctggcacataggccttgtaagattaagtggattcactttcactgtgtgtcatttaattggtgcaagttggcaatgtgacatttctttgttcttttagccgtcctggtatgtacagtccttcctgtttagtttatgccaggaaattaatcgggttggaggccatgccttgccaaaggtgacattacaggagatgctgaaaagctgtatggttcaagtagtagctgcctatgagaaactctccgaagaaaaacagattaaggtaggtgtctgaatgtttgcccattaaaaacacaaattaaacaaaagaaaaccttagcattgtcttgggtttgagcagttcacatcaaagactcaaactgttaaggatcacccagcccaggcatcgggtcctgtaaaaatgctctatcttaggagtagcacccagcgctgtgagtttacttacactcattctaaagggtcagcagatcttcgctaagaaggcagctcagcacagatggaaacaccaagacccagaactttgggaggctgaggtgggaggatggcttcagcttgggagttcacggctgcaatgagcagctatcatctcaccactgcactccagcctgggcgacaaagcaagaccctgtctcttaaaaagacaaaacaaaaaaatcaaaaaacaatgaaaaggatcagagcttcaaaataaaagacctggcttccaacctcagtgctgccactggttcactgggggctccgggcaaatcattaacctccgtttccttagggccaaa

SEQ ID NO: 20190 - DNA, 1049 bp, Homo sapiens
tccgttgggagggtttaactgcccggaaacggaagtctcgttctttttcgtccttttccccggttgctgcttgctgtgagtgtctctagggtgatacgtgggtgagaaaggtaatctggggcaatccactgccaggtgaaatctggggaccccaggtccgcgtggagggtgtcggggaggagaaggggagtgcgatggggccgatatttcgggggagagcgggaaaacggggttcgctgccagcccccgcgccgtgttaacgccgaggactgtttcccgcaggtcctggtccgcgccagagcccagcgcgcctcgtcgccatggtgagtacagtccctgcctggcgccttcccggggtgggctcgtggggccccggggcgagggcgagagagcctcccaaggatctcctgaggccgggagaagctggtggactgggccatcgccgggagacgtgtctctttcctctctgttcacccgcttcctttgtgttgcagcctcggaaaattgaggaaatcaaggacttcctgctcacagcccgacgaaaggatgccaaatgtaagtggttgctccgaaggttcaagaagagcggtgcctagcctggcaccgctccgggagcgtcttccccggaatgtcaggcaggagacggttaggccgtctgggtgtgtgcctggccctctgggagcagtggtttcatcctgtttcccatgagaaagacctgtggggggcacgttgaggccctggaatttctaggaccatctttagctaatcgcgatcatctcagaggccgccctgagttcagttttctttcgtataatatagtaaattgtcggaacggaatctccactccgcgaaagcctcaaaacacacgtcccataaacactgtttaggttctctgcagttgtgcaaaatcttaacacaaaatccattttgtaataaagtgctggatatttgcatgtaatgtatcgagcacggcacactgtgtagtatggtcgtttacctcgtgatcctgtggtcgctggccagtgtcagaaggtatcatacctatctaa

SEQ ID NO: 20191 - DNA, 1013 bp, Homo sapiens
aggggcgggtggggtttggaaggttgctgtgtgtggccatgttgtatcttgttttgaatccctctcagatttcagagcccattttatggtctaagaatctgctcttgctgttgggagtgtgaggaatagttgtgattctcagattatatacagtaccagaaatcatttccttagccagaagagcggttagagctcatttaatcctgttcacgacccttcgaggttggtgctagtactgatagtccccattttttacaggggaacagatgaaatataatagaccaagtctttttatcgaatataatagaccaagtctttttatcaaacactaaatattttaaccgaaacttcgctggtggatctaatttctgaaccttgtgtgctctctttagcttaagtacaaaatttagacaagcagcagcaactcagatgtgtcttctggatggcttacttttgtctctttccctctaggtttggcagtgaaggaactgaaatgaaccagacacactgattggaactgtattatattaaaatactaaaaatcctaagtgtctttcgtctttgcggatgggaaagggaaaaatgctacctcgtagtggcttctgatgggaacaggacgcgggttctgttgctgccttcctgtgtctttttttttttttttttttctttctttgagacggagtcttgctctgtggctcatcctggagcacagtggtgcgatatcagctcactaccacctccgcctcctgggttcaagcgactgtcctgcctcagcctcccgagtggctgggattacaggcacacatcaccacgcctggccaatttttgtatttgtagtagagacagggtttcactgcctgcctcagcctcccatagtgctgggattacaggcatgagcctccgtgcccggtgcatccctaatcttgagcatgatctcagtcggcaaatgaggccatctgttttcagcctgtttgaaaataagatgtggggaggccatgatggaaatagcacgt

SEQ ID NO: 20192 - DNA, 1030 bp, Homo sapiens
cacacacacacacagcttctaaatcgtggataccaggtaagctggaaccacttcctttcagttggcaaagctttggtccaacagcatataagctttagacccagctgtgcccagcaagagagtgtttcgcaccagaagcactgcgggtgaggctgcggctgcacccctgcttgcttcctgggatgacaggaccatcatgccactcatcgggtccagtggaaagcatcccccgacatctctgtctttccctcagcagcctcagcctctcccccatctccaactttcagattcttcaggagagaggatcgcggatgtaaactaagaccccgaaaactccagaccttcaggagagcagtcagcagagcccctctgtgaagtgaaacctcactcctgtccagtgaccgagccactgcaaagcacagctgatcctggccccctgtgaagaagtgttctggtcaaaactaaaggaactccctccccacctgcaggactccgaagacagtgcgacttctggctgcagaataccttttcagaaacctgctttcatttgcttagccagtattagaacagatctttacaacagcagctgggctgggttcccagtcggagcctttcggggatctgggggatgagggcggaaggcctagctccttggaaatggcctgtactttaaggacgctggagccaagaggattgttcccgtgccgtgccatggtttcaccctatgtgtgccacaatggacgttagcagctgcttcggaacaccgtccctcctatgcaccctccaagacgtgcagcagatgcaaagggttctagctgcagtttgtcgaattgaggttttaggtaaagcatagagttgccagagtaccccgcattcccatgaatagagcctccaaggaaagggaggatggggtgtcctttgttgtggttggaggttggtgatcattgctctggatttggggctcccggctgccaccacatgcagctttgcctcacctttctccagcagccgggaccctctggagagcttg

SEQ ID NO: 20193 - DNA, 1044 bp, Homo sapiens
ggctgcgacgacactaaggtggagaccgggatgtagcgaggactcccagagttgggagacgttgtacgcttactgggacctaaatcccgcacgagttcccacccaagtgccgccgccccagcctacgcacgcgcattcgcaccgtctccagccccggggtcctcctgcccctcccgccgtctccgggggccttttctccgctcggcaccagggtgtccccggcgccgcctgatcctgttagcgcggtactctgagtgcagtcagtcctcggcgctgttttccctgatttgctgtcgacgccaggaaggaaggacgcgtgcagaggaccgcagaggggtggccgtggctgagaggagacagcgccgcagcactgagggtttgggcttgcaggcgctgcaggagacgcccaggcggagtcttgtctcgcagccagctctgagcgggaggcctgagcgggaagcattggcgtccgagcgacttctaggagcctggggttcggcgctatggaggagctcgatggcgagccaacagtcactgtaagggtaccccgaacaggcttgctcgtccttgcgggttgagaactgcgtctgcttagttacttcaggcttgtctgcttccctagtggtcgcgaggcgctcgtccccttccctcgactcagttgccacttttccggaggtcgcagtgttaacgaggtgcccgccctagggtcgcagtggtcgcggggtttctgccaccagtcacaaaccccggcctcgaaggtcccactccgtccctttccttcctttgtgttcctggcctttttacttcccttgcttttcctcttgggcattagagtgggttcagcccaagcagaggaatttatatttttattccagccgtattaagctctgcatcgcggcacattgagcttctgcctgtgtggcctaaggtttattcaacgtattatctcaggagactattcctgttttatcgctgtgcattcaattccatttgaactttgaagacagtatgtcaactgtggatgatctgtgatgtgtataaaaa

SEQ ID NO: 20194 - DNA, 1061 bp, Homo sapiens
aatatggtgaaactctatctctactaaaaatgaaaaaaaaaaaaaaaatagccgggtgtggttgcacacacctgtagtcccagctactcaggaggttgaggcaggagaagcctttgaacccaggaggcggcgattggagcaagctgagattacaccactgtacaccagcctgttagagtgagtctttgtctcaaaaaaaaaaaaaaaaaaaaaagaatggaacaacttcagtaagaagaacatttttcattttagatttctatgccttattttactagttgattccaggcgtgaattccaagaagaaccaaatgtattttgactggggtccaggggagatgctggtatgtgaaacctccttcaacaaaaaaggtagggttttttttcttccaaattatccatcttggcacatttggttgtttttctgtttattacctcagattttactagttgtggactgaaacagttgaatttattttgtactattttaattttctctattttgttttcaagatacaacagggttttgttgtgtcacctgggctggagtacagtgtgatcatggctcactgcagcctctacctcttgggctcaagtgatcctctgcctcagtcttcctagtagctgagactacaggtcaccatgccaccacgcccagctaatttttttttctttgtagagatgggagtctcattttgttgcctaggctggtctcgcactcctggcctcaagcgatcctgttgcattttggcatttttatttttgaaatgttagctattttagattttcattgatttttgagatcttgaagatgttgaatcccggaaaaaaattaatagttttcatgaaaaattttcttcatatttaaaatgtcaagctttttatccctttttctttgtccaaagtgaccaaattcctatcagtagctcccttattgtgaaccttgcagatgcttggccgtcacttttgtgtccacagcatggattcagctgaataatagttctgtaggctgagctgagccgtagcatccaaggcacagatggagctggagagtgacatag

SEQ ID NO: 20195 - DNA, 1043 bp, Homo sapiens
acaaaaaggaatacaaaaccgtttttttttttttttttttgagacagggtctcggctgggtgcggtggctcatgcctgtaattccagccagcactttgggaggccaagtcaggaatctcttgagcccaggagtttgagattagcctgggcaacaaagtgagaccctccatctcaaaacaaattaataaataaaaatataaaagagaaaagatagtccgactctgttccccaggctgttgtgcagtggcctgatcttgctcactgcaacctccgcctcctgtgcggtcctaccacctcagcctctcaagtagctgggaccacaagtgccaaccaccatgcctgggtaatgatataaaaccaattgacaggggctggggtgcatacagggttggatgtaaatgagcttgcacattactttggatcatcagtttcgaagtcagcatgtcgtatatgtgtatatggatgtattttctatgtgttaggtatttccattcacctctgctgactgacccaattgggaggtggcagggaggagatcgctagttgactgggctaatggaaagtcaactaaacttataaagcctgaaattgggaacagattgtgaggacaaaaaaaaagaaaagaaaagaaaacctggaattcggcccggcacggtggctcacaggaagtagtgggccaaatgtttgagtctctgattgattcgctaaggtttgttgttgtcgtttagagacagggtttcgctttgcggcctgggcgggagtgcagtgatgcgatcatggcacaatgcacctttgatttcctgggctcaagcaatcctcccacctcagcctcctgagtggctgggactacaggcgcacaccactacgcctggctagttttattttttgtagaggtgaggtttcactgtattacccaggctggtcttgaactcctgggctcaagcaatccttccaccttggcctcccaaagtgttggaactgcaagtgtgagccaccattcctggtcattcactgagtatttattgagtccctactatttgcaa

SEQ ID NO: 20196 - DNA, 1031 bp, Homo sapiens
attcacagataaagactgaacagtgaagactatttgcattgagtgtatattttatgttatgttatgttatttttgagatggagtctcactctgtcacccaggctggggtgcagtggcgtgatcttggctcactgcaacctctgcctcccgggttcaaatgattcttgttcctcagcctcccgagtagctgggactacaggcatgcaccatcacgcccggctaatttttgtatttttagtagaaacagggtttcaccatgttgaccaggctggtcttgaactcctgacctcaggtgatccacccgtctcggcctcccaaagtgctggaattacagacgtgagccaccacgcctggcctgagtgtatttattttacatatttatatttgaactgaaacttttatgaaccattttatttaatgcattctgatattttatattatttcattttaatttttttccaaacaaaacttctcacatatttattattgaaccaacctactattgtagagcttataatcagagaaaaaccattttctcaacaaagtatgtccacctttccagatagtggtgacagtttcagcttgatgtgataagatgatagtcttacgtgtagactcatctcatgtgtaattcctggcagacccagcttggttcttctccagtccctcctcttggggttgtagctaactgtattagcaattttgttttattttgttttgttttgtttttttgagatggagtctcactctgtcatccaggctggagtgcagtggcacaatctcagctcactgcaacctccgccgcccagattcaagcgattctcctgccttagcctcccaagtagctgggactacaggcgcctgccaccacgcctggctaattttttgtatttttagtagagatggggtttcaccatgttaaccaggatggtctcgatcttctgactttgtgatctgcccgtcttggcctcccaaagtgctgggattacagctgtgagccaccacgcccagccctgtattaccagttttaa

SEQ ID NO: 20197 - DNA, 1025 bp, Homo sapiens
agttgaaatccggtgcccttagctgagagcaggagcattatggagaaggtacccctgagaggaggacagagttcagcacaaatgtctctcctcagattatgctgggagacgaagctgccttgttagagcagaaggaacttctgagtaattggtatcatttcctagtgactcggctcttgtactccaatcccacagtaaaacccattgatctgcactactatgcccaggtgagtgagctcggggtgggcaagggtgggggtaggagtcctgggggcgccctgatgggtcattctctttgaattcctccctgaggaacaggaagaccctttcctttggcccttagtgaaagaacaaggcaccttctctggggttcgttatacagcagccctgcctgccccgagtctctgcttccgtcctcaggattgagtgtctcatcacctttccacagtccagcctggacctgtttctgggaggtgagagcagcccagaacccctggacaacatcttgttggcagcctttgagtttgacatccatcaagtaatcaaagagtgcaggtaggatctctcccaccccccactgtaaccatttttaggtgtacaaatatcaccaccttgcgtttctagagtggcctgttccttccttacccttcttccctcagacctgctatcttagtccatctcacgctgatattacagaatacctgagaccagataatttataaagaaaaagattattttctcaccgttctggaggctaggaagtccaggatcagggcactggcaatgttgctggtgagggctgctctctgcttccaacatggcaccttgaacactgtgttctcatgtggtggaagggcaagaaggacaaactcccttcatcaagtcgctttataagggcacccaatcacattcatgagggaggatgtggcctaatcacctcctggcctaatcacctcttagaggccctacctcttaatactatcacattggcaaaactggggttttagaggggatcccttcaaacc

SEQ ID NO: 20198 - DNA, 1003 bp, Homo sapiens
tgagactgctgctctgatctctgggccgggccctgcaggttcctcagggattactgtgagcgaggctgcttttctgatttggatctcattgacaacctggggccagccatgatgctcagtgaccgactgacattcctgggtgagtctctgggttttgtgccctgtgctttgggcacaagtgggtagttggggaggttggagggatcacgtcagacttctcccagcgcttccttcatgtattcccattgcatcagtggtcccagaaacatcctccgtcatgtccaggatcatgagtttggctgtcacatctccttagtgcctccatgtttgtttgtttgtttgtttgtttttctttctttctctctttctttctctttctctttctctttctttctttcttcttttcttttattttttctttttttttttttttgagacagaatcttactcgctctgtggcccaggctgccaggctcactgcaacctccacctcctgacttcaagcaattctcgtgcctcagcctcccaagtagctgggattacaggcacgcggaaccacacctggctaatttttgtattttatttatttattttttggggacagagtctcactctgtcacccgggctggagtgcagtggcgtgatctcggctcactgcaacccccgcctcccgggtccaagcaattctcctgcctcagcctcccaagtagctgggactacaggcgcacgccaccacacccagctaattttttgtatttttagtagagatggggtttcaccgtgttagccaggatggtcttgatctcctgaccttgtgatccgcctgcctcggcctcccaaagtgctgggattacaggcgtgagccactgcgccccgcctaatttttgtatttttagtagagatggggtttcaccatgttggtcaggctggtctggaactcctgacctcaagtgatccgcccgcctcggcctcccaaagtgctgggattacaggtgtgagctac

SEQ ID NO: 20199 - DNA, 1038 bp, Homo sapiens
gggctaactgatggctcctaaccccagcgaatgtctgtacttagatgaattgtccaggaagagtggcctctgataggaccctctcgttcccactctcccacttgctgccggcaggatgacgagcacatcgtcctggagccgggagacctcttcccccccttctcccctccaccctcaccccggggagaagtggagagagggccacagagcccccagcagcaccggcttttccgtgtccttgagacccctgtgattgacaacatcaggtaggggtgctgccccgcctcctcctgtccctggtgtcttctgtgaagaggggaatgggactgacaaggaaggggccccgttcatctcgaggttctcttgagggcaggcatctccttaggctcctgtccttaacatcttgtgagaattcttagactgagtggtgccctctcccagtctctactctgaggggacagctctggaggtgaacacgggctagggccagggcagagcgtggaactgcaggactcacggtgcttgaagaagcggtatctggcagagaggcccagaatcctcccaaggtgtaggtttctagcctctctgccaagtgagactgacagtcacttctttctgcagatggtgcctggacatggccctgtcccgaccagtcactgccctggacaatgagcggttcacagtgcagtcggtgatgctacactatgctgtgcccgtggtcctggtgcgtgtggcggggctgtgcggggctgcatggggcagaggagagggctggacacgggggggtctcagggccactcacatgagcgggagtgaatgcagagggtcccagagtgagccagcctgtggagtagcaaaggaaggggaacggcagtgcctgggtccctctagaggggcggggtcaaggctgtgcctctgctgttcccaacaggccggcttcctcatcaccaatgccctgcgcttcatcttcagtgccccgggggtcacttcctggcagtacaccctcctccagctccaggcaaggaccaccctgtcctc

SEQ ID NO: 20200 - DNA, 1297 bp, Homo sapiens
ggttgcagtgagccatgatctgccaatgcactccaacctgggcaacagaatgagaatctgtctcaaaaaaaaaaacaaaaaaaaactgcttggaaaccagctgtaactttcaagatgacctagtaaaatttaggaaatttatgcccaattaaaatctaaaacagtaatattcttgaaaatatagtgtgagctgttccatatttgagctgattctgtgattggatagaactgtatgtagccactaaaatcttgagacgttgtgagtgagaaagataagagtgtgttttaccaggaaagaaagttttggcgccagcatgcaggagggaaaaaaaagaacccctgaaaactgtaaatgcaacctgctttctatgctgagtgaaaaacctggaacccaggcctgagaactcgccctgcctgagaactggcaagatggtatgggcagacccatggccccatagttcaaagtcagtcacagctctcctcgggcttgcagaacaaaacactcagtagtgataatcttctctgcctagtatttagggtatgtgggacttggagcctgcacgtaaaacaagcccagggagccgttaagtgtttgggtttcagttgtggagggaagggaggatctgggtcctagagtctttctgggtacagttgcagccttttcttagggctggaaggcttcctggggaagttggctggagaggagggtacataacacttaacggtcaccccttctaaaatactgtaatccaggcaacaaatccttgggagatgacagggctttgtgagtcagggtgggggtcacatgaaaaacaaaacagactttactgctgtccagtagcagtcactaaagagcggggtgggagggacccaaaaaaggtgaagctgggaagattgtggaaatgccttttgtgctcaggctccccttctcagccctacatcacggctgacagcctcgtcattcctgcctgctccttgactgatgtgcttcgctgttcctcattcactcatgtgcatttcaagttttactgtggaatgaaaagttttcatggaataatttctgttcctcttgaggagccctcagaaatcagaacacaaaatccaaccctcaaagtcacttgatatagttcttttggagggtgatggagaagggtttagataaagcttgccagcttcaatgttctgcaatccccagtggctgccaggcctttaggagtcctcgtggcatctccaaggactacaaatgatccccagcatgagtcttctgtgatactcttatcttagtcctggccctgtc

SEQ ID NO: 20201 - DNA, 1027 bp, Homo sapiens
aggctggagtgcagtggcgcaatctcagctcactgcagccttcacctcccagttcaagcgattctcctgcctcagcctcccgagtagctgggattacagatgtgaaccaccgtgcctgactaatttttgtatttttttttttttttttttggtagagttggggtttcaccatgttggtgaggcaggtctcaaattcctgacctcaagtgatccacccacctcagccttccatagtgctgggattacaggcatgggaatcccatgggattacacccagccctttttttttttttttttttttaaatcaaacggctacagtttggtgctgccacctcaatttgttctaaaggctagcagtttacccaccattgcttgtgcaaaggtcaacacgatgaaaaagacaatgacttaaaacggttttgactttgcagaccccttagaaaaactactattattctaaaacagaaatcatgggtcagtgattcagtagttgtttgagaactgtttttattgctctgaaaatgtccgttaagttgttagccttatggggtcttgagccatgttgagggtgggttagtattcagagtaagatgattcagccctggcatggtggggaggagttcaagctctggaatgagactggggttttcttggggaagtcctttaacctcagtttttctcatcgcgaaaataatcatcataataaaatctgtctcatttattttaaggttcaactaagtaaaaataaaatgcagttgtccctcactatctgtggggatcccaggaccccctcctcagatgctcaaggttctgatataaaatggtgtagcatttgcatttagccttgggaatccttctggatactttaaatcatcttatgatacttgatacaatgtaaatggctgtgtaactagttgttagactgtgttgtttagggaataatgacaagcaaaaaagtctgacacgttcaacacagacacaatttaaaacacacacacacacacacacacacacacacaattggagg

SEQ ID NO: 20202 - DNA, 1062 bp, Homo sapiens
ccacgagggccacacttgcttgaattcacagtcgacgtagataaacatgcaaagatggaaacgtgtccgtgcgtgcccatgaccgtttccctcgcgggctgtgcggagcctgagtctgggagcccgaaggtgatgggttccaagtatgtctgcaggctcagcagaaatgtagcattagagggagccccaaatactgacactacaggagtccagcaggatgggaaaacctcttcctggaagtcttgcatctgtgtgcttttaggtcgctgtcttcatttccttcaagccacgttaagcattccctagagttaggtgatgtgggagaaagatgaataaggggcggtttctcctgttaagcaaaatgttgctttccattttccctgatgctctgtgaatgcctctcatccccatgggctcctgagtgatgtgcatgtttaaaaggatccccagctgcgagaggttttggaacctggggggttgaacagctcttaagttgttcagtgaacgaagaacagaatcatctgttggagtagaaagaactcaaaccagtcaggaggaactcttgttatagaagaccttgggaaactgttctggggttggggaacattggttataggaagtgtatggtttctttgtgggattctttgttgttggctgaaatcatttaagcttcttgactacagtctgactcacgttaaccattccttttctgatatggacattgctttcctggtcctttcttactggagatctttcgcagtctttccattgattttggtgagatgttcttagctcaaagactactgatgagttgaatggtgtagtcttgattttcgaatctggaaacttcacgtaattggaacttctttataatctctggttgctcagatcactgtttttagcaaaataaacacattttgagtcacgagagtcttggcttcagcaacttgtgtttctgtgttgtgttgtcattgagcatactatggaatctgtaatagaaaggctttcttattttggaattgacaggtgaaacaagtgaacagctgattaaatgtcagtatc

SEQ ID NO: 20203 - DNA, 1027 bp, Homo sapiens
cagggtttcactgtgttggccaggctgatctcgaactcctaacctcgtgatccgcccaccttggcctcccaaactgctgggattacaggcgtgagccactgttcccgtctgcctgtcaaattttttacctttttaaacttttatttatttatttagttgtatttttagtagagatggggtttcaccatgttggtcaggctggtcttgaactcctgacctcgtgatctgcccgcctcggcctcccaaagtgctgggattacaggtgtgagccaccgcgcccagccacttttatttttatttttaattttttttttaaatttatttttgtcacccaggttggttggacagagcaagagacaggatcttgctctgtcacccaggctggtgtacagtggcatgggaaggcgtgagcctgagaaggtgtgagccacctcacctggactttcttatacattaattaattttgtatagttttatacctgatgttatttgaaattaggtaacatgctgtagtctttgcaataatccagagacacttgtgtgataattgagtctcactcaccataacagtaatcttggcaaacacagttgaatacactaaaagcaaaaaattatgttgccattggtttccctttcttgcccttcattcttgtgctgaaattaaagttcttagagtttgagccctccttttcctaaaccaagaggattattcataacatagtttaaaggataattttgttgattttttttttctaaactcttgaataatcttgctttaagggaaactttggaataatcctttcagcaaattggtgtagcaggcacttgtgctggacttaggaatccagtccttttagaaaacagttatgtcagaagttcctttattgtacagctccaagtatttgcttagcacttagtaaaacgataatgtatatgtattattattcttccaatacaagaaccacatgacctctttttttttttctgagaccgagtctcgctctgttgcccttggctggagtgcagt

SEQ ID NO: 20204 - DNA, 1046 bp, Homo sapiens
ctctttcctgtgtgtcttagaagccatgagcacgcttaggtaactagagccctgccacagcctgagcagcacagcacacatctgcaggctttcctgccagacctttacctaaaggtaatttttctcattaggagagactccaggtcaagagtgatgacagtaaggttgcatttaaagctgcattacattaaatagtggactggtctagtgattattttcccacactgggcaatatttgcttaatgattaagtttttttgtttttgtttttgttttttttaatccagctatggttgatactaaaggaggttttcccactatccgtatgcatcttctctgttttgagattgcaactatggacagttatggctaatcctagtagattgtcttcccttttaacatcttggatgaatttgggtcacactaattgttatgtgaagatggatgttgaatgtaagtttctctgccattcttagccaatatataaaaattacattagcctaattgctaacaatgccaagaatttaggtttactatccctctggacaatgtagcttcttgttttcttaccatatagataactctatagattcaccccagccagtcatcttaaaatacctgcataggcagcagaggtatctgtggagaaagtgcatgggataataggtacagggtgattttgggagtgatggaaatattctggaattagatatggtgaaggttacataatgtgggtgaatacactaaaaaccactgaaatgtacaagtggtgagtttgagtgctctctgaattatatctcaaattgttaaaaagttaattaaaaaatcagtgtatatgagtccctcttaccatagagagggcttcaagcgcatggcctattgccaaggctcagcaacagtggttcagtgtgggaaagcctgtggtttgcgcaaagctccttggtgcccttttcccagctttctcagtggcttaggccctgtgtatctattctagttgaatgccgccatgttataagtctgtggagatgttttgagataagaaatacg

SEQ ID NO: 20205 - DNA, 1033 bp, Homo sapiens
atatagccaccataagtcctgacaaaatgacttttaataaggagggggaaggtccatgtcccaccttcctatgaaattttggcctattcacaagtctacccccacataagagaagtagttatgttctgtaaagaagaggttgataaaaacctttagcatggtgttttgtgacttagaagttttaagtagtcgttcttatatctaagcatttattaattttggtaagaacattactatacgtttctgatgtcacttttactgttaagaggtgccaggcatctggtgacctgtcacttcaggatttgtgtgaatcagaccatctaaatataatataaattagagactggtacttgtatttcctgattaaaaacaaagtaacgtctgttttactattgaagtaagagtactttataatgaatacaaaaatgtatattaaatatccagtagagcatgctaaagtgaacatttctgtttttatttcagcaacttattttatggtattgtagttatggcctgtccgaaactctctgacatattctaaacagctttcagagagtcactgaggcttatttgctactactgttgtttttcctttagctcagttaagaaatgtttagttagccgggcatggtggctcacgcctgtaatcccagcattttgggaggctgaggcgggtggattgcctgaggtcaggagctcgagaccagcctggccaacatagtgaaaccccgtctctactaaaaatacaaaaaactagctgggtgtggtggcgggcacctgtaatcccagctactagggaggctgaggcaggagaatcactaggacccaggaggcgcaggttgcggtgagccgagatcacgccattgcactccaacctgggcaacaagagtgaaactccgtctcaaaaaaaaaaaaaaatgcttagttaatagtcagcatggtagttaagagtactgactccagggtcacaccacctgggtttgaggcccagctctgtcagttactagctgtgagatcttgggcaagtgactta

SEQ ID NO: 20206 - DNA, 1442 bp, Homo sapiens
atcacgaggtcaggagattgagaccaccctggccaacatggtgaaacctcgtctctactaaaaatacaaaaattacaggccggacgcggtggctcacacctgtaatcccagcactttgggaggccaaggcgggcacatcatgaggtcaggagatcaagaccatcgatctcccaacacggtgaaaccccgtctctactaaaaaatacaaaaaaatttagctgggcattgtggcaggcacctgtagtcccagctacttgggagcctgaggcagaagaatcacttgaacccgggaggcggaggttgcagtgagcctagatcacgccactgcatttcagcctggtgacagagccagacatcatcaaaaagaaggccgatttcatgtggtttttcctggctgtcggtgagtccacagctaagaaaacactaattcagtacaacctaaagtgtaatctgctagtatcttttacagctggtggtggtaaaaatatgtgtacagcggaagaataattggacaaatttacaaaacttgtgaaaatgtaaggtggtttattcattgtgttattcatcagcaggtactttgcagaaaatatcttaatttatcatgtgttattgaactcttagcatcagtaattttacttggttttgtgaatcatcatcagttccataagtttttgtcagaaatagaagctgaatattctgatgtgccctgccgcgcagtagtttgatggcttagcagtggtagttttctttcaactttttgagctcagggctgagattgaaaattttctgaatgaggagaatcgctcccaaccactattgaatgctgaatggctttggaaattagcttttgctgcagactaggtaatgtttgttaatgaattcaacctaaaactccaaagtaaaacagtgcttatgcaaaccctatgcttcagggaagtcatgttgatgacagcaaatgtttaaatcatatgtcatgttaaactgccttgtatacttcctgtgctggcaaaagtgaaaacaaaggcaagctctccattcctacacacatgttccaaatgcaggctatagttctatcagggattttgcatctcaatgtgaacacaaaggaaatttctctaatttgaaatccactgggtgggcgtggtggcttatgcctataatcccagcactttgggaggcaaaggtgggtagatcacttgaggtcaggagttcaagaccagcctggccaagatggggaaaccccatctctaccaaaaaatacaaaaattagccaggtgtggtagcgcatgcctgtaatcccagctactcaggaggctgaggcaggggaatcgcttgagtgtgggagacagaggttgcagtgagctgagatcacgctgctgcactcctgcctgggcgacagagtgagactccatctaaaaaataaaaataaaaaatccattaat

SEQ ID NO: 20207 - DNA, 1075 bp, Homo sapiens
ctattgcgccactgcactccagcctgggtgacagagtgagactgtctcaaaaaggaaaaaaaaaaaaaaaacaagcccacatgcttgtggaatgttatcagcatttagcaatacctatgtatgtgaaaagacattttcaaagatgaaatacataaaaatctcattacaggccaggtgtggtggctcacacctgtaatcccagcactttgggaggtcaaagcaggggaggattacttgagctcaggagttcatgaccagcccgggtaacatagcgagatcttatctgtactaaaaataaaaaaaatttagctgggcatgggggcacgcgcctatagtccagctactccagaggctgaggtgggaggatcacttgagctcaggaggttaaggctgcagtgagccctgcttgagccgctgcactccagcctgggcaacagagcgagcccctgccttataaaaagaaaaatgtgtgtgtgtgtgtgtgtgtgtgtgtgtgtgtgtataatatatatgtatgtattatagaatcagaattaacaatgaacatttgtaatccattttgatgaaagggatcccccaactttgcaaattgttatcccctcaaaaagaaatctaaagtccgctgggcgtggtggctcacgcctgtaatcctagcactttgggagactgaggcgcttgaaccccaggggcagagattgcagtgagctgagatcacaccacttcactctatcctgggcaaaaaagcgagactccgtctcaaaaaaaaaaaaaaaaagaaatctaaagtctaaaatatttaccatctggtcctttacaagaagagtttgctggccgggcacaggggctcatgcctgtaatcccggcactttgggaggccgaggcgggcggatcgcaagttcaggagatcaagaccatctggctaacatggtgaaaccccgtctctactaaaaatacaaaaaaaaaaattagccaggcgtggtagcatgcacctgtagtctcagctacttgggaggctgaggcaggagaattgcttgaacctgggaggcagaggttgcggtgagtgagccaagatcgc

SEQ ID NO: 20208 - DNA, 1058 bp, Homo sapiens
tcccaggagagggatggtcctaccagtttgaggaatgggtatcccagctcagtgccaggcgtggtacctttgtgtagcaggagggcacagctttttgtctaaccagacagtaaaggagaagaacctttgcttcaaatgccaaagggaccagaagagcatcaggccatagggaggcttccagatttctgcctggggtcttcaggatgtacctggagcccagagatgaggcccttgaaatttgcagtttgcctcctgtacctcacctcatcctccttttctcttttccagttcccttcctattccacgcacatccacgaaggtactgggagctcttagaaccagacatactctgtttctaagctcatactgtttctgttccaaaaacaccttcaaattcttcatccactagtacctctcctcccctcttcccccttcctccttcctgcatcccagcctgggtcgaggatcccttttttggattgacttctgttcccttcatgcttctttctgcagtctccaagcctctggcaccatccttctcgatgacgttagatgtcctatcccaagccatttgttgcttgcatttttaggctcgagagactaaagagaactatactaactgcctgtccttctggggccaggggcaggggagcccagtctaggagaccccccaacctagacacatgtagcaaacaaaaacccagatgtaagggggtaagtgggtctggggccttccactgggtggaatgtgggagaagagatttgggagtgtcttggctgttacacatgcagggcagaggagagagaccagtgaaggttgggaggaggcggccaaaaggagacagcttcatgcccccaggacataaatagcccggctgctgcaggtactcacatgaggtgacacgactggggacagaacaggctggagcggcgggggcgggggcgggggcgggggggcgggtatcttcagaacttcagtatgagattttccccaagcacagatctaggtagtgctaggaaatgtctctgggcggaggcgggcagacaggacggtaatt

SEQ ID NO: 20209 - DNA, 1053 bp, Homo sapiens
gtagggccaggactgacccttagagctcctttgtgcaaattagaaagaggtgccttttccccttggtgagtacagtctcaccccaagacgtgttgttcagtccccactcatctcactggtgtccttgtgtagtgaatggccagcacgacgttctcagaatccctggtgctagaagttggtgctcctttctttcagtactcatttctaggtgcccgctttgtgccaggtcctgtggcaggcactgaggagacagatgacaacatgctgctcctgccctctagagggaaacttcccacccagtggacatttgtcaagcacctgctatacaccagccactgagtgcccagagacccgcccacccccactgatcccggggctgagacccttgagttgtaacatcaggggacaagacccttgtccgaggcagggaccctggatggggatgtgatttctcctggaagtatcaaagaagattcagaaaggagaggcatttgggttggacatgactggcagacggtgtcagaagtcaggagtcaggattggcataggaagcagctgaaggaagggcacaggggcttgggagaatacggacccagcgtagcatgggcgtgaagatgcagcgtgggcagtagacgaggtggtcagggtcagatagtccctcgggaggtcacatcccactcttctctgtccctagagtctgctttggatgacctggacctgaatgagtttggcgtggccgccctggagaagactttcgataacagcacagtgccccacccaggaagcatcaccatcggtactgggtgtgggtgggcagggcagcctggaggactcctcgggttcctgcctggctcaggccccttgctctgtgtggcccgcctggcttccgctgccctcacccagcccgtcctccccgggcctctcttgcaggcggcagcttgctgcagagctctgcacccgtgaacatccccggctccttgggcagctctgcctccttccactcagcatccccgtcccctcccgtcagcctctcctcgcatttcctgcagcagc

SEQ ID NO: 20210 - DNA, 1024 bp, Homo sapiens
gcgtggggtgggggaaagcgggggctggaagaacagagcagaaactcagttttgttcgctcgctctccccctgggaggactcgctttgccagtcaggaccctgggtggttactgttgttgcaggcttcaaattctctctgtgagctgcttgtagtctgtcccaggatcacctgcctcctcccagtagcctcgcctctccagggtttcaagtccaaggttctgggttctgaaatgggccccctgtccagctgcagccggctaccctatgggtgctggccagaatcccagctctaccctgtgtccctgctgtgctaggcccaggtccctttccctggccacagaggggagagtctcctgcaggttctgaaacctctgtgcagacagcatcagcctcctccttgccctcctcccagagagccaacccagcttcccaccaggcctcgcagccagagtggcccccaaaagatgatgctctctggggacaggggcagggcagggccattgtgatgagactgtatgctggccccacaggcttgtgatgcctggaagaaagaggcggaggaggctggtgagcgggccagtgcggcgggcgccgagtgcgagctggcccgggagcagcgggatgcactggaggtgcaggtgaagaagctccaggaggagctggagcggctacacgcggggcctgagccccaggccctgcccgccttctccgacctggaggcgctctcactctccaccctctactccctccagaaacaactgcgggcccacctggaacaagtggacaaggtcagcccaggtcggggagcactgggtgggatgcacggtggcctcagccagctcttggactctgacctggtccaggctgctccagggatggccaccctcctgagagcctctgcccagcactgggccagcactcaaaaggccggcctgctgggaatgggtgaggagagtgcactggggaaggtgaaaaggctgggggtgaggggtgtcggtgccacccccagcacccctgagggcg

SEQ ID NO: 20211 - DNA, 1018 bp, Homo sapiens
agtcatcaaccaagaacagcaatatgaattagcaaaattccagcaagaaaaaagactaatcttaggacactgttctctaaaccacagagattaagacaacgttggtttaaatacaagaaaatacccaaaactagctgggcatgatggctcacgcctataatcccagcactttgggaggccgaggcgggcagatcacctaaggtcgggagttcgagaccagcctgaccaacatggagaaaccccgtctctactgaaaatacaaaattagccgggcatggtggcacacgcctctaatcccagctactagggagggagaggcaggagaatcacttgaacctgggaggcggaggttgcggggagccgagatcgcgccattgcactccagcctgggcaacaagagcaaaactctgtctcaaaaaaaaaaaaaaaaatacccaaaactaaaagcaataagggaacgaaaactctaacaaatgcaaacttgcccacagccatataggatctctgtccaacttctgtttgcctcaaaccagtatagttcaagtcttcctttcttcctctctcctttcaaaaattagggcaggccgggcgtggtgactcacacctgtaatcccagcactttgggaggctgagacaggtggatcacctgaggtaaggagtttgagaccagcctggccaaaatggccaaaccccatctctactaaaaataacaaaattagccgggcatggtggcaggtgcctgtaatcccagctactcaggaggctgaggcaggagaatcccttgaacccaggaggtggaggttgcagtgagctgagatcactccactgcacttcagcctggggcacaggatgagactctgactcaaaaaaaaaaaaaaaaattagggcaaatatatatttgtgatattactttataaatgaggcagaagcattagaccaacaagaggtaagaggtatacttaacaaatccattagcctcagactatttcacatcttatgcctcctatgaacagcatga

SEQ ID NO: 20212 - DNA, 1018 bp, Homo sapiens; identical to SEQ ID NO: 20211

SEQ ID NO: 20213 - DNA, 1853 bp, Homo sapiens
gaaagccgtagttttaacaacgagccttttttcctcccccagaggcctttctttgtttggcatctgcagagacggtgaaaagcagagctccaggttgaaggatcagagtaatagatggagcccttaacatgagtaagagtgggtgcaggcagggcctgagtggtcactagaaatgagaaagcacagttggtgccatcacatacattcacctcctgctttattctgaagttcaagtatgagaatacgtgttgacatacaagccagctatggtaagaaattactcaaaattcagaatgctaattattttaatgataaaaatgagtagcgtctttgcccgtgtgatttggggccactaggtgtcattgtaaccagcgtggatcctcgttagggcatgcagggatgaaagagacatggcaaatgaattttggatcgctaggatttaggaatctttgttattggctgagctgaggatgatttaaagttatccctgtctgaaatggtatcttttgtgaggaggtctgacttgctgaggctcagctgtttaatacaaatctggagaataaaccttaaggtggtttctgttagaatgaagcctgttatccttctcttttagattaaaggtggtggctgtggccttgaaaacagtcatgtgaaaactcatcaccttaaggtgttaagtgtaaggatcttcatgatgaaatttctgtaaatggtgagatttttagtactttcatagacttgaatatgcttatggtcctctttaagtattggtttgttagttttggggatgtgttggtcttccagggttacgattgcccagataatggaagtagtatggaattccttttgatagggtccttgccaagcactctcataaagagcattttttgtttgtttgttttgagacagagttttgctcttgttgcccaggctggagtgcgatggtgcgatcttggctcagcgcaacctctgcctcctgggttcaagctagtctcctgcctcagcctcccaagtagctgggattacaggcatgcaccaccacgcctagctaattttgtgtttttagtagagacggggtttctccatgttggtcaggctggtcttgaactcccgacttaaggtgatctgtgctgggattacaggcgtgagccaccttgcctggccataaatagtatttctaatatcaaccccatatgaggtaaatttttttccccactctgctgctgagtaagtaaaagtgaggcgtaaagagttcttttgcccaaagttatacaagcagttactgagttagactggcagttctgaactggggagcgatggtgttcctggcatctggtgaatgctactattaataaataccctggctgggcctggatatttatctcatgcctgtaatcccagcactttgggaggccgaagcagatggatcacctgaggtcaggagttcgagttcgagaccagcctggccaacatggtgaaaccttgtctctactaaaaatacaaaaattagctgggtgtggtggcgggcacctgtaatcctagctacttgggagactaaggcaggagaatctcttgaacccaggaggcagaggtttgcagtgagctgagatggcaccattgtactccagtctaggcgacaagagcgaaactctgtaaataaataaataaataaatatcctacaatgcatacaacagcctgcatgaggaataattgatccacccagtatgtcagtagagctgaggttgagaaactcctgtataccacacgttaggctaactagagatctgagctctagtctcagcctattttctcaccagagtcttgtttcttcatttgtgaaacagggttagtg

SEQ ID NO: 20214 - DNA, 2024 bp, Homo sapiens
gcaaatctctaatcctctgtcttaaaaaactgaaagcctggagggcacggtggctgacacctgtaatcccagcacttggggaggccgaggcaggtggatcatctgaggtcgggagttcgagaccagcctgaccaacatggagaaactccgtctctactaaaaatacaaaattagcctggcgtggtggcgcatgcttgtaatcccaacttacttgggagtctgaggcaggagaatcacttgaacccgggaggtggaggttgcagtgagccgagatcgcgtcattgcactccagcctgggcaacaagagtgaaactacttttcaaaaaaagaaagtcacatgcttgctccacaaagaatttgcgtgagggaagtgaacaatttgatgagaaaaaaatagtttgcgtgtgctgtggctgttagtgctatggtccagcaggttggtgggagctgagtccatgatgatttcaagttatccctgtctgaaggcaaagaaaggcctttctgtgtggaatttgaatatctgaaactcagtttcccaagtttgccttacagaaattttaagttacttgagagttactctgtgtgtatcttcttaagtagttttttttcttaatttctcttcccaggtgcagtcagcctcagtttccaaagccggaaaaggatcctctagtagccacggtgtggcagctgctctgaaccaggacctggacccggacccaaagtgccatgtctttaatgtgagtaagtagacgaactggtaaacaggcttggtttggtttgggggagtggtaatcttttttgcttcccctgctctggacttaaagcaatgggggcagggagactttagtagcattttgttgctaggtgtctgcaataagagacgaaactgaactgctttgccggaaacaagtgaaatgattgctttcctgtttgtaagatttgtttacatctttcgtatccgtaagaagtcccacaagcctatgatggttagttatccctgtctgaaaatctggactgagggaaataatctattctgaggcttaagggtttggctccatggttttttttttgtttttgttttttttcccctttttttttccctcagcatatcctgctgagagcccagtctagagcatcattcctctaaaacgtgaaaagcaaatgagtgattgtcctgctttctctagtcctttgattatggctctgaggatacaggctgtatgaggtggcaggaatgcacaagtacccaggatttgatttatgcccttattgtggaatgaaagtgcttgttacatatttcaagaaaatgaatgcgctcttagaaacagattggaatgtaggatgtatgccagcttgtggcaatgagaatgcttaatgactctgaccttgcctctgctccagggtcctgacatttaggggaaaccacggctgtttggtttctatgtgctttgttaaggacgccagggaggtctcctaagtttgtagcttagatcctgtctgaatgtcacgactggcatgtgagcaagaaagaaaccaagtggtgctggagagtggggtgcccagctttgttcccactggaatgccaggcttgaagtgcacacagattgcctttcttttctgttgaaaggggaggtgtgggccgggcgcggtggctcacgcctgtaatcccagcactttgggaggccgaggcgggtggatcatgaggtcaggagatcgagaccatcctggctaacaaggtgaaaccccgtctctactaaaaatacaaaaaaattagccgggcgcggtggcgggcgcctgtagtcccagctactcgggaggctgaggcaggagaatggcgtgaacccgggaagcggagcttgcagtgagccgagattgcgccactgcagtccgcagtcctgcctgggtgacagagcgagactccgtctcaaaaaaaaaaaaaaaaaaaagaaaggggaggtgtgtgcaaactctttgtatttaaggttgtgtttttgctggacaccaaagaagctgtattctgggtg

SEQ ID NO: 20215 - DNA, 1070 bp, Homo sapiens
tcctatattgaacagacctcgatgaaaatcttgaattcaccccagtgccctctgttggcaagggaaggtgaagattgaaaagttaaaaaagcttttggccacttgagaggatcagggccgcaactcttgaagaagcaaagggctcagtgcattggggtcagcgctggtacagctgaaggatgccggccttgtgcaggtccctccacagggcagcttccagggacagatcgtggtttgcataaaatatcaatggcttcatttttcgttcgaaatagtggtcggaaaatttccagtagttgcttgtgatgaatccataggcactgacctgggcaaggatagtcgctggattagtatttgttgagcgtctagtgtgtacagacacttgggtgaagtgacatgagtttagaaaggtgtccgtctgctgaggtgaggataatggtctagggcttattcccacttagcaagtggggagatggattcaggggtgactcactgtgtccccacttggcatagctggtgattgccagagctggatttggaactcaagggtggaggcaaaagcccattactactctctccatcctaactggggactgcagtcaagacactcctgcatcagaataggaaaaggccctgtgtggtggctcacgcctgtaatcccaacactgggaagctgaggtgggaggatcacttgagcttggaagtttgagaccagcctgggcaacatggtaagaccctgtctctacaaaaagtaaaaaaaaaaaaaaagagctgggcgtggcagtacatgcctgtgatcccagctacccagctacttgggaagctgaggcaggaggatcatcacaccactgcacttaagcctgggtgacagagttgagaccctgtctcaaaaaagagggaaaagatttaggtgtgagtcgtggagaggcatttggcccccagctctccataccagctttagcatgggtcacggcctctccttgaaagctgctgcttggcccctgcctccatgagcttcacgtgggtcatatcccatcaggaatgactcttaacggtgatttcaaagtagt

SEQ ID NO: 20216 - DNA, 1022 bp, Homo sapiens
aagaggacatagttggaggctgttagtctgtttttacattgctataaatacctgacagtggataatttataaagaaaagaggtttaattggctcattgttctgcaggctgtacaggaagcatggtgcccacatctgcttggcttctggtgaggcctcagggagctcttattcatggcggaaggtgaagtgggagcaggcatgtcacttggagagagagcaatagagagaagggagaggtcccagactcttaaacaaccagaccttgcatgaactaactgagcaaaactcacttatcaccaaggggatgttgctgagccattcatgaaggatctaccccatgatcgaatcaccccccatcaggccccacatctaacattaggaatcatgtttcaacatgaggtttggaggggacacacatccaaaccatatcagaggccgtagagtttggaagcctgaacttgcacttggggtttttggtctaagctggaaggagtcaagaaaaaggatggggctgggcgcggtgactcacacctgtaatcccagcactttgggaggctgaggtgggcagatcacttgaggtcaggagttcaagaccagcctggttaagatggtggaactccgtctctactaaaaatacaaaaattagccaggcgtggtggtgcacacctgtgatcccagctactcaggaggctgaggcaggagaattgcttgaacacaggaggcagaggttgcagcgagccaagatcacactattgcactccagcctgggtggcaagagcaagactccatctcaaaaaaaaaaaaaaaaaaaaagagagacagagatgggaactatgattttttaaataattttttttttactttttttttttttttgagacggagtctctgctcactacaacctttgcttcccaggctcaagaaattctcccgcctcagcctcctgagtagcttggattacatgtgcccgccaccatgcccagctaatttttgtatttttagtagagacggggtttcacca

SEQ ID NO: 20217 - DNA, 1036 bp, Homo sapiens
tggaagagtcaggacacattccagggtagggggagaggacacggtacccttgaaatttgtttattttgatgactgaaggaagacaggatttatattctcagggcaaaaagttcaaacattagagataaagctaaagccttttccttctctccctccttccctcctttcttttcttttctttcttctttctttttcttctttttgagacagggtcttattctgtttcccaagctggagtgcagtagtgcaaacagggctcactgcagcctcaacctcctgggctcaagggattctcgcacctcagccccctgagtagctgagactataggtgtgcaccaccacacctggctaatttttaaatttttctttaatttttactttatttatttatttatttatttattcgtatagagataaggtcttgctatgttacccaggctgtttttgagctcctgagctcaagtgatactcccatctcagcctcccaaagtgctgggattacaggcatgagctactgaatctggccttctgatttttctgtagagacgagtctcaccatgttgctgaggctggtctcaaactcatggattcaatcaatcctcccacttttgttgcggtaaactgaggaacggagagaccaatatggcctcccaaagtttaaagtctttctttactatcacacttgtctttaagggcggaggggagagcctttcttggcaaccatttcaaccccactgttagtagtatgttatatacccctctctatagaactctctaggtaatatttatgagggtgtaacataaatgagatcatattacaccactgctgtgcaattgcttgttttacttaaccatgtgtcttttttctttttcttttcttttctttttttttttttgagacagagtcttgctctgtcgcccaggctggggtgcagtggcacgatctcagctcactgcaacctccgtctcctgggttcaagagattctcctgcctcagcctcctgagtagctggacttacaggcacccgccaccaca

SEQ ID NO: 20218 - DNA, 1032 bp, Homo sapiens
ccatctgggcccccacctttttttcatgccaatactccaagttcacgccccttttttgctcagccgtcagccccgtctccgtctgaagagtgcttctgccctcatttgcctctccctgtgaccccggccccctcagactccgctgcgtcgtctctcggccccgtccagccgttcctgactgctcttcgccggagtccgcttcccaaccccctttcgccagagcccgagagctccgtcggctctgcgtcctggcggtggggactccccgcggagcgcttgcgcgtgccaggccacccgggactacgtttcccagcgggccgagcggccggcgccgcggctgcggtcaggtgacccggtcgcctggccgcagtgagtcaggctgggagggcggggccgcgccggctgctgcggctggcacttggccctttaatccccttcgtgggcccctcaacctggagcggataaattcttggcgcttctccgggggttgtgctcttccgtactcggatcgcttcttaggagtatcctaactgccggtggggagaacttcgccctaaacctggggttccgatccaggaactggaagttgacagcttggctgcctggctcctgcatctgccttctccactcaccatctcatttctttctccaggattgtcagtggcttcgccccgaggagagctgactgccctgggctgctgcctccggcagagctgagccaaaatgtccccggaatctaaaaagcttttcaacatcattattttaggagttgcctttatgtttatgttcactgcctttcaaacttgtggaaatgtggcggtgagttggaatctgtcctccctcctttgaagtgcccatcataatgcagtccagaaatgaaaataaacgttcattatatctaatagcgcgctttaattgcatctttcatttttcccacccagacttcctcattttttatgattaggtttgatttcttgtgtcagacatttctcatgggggcgttaagcattatcgtttaatctgatttgatta

SEQ ID NO: 20219 - DNA, 1047 bp, Homo sapiens
ctcccatgggtgtttgtttgtgtgtgtggatgtcccgctcttttattgcaagtttcatattgtctatatttagatttggcttagaccttgagcaacgtttattgaaccacaggtgtttttctctgtgagtatgaaaacattctcccctcccctcccgagttttcccataccccaacttgaacgcctttaaaccagggcttcggctgcccacacaggatttctttcctctaggagtttttgttggttggttggtttgttgtttgttgacttatagtaagtcccttgggggtcttttgttttttgagacggagttttgctcttgatgcccaggctggagtgcaatggcacagtcttggctcactgcaacctctgcctcccaggtacaagcggttctcctgcctcagcctcccgagtagctgggattacagatgcctgccaccacgcccagcctatttattttttgtatttttagtagagacgggatttcaccatgttggccagactggtctcgaactcctgagctcaggtgatctgcctgccttggcctcccaaaatgctgggattacaggcatgagcccccactcctgacccccttgggagtttttaagttctccaagtacaaataagtccccattaatagtcattttttttggatcttcacacccattgggatggctgctacccagaaaaaaaaaaaaagaaaaaaggaaggtgttggcaaggatgtggagaaattgaaacccttgtgcactgtgtgtggaaatgtacaatggtgaagctgctgggaaaacagtatggcagttcctcaaaaactagaaataccatgtgatccaataatttcacttgtgggtatatacataaaagagttaaaagcagacttgaagcaatatttgtacacccatattcatagctgcattattcacaatagccaaaaagtcaaaacaactcaagttattcatccatagaagaatggataaacaggccaggcacagtggctcaagcctgtaatcccagcactttgggaggctgaggcaggcagatcatgag

SEQ ID NO: 20220 - DNA, 1035 bp, Homo sapiens
agtgggaccagtagtgcagcaggcagggtgccaggcctaaggcgctccagggaacacagcgtcaccccaaaagccacgctgtgggctcagcaccactggggtgctgcgtctgcaggaacgagctgctgaccaggctctgtggtcagtcaggcctgagtgctctggccacggcaccgctatggtgtcccagctgtgagacaccttatgggatgaaacattccttttttcatctcagtcctttggggaagggactactccagcccgagctatgagcgacagcccaccagggctgcccagtgaggccacgcaggctgtgcgctgcacgactccacgacagacaccctttaggcggccacaataccagtggtgtcctgtggagttgtagaaagcagtggccaggcaggtcatctgatgtcctccagtttttttagctgaaatgatggaaatctcttcatctactctgtgctacaagcactggttgcaagctcggtattgaatttggatgatgggcttgggcagacatctctgaaacgagagtgatctgaaaaagtaaaccgttgcccccgcctctgggaagctgaaagagagagggagctatctatatcctgttttctcccactcctttggagaaggactactccagcccaagttatgagcgatggctcaccagggctgcccagattaaccgattgagtgtgtgagtgcgtggggagggcctgagaggctggagagacctgagttagtgtcatctaacgctagtatgaaatttcccggtcccagctgagtttttgaaaatccactctgttttccgtagagggacttgtggggaggtcctttgctgcttcagctcttggggtggggaggaaatatgcccattttctccaatacccgaccccctccgtgagccttcctgggcatctctgcctctctctcctccttttcttctgcccgccacatcccccctgctcccattcatgcctgttcttcagagccaggagccctgtgtctttaaggaaatcgcagcttctcctgttt

SEQ ID NO: 20221 - DNA, 1073 bp, Homo sapiens
aataacgaagctactgatcaggggaagcccctgtatcctacatcaggcctgttacatgattattggatttaatcactctcccagctgtactggttaggattagatctggctgtcgcagggaaaccccaaaataatcgtgatttaaacaagatggaagtatattttctttcctgcttgcaaatttcagaggtcgggagggctggtgtggcgttccccggggtcttcttaccttgacccatcgtgtttagtttccaccttggccttgcctcatggttcaagatggctacaggtattagagtcattatatctgcatcccagccaacaaggagaaggaaggagcagagcgggacaccacgtttcccacactgctcatcagctccatcttggccacagggccatgcccacttccaggggatgctgggtggcattatttccaggcagctcagctcaatgtgcccagccctgttctgggttctatgactgaggaaggaggagagaaggaggactcagggggatctcaccatctgggttgtgtccacccaagacgctactgttcactgagagcttgctatgtgccaggcattgtgctaagggctcacgtgcatctcttatttaaccttcacacaatgaggtaggtgctgcatgtgatcctgcccactctataaatgaggacaccagggcacagtgggttagaaggtgacccatagctagtaagcgccgagctgatgttccagcctacatcaatctaagtccagagccaggggtgcttggccctgaccccacagcctgttcagcattatgaagccttggagaatggcagagagaaggcttgaaagcaggaatcaaggtccaagacctctgctgagatgtcagaggtcactgtggggtgtggagcggggagctgggagatgaggctccccatgccgattgccacagctgcagggaagcccgggaagctgtgggcactgggtgctggagaagagggcagagtcggagggtcgtggaacacacagggtctacttttatcagaaaatgctgttaagaaactggcccaagagaatgagaggttatga

SEQ ID NO: 20222 - DNA, 1062 bp, Homo sapiens
ccgtttaaccttatttcataattatgcacacttcccagcttgaacttgaacatttgtttctgtcttgttcccgttggcccggacacacagtgctgtttcctgccccctcttttcttttttcttttcagacttctttgcctcagatgtttgccattccccatctgtctctccagatcttacccatcttgtccttccacacgtccccgatgcctctgaagatgccattcatgtttctctcccttccccgggacacattcttaatgttggagttggtgttaggtactttcacttgcaatgggagtttctttattcacaaagcctcttgagtgttgctctcatactattttgtgtgtccttccagggcagtgaccttgacagttatttgtcttgttctcccaagcgcgggtgctaaggacatagtctgtgggcatgcagatgtgtgtgacttgttcacacgaactgtgaggatgaggacttggtgaatggtggaaattcagatccaaactgtatctccagggcatgatggcgcctgtctgtagtgcagttacttgagaacttgggagggtgagttgggaggatttcttgaggttccaggagttcgagaccaacttgggcaacatagcaagatcctgtctctataaaaaaataaaattaaaataaatggtcatggtggtgtgtgcctatagtcctagcttctcaggaggctgaagagagaggatcctttgagcccaggagttcaaggctgcagtgagctatgatcacaccactgtactccagcctgggttacagagcaagaccctgtttcaaaaataaataaggaaataaaatgcatctctaattctgttttcagacaagagatttatgttttctacatggaacagaagtaacatgctatggtctttcagttaaccagtgggtcacctgggagcaaagcccttttgtgataaagttggctgatttgtgttttttttttttttttttaattttcgtaaacgttgcaaaaccttgttggtaaacactctcctggcagtttaagtggtgtgcttttccaggttgaataac

SEQ ID NO: 20223 - DNA, 1035 bp, Homo sapiens
gaagcaaccagactatttcccactccgaccttgcctttgggcttaagaaactgtcaccaggacccagttttgacagtgacaaatcatcatgagcccttactgagtctctttgcactgtccccagccactttatgtccgattagagacacgagggagagaaaaacctgctgcctgccctctctgagctgagaaccagtgaggggcaagaggccggtgcaactcctgaaggagagaacggggtgcagagagaagggggacccttccagctccatctgcagagccatctcgtttccgttgggtgaatgttcagtcccaagttgaaagttaagtccttgtctggctgccaagccctgcctgtcctttccactttgccagggcggtgtattagtctgctctcgcattgctataaagaaatacctgagcctgggtaatttataaagaaaacgggtttcattggctcacggttctgcaggctactggaagcatggcggcatctgtttctggggaggcctcggggagctttcactcatgtggaaggtagagcgggaacaggcttctgatatggcaggagcaggagcaagacacagccaggggaaggttgccacacacttttttttttttgagatggagtcttgttctgtcacccagactggagtgcagtggtgcaatctcggctcactgcaacctccgcctcctgggtttaagcaactctcctgcctcagcctcccgagtagctgggactacaggtgggtgccaccacacccggctaatttttttgtatttttagtagagaacgggatttcaccatattagccatgatggtctcgatctcctgacctcgtgatctgcccgcctcagcctctcaaagtgctgggattacaggcgtgagccaccgcatccagcctgccacacactttttaacaaccagatcttttggtaactcactcactatacagtaccaagggaggatggtgcattagtccatcctcattctgctaataaggacatacccaagactgggtaacttataaacag

SEQ ID NO: 20224 - DNA, 1024 bp, Homo sapiens
ctcccaggttcaagtgattctcctgcctcagcctcctgagtggctgggattgtaggaacgtgccactgcgcccagctaatttttatatttttactagagatggggtttcaccatgttggtcaggctgatctcgaactcctgacctcgtgatctgcctgccttggcctcccaaagtgctgtgattacaggcatgagccaccacgcccagcctgcctcatttgttaaatgggacagtgctatgttgttgtaaaggttaaacgagttcatatttgaaaaagctgagaaatgcctgctctgtaacctgttagctgctgtcatgatcatgattgtcattgacaggaggatggagaaggctggggttacgccattgctaggacgttccagaagcctccatgatcttcccttactgtggtcagagcatggtgcagggtctctcccccagcccctcagcactggagccagctgcactgtacccgccctggctctctaggttctgagttttgggactccctttgcatactaggtcacatggaacttgccgtcattcccaggctcccctggaaactctctgtgggtggcagcggcaggaggacttacccgaggccgatgagccacagaagcgggactgaggttgcgtcacacccctactggcacctgggaattactctggagattctttttttattttttatttttttgagatggagtcttgctctgttgcccaggctggagtgcagtggcacgatctcggttcactgcaacctctgcctcccaggttcaagcaattctcatgcctcagcctcctgagtagctgggattacaggcatgtgccaccgtgcccagctaatttttgtattttttagtagagatggggttttaccatactggccaggctggtctcgaactccggacctcaggtgatccacccgcctcagcctcccaaagtgctgggatcacaggcatgagccaccgtgcccagccactctggagtttctctgtggctttcaggagattcctgaagggg

SEQ ID NO: 20225 - DNA, 1050 bp, Homo sapiens
ggtgtccatttccttgagtttctctgttatcttcattacttccttccttgtacttgcttcagcgcattagtcagggcccagtcaggaaacaaaaaccacaccggcaatttgaatagcaacttgtaatataaagtgttcttaactgtaagaggtagttaactattaaagggatcacaaaggggtgacattgtgatataagaaagatgtatttgggctgggctcggtgcagtggctcatgtttgtaatcccagcactttgggaggctgaggcaggcggatcccttgagctcaggagtttgagaccagcctgggcaacatggtgaaacctcatgtctaccaaaaatacaaaaaattatcctggcgtggcggtgtgtgcctgcggttccagctacttgggaggttgaggtgagaggatagtttgagcccgggaaggcagacgttgtggtgagccgagattgcactactgcactccagcctggatgacagagggagactctgtctcaaaaatcaatgtatctgtctgtctgtctgtctatctatctatctatctatctatctatctatctatctagtctctgtcccccaactttgtttggcatgtagctcctaaaactcttgaaatctccaaagtgatgggtgtctttttgtttgctaaggaggcgactggtggctggaggctcctggacagcctggggataagggctggttgccaggggacccagccttgtgattagaaggctagaacttgcagcctttcccatccacctcctgcgaggcaagaggggatgaaggttgagttgatcatcaatggccaaagatttcatgtcatgcttatgtagtgaagcctccctgaaaacccaaaaggatgaggtttgtagagtttcaggttgttgaatacctgcaggtgctgggagggcagtgtaccctcccgtggaagctccatgccgcttccttcatacctttcttatgcatctcttccagttggctgttcatttgtatcctttgaaatatcatttgtaataagtcagcaattttaagtaaactgatttcc

SEQ ID NO: 20226 - DNA, 1045 bp, Homo sapiens
accaaaacttaaaacttttgtgcatcaaggaatactaccaatggcgtgaaaaggaaatccacagaatggaagaaagtatttgaaaatcgtatatccgataaaggactagtatccagaatatataaagaactcctacaactaagccacaaaacaaaaaaaaacaacccagtgaacagacatttttccacagaagacataccaatggccaagaagcacaggaagagatgcgcagtgtcactaatcatcagggaaatgaaaatcaaagccacaataaaatatgatttcacaccctttaaggtggctgttagccaaaacatggataacagcaagtgttggcaaggatatggagaaattggagccccgtgcactgctggtgggaatgtaaaatggtgcagctgctgtggaaaagatataacaattgctcaaaaaattaaactcagaatgaccataacatccagtgattccacttctagatgtatactccaaagaactgacagcagggacttgaacaggtgtgctacattcttgtttgtagcagcacttttcccataaccaaaagatgcaggcaacccaggtgtccaccagcggatgaatgaacagacaaaatgtggtccatctgtacagtggaatattattctgccttaaaaaggaaggagaggccaggtgtggtggctcacgcctgtaatcccagcgctttggaaggccgaggtgggcagatcacttgaggtcaggagtttgagactagcctggccagcatggcgaaaccctgtctctgctaaaaatacaaaaattagccaggcatgggggcatgtgcctgtaatcccagctactagggaggctgaggcaggagaatcgcttgaactagggaggtggaggttgcagtgagccgagaccatgccactgcactccagcttgggcgacagagcaagactgcctcaaaaaaaaaaaaaaaaaaaaaaaaaaaggagattctgacacatgctatagcatagatgagccttgaagacatgctaagtgacagaagccagacatgaaaagacaaata

SEQ ID NO: 20227 - DNA, 1068 bp, Homo sapiens
tttcattatcatttcatttgaaatattgtaaaatttttcttgtgatttcctctttgactcatgggttatttagaagtatgttgtttaatttgcaaatagtcaaggctcctctgagtatcttagagctattgatttctaatttaatcttactttggccagacaagcatattttgcatgcttttaaaatttgagacttatggcccagaatgtgtatcttggtgaatgcactgttttcacttgagaaaaaaatatgtatatatattctagacttcctgagtatagagctttataactgctgattaggtcaattgctagttaccagtgttcttcagattatctgatgcttgtttctcagatgttgagagaatggtgtttgctatggcctacctgtttgtgtcccccaaaattcatatgttggagcttaatctctggtgcagtggtgttgggaattggggcatcagggaagtattggctcatgagggcagagtcatcgtgaatgggattagtcccttctgccatgtggggacacagcaggaaaaggacatctctgaagcagggagctagctctcaccagacactgagcaccctgattttggacttcccagcctctagaactgtgagcactacaatctgtttataaattacccagcctaaggcattttgttttaacatcctgaatgaactgaggtggtgttaaaatctccaactatgcatccaggcgcagtggctcacacctgtaatcccagcacttcaggaggccaaggcgggtggatcacctgaggtcaggagtttgagaccagcctggacaacatggtgaaaccttgtctctactaaaaatacaaaaattagctgggcgtggtggcaggctcctgtaatcccagctactcgggaggctgaggcaggagaatcgcttgaacccaggaggtggaggttgcagtgagccgagattgcaccattgtactccagcctgggcaacaagagtgaaactccgtctcaaaaaaaaaaaaaaagagtctccacctatgattgtggaattgcccatttctccctttaattctttcaggtttt

SEQ ID NO: 20228 - DNA, 1032 bp, Homo sapiens
gctcttcgcatacttggtccgcaccgggccgtgtgttccaggggcagaacagggaggaatctcagcacagacagcagggctgccagtacagcgttgagtatagggttaatcaaagcacagggctccctggaaccacccaacacagagcagtgaagaggtggctttggggaaagtggggtcagagctgagcctgagtggggggtggggagggcgggcatcagcctgcaagggagggacacctactgggccccagaagttcctggtggggatcagggactgtgaagttggggagagggtgaccactgtgatttagggaggaagggccccatagacagcccagcttctggccccgtgtttacaggacaccccacataggctctgagcctatccctggactgtggactccctgaggcagggtgtgcaggttcgtccagtaccaggtgtaaggcagggggccttggtaagcgtcgagggactcactggtgtctgatgaagcagtgagtttggatcgtgtcatgcctcgggtcctgagcctgcaggatttttctgtggggctgtgtgcttctgcttctggaggtgtccagaaggcactgacgttcctgccgggatgccttactcggaaggtcccgctgctcccacctcctcccattttcctgagctgcttgcagagggcacccaggtccccttttactttgggattgggtctctttctctttccccttctaagaacaagtaccctccttctccgaactgtccctggagcctctcagacctaggtctagagtgggaagtcccgcatgtgctgggggaacaggaatcaatgcgggaggattggccaggcccggtgtgtctccttcgtggtgggacggggtggggccagagaacagagcctggctccagagcccaggaagagaacccctcccctcgccggcctgccaagcaccgtgcagtggtgagaggaaaggagggctggtccgggaatgcagcgggtgccgagcagctgtggaataccttaaatagagcgcagctgcg

SEQ ID NO: 20229 - DNA, 1035 bp, Homo sapiens
ctggtgattgtggtggtgaagggggtgatggtggtgattgtgatggtggtgaagggggtgatggtggtgattgtgatggtggtgaagggggtgatggtggtgattgtggtggtggtaatggtgatggtggtaaaggggtgatggtggtgattgtggtgatgtgggtggtggtggtgatgtgggtggtggtggtgattgtgatgggggtgatgatggtaatgtgggtgatggtgattgtggtggtggtggtgatggtgatgattgtgatggtggtgaagggggtgatggtggtgattgtgatggtggtgattgtgatggtgatgtgggtgatggtggtgttgatgggggtgatgatgttagtagtggtggtgatagtgatggggatgatggtggtgttgatggtgatagtggtgggatggtagtggtgatgtggttgatgatggtgctggtgctgatgattgtgatgacagtggtggtggtgatgagggtgacggaagtggtgatgatggcgggagtgatgggatgatggtaatagcagtgatggtattgtgatgatggtgctgatggggatggtggtgatgataagggtgatgatgatggtgatgataataataaaagtaacaataataaagggatacaccttgcagtatcccagttggcatctcctagatctaaggtgtcgtggctggaacattgacataactcctgacctgaggttggccaggacacagacctggtggacagagagagatggacgaggagtgtccgtccttgggctactaaacagttcaggccagggattcccagcaccagcctctgtcctcccaggagcccacacttttcctagaaaggtgttatcaaagtcagaacatcagtgtaatttagggtgttttttgtgttgtgtttttttgagacagggtctcattgttgcccaggctggagtgcagtggcatggtcttgactcactgcagcctccacatcctgggttcaagtgattctcgtgcctcaggcatgtgccaccatacctggctaatt

SEQ ID NO: 20230 - DNA, 1023 bp, Homo sapiens
ccctcccagccaaagccccacagcaagacggctgctgagccaacgacagcccttctgtgtggacatgtaggggtgtggttgggaccccagaactcatggacgagggtgcttggagctggccctggcccgcctggcctgtgcagtggtgtcacctgtgtctgggacacacccgtgtccttcctctgccccacactcacagcgtggccgactcggcccggggccctgtccttgccagcagggacccccgtgagccccgagccagcacctgagagtgtcgacacctgcttgggggtgggtgcccccccactgccccgctcccccagatgagcctcacgcacatccctctgcttcagcctcaggcccctggacatcgagtttatgaaacgcctgagcaaggtggtcaacatcgtccctgtcatcgccaaggcggacacactcaccctggaggagagggtccacttcaaacagcgggtagggttccatctctacttgccccagcccttctgtgcaacctggagacgctgcaggcctggcaggggccaccccgtctaaaggagtcacactgtcagggagaccgaaccgctggtcactctccccagcgggtggctggcctggtggtccctggcccaggtggctgctgggggccgtccctgagatggcctctccagctcccccatatctcaaaagcagctttgtgggagtgccaattctccagcagagtctctgaggggggttttggagaagacctggaccaggcagatggtgaatctctcttccagggagtgaggccgagcaggggccgtgcgacatggcccaccttgttttatgccccccctttttttttttgagaaagggtctggctcagttgccaaggttgcaatgtagtggcacaatcatggctcactgcagcctccacctcccaggctcagtccccgagtagctggaattacagacgcacaccaccatgtctggctaatttttgtatttttagtagagacgaggttttgccatgttgcccaggct

SEQ ID NO: 20231 - DNA, 1093 bp, Homo sapiens
aggcctggctaatttttgtatttttaacagagacgagatttcatcatgttggccaggctggtctcgaactcctgacctcgtgatccacccacctcagcctcccaaagtgctgggattgcagacgtgagccgtggtgcccagcgtctacgccccattttcgtaagataatggggataacaaaggaatcacaagagacacttgcaggtgtgtgaagacgaagttcatcacatgggagggcaccgggtgtctttatttgccttccctgcccggctccccacctccagtgatgccgttcactgccctccttgttaaaaggccttctgttatataacagttacacatgccaggcaccgcgtgttcatataggagttacgaagcacagcaataaaatgaccactctgagatggccaccagctcgagcccgagggcacttgtgggtgcccgtggtctcctgcccagtctccctgagaagtggccactgtcccgagcttgggcttgtatgtattgtgtgaagtgcacatgtccctgagcaatgtttagcattgctgattcttgagcttgtgaatggtcgtccacagtacgtagcccctgtgtgtgtccctgtgtgtgtgtgctctgagcgcacacaaggtggatggggccgtgggggtaacaccctgtgggccacaggttttctttaaaatcccagctccgattcctgcttcatcccattcccagcagcccagccccctgcctgtcttcaggcccctgctgggacgtcctgctctccctggtcaccccagtggtgcgggggcccactgccctggcttctccactgtggcttccttccatgctcctatttggcctggtcactgtgccatctcccattagccaggaactttctggagagcaggagctgagctgtccaggagcaggagctggtgctggtcactccagtatcccccagactgagggcagtgccaggtgtcctatactcagctgcagagcaggtggttcccctgccctcctgcccatggggctgccctcagactctgcttttggcaccagcatttctgggcagggggagagaggtggggtccgggcagagtttctc

SEQ ID NO: 20232 - DNA, 1047 bp, Homo sapiens
gcctctcaggttcaagcgattctcctccctcagcctcctgagtaggcgggattacaggtgcctgccaccacgcccagctaattttttgtatttttagcagagatggggtttcaccatgttggccaggctggtctcaaactcctgacctcgtgattcgcccacctcggcctcccaaagcactgggattacaggcgtcagccaccgcgcctggctgagatgtagtgggttgttgttgttgtttgagacgtagtcttgttctgtcgcccagactagagtgcggtagcgtgatgtcagctcactgcaacctccgcctcccgggttcaagcgactcttctgcctcagcctcccaagtaactgggactacaggcgcccgccaccacacccagctaatttttgtatttttagtagagacagggtttcaccatgttggccaggatggtctcttatctcctgacctcaggtgatccgcccacctcggcctcccaaagtgctgggattacaggcgtgagccaccgtgcccggcccgagatgtagttatttaaatagcttatgcacatgcctatttagccttggatggcagaattttgattgggtagatcttaagtcttcagaaaatggtttgttctctttaacttgtgattttccaactaaatcttaaattagtgaacgtgagtttaaaaattcagcctttaggaacactcacaaaagttctcattagtttctcttactttttatttgtctttcccacaacctttcccccctgttttcccacttgccctcctgaaactgcacttgagagttgggagtagagagagacctggtttgaggcaacagggtgaacacagcgttctttcattctgtgtactgttgtgacgctaagcctgttagcgttgagataccagcccacagctggtgaaaggattccagacttcatactggcagtttattgagtgcctaccatgtgccaagtacagagcacttaatatgttatttcatttattctccttaataagaggagaacactgaggcactctgaagaagccaggt

SEQ ID NO: 20233 - DNA, 1006 bp, Homo sapiens
caaaacaaattaataaactttcttaaaatactatgagatttgtgtgtgtgtgtgtgtatgtgtgtgtttaagctcatcagttattaatgttagtgtattttatgtgtggcccaagacaattcttcttcttccaaggtggcccagggaagtcaaaagattggacacccctggtatagataaaagcaggtaattggcctagcctgggcgacacagcaagacccttgtcttttaaaacatgaaaaaattagctgagcatggtggcacatacctgtagtcctagctactcaggaggctgaggtgggaggatcacttgagctgtggagttcaaggttacagtgagctacgatcctgccactacactttggcatgggtgatagaccttgtctcagaaaaaaaaagaaagaaaagaaaaaagtaggtggggggtataaaattcttgttttagtaacacgggcaatgtaaagatgttataattttagtaaagatatatgaaataagcctcacatatccatattgtaaaatgtctatctgagacccaagtctctggaatttgttatctaaattaatctattagtggtatcattaacacatgcattagttacaggtgtcttgtaataacatttatttcacaccttgggtgataaagtgcttgaattggtttctgtctttgccagatcaaattctaaatttcctaaaatagctaacatgaaaccagtctcctttatgaacccttctctgacttctctcatgataaactttctcttctctattcattcctttggtcatctcattcagtcctgtgacattaaataccacatacgcactgaagacaccaacctagactgctccccagactcaatatttccatatccagttgcctgttccacatcttgatggctttttaatgggcatttccactgaacagatccagaactgcacccctgttcttgccccaaaataacctcaggaggttattttgtcttcactgatgaattctgtcaaacat

SEQ ID NO: 20234 - DNA, 1029 bp, Homo sapiens
gggtaaaatctggtcttttgaaaatatgaaatagcattgtgattatgaggctttgggacatcatgtaagagtaaaggttcaacaacagaagtggaaactaatttacagttgccatcttttactcttgccacataagacttgaataaaaagtaccatgatatacttttatcattactttataaagtaaaggactttctcatgcaaagaagtggaaaggataccatcttataggagaatcctataaattgaataaatgcatctttatgaaaaatgtaggtcgtctttatttttctcattccatggtgttataaaactttctcaactgatcatggtctttagagtgagttgtcaactctgggctagatttctaggaatgccacttattagctaggtgactttgggtttaatttttattttctctgagcctttgtttgctcagctagaagaaatgaataataatatatactattacaggattattgtaagaattaaatgagatagtatgtaagtttctcacattgtaggctcatgttatcttccttatattcagccctgcgtagtctgtttctcactatcacacatttgctctttaattacatatttgtgtatacgtttctgtaatttcaaagaagtgagtcaaatttaaccctatcatagacatgactatagtaatcattttggtatgttttataaggtgggtgagggaggttgttttgccctgaaaacatctacaaatgctagcatataaaattgagcaaaagatgtgggatagagattgaattcatattctttgtgaagactattaggatttgttcttgtgatgatcagattgtcagttcagtttactgtatttcacacacagtagccccagttagggttccagaaatgcttataaatttgtctcctgtggtattatcttaatgtggtgttggattcttcatcgctgaagtcagctattcaggtaaaactttatttggtaagatcagatacctaagcaatatatagtcactaagtcacttcatatataaa

SEQ ID NO: 20235 - DNA, 1948 bp, Homo sapiens
agcctcagcctatctccacagttttgtgcatgcaagattaacattcagtcaaaaactaagcatataaaaagaggcaggcgataaggttacccacaggagatctagatattagggttatcagacatggaccttaaggtaatgttgataaatatgtttagtaaattaagtgacaaatggaggatttcagaaagaactggacactattaaaaaagttaaatggaaattctggaattgaaaagtgcaatatagggtgacaatagtttacaataatcttttgtatattttaaaatagctagaagagaagaatttgaattttttaacataaagacatttaaggtgatggatatcccaattacactgatttgatccttacaaatcatatgaatgtactaaattatcacatgaatcctgaaagtatgtgtatctgttatgcatcaattaaaaattaaaaagaacttttaaaagtgcagcaactcaaattaggaattaaacaggagggtttaatagtattcttagctgaagaaaaaattagtaaactagaagatagatcagaagacaatatccataccaaagcacagagagacaaaaggatggaaaatgaaaagaaaaagaaaaatatgtaagagacaaatgggacactgttaaaagtctaaaatacttataattggaatctcggagaggagaaagaataggtcagaagcaatagtaaaagacataataacttgagaatcttccaaaactaatacagacttgcatatttgagaatcactgtagctctaagcagaatcaataccaaaaaacaaaaataaagggaaaagagaggaaaaattgccaaaacaaagaaaatcttaaaatcagccaaaggaggaaaaagatacattaccttcaaaggagcggcagtaaagacggacagtctactttgcaaagaaatggaaatcaaaatacagtggaacgatatcttcaaagtgttgtaagaaaataactgccaacctagaaatctgtatgaagcaaaaatatctttcaaaaatgaagtgagaatatagacatcttcagacagacaaaaattagaattcatcaccagcagatctacactagaggtactataaagaaagttcttcaggtaaaaggaaaattatcccagctggaagcatggagatgcaggaaggagtaaagagcactggaaaggatagatagacgaatacatctaaaataatgtgaactgtgtaaaacagtaaaaatattgataggtgcagcaaaccaccatggcacacgtttacctgtgtaacctgcacatcctgcgcatgtacctggaacttaaaaatttttaaagtaaaaataataaatggcaacagcaacacagaaagctggaagagagttctgatgggggaaaaacacaggttatttttcctcggctctcactctacaacagtgatcatcacagaggacttctttgaccaaatgtgtggatttctccccacgtgccaagcaagcagtcagttctgcagtggacaccagctgggtcggtctcaacacagaagacttctgtgagcaaatgtgtgagggtttcttctcacacatcaaacaagcaaggagttctgctgtggatatcaggtgggtaccctccaattccatttcaacattatctacctggagataactcagatctcacaggttgaagactcagtctccaggactgtccctccttgagacaccagttgcaagtctgggcctccagaacttctgacccactagcttcaagttgggattcccaccacccctctttgggttcagttaatttgctagagtggctcacagaactcagggaaataattacgtttaccaggttattacaaaggatattatgaaggaaacagatgaagaaatgcctagaacaaggtatggggggtgggtgcttccatgccctctctgttgcaccgccctcctggca

SEQ ID NO: 20236 - DNA, 1049 bp, Homo sapiens
atatggcgtaaattcacagaccaactttcatattatacttaatggtaaaaccctgaaagcagtctcttactgttataccttataacccacccctagaatttctgcttcccattctagcaactgagttctgctgggatttggagttcttattttccaatagggaatgttactaccagaggacacagaaaggttccattgaattgaaagatgaggctataacccatttgggactgttgatgccactgaaccaacaggtaggaaaagaggtcactctcctgactagagtgcttaattctgattaccaaggcaaaatggggtaatgctatacaatgggggcagggaggaggatgtttgtaactcaggattctctagagtgtctcttagtacttctttgcaccatattagagacaaaatgaaaaactgcagtactcaagaaaaggcaggtctgttgaggagtcacatgtttcaggaatgaaggtttaggtcaccctgtcatgttgagaaccctgactggctgaggttctaattgaggtcacaagacatgttggatgcatagtgagagaagaaagttagggacaccatccatgcgttcataaccaggtgcagaagcaaggattgtagtaacttagcatattttttcttgtgtctgtatgtttatatgtattaactttgctttttccccccttattttatatataattactggaagttaattaatttgatctttagagaacagaatatttagtgggactgttaactgaattttaaggagtaattaatatagccagtgattaatacaatgtctgttcggactgcagctcctcattttggggagaaggtgagaacatgttcatttataggaaggtagctgcatgttaccttcatgtggaatcagagttgttttgatacttcaaatatagagggtgtgtatggaagccaagtagccaaaggggtggactgtgccaattatttattgttgctcagttcccagtttatgtaaatccacatccatttatgccctgcttttgatacaggagatgggcactgta

SEQ ID NO: 20237 - DNA, 1020 bp, Homo sapiens
cagccccttggcagacctttggaaggatggacttttgtttagggatgtcatgtgattcgagttgggcacaatggcatttagtgggtaggagccagagatcctaggtattctgtgcctggacctacttccatgcaagtaagactattagtacatctgttatgacttctgaatttcgctctggatattatttgggtgaaaaatttacttaagcttagaacctattttacatgtatagaattttttgtgctgttgtaatatatgctgagtttctggaaactctgaaaagcaactgtcatatacattcagggaaggttgtactttgtctgggacttgctcagtagttaattcatcatttgggaaatctcttcacctgctaatcagtgccagtcatggaatttgagttgcaatgccaactttattttcttcatagtacttaggaaattacttatgaaaaactgaaattactttgtttatttacctgtgtttgtatttgtttacccactaactgtaagctcttgataatagggatcttacgtatcttgtcagtggatatccttatacctaaaatcaactctggcacattgtgtggccagttattaataaatgatgcccaaataatggacagatgtttgaatgagtgaatcatccccttgggcgtgatctttatatgctgttgttccttaagcccccatctcaggccctctttcctgtttactctcaaactcccttcctacctgatctcagctataaccctcactttgatttatatttctgcattaacatctcctgaaatttttctccagtctggatctttcctgtgaactctggaattttacattcagctcccttccccagtttaatgtttcaagcatctcaaacgcgaggtgtccttctccagtgtttatcttagtgaacggaccaccatacacttagtcacactggtgagaagcctacggattgttcttgacacctccctctcccttatacccatatccaattcatcacccacttctgttcatt

SEQ ID NO: 20238 - DNA, 1027 bp, Homo sapiens
attttatttttattttttttttgagatggagtctcactctgttgcccaggctggagtgcagtggcacgaacttggctcactgcaacctccgcctcctgggttcaagcgattctcctgcctcagcttcctgagtagctgggattacacccgccatcatgcccagctaatttttgtatatttagtagagacggggttttaccatgatggccaggctggtctcgaattcctgacctcaggtaatccacccgcctctgcctcccaaagtgctgggattacaggcgtgagccaccgcgtgcggccctatcacttttttttattttaaaagaaaccagaaagccaaaaggtggcaattagcagtacattgactttatgagagtaataggaaatatttgcttcttgagattggtatatgaacatagtattagatttacagttcataccaattttatgctttgaattttagtttttgatgtaagatagtaatttccaggaagttgtttaagggacagaaacaacgagctataactaataaatacttgttagtatacaaagtatgggactatgcagctcacagtctcaaatgtgatctcagtttgctccagtaatcagtatactggtttgtgtttatttaatgaatgactaaagactaaacttaattagaacctttttttttcttatgaggtagttcccttaggatctctgtctaaacttttgcagggtgtgggcagcatctgaacctgttgcgtgtttgaaaacaggaaattaaaatgtttttctgttaattgatatttttcaggtaaattttcttcattttatgaaatttaagtttttacatttcacatttttaatgtgaaatattgacaagcttcttggtacctgtgggggttgtttcctgcagcaatataatcagtcacttttttttctattttgtttcattatagaaactattggctgggcaccgtgtctcccgcctgaaattccagcactgtaggaggctgaggtgggcagatcacctgaggtcaggcgt

SEQ ID NO: 20239 - DNA, 1031 bp, Homo sapiens
ttgggaaaggaaaatactgatatgaatgaggtaagtgcatacaagagctgggccactcccagttgtgccctaagtttgctatgaaagcaaggacaaggaggggttgccttatcccagtcatcttaaacccgtccatcaggtcattaaaactgagcacccttaccaagctattctacccaaaaaagagttgaaactgtttttcagctcttttgagagaggtggaaggtgggaagctagctcatagagtccttgaacaccttcctaaggactttagatcttctggaccagagagggagccattggagagttttaagtaggagagtgacatcatgagatttgtgctttagaaagatcactgaacctgcagaattgaagacgaattaaacagaggaggagagagggctggaggcagcaggtacagttggatcagtgcataggtcagactccagcttactagctaagtggcgggggtagacagggaagggtagtgatgattgatagagtaggcagaacttagaaactaactgagctaactaatcatttgatccagcagatatttattgagcacctgctatttgcttggtactgtgctgattgctatgggaagaaaatgttaaaatagagatacacttcccactctcatggagctgagtcttatgaggaatggacataaatctcaaccacagtgatacatgtatccttactaactgggatggtgactgtgtgacagcatcaacaaaggagcccaaacttggcaggagttgtggaaggtatcattgaatctgaagggtgagcaggacccaactaggccagggaacactcctacatagagagggaacagcatctgtaaagagcctgtggccgtatggagtatgacattttccatgaactaaacaaacaggaagctatgaaatagcagggtatgaggtgaggccaaagtgagagatggggattggttcactatgcgaggcatcaaagaggagttgtgctcttttgcctaagagaataagaaggcttttccaaatcagttt

SEQ ID NO: 20240 - DNA, 1056 bp, Homo sapiens
gcctgtaatcccagcacttgagaggctgaggtggatagactgcttgagtccaggggttcaagaccagcctgggaaacatgtcaaaaacccatctctactaaagatacaaaaaattagctgggcatggtgatacacatctgtcgtcctagccacttgggaggctgaggtgggaggatcacctgagcccggaaagccaaggctacagtgagctgtgatcatgccactacacttcagcttgggcaacggaagtgagaccctgtctcaaaaaacaaacaaaaaagcctggccgggcactgtggctcatgcctgtaatcccagcactttgaaaggccagggtgggtggatcacctatggtcagaagttcaagaccagcctggccgacatggtgaaaccccatctctactaaaaatacaaaaattagccaggcatggtggcgggcacctgtaatcccagctacttgggaggctgaggcaggagaatcacttgaacccaggaggcagagattgtgccattgcactccagcctgagcatcaagagcaaaaaaaacaccgtctcaaaaaaaagcaaaaacaaaaaaaccttttgaggcagatacattaaagtgtgtgaaaaaataattgttagtatgctaattgtaattttaaaacacattgagtggttctaagtttaccagacaagtgtctatgtattgtgctctcagttttatttggaaagtttgctattgtgaaagagacagcaagttttcttctctgttgtgggttgtatttccattttttattaataggctgtattatttagagcagttttttttggtttttttgtttgtttgtttgtttttttggagatggagtctctctctgtctcccaggctggagtgcagtggcccgatcttggctcactgcaagcttcgcctcccaggttcacgccattctcctgcctcagtcccccaagtagctgggactacaggtacctgccaccacgcccggctaattttttgtattttagtagagacggggtttcaccatgttagccaggatggtctcaatctcctgacct

SEQ ID NO: 20241 - DNA, 1056 bp, Homo sapiens
gtgctgcccactggcttgaatgcctgcgcagctttccatagctactgggattcccagacaaaagccttccacttgtgactacttcatgaagtttctgctatttttaaagttggtgtttttaggttttattcagcataggttgacctatgctgaatttatagaattttcacttatgtcagagtttgggttttaagttgtggatcattaccacttaagggtattgatctctcctgtcttataaaatatgatttctgaattacatttttgtgtgtgtgtgtgtgttgttttaaaggaacgaatgctacagtacaatcatttttgtcctatgcttgttgatattaattagttttctgtgagcctgaggaaaactggtagtattttaggaaatgcagtatagcttcctaaactggattgtctggacctggttcaggttcattctggagataaaacaacagtattagtccagagaaatatccctgtgcctgcctttttatcagaaattgtaggctgcctgagaagggctccagaggccgcacttgacactcctcgaacattgcctcaattactcagtctctggtgcgagccagaattgcaggacctgctaccttgcgctctgctgtgcatacaaagctattaagtcgtcataaaatcagtctgctgttttaccagttagtgggatgtggcagaaagggagaaagtgcaaacatagcatttatgtgtgttctaagggaatgaaagcagatcctaaaaatactcagcaacatgattacctcgcatactcagacataatattctgggacacttaaaaaccaacttgcagacacacaagagaacattgaatattaattaacaaaaccatttagtgagtaatggagcctcatagttggctctgaatctaacaatgagattgaagaagaacttccagggatttcatctctgaactcagatttcactgaaatgtagataattttagagtcaaatatgaaggccattatacagttgatccaagctaaaccagcagcagtggggtagtgacatcttactgtgtcttccaac

SEQ ID NO: 20242 - DNA, 1028 bp, Homo sapiens
cactgggcactgcattgagggtaattctcgctctgtaattgttcaaacccaggtttgtgcactgagttgatagtgcacaattatcaatataactaatacatgtaactattatcaggcaataataaaagttattagataatagttaaatgtattcattaggatataggataagccaccataacaaagaggcctcaaaaaacagtagcttaaactaggtagacattgatctctctcaggttacagtgcagaaagaagcagtgcagggatcgggggtgactctgccatagccacttcccaggaacaggggaaaaggcagcactactgtgccggtggccttgaaattgtacacaccacttccagtcacatcccactgcccagacctaggccacagctgcacccagtctgagaggcagtagcagaagaagcagttagtcttccccacacaaagcaaaccagcatgtcccaaatggcaaggcatctgtgtgccgtctcactgtttcttctgtatctccctgttacctgtgagtactgataggaaggacacagaaccttggaaagttcatttataattaaaatatttggaggatgagatctctgaagactttccttcttccttccctcctttctttttcctttctttcttattctttacgtgctaactactaatgttaaaatgtccatacattttttaatggcctttgacatttcacccatgagacaaatataattattattgcaggatctggccagcagcctgcggtgcaacagggctctttctttgttcccaggcagattggcaggtcgagaaataaaagacacacacgagatagtgaaagctgggtccggggggtcaccgccttctgatcctgtgatgccaccaatgcactggatataccggcatttattactaagtttagtgagggcaggggtaggttagtgagggatttagggtcgtttgattatgaggtgagatgatcacatggggatgaagtaattctttaacataacatcggtatgcagaagtacag

SEQ ID NO: 20243 - DNA, 1043 bp, Homo sapiens
gtggttacttgagtttgccaggggcttgacttggtgtttctttgcctatcacacagtctgctggtgttagagagcactctgtgtggctccccaaacacagcagtgagttttcttctttgtctcaagactgcatatgctccatctctctgcctttctaggtaaactgtcagacatcaaatcgacgtggtcctctggccctacctcccacacgcaagcctctctgtctcatgaactatggaaggtgcccagaaacagtactgcacccacgaggccacctccagggttaaccaatcccaagccctcctccacctggggtgccagccccctcggctggaccagctcctactcctcgggtaagctccatgctcctcgtgttccgatgggggccttaccctttaggggatgtgcttatcactttgtcctgtacctcctttgtaaggacccctgcctgtaactctggagcctgggagggcttaggagggcaccagggccaccctagatgtccatccagggcagtagctgggtgagcctggtgtttttagcatcagcctaggtgtgccggcacgcagcaggtttgctctgggccaagaggtcccaggcagttccagcacccattgagggcccacactggccaattctatcctcaggagtgtggctgccccacactgggccatcagaggcctgcacagcgctttaggctctctgcccccatgactccccttcgcacagggatctggatttctgctttttatatttgcttctccacaagatgtcactgggacgtaaggcttttgcaggcccaaaacaaaacaaaccccaccagtttgaaaaaacaactctcataatattgcagcttctctcaggtgctgcatgtcgaacctcagagatgaaagaaatgtactgggaatttaggaaactgaagatttacaccagcgtgggcaacaaagtgagaccccatctccacaaaaaataaattagtggggcatagtggcacatacctgtgatcccaactgctggggaggctgagacaggaggatggctca

SEQ ID NO: 20244 - DNA, 1084 bp, Homo sapiens
tttgttttgttttgagactgagttttgctcttgttgttgcccaggcttggagtgcaatggggcgatcttggctcactgcaaccttcgcctaccgggttcaagcgattctcctgcctcagcctcccaagtagctgggattacaggcatgcgccaccacgcctggctaatttttgtatttttagtagagacggagtttctccatgttggtcaggctggtgacccggaacttcttgaagagaacaagggcacacagaggccagggcagaatgctgatgtctgggtagggtgtaataaatactcactgaatgaactcaagttttacttgctggccagggaggaagtagaccgagaaatccctcctataggctgaacaggggacaggacttcatacgctggctcctgactcagggcatttggatgtcgaggaaggagaagggaaaggtttctgcctcgggggtctgggtcagcctctgtcaacaaggtttacgcagagccaggagaacagagctattgaacaactcacagcggcaggtctgaaggagggagagccttgccaaagctgaagcttccttgttctgagagggccatgtccccaaagctgatgcaaaatccctggatgcattctgaggccacagtttgggagcaaaagagaacagctgcagccctattcccagcctgggctcactttctcgccaggagtccctcaagcacggggcagcaacaacgacgtctccacgtacgcagaggcatgggggtgctcaggggcgcacctctgaaggtcagaaacggaatggccatacccaagcggggaggagatgccagctgccgggtggtcgggaacccagagcggacactggcagcctcaactccacagggcagatgccccgcacaggggaagggacccgtcagcctccccacgggaatggaatttgcagctgtgactcatacagaatgttgggcaagaacagaaccaggaaggcaggactggccttttgaggggacaggccctgtgacgtccgggcagggtattcaggccagagcggcctggctctgtgctgggaggcagggcgggtagagacctcga

SEQ ID NO: 20245 - DNA, 1060 bp, Homo sapiens
cacgagctgtgctgtcccttgcagatggccgaggctggcttcatccactgccccactgagaacgagccagacttggcccagtgtttcttctgcttcaaggagctggaaggctgggagccagatgacgaccccatgtaagtcttctctggccagcctcgatgggctttgttttgaactgagttgtcaaaagatttgagttgcaaagacacttagtatgggagggttgctttccaccctcattgcttcttaaacagctgttgtgaacggatacctctctatatgctggtgccttggtgatgcttacaacctaattaaatctcatttgaccaaaatgccttggggtggacgtaagatgcctgatgcctttcatgttcaacagaatacatcagcagaccctgttgttgtgaactcccaggaacgtccaagtgctttttttgagattttttaaaaaacagtttaattgaaatataacctacacagcacaaaaattaccctttgaaagtgtgcacttcacactttcggaggctgaggcgggcggatcacctgaggtcaggagttcaagacctgcctggccaacttggcgaaaccccgtctctactaaaaatacaaaaattagccgggcatggtagcgcacgcccgtaatcccagctactcgggaggctaaggcaggagaatcgcttgaacctgggaggcggaggttgcagtgagccgagattgtgccaatgcactccagcctcggcgacagagcgagactccgtcataaaaataaaaaattgaaaaaaaaaaaagaaagaaagcatatacttcagtgttgttctggatttttttcttcaagatgcctagttaatgacaatgaaattctgtactcggatggtatctgtctttccacactgtaatgccatattcttttctcacctttttttctgtcggattcagttgcttccacagctttaatttttttcccctggagaatcaccccagttgtttttctttttggccagaagagagtagctgttttttttcttagtatgtttgctatggtggttatactgcatccccg

SEQ ID NO: 20246 - DNA, 1023 bp, Homo sapiens
ctctgagtgaagattaggaaaccgtcttctattttaggagcctggtgtatgttacatactgtgttgactcgcccatgacagttgtgtgggtcctttgaaaggggtgtgtcagtgg[450 bp omitted]aacggggcgcaaaactgtgcttgtcatctcaggtaacacgtcagtattctgaggacgcctgtggccttgttacagaaatggcctcgtagtgtggccccccctgccacacagtggcaccccgtgccctgctttttctccaactgtgatactgactggctcatttcccagcaaaaagggggatattgttctctgggtgtgacagaaacttacagggccctttagctttctcctccattgtcttttccagccaggaagtccctgggccctgtgggcagtgatggcagaggtcccaggcctggaccccctttgtcctcacagggttttggtgcatcagcaacttgaaatagggaggctgggtcagggagactcactacatgttcctcagtcagaagggcacagacggcctacccaggacctgtaaggcagccagccttcaaggcagacctgttcttaccagc

SEQ ID NO: 20247 - DNA, 1050 bp, Homo sapiens
ttaaaatattttttccaccagttatatttcttcaactctaaattgaagaaatttagagtcctttacatgtcttggtcttaaaagccttttgggttttttttttgagacaaggtctcactttgccacccaggctggattgcagtggcagcatcacagctcatgcagctttgacctcccgggctgaaacccttgcctacctcagcctcccaagttgctggggctacaggcacacaccaccatacccggctaatttttagaattttttcatagagatgatgtcttccctgtgttgcccagggtggcctcagactcctgagctcaagcgatcctcctgtctcagcctccaaaagtgttgggattataggctttagccactgtgcccagcccttaaaagtctttaggaacacggcttcttagcttttctaaggaatgtttgacagtggcaacttgtagggcctggccttgcctgccaccagagcaccctgggaatctctgggccaggtagacatgggaagtcagggttttctgggctggcctgaggggctgggctggggccagccggccatgtggtgtggtgctggaggggactcctcactattcctgtctgttcctcttcctcaggagcaagagcagctctacctgaggtcaggtgtggtgtcctctgccaccttcgagcagccgagtcgccaggtgaagctgtgggtgaagatggtgactccactgatcaagaacttcttctgaggacagacaggtgctgtctctagcatcacctctcagcacgattttcccgagagttcacaggtggggcaggtggttgttctgactcaaccagagcttccagagggctctttgatccctttctcagttaaacacagagcagcatcttcaggggtatggcagctgtcctcaaagttagaagctggatgctaaattaggcagtctgttcactttccatctggtacccactccactaagtcccaaggcgcctgtgctggggtcggcagtggcagcctgtagtccccttctgctctcccttcccagggggtcctg

SEQ ID NO: 20248 - DNA, 1084 bp, Homo sapiens
gaagatgacaggcatggccggggtcagctctttcagccgcgcttcagcgatgactccagtctgggtgtcccagcgagcccctgcagggacagtatggctgagggtcaggtgtgctgccagtaagtgagggaggggctggcaggaagggtggggtcctcacactccccgccctctgcagagctgggctctaccccaaaaggcttcaggccagctgccacggctggaagcagaggccttcgtaggtgatggcctgcatgttgtaactaccccgtcccgctgggctcaaggaacagctcagctaaagccctcgggttccatccgtttaaatctgtggcattttcagagcctcatctgtcagccttaatgtcagtggcaggaagtcataactccagctaaaaattacagagtaaagttccctgattcttaatgtgtaatgtctgccctatgtgtacatacacaatataattatacatctgtgcatataaatattgcctttaaccagactgctattatttctactcgccctatttaatggtgtttttatttcctgtctgaaatctcaaaataaacaaacatggagagcttatctttggttgtgtgggaaatggggtgcctgagccgttgctggcccaaccctgccaccccacaggtaatggggtgacgtcagctgttgaaggggacaggtatgtggtggtggcattgctgctcaactcagaggcgggctgagaagatggccggcctcggtgtcctggctgacctcttctgtgtagcaggacaggggtgatgtgggggcggacttctaacaggtgccccagcctcttttcccttgaaccctgtgttccaggagtggcagcagctggggagtgggtgagactgggccagccagcatgacctggagtctcagtgcagccacaaaacgcacttctgccctgggctgactgctccgtggcagggaaagcctgggcttttcagcgcttttcatcacgtcggagctgctctctcacaagctctgctgttttcattaaagcagaggccaggtgactggggtgtttttggtctcctccagaccctgcacattccctga

SEQ ID NO: 20249 - DNA, 1080 bp, Homo sapiens
gtgtgagccaccgtgccaggcctaatttttgtatttttagtagacacgggatttcgccattttggccaggctggtctcgaactcctgaactcaggtgatcctcccgccttgccctcccaaagtgctgggattacaggtgtaagccatggcgcccggcctacaaactaatcttaaatcgttttcaaagatcagcaaaacatggataattgttgaaaacagatcatagacacatggagttggtcataccattctctgcatttttgtatatgttttaaattttccataatgactttaagtttgacttaaatgcataaatatatgaaaagggtataaatcacctggcgtgctgcttactaaaactccaaatgtgggctgcaaatgccaagtaagttcatttgtatgaaatggaaagttttgatattattattatagtataccactcaaccattttccctacatatttggacatacagaagaaataatccaaatatttctgcagtagatattaagtggatcacatttaatgtgacattggagcaaacttcagatgtcgtaagtttgttcttgctttttgggcagtaactgcacacagtaggaaacacgattcttctggctgcccctggaataacagattctgcacaacagtgtgcacatgggccagggggcagctaactgttcaaatacaccattgaagaatgtccatggctgggtgcagtggctcaggcctgtaatcccagcactttgggaggccgaggcgggcggatcacaaggtcaggagatcgagaccatcctggctaacatggtgaaacctcgtctgtactaaacatacaaaaaattagccaggcgtggtggcaggtgcctgtagtcccagctacttgggaggctgaggcaggagaatggtgtgaacccgggaggtggaggttgcagtgagccgagatcgcgccactgcactccagcctgggcgacagatcaagactctgtctcaaaaaaaataaaattaaattaaaaaaaatttcatatggtgaagtattatgagacttttgattgaagtttgaattatgatgggaacatctttctcag

SEQ ID NO: 20250 - DNA, 1032 bp, Homo sapiens
cagctgctagtcacgtgagcacttaaaatgtggctccttggccgagaactggatgtttcattttgtttaactgacatagctccatgtggctcgtagccactgtactgacttaaacatttgcaagcccaggtctcagcagccaggtcagtggtggggacatggaatggggcattgtcagctgaagatgtggtgtggaccaggacaggcagaaagaggtcaggcacggtggcttcacgctgataatcctacccgctttgggaggccaaggctggaggattgcttgagaccagcctgggaaacatagtgagatcctgtctctaaaaaaaaaaaatttttttttttaattagctggatgtggtggcatgtgcttgtagttccagctacccgggaggctgagatgggaggatcacttgggtccaagggtttgaagctgcagtgagccatgactgtaccactgcactccagcctgggtgacaggagaccctgtctcctaaataaataaataaataaatgtagaattaggagcaagaggagctgagagctgaggaacagcctgggagagcacctgtctttgggggttgatcaggaaggctaaacactgggagacagtgtgggccaaaccccatggctgaagaagagggcagtcgacattggcagatgcttacagtgcgcacgaaagaggaatgcagaagggtgttgggtgccacgagggtcgtgggtgatcgtagccaagcagtcggggcggggccagcaggaggagggccagtgggatgctgtgctgattatattcctgacctagaagccccaggctggggataaagccctgtcttatgccaggcttcctcaggagctgcctggaaaatgctggggcttgtccaggccccagacaaccaaatacgtttgtgctgcttgtaaagggctgggtgcgacggggcaccaggccatagaattcccaggttctttcctccctctgttttgggagcggtcggtccccgagggcgtccccgctgctggtgctagggaagtgggcgg

SEQ ID NO: 20251 - DNA, 1050 bp, Homo sapiens
ggatgccggctggtggaaggggtggccttctgtaggggtgacactagaactgagtctttggggaggaggaagccttcagtaggtggagaatagggagtagggtatccaactggcggggaacagaaagggccaaagcacagagacagaaagggacgaacatgcccctctgggctgggcttccttcctttggggggcacttgcccacccggtaaactccccctcagtaggttgcagggggagaagttaggagcacagacatggcttccggaaacagcagccgtagctttgtttctaaacccaaagcagtgagactgctgagcatttcagacctcatgaagatgggatgaaggctggctgctgggaaagatatttttggacaggaggaatgtggagatggctctttccctcctagtggaggaatgacaggtgacaaaggtgacctggtgtgggattgttctgagaaggtctgggagggggtggctgaagtataataaggacatcaacgaggaagggggctttggaaaaggaaggtggagaggaacaactgcggcatctctgcttgaatccgtccccgacccctgcagttctcagggtctcccaatgtcattctggaggccctgggtcagtgtttggtgatggcagatgctacagaggactctttgcaacaggcctctgaatggcagtggagtgatggcagatgacaactcagtgaacaaagaagtggccttgggcgttggtagatttagggaatctcaacgttggtgccatggcctctaaatagccactgcggtgtcttcttactgctcctaaaataataatgattttttaggccaggcatggtggcttatgcctgtaatctcagcacttgggaggctgaggcgtgtgatcacctgagttcgggagtttgagaccagcctggccaacatggtgaaactcagtctctactaaaagtacaaaattagtcaggcgtggtggcagatgcctgtaatcccagctacttgggaggctgaggcaggagactcacttgaacccaggaactggaggttgcag

SEQ ID NO: 20252 - DNA, 1053 bp, Homo sapiens
ctgcatgctggacctgccttcccttcctcctctggctccgggccagggtttgggggaatccctctctgcaactttgcgttttatgggggtttgtttttctcccaggcagagactgtgggagtcctcttgtggccttgttttaattggggggttggagcggcagtttccctttgggtctgaggttagagtgctggcttggtggggggtggccagcctccaaaacctgggtttggactttgagaagtgccatggtgctacggtgccactgccatcggcccaagtcgaggagcggtgagggcgagccccctcgggctgccttgcaaagcggtgatcatcagcctggcgtctaatgctgccctgtcctctgctttgcagacataacagctgggagccggaggagaacatcctggacccgaggctgctcctggccttccagaagaagtgaggacgctgacagcactggggagggtgtgggggagggacggtggctggttggagtcgtgctgggcgctgctcgcctgccgggaggctggagctggggctgtggtctgaggtcccttagcaagattgtgtccagggccatctctgtggctggctgtaaaagtccccagccagcccctctcccaccttctcctagccagcctgtatccatccctgagaagaacctaagtaagtgctgctttggtgtttccgacagccatacttgcaaaaaccaactttttcagttgcttcagataaagatgttatagcttctcttggccttttctgctgagtaatttgcacatggcgctaacagaaaaccaggagagcaggtttgccacagtgacgcaggtctgcccttccagccctgcacgcgtgtgccatcaggcaagaaggctcagagagggagctggaacacacagcacgcagttgtgcctattgtgatgtctctctcaagaaagaaacatttattttgctctggcctgcagcatacagtaccaagtagcaccatgaggccggattgggccagacttgtttctgtaattctagatgtcatttctatttttaggtagg

SEQ ID NO: 20253 - DNA, 1030 bp, Homo sapiens
aggtgaggagagtagcagctcggactccgaccccgactccgcctcgccgcccagcactggacagaacccgtcagtgtccgttcagaccagccaggactggaagcccacccgcagcctcatcgagcacgtatttgtcaccgacgtcactgccaacctcatcaccgtcacagtgaaggagtctcccaccagcgtgggcttcttcaacctgaggcattactgaagccccggcgccaccagctgcgcggtcttactccccttccctgcctatggtgtcgcttggctaagtgactcccagcccaagccccctcaagagtctgggtcgggggaggaggagtgggtggcctccttgatgggcaggcttggaagggacttctcccgcaccccactctgtcccaggacatagggcagggggcctcactgccttgttggtctccaccttgttcctacctctgcaggcctctttgctctcccctcttgcctcaggaaacccggtggcacctgtggctccaggtgactgtcttgaacagagcgggcttcttcatggctgcgttgttgctgagtttgaactgctcctccctggcctgcgtgactgaatcacagctttggtccctgtcttgcaggggctgaggtgtcaggaggggacttctggcccaccttgccttcagccctggagtgggcagagagtattgtggggaggcatggccagtgggactagtgttccctccatctggccacagcttttgggagatggggtgggcaggggtggtcctggctggcattgcctgagccggcagtgatgaagtggggagcttgcccttgacaggtgggggctggctggggccttaatgtgaaaagacagtggcaggcagctggagtagagcgagcccagcagccctaaaaggctgccttcatggccatctagccccagttcagggcagcatccatagcccacaagccagcgtgggtggggcgggggtggtcccacagctgggttccacctgaagagcctccgtgcctcggagcaggagag

SEQ ID NO: 20254 - DNA, 1025 bp, Homo sapiens
tgactatgggatagacactgttctgtgttgtcttagaatcctgacaaccctacgaggtaggaactatgattgtgcccattgtacagatgaggaaactgagaggtgcaaggtcattgcatagtcacccagctgttgcggcaaacggtagctcttgcttcaaagccaccgttctgaaccacaaggcacccatccctcctactcccctaccctgggaaacccgaaagagtttctaaaagtcactttggagaacagcatgattcagtatttggtgagccctaattaagttttatgatcacaagtgacaaatataaaaccaaaaccaaaatcttattttaagaatttatcaacaacaacaggccaggcctagtggctcatggctgtgatcccagcactttgggaggccgatgcaggcggatcacttgaggccaggagttcgagaccagcttaaccaacatggcgagaccccatctctactaaaaatacaaaaattagccgggtgtgttggtgcacacctgtagtcccagctacttaggaggctgaggcacaagaatcgcttgagcttgggagtcagagattgcatgagccaagatcatgccactgcactccagcctgggagacagagcgagaccccatctcaaaaacaaaacaaaacaaacaaacaaaaaaaaaaatatatatatatatatatatatctcaacaacagcaaaaccagtgtcttcacctttgtttaagtgaagtctaggtcacttgttgctctgtaaacccgattttcatccttgggcctagtttctagaaaatacactgggaagtagttttcaaatatgattgaagaaagggcagggacagcccctgagcgagccttgcttcccacctcccactggctctcagtctttgggacagtgtgagtggagcttgtgtccagttgtgcacacggacacccggaaacctctcattaggagaagccactgctgcgcaccctggagatgggttttgaccctgggctcccgttaatgttgttgtggctc

SEQ ID NO: 20255 - DNA, 1024 bp, Homo sapiens
ggaaaacccagatggcctcttgaggccgggcctgggctacgctttcatcaaggcctccatcagctgcgccttggaggaaccagggagagctcaaaaccaccaggacctatcccagcccagatttcagattggtttgttctgggaaggaccaggcattgtttgtttctggctttctttttgacccttaagcttccagatgatgctaacttgcagccagggctgagaatcacagatcttaaatttaaatagcaggatgtcaatgcatacagaattcagaattctcttttttgtgttttttgtttgtttgtttgtttgttgagatggagtctctctctgtcgcccaggctggagtgcagtggcgtgatctcagctcactgcaacctccacctcccgggttcaagcgattctcctgcttcagcctcccaagtagctgggactacaggggcccgccaccatgcctggctaatttttgtatttttgtagataacggggtttcaccatgttggtcaggctggtcttgaacccctgacctcgtgatccgcccaccttggcctcccaatgcatacagaattctaagggagaaggatggttagcatttgacctacatgtcagttagactctggaaattaacaacaacgggaagtccacgcatgaagacttctggctgcagccaaatctgctcagacaaaacccatgacagagtttatttacatttccacaaacaagcctgaaaacagacattctattcgagaagctaaaaagagggaaataaactgaaagaagcagaaaaataaaccaataaagatcaaaagcagaagctgatgaaataaataaaaaatgaattgacttgataaataaactgctttttttttaaatgaccaataaaccttacacactgctggcttatctggcaataaaaaggagatcatgcaagtaacagtgttgggaatgaggacaacttgggggagggttttttttgttttgttttttgtttttaattgcaagaaagctatgcattgtactg

SEQ ID NO: 20256 - DNA, 1033 bp, Homo sapiens
tggacgtgatgatggagactgagaaccgcctccacttcacggtgggcagggcaggggcgggggcggcggccagggcagagggtgcgcgtggacatcgacacccacgcacctcacaagggtggggtgcatgttgcaccactgtgtgctgggcccttgctgggagcggaggtgtgagcagacaatggcagcgcccctcggggagcagtggggacaccacggtgacaggtactccagaaggcagggctcggggctcattcatctttatgaaaaggtgggtcaggtagagtagggctgccagaggttgcgaatgaaaacaggatgcccagtaaacccgaattgcagataccccaggcatgactttgtttttttgtgtaaggatgcaaaatttgggatgtatttatactagaaaagctgcttgttgtttatctgaaattcagagttatcaggtgttctgtattttacctccatcctgggggaggcgtcctcctcctggctctgcagatgagggagccgaggctcagagaggctgaatgtgctgcccatggtcccacatccatgtgtggctgcaccaggacctgacctgtccttggcgtgcgggttgttctctggagagtaaggtggctgtggggaacatcaataaacccccatctcttctagatcaaagatccagctaacaggcgctacgaggtgcccttggagaccccgcatgtccacagccgggcaccgtccccactctacagcgtggagttctccgaggagcccttcggggtgatcgtgcgccggcagctggacggccgcgtgctgtgagttctgggctctgtgccagcatgatggggagggcgacgcgcatttctcacacggcagggagggccacacgcgtttgtttctcacacgatgggcagggcgacacatgtttgtttctcacacggcggggagggcgacgggcatttctcacagggcgctccctgggtcttttactcacataggtctaaatcccatgtaaacacgtgttcaggactcaccaagcccctgc

SEQ ID NO: 20257 - DNA, 1050 bp, Homo sapiens
gtgctgggccttgtgttttctgggaaatgagtcctatgggctgatgcctctcccaactctggccttctgtgctcctaaggagggttctggggccctgcctggaggtgggctggcaccacatatctttccgtcccatgccaggttcctcctgagtcaggcttagcacggcttccccaggccactctgagctcctcgtggggagagagcctcaactctccgcctgtgattggcccatctgtggggtgcagagccctccaagtgaagaatctgtcccccaaccccagagctgcttcccttccagatgtggtcctgcagccgagccctgcccttagctggaggtcgacaggtgggatcctggatgtctacatcttcctgggcccagagcccaagagcgtggtgcagcagtacctggacgttgtgggtagggcctgctccctggccgcggcccccgccccaaggctccctcctccctccctcatgaagtcggcgttggcctgcaggatacccgttcatgccgccatactggggcctgggcttccacctgtgccgctggggctactcctccaccgctatcacccgccaggtggtggagaacatgaccagggcccacttccccctggtgagttggggtggtggcaggggaggcaaggggctggccgggacgcgtctcctcaggccccagcagacggtcccgtgttgtggctgcaggacgtccagtggaacgacctggactacatggactcccggagggacttcacgttcaacaaggatggcttccgggacttcccggccatggtgcaggagctgcaccagggcggccggcgctacatgatgatcgtggtgtgtgcccccacactgtgggtctttgggaagggggccgcccggtgcccagtggctccttctctgtgcagcgtcatcctcgtgcctgtgtggtcgccgaggatgttttctgagggtctttgtgatatcgagggaatatcaagaagtttgcaggcttggccccagctgtccagggaggtcgggtttgagggtccccagaaatggccgggt

SEQ ID NO: 20258 - DNA, 1050 bp, Homo sapiens
tggcgccagggctctgggccaccctcaccttgacaggtttccctcttcccaggatcctgccatcagcagctcgggccctgccgggagctacaggccctacgacgagggtctgcggaggggggttttcatcaccaacgagaccggccagccgctgattgggaaggtagggcgagggtccaggggacgggggttagaaagcagaggcctccagccagggggagccggcagctgctcaggaagacggtgggatttgaggagccatcacgcccagtgggacagctgagaggaatgggccacagtggcccgtgacgatggtggctcctacaaggaatggccccgtgagttcttccatcagcaggcctttgacttcatgggcagctgggcctggcccaggcacaagccctgcagaccctcagtgaggccttagggtcctccttgtcctcccagccccccaggggcctccaggcagggcccccgctgagggagcagctagggagggtctggtgcggatgtgaggctgcctggcagggcttgcacggggccgtctccgctgcccttctccctgacgctctctggttctgcagcccagcccctgggtggacgtgttgggggtgacccctcgttttcccagggttgaggccccttggccccgcatcagtgccttgtggagaaagagctgctcattgacctccagggtgcaggtctctcagatttgcaaatgtgggcgtccactaagagtgaggctgcccctctgctcaggctgaggctcagtggggcttccatgcaggccctgggtggggccgggtctccccactgcagcctctcgttgtccaggtatggcccgggtccactgccttccccgacttcaccaaccccacagccctggcctggtgggaggacatggtggctgagttccatgaccaggtgcccttcgacggcatgtggattgtaagtgtggccccctcctgagcatccccaaggcctctggggactaccccaccctcctcactctgggcagagtcacctaccagcagcgcttctcttgcagga

SEQ ID NO: 20259 - DNA, 1031 bp, Homo sapiens
atcacctgaggtcaagagttcgaggccagcctggccaacatggtgaaacccatctctactaaaaatacaaaaattagccgtgcatggtggtgggcgcctgtagtccctgctactcaggaggctgaggccagagaatcccttgaacctgggaggaggagattgcagtgagccgagatcgcgccactgtactccagcctgtgtgactccatctcaaaaaaaaaaaaccaagctgtgaaagactccacaggaaaagataagtgaatgtgtatctctggggaaaggtttcatttagagaaaaaaaaaaaaaaaaggtgaactttatttgaccatagcagaaaaaaaaatgtaaatctctgaatataaacacaaaaagattaaaactgctctgaacatggactgtaacagcagagaaggcattgtcaataaaacagcaaatagctactcttcctaataggtagagaactcatacgttggtaagaccaagactaagaaccaaattggaggaacactgtttgcaaaacaggagatacgaatggtatccacacattcttcacccggaaatccaagaaacgcaatttgtgttttaattactattttaatgaccttgttgtttctgtcactacacttttttttttttttttttagtggttgccctagggattacaattaacatcttaattttagcctcgttggaactgatgccaacttgctttcaatagcataaaaaagctttgcttctatgtggtttccattgcctctcgttcctctgtgctgttacacgtctgtatccatgatgagcccatccacgcagatttataatgaccgccttattcaattatcttttaagtcaaataggagggaaaaatgggttacaaacaaaaagtacatacacactgtctgccttttatatttactgatgtagttacctttacccatggttttatttcttcatgtggctttgacttcttgtctaacatctttcatttacagcagaaggactccctttagtatttattgtagggcagttctgc

SEQ ID NO: 20260 - DNA, 1052 bp, Homo sapiens
ccctctatgtgactgcgtttggaaacagggcttttagggggtaactaggtttaatgaaggtcataaaggtgggccctgaaccgatagctttagtgtcctcgtgagaagagacgccagagagctcgttctctgcaccctcacaccccagggaactccatgagaggacacggcaaaaccaggccatgcgcccaccaggaagaaaggcctcatgaggaccccagcctccaaaactgggagaagatgaatctctgtgctaggccccgcagcctggggtgatctgtgacggcggcctgagcaggtgaggactgcctgcatgtttgtatttttatgaatgctttgattgagtctgggggtaaatccctggaggcctgtggcagcctcagaggtgtgttctccctgcactttcttcaagaagaatgtggcctgccctactgagcctcgttctgcccgttctgcccgggcagtcccggccaatgtcagcgcagcaaggggagggcctctgtaaccagggctgctggctgcggggctccccactggacacgggagtggacattggagtgtccttcatccgcgtcactcttccaggtcccttgcctcctcccattttccttccttcctttccttccttccttcccttcctttccttccttccttcctttctttccttccttccttcctttcctcccttgctcccttccttttctttcttccttccgtttttctttcctttcttccttcctttcatttttttcttcccgttctccctttcttcctccctccacccctttcttctcactgtgttccccaggctggtcttcaactcctgggctcaagcaatcctcttgcctcagcctctggtgtggctgggaccacagacacatgccaccgcgccaggctaatttgttaattgtttttatagagacagggtctcactttgtttcccaggctcgtctcaaactcctgggctcaagtgatactccagcttcagcctgaagtgctggaattaaggtgtgagccaccatgcctggccctctctcattcacaagtgaacc

SEQ ID NO: 20261 - DNA, 1073 bp, Homo sapiens
ccactgggacttgtcccttctctagagattttcagatggttgactggagatgacatccagagccccgtctgcaggctcctgctggctgtcatcctcagcacatcagcccctctgcccatctgtcaatagacgcgggcgcttcccttctcgcagagccctctgcgccccttcatgcctctctcgggggtcccccacctgggttctctgtctgcaaacttgacagacagagatcaagacttgactgtgttgatcacctggactcccagtgccgcctcctcacctggggggtcctgggcttcccctcgctccccctccctgcacagtgaccctgaaactcaaggaagtgagctggggtcaactggttgttgctttcccttggcaaccagggcctccctgccccctggtgtccggtgtcttggaaacagttgttttactgtttatgttgttcatgtgttgttttaggcagatacagaagaatgtaaatttagtccctgtcactccaccttggacaaagacagaagtcctaagaactttatagagtatatattttttcgtttttgtaaacatatatatatattttttttctgagacaggatctcgctctgtcacccaagctggagtgcagtggcacgatctcggctcactacagcctcaaccaccagggctcagctgatcctccccctcagcccccccaagtagctgggcctacaggcgtgtgtcaccatgtctggcaaatttttcatatattttttttggagagactggtcttgctgtgttgcccagtctggtctcgaactcctgggctcaagcaatccgcccatcttggcctcccaaagtgctgggattaagacgtgagccactgtgcccagccaaacatgatttttactagctagagagtgtactctgagaacataagctttgaaagaataggcattagtccggtaattccatatataaatacatttaaatatggaattctatatatataaatatggaattcctgctctgataaatgccatggcattgatggctcggttaaaagggcacgtggtggctgggcgtggtggctcacg

SEQ ID NO: 20262 - DNA, 1050 bp, Homo sapiens
gtctctcgccaagaccatcgtggcagacgccatgcagggcccggctgcctactcagatctcttccgcagcctgaagcaggtccacctggtgtccttccagtgcagcccgcactccaccccacagggcatcatcagcaccttccggcagtgcgcccgctttcagcaggggaaggacctgcagcagtacgtctctgtggtggtgttagatgaggtggggctggcggaagactcacccaaaatgcccctgaagactctgcacccgctgctggaagacggatgcattgaagacgatcccgccccccacaaaaaggtcggcttcgtgggcatctccaactgggcccttgaccctgccaagatgaaccggggcatttttgtgtcacgtggcagccccaacgagacagagctcatagagagcgccaagggcatctgctcctcagacatcctcgtccaggaccgagtccaagggtactttgcgtcctttgccaaagcctacgaaacggtgtgtaagcgccaggacaaggaattcttcgggcttcgtgactactacagcctcatcaaaatggtctttgctgcagcaaaggcttcaaatagaaagccttccccgcaagacattgcacaggctgtccttaggaacttcagtggcaaggatgacatccaagctttggacatctttctggccaatttgcccgaggccaagtgctcagaggaagtcagccccatgcagctgatcaaacagaacatctttgggccttctcagaaggtgccgggtggagagcaggaagatgctgagtcccgctacttactcgtgctgaccaaaaactacgtggcactgcagatcctgcagcagacattcttcgagggggaccagcagccggagattatttttggttctggtttccccaaggaccaagagtacacccagctctgcagaaacatcaatcgtgtgaagatctgcatggaaacaggcaagatggtgttgcttctcaacctgcagaacctctacgagagcctctacgacgcactcaaccagtactacgtccacctcggcgg

SEQ ID NO: 20263 - DNA, 1049 bp, Homo sapiens
agacctggagcgccacgccatcttcacagaggtgattgtctttctgcacttgtaccctatcccctgtcacccaagagtcctaaatccctcgtgtcaggattcaagattcttccccaggcagcggttagggatcctgcagggagatgctgagacgctgagctctcctccgcggtaagtgtggggagtaggtccagttaaccaggtgctgagtgcctggctctgtgcagtgcaccatgctggtaacagcaccatacacagtgttcacaccaacaaataaagtaccacgtcccaggactgggccaagggcactagggacgcacagatgaatctgtagcccttgtcctttgttagcattagggagcatggagagaccagcacatgaacagatgccatcaatatcatatgataaatgctgtgcttagaggcagcggggagcggtgcagaccaggatgcgagctcagatgagatgttccctaggagaagcccctcgccgatggggaagaatggccgggaagggattgtaggctgagggccttctgtgggcagagccgctgacagctcttagggttcaaggctgtagtgctgagatggggcgatgaggtgcagtcagagagaactactggaggccctcagtgactctgcagagccacatctcagccctatggagcgggcactggaggcacgcttgtctccctggctgggtgaagggagtctgatgaaaggctgttgtggaaaagacgggccggtagggaggccgctggaaccgtacaaaggagaggagcagatggaaccgagagatactcaggaggcaatttggcagggccaataccaccacccagtggggggatggggggtggaggggtccggggcgaccccctggattcctccttagatgagtggacattgcttcatcatgacagataccgcaggaacggacagcaggttgtgggaggctagtgatgatgtccgccggggacaggtttctatgcatcgtgcagctggacgtaggaatctgagctcagtggtgaggcagggattcctgggctaga

SEQ ID NO: 20264 - DNA, 1035 bp, Homo sapiens
tggcattgcgcacagaactctttgttgaaatggaaaggtccactgggtacaggggctgtttcctgtaatcctagctacttgggaagcagaggcaggaggatcgtttgaggccaggagtttgagaccaggctgggcaacacagcaagacccccatcgcttaagagaaaagaaggaatggaaagttcagctgtcctcacccttagctgcaccggggcaggcccattgaggagcacaagatagggtttctggtcaacgaaggaatgccacttcaaagcagaggacacaggaatggggaagaaaacgagccgctaagagaagatttctcatccccttgtgagagaagaaatcacgatcgcagggctctgaagtttatgtaaaactcatcggaacgggtggccgtgagaccgaaccaacagctcggagaacacccttctgcagctgcacagctttgctttgtttatttgcttgtttttgtgtgtgtgtttgtttttaaaataggtattcttttttttttctttaaataggtattctgttataaatgaaatcaacaaaatacgagaaaatgaggaccgtatcttcgtctatttcatcacaaaactgtcccgggtgggaagaggaacagcctatgtgggcttccacggaggtgagatcagaacatcagtcagggtatttatttatgtatttatttatttatttgtatctatttattttttgagatggagtcttgctctgtcaccaggctggagtgcagtggcgcgatctcagctcactacaacctcaatctcctgggttcaagcgattctcctgcctcagcctcccaagtagctggcattacaggcgtgcgccaccatgcccagctaatttttgtatgtttagtagtgacggggtttcaccacgttggcctagatggtctcaatccgttgacctcatgatccgctcgccccagcctcccaaagtgctgggattacaggtgtgagccaccgcacccagcccagtcagtgtatttatttaagtcatgttggaactgtttctcat

SEQ ID NO: 20265 - DNA, 1050 bp, Homo sapiens
acatcaggggaggtggcagaggtggcagaggaggccatggaaacagaaagttctgagaaggtgggaaaggaaacctctgaactcggaggcagtgatgtaagttctggttcttgggacctccccttgtgctgctggtgatgcttctgagctgcatctttaaacgcttttgcattgggagctagaggagtcgccgccgctgtgcaggggtgaggatggcgccccactttcctcacacagtgacggtcttgttgctggttactgggggtcaagggcatctgcaccggcagtttggggggtgcagggcggaggtcggcgtctcttctttgtccgtgaggaccgccgccctgtgctgtttgctgcattgagaccctcatcgcatacgggcggtttggcttttgcccactgtgtcagtggcagaaacggatgacccaaccgtctccaccaacaggtgtcgatcctggacaccaccaggctgctgagaagctgtgtgcagagcgccgtgggcatgctcagagaccagaacgagagctgcacgcgcaatatgcggagggtggtgctcctcctgggcctcttgaatgaggatgacgcgtgccacggtatgagcctccccacccctcttgcccctgcccccacgtgggctcttcctgaggagtgggcatcatttcactgtgtgttgggggacaccctctcaggtttccatggctcagcagaagcagtgacacagtgggaatctaagagcatctctcagattttgctctagaattggcctggccaacggacttcccttcctgggggaggtgggacagaagcactccggagccaacagctcagccacggccatgctgaacgtctgtttctgcctttgtacagcctctttcttgcgggtatccaagatgcgcctcagtgtctttttaaagaagcaagaagagagccagtttcaccctctggagtggttggcaagggaagcctgcaaccaggacgctctccaggaggcgggcacattcaggtactgtgactaaaggaagcaaggagtggctccaatctggtggc

SEQ ID NO: 20266 - DNA, 1084 bp, Homo sapiens
ctccgcctgagaaggaagtgattgagagcctgctctctctcctcttcgtccaaaaggggcgcttaagagatgctgcccagagtaggttgctttcttcctgtaaacctagcccctcatttcttcatctcgcttctgcatgtctcatgcagtgagctgcctttttctttctggtttaaggacactgtgaacacacaaaatctctctctccattcaatgatgttgtggataagactcctgtcatccgctcagtgatactgaaactgcttttgaagtacaggtaagaacaacatggagacttgcttctggaaagccctggctttttctcttcatcgcagcgttttgttaccaagtcttcttgtcgtgactagtagctagtacatgatcttggggagctttttcggtgagacacagcctggttacttgtactggttgtgtattctgacattttcacatataggcacatgagtttagtattcccacaagcacacgcatctagcaagaagccaacagtgccgtgaagggaccacagtggcgtgagggacatggaactcaagaggccagaatctgtggtgctgagcctggttccacagcagcgcaactttctgatttttcagatggtagcttagaatcctgctcaccctgaatgtcctagatgtctcctaagtttctattcccctgaacatgggctctatttccttggaaaggatgttgacatccaagaatagtatcacctgtggtacttgtatggatctaatattgcagttctcaaagtgttggtatggacccttgggtgtgaggtaggtctctgaggttaaaactattttaaaaattagattactaagataaatttgcccttttttaaaaaacatgttgatacttatgatgatgttacaaaaagcggtgatgagttaaactgctggcccctcacgtgaagacacagtagctggaggtattgttttcttcaccgccatgcacacgtggttttcttcatgccagtttcattttagttttactaaatcttgactcttgaggatttgacttttcaacgttttgtggaaatgggaagcacacacaaaacactccc

SEQ ID NO: 20267 - DNA, 1053 bp, Homo sapiens
aatggaagaccaaaccactcttctcacggattcatgttttggaaaatattttaaatgttatttaacatgtaatagctttattgttattttaaatgaatgtatatttttgaaaccttttgtttttaatgtctcataattcctaatatcataaatattgataatataacccacataaaagctcttcggggttctcaatttttaagactataaaggggtcctgaaaccaaagtttgaggacagctggtctaaaatgtgagttttatattcctccagtattatgctaaaaggttttccataaaatcttagaaaccacgtatatgtatgtatatgtttatacacacacacacacaggacagacgaccgatagatagatgctcttttttttagtaaggtatgtctccagatctgagagaaccaggaataatatttctctttctgcagctttcatgatgtaaaagattatattcaggaatatttgaccctgttaaaaaagaaagcattcataactgaagataaaactgaactgtacatgctcttcatcaactgcctggaggtaagtgaactctctcttccctgaatttcttttggaaactatctgaaccacatggtttaaaatttacagaatataattttagtcagtataattaacgaatgctctgttccgtgcagaaaagaagaaaggtttcaaagacgcggcttctgccttcagcaacgtatattttggcatttacttgcatatacatacaaaacagaacagcctaggagaatatactgccaaagttaacagtggttatcattgagtggggacattatggatactttttatcttcatatttttatatccaaaatttttataatgtaaataaattagataattttttttcctcataggttcacttttcccctccttcttgtccttaaaataaaaaggaatgttaggtttccataagtcaagaaatttacactgaaacctacagtaacattcttctatccttccttctccacagtcacattggcgactgtagaagcttggggcatccatgtttaaaaaaa

SEQ ID NO: 20268 - DNA, 1058 bp, Homo sapiens
ttttatgagtactgttcattgagagatgacaatgaagattagatgaaattggaaataaaccaacattgtttacattccaggagacttgtagctcagccacacacgcagtaatgacctgtgcccgttcgcctctggcactgcccacccctctttttttttttcttctaattctgtactcacaaaagagaatctcattttcttctttcttccattcccttaaattctgagtactgtacatatatttctgggttcccacgatgatgtgaaaaactaccagactgttttttgtcttctcacaaagacaagaaaaatcagggcattttgtgagtgccttaagatcaaactaacaagatctgaccctctcccctcacagtgagccactgccccacttcagagggtaagagccaaaagcctcattgtgaaaggcactggacttggaccagggacaccatcagggccttggttttctcacgcataaaatggagagtggattaatcgccaaagattcttctgatctgacattttgaaattgtgagagaaactagatgactgtaaacttggtcacaggcctggttctggcagttctttgcggacttttttctagcattatgccaaataaacatgcagtctcagtgtgctctcgcatgtatgaatatctagtcctttctgtggttctcagccaagacataaaaactaggactcagagcacatacaaaaccagttatgtttcggaaagagggaaaagagtccccgagcccggatcttgtgctgcttttctcactgacgtgttgccttttttctttacaaaatctgctttgatacttaggacctctctggactaatttctcttcctagacagctcagcacagctattgatatgttagaggcagtatccttaatattcattctaaatgagttaacgacttaacttgaaattgggcctaaggagtgagaactacaaaaatacaaaatgcttgtccaggactcagccatgcacaccttgagcagcgccggcaggaggcacggaaggaactgtgctccgttctcctcactgtcat

SEQ ID NO: 20269 - DNA, 1037 bp, Homo sapiens
tgatgagcagtacatgaaatgcatggaaagcagttaacacagcattcccttccccctccaacttctcctggctgcaaattaatcacctcatctgcatcctgggcctcttttgaatgcacatgctgttagagcgcttctcacattgtattaaagttagtcatttatgattccatttttcccactgactgtaggttctcaagagtagggtgtaccatatttcttttacaaccccagcaccaagcaaagcacctgctacttcgtcggtattcattgttccggctatgaaagcttagactaggaaaggatcttggaacagtctggtccactggttcctgaatgcccgaccgtggacctgcaggagcagaatcacccagaagtgtgttgagaaacagattccgtaggcacatccacagagacagaaagtggatccttgggccttggagttggggtgggatggatgggaagtgactgctgatgaggatgaggtttatttaggggttaaggaaaatgttctaaagttagattgtagtgatattgcacaactctgtaaataccaaaaccatcgcattatatgttttaaacaagtgaactttatggtatgttaattgtatctcagtaaacctgttaggaaaaaaaacaggccgggcgcagtggttcatgcctgtaatcccagcactttgggaggctgaggcggctggatcacgaggtcaggcgatcgagaccatcctggctaacacggtgaaaccctgtgtctactaaaaatacaaaaaaaatcagccgggcatggtggcgggcacctgtagtcccagctactcgggaggctgaggcaggagaatggcgtgaacctgggaggcggagcttgcagtgagccgagatcgcgtcagtgcactccagcctgagcaacagagcaggactctgtcaaaaaaaaaaaaaaaaaaacagattccagagccctaccccacttactgggggaaaaactctcccagagtatagcataagaatctgctttttaaaataagctttcctgtgattctgaa

SEQ ID NO: 20270 - DNA, 1057 bp, Homo sapiens
aacccaaattctgttatcagaatggaccctccccactttgggtcatgggcagatttgatcagtttccccattgagtcattgatgaagatgttgtgagaatgatccccaaccctctgtgctaatacagagcactccgtctgctttggtgtgtttaattattgatccagccacaagtgaggagtggaagttgtgatttgaaagctgtcaccaagagatttgggggattcagtaacaaaactgcaggaaggtagacaggtctgcagaatgtggacatagtgggaaacgtcttcacattaagggcagtgtgactaaggaaaacacaaggttaggagactcaggcctgccatgttgtgctctaaactgcagcctctgcctcctgggttcaagcagttctcctgcctcagcctcccgagtagctgggattacaggcatgcgccaccacgcccagataattttgtatttttagtaaacacggggtttctccatgttggtcaggctggtcttgaactcccaacctcaggtgatcgtccgcctcggcctcccaaagtgctgggattacaggcgtgagccaccacgcctggccaacactgtgtcttctttaagcctccaacaacccatggaggggtggggtggggcatcggcttcaatacacaaaggaggagacaccaggaaagcaaggggcaggcagaggtgatgcagccagcagccttagccttgcttctgatgaagaccaggtcctggggggctcccgcggacctgatcccagggaatcctcctatggaccaggtcccggaggctcctcctatggactagattccagggaatccttctacagtctaggcttcaggggctcatcctatgaactagatcccggggaatcttcctatggaccgggtcccggggaatcctcatacagaccagatcccggggaatcctcctatggaccaggtcctgggggctcctcatacagaccagataccagggaatcctcctatggaccaggtcccaggggctcctactatacacatcaggtctgggagttggggctcctccagtg

SEQ ID NO: 20271 - DNA, 1024 bp, Homo sapiens
aaataaattaaaccgacagtttcatttgtaggattgactttaataacacgcctctactgaacaaatggcgattaactggggaaaacggaattatggtaaccgaggtaacggggtcggggactctttctccttcgctgcatgctgggtggcggggagagaccgctctgaggaggtttggtctgtcggccacgccgtaggccgcggtgcattctgggtcctggcaatatggcgtcctccttgatgggctgatgagatgagtttcactgtagctccaaaccagagggcaaagctcccatgacccaataagcccacattgtccctttcctccgtggttccgtgtcgcccgtttctcaggactcgttctcaggcaggagagagcctcggggctgaaggccaggaccagccaggccgcgcggacctgaggttgaggaaccgggtgcaggcgagcacgatgggccggtcgtggctctggttgcagcagctcagacgagtgcgggacccgcagggctgagagtggctggaggagacccagggccctttgaacccgatcccttggccggagacctcagcccagtcggcccagtgggcgaaccggcaccaagagcggcctgcctgtcttcggaactgctgaggcggtggaggccgagagcagggtcatcgtgaggcctgaagtctcttacgcttttggcagctcccctcgcagcccctctggaaacgtacagcctcaggagcagccagtggcttgggacctggggtggtgtgtgtctgcggagcttcttgggctgccccatttcctagcggcccccacctccccacttcccgctcagagttagagataaggatctcagacttttgcctgagtaagggtctccgcactctttatccatttggttttcgatttcccgtttttgtttcttatttcaccaattctggtacacgctagtttttaaggctggaggttctcgagcgcttgctgccaaggactcccccaccccctcccccactgatggagtccgaaatgctg

SEQ ID NO: 20272 - DNA, 1075 bp, Homo sapiens
caacatggccaaacaacaggacagacgtggctgctttccgtgggctctgttgcttctgatttatgtgtgtcttttctctttgagttgaagcattagaaggtgtatccaccaagatccagtaaagaagacagaaaacacaccaggtatctcaaccaagcggatttaggtggggaactggttttacaggctttcgaggggctgaaagggccaaaaggaaaccttgactgagacggtaactacaggaggcaggtgctgctgctagggctgggggaacaaatagaagaggctggagttacttaaatctagatggctagagaagggacccagtgagctggggcttgggccactgaggtagggacacagcctggcgcttgctggcaccgctgctaagtgcacagtgcaggggcctgggagcagaaggaagcaggagggcatgggggcggccggcagctgggaagggaaccatcctccctcctcgcctgccagcctccctggagggtgctggacaggtttgaacttcatgtggtagcagtaattttaaggttttgttttgtccccttgcaactctccttacttgctttgtccccttgcaacttataactaccttacacaggtactctgcattggtactctgcacaggtactcggggttattatttacatatgggatctgagcctcctgtgctttgcccgagttagggcctcaaggactttgtggatcccttcctgatcttttatttatttatttgtttatttatttatttatttattttgagatggagtttcgctcttgttgcccaggctggagtgcaatggtgcgatctcggctcaccgcaacctccgcctcccgggttcaagcgattcttctgcctcagccccctgagtagctgggattacaggcatgcaccaccactctggctaattttgtatttttagtagaggcagggtttctccatgttggtcaggctggtttcgaactcccgacctcaggtgatccgcctgcctcagcctcccaaagtgctgggatcataggcgtgagccaccatgcccggcccttcctgatctttatggcaaga

SEQ ID NO: 20273 - DNA, 1053 bp, Homo sapiens
aagtgctggggttgcaggcatgagccaccatgcctagcctgtgtggcctttcatactaggtgaatctgtggccacccacatcctgagaattgttttgttcctcttccaacctagaggaaggtccccttggaagtgtggcttggggctctgtgattgaacctttcctattcatcattttcgtcagtgtgttggatacagatttggaaggcgtgattactgagtgctgatgatataaagctgggaaggacaggtactaatgtagatgaaagactcgtgatttactccaatcttgaaaggatgacatgctggcagattgtggtaaaatataacagagatactttgaaagtcctgcatttagtcttccctttctctcccttgctcccttcctcccttgctttctttcttccttccttccttccccctttatttgtcccatcaattgcgtaaatgcaggtaaacatttagccattcctgtgaaagccgctgtgtatgtggtggccttaatcattgtccatttttgggcctgtggatccctgttattctctgcagtggagactgcacatcgggccagtgcatgcctgctattctctgcagtggagaccgcacatcaggccagtgcatgcctgctattctctgcagtggataccgcacatcgggccagtgcatgcctgctattctctgcagtggagaccgcacatcgggccagtgcatgcctgctattctctgcagtggagaccgcacatcgggccagtgcatgcctgctattctctgcagtggagactgcacatcgggccagtgcatgcctgttattctctgcagtggagactgcacattgggccagtgcatgcctgctattctctgcagtggatactgcacatcgggcctgtggatccctgttattctctgcagtggagactgctcatggagcatctgattttcttctggaccttctattttgagctgcattcacagagcacacctgagaaatggtggccaaggggagtgatctaggaccctgagaaacctggaagcagctccccttagggagagttg

SEQ ID NO: 20274 - DNA, 1027 bp, Homo sapiens
gctattgtagagtagaaacgagaatgcacccccggaatcagctctccgatgatatgcaggtgcagctgcctccagccctgccgttggtcaggaggaggcaaggggtacctaatgtgctcttatttggcccatgatgagtggagaaagagacctttgcccaggtgtccatgtcactgaggcagtggcggagggtgtcccccagctctgcagtggtcaccctctgcctcctgtcctcgggcagctgcctgtggctgcaggcggtgaaggtgctgttggttgtttgctcccagacctggctgtggggcctgctctgcagaggtcaggggcatggcgcagggggacccagcagggagctggagccaggcagtgcgggctgagccaggccgaggagacccccgcttttatcttgagtgttgtcatctgatgctgagttctttctcagcagtgaaggggaatcagtgtcctgacttgaattgcactttgatggggtttttagtttctgtgtgttggatttttactgagagctctagagaaactagtcacctgggggtttcagaggagggttgtgaagtgctgaatttttctttgagcttttaaggtcagaactcaggggagctaaaaaaaaatgaaaaaataataatttaaaccttataaggtgactcataaataactgcctttcaagatgagtggaattcttctgggaaaaagccctgtggaaattctcctgaccaccgagaacaaagaggaccactgctataaaaacctccagaatcatcatctgcggatggagggaagactctgccaggagtgcgatttttcctttatgtgttactccgtttaccatgtctcaataaaatggcagagaaagtccttttcctgtgtttcatttttcccacaacctttccccttttgacttctttggggcttccccttatctgagactggcccaccgcagaattcagcttcacgggcctgtccggatggaacgtggacgccatcatgtgtttactgcttttatctcttagcc

SEQ ID NO: 20275 - DNA, 1029 bp, Homo sapiens
atgctgttacctattctctttgaaattgagatttctttcttccttgtcccattccactcttgccacacctagctcaggccttcttattccaccgtgacagcttcctggctaatttcccttcctccattctttttcttcccaagtaaatgttagcccttgtcattaatgttagacgtcatcttcctgaaaatatccatttagccaggtttatgccgtggcagctgcagtggggcccggaggcctttcttccaggcctctgttattggaatccacctcccgcgtctatttggagctatggggcctttggaacggcttcatgagatgcgttggcccaagcagaaggctggtacagaagcagaacaaagctctgagcattctgagagttttctgttgagaaatgccatgggcttatgtcttcagcctgcctgggagccctgcatatttttacttgccttggggttgatttgatgaagcctgtaccatgggtaacatattgctggataatgaagagtggaaggaaaattagccctgaatgaatgactcagtcccatgataatgtggctaattttaatttgcatcaggaatagtaaagctgtggcccagtgtgttatcaaataaatctctaaacagccttgaaatcaatccatttattgaaaattgaaaatctttttttttttttttttttttgagacggagtctcactctgttgcccaggctggagtgcagtggcacgatctcagcccactgcaacctctgcctcccaggttcaagcaattctgcctcagtctcccgagtagctgggattatgggtgcacaccaccacgcctggctaatttttgtgtttttagtagagatggggtttcaccatattcgccaggctggtctcgaactcctgacctcgtgatctgcctgcttcggcctcccgacgtgcagggattataggcatgagccaccgcacccggcctgaaagttgaaaatcttgttccatgaaataaattttagaaaattagccagacatggtggcgcatg

SEQ ID NO: 20276 - DNA, 1043 bp, Homo sapiens
ccccacttctgcccccccatgcttatagaaataacatgtttatggtagatggaaagtgcatacacagaagggccaggtacaaagaagaaaagaagaatcatccacgttcctctgaagaggtcagaatcactcatgacatcttgtgttttcatttggtacgaccttatatttggaatcacagttgtgggtacagttttgtaccctcctcttttcagttatgtttgagcatgtcctgtgccatttaatattctttgagaacatattttttaaacagctctactgagatacaattcacataccccagagttcacccatttaccaacagagttcaccaacagttgcaatctgaaagtatgtttttgtaaaggacatatactattttatcatgtaacactgtttaatatacgccatttaattatgcccttcaacgtggaattttaggcttccataggatacagtttatcgtatttagattttatgctgttgaatgacttggaattaatttgtaagtgtagagaaaaatgaatcctagggctcagagcactgcagcagatcacgtatttttgctctgtgacaaagtatttttattttcactttttctttttttgttaatttcaccccataaggtgtttcgggtagaggcaaatcccacaagtatccttggggattatcgacgactaaagaacagcaaagaaatggttcctagctcctcacgcagtccttggtgggcggtgggctgactggctgcgcacgctaggcctcaaggtagaagcggttcatttagagacccccaggcatagtcgcatggcttcacacacccgcaccagggctgaccatttgtttttggaggaaccacaaaaggattcagtatggaattccttaagaagggagtttctttagtttgcttaaaatagttacaactttttttttttaagacggggtcttgctctgtcacccagggtggagtgcagtggtgtgatctcggctcactgtaacctccgcctcccgggttcaagcagttctcccacctcagcctcccgagt

SEQ ID NO: 20277 - DNA, 1356 bp, Homo sapiens
gctcttccatgtgtctctctcttctgggactcagctgtctatgtattctgctgttggacattgtaccgcagctcttctgtgtgtctctctcttctgggactcagctctctatgtattgtgctgttggacattgtaccgcagctcttttgtgtgtctctatcttctgggactcagctctctatgtattgtgctgttggacattgtaccgcagctcttccgtgtgtctctgtcttctgggactcagctgtctatgtattgcgctgtcggacatagtaccacagctcttccatgtgtctctgtcttctgggactcagctctctatgtattgtgctgttggacattgtaccgcggctcttccgtgtgtctctctctcctgggactcagctctctatgtattgtgtcgttggacattgtactgcagctcttccgtgtgtttctctcttctgggactcagctctctatgtattgcactgttggacattgtaccgcagctcttctgtgtgtctctctcttctgggactcagctctctatgtattgcgctgttggacattgtaccacaactcttctgtgtgtctctctcttctgggactcagctctctatgtattgtgttgttggacattgtactgcagctcttccatgtgtttctctcttctgggactcagctctctatgtattgcgttgttggacattgtaccgcagctcttccgtgtgtctctctctcctgggactcagctctctatgtattgtgttgttggacattgtaccgcagctcttccatgtgtctctctcttctgggactcagctgtctatgtattgtgttgttggacattgtaccgcagctcttccattgtgtctctctcttctgggactcagctctctatgttttgtgctgttggacattgtaccacagctcttccgtgtgtctgtctcttctgggactcagctctctatgtattgcgctgttggacattgtactgcagctcctccgtttgttctctcccatgtcacaatgagcttttgttagtctgctgataaaccagccaaggaaattctttttctctgatattgggttttttatttctagcatttccattgactattttagtttccatctctaggggaaatgcatattgcctgcctttccttctagagcctctgctgtgttcatcatagttaccttagagtccttgatctatagttcagaaaacagggtcagccctgagtctgagtctcctaattcctttatcatctcttgactgtaatttgcttttccttgctttttttgtgctttataaattttaattgcatgctggacattgtgtgtagaagaacaatagcgaatgaggtaagttgc

SEQ ID NO: 20278 - DNA, 1029 bp, Homo sapiens
ggctgcaccagaatggtgtctggaagcctctgatgatttccttgctggtgctggaacgcttggacttgttcttcatttttctagcttttgatataggtgattccagttcaaaaggaattgagagaaaccatggtgattatatttttttctgaaggctgccagccactatctggcccgtatttccttgcttaggcccattgagcccttttctaaataatttatcagtttgccactgatgaaatgtttcttctgattaaatttaaggctttgccttattaccttgtaggtgtataaatttgtgttctgccagagattggaggaaaatgccgaccgttgtttcagtggaaaattctgcagtaaaacctcactcattccatcataagtctcaaatgaaagttttattgggaaatgggagtaggagattattataaagctgggaccatacagtgaagaatttatctttttagagaatttttctaacaaattggggctactggcagtttagtacaggatggaagttaggagctggagcctgtggaaaaagacaagcaggaggggcctcgctctctgtgtccttctttccccagagagagtggacaacaccagaagcagaggccacacctctttacttggggtgagctttaattcttctggtgccttaaaaataagtttctatgggaatatctatcatttactaaggaagatgaaacagcatggcggtgcctccactgaccaagtctgtccgtcgggcaggtgtgtctaggggaggaggcggaaggcgctcctcagtcatggagccacgttgttgtaggagctcattctcatcttgtccaggtctgcgagtagtgaaggcagcaagtcctgtgtggcggccgtggggcttccagggagctgagcggtcaggttgagtcagtttccatgtggtggacagttcttacttatccatgcacagccctggtttgtggattacagtgaacagattttgaatgtcagcttcccttcagttcaccgtgcttctcagatgtgtca

SEQ ID NO: 20279 - DNA, 1027 bp, Homo sapiens
aacccttctatgtgccttctgttttaaaaccatgattttttttactttaataataggcaactaatttaaaatacctattcaccatgtgtcatctcagagtaggaaggggactgtgaggcagacggagccacttgggacttttgcctttgggttgtgacatttgtctgtaggttctttcacttctgtccatctcatttgtttctgtgccatgcgtgtgacatgatgagctggaaagactttgcatggggcccacgtgagtgctcacatcgaaggggcaagtgttaatcaccctctagttgacagagctgtttcagggatggctagttcctctgtccggaacacttgtattgagtggcagggagccgcggggacactgcccatagcggtgggagagcaagcaggaggggctctgcccagggctgtttcctttgcctttgtttaccagcataaagtattaaaacagctaaattatcatgggcattttaatccaatttctcagcgtttcgtcatttgaagaatagaagtctctttgttttcacagccctgttcttgcttgtttaaatttgaatatatttctattcattcagctgatagaaattctttacttttaaactgagggagaaaaaagaacagattgactagggatcagaatgtgatttcagtgggtctttattgggcccttgttagggaggggtttggacctggggacttggagtctacactgatggcagaagcaagctccagaaaagagcaggctccagctttgcaaggtaaaccttggagagtgtagttagggtgacagccagcacctctccctgctgagtggagagggaatccagatttttaggatcttataacctgatatttttcatgcctttgactcctgtcttggtctgttaggtcttggcttttgatagccaaagtaaccagctgactttccttctttttttttgaaatctcctttactttttcacaaggctgtttctcagtgtgaatatgttgctttcatattcccagagcactcact

SEQ ID NO: 20280 - DNA, 1930 bp, Homo sapiens
agtgtgcacgtggatctatttaccgtgtggaaaataatagaatgaattgcttttacacattactgggcttaagaaatggaaggtgacatagcctttgaaaccccctctgagcccctccccagtcacagtcccctctgtcttcctgagctcaccctgtcctgattgggccttgtgccttcctctgcttgagactggttctgtgcgtgtgcgtgtgtgcaagcaggtgtgtgcacaagatgggctggcctgccctgctttggcacggaagcatcctccgctgggtgtttgttctgaggctcatctcacaaggatctgggtcctcaggctcccactgctctgcatcttccccgtgacagccgcgtgggcatttgctcttgaccctgtggtggctgagacagaaaccttggaggagtcactcacttctgttggagcaaaatgcaggcctcctccagggctgcgtctgggagggacttgggtggtggagtgtttatgacttagcgcagagggctcttacgtgcaaaccatcttggctgtggagcgccctgttgcctggaaggtctgccttctcatgggggctgggcttccagactcctgaaatgtgctgtgaggcttcctattctttcttaatgattaaaaatacgatttcttctttaatgcccagcacaaatgcatttagctgtgtttatttttttccctaagtaacagaagcaatcctgagaaaataattcttacactcagtattgattctctgcttcatgtgctagggtgttccccctcccactgaagttgctgctgcttcaccctctcctcctcgatggcctaccatcctgcagcctcgctccctgcgcctgcccccttctccttctcctccttcccctttcagtgcttgctcttccctcctttccttcttctcttcctcaccccactcttcccccttttctcctcctgcctctctttccacctcctcctccgtccctgctggtctcctaagaagcacttagtagcactcagaatccttgaccttggcaggcttgggaagtgttggttaatgaagggatgtgaagacgaagggagtctgagtctccaaaggaatcatggctgttgggagtttgcttgattaggagatgggccgtttattacaatgtgagttgttaactctaaagtgcctgagataaatttatagtgtttatttgcttcagaaggagttggattttttcttacaaagtgaaatatacttttctaaattttatgtttatataaacataatttatgttgttatagttttaatctgcattactcctcaaaaggaacaaaaatgttttggcttttttctccctgagctgcagagacctttttctcctgcttctgtcctctgtattctccccacccctttctccctcctttcttccctctttttaatctgtcaattaaaatatttgaaaggatatcactgagatctttgggcaaggactttacctgtttttgctgttgtcaaccgagggtgcggtggctcctcccacctgctgtctctggtttttactgggcttcctctccattatcctaattaggtggtttgccggttgttacacatcaaagacctgagtttcctggcgaggagggagggaggcatgggagcccctcattaccggcgtgcatcctaaccacactgcttgttttcttcttgagaaaatttttttcttttcttttccctttcctttcctttcctttcctttcctttcctttcctttcctttcctttcctttcctttcctttcctttcctttcctttcctttcctttcctttcctttcctttcctttcctttcctttcctttcctttcctttcctttcctttcctttcctttcctttcctttcctttccatgtcctttcctttcctttccatgtcctttcctttccttttcctttcccc

SEQ ID NO: 20281 - DNA, 1106 bp, Homo sapiens
cgccaatgttcctgataatcaaatttatgggcgtgcgtgtgagagagagagagtgtgttcctgctgaagcatctcggttaaatcaaaacactctgtaattattgggttcttctttcctcttgccagaacactctctaattattggtttctttcctcctgctcttgacatttgatgtgtctatttgccctctctgtcaatagtgctgagtagaatactgcaggcacaagtcatgtttttgtaacgattttcgacagattagcattcctttaaaaaagaacttaagtcggttggggaagggggtccactcatattacaagggggatactttcaaaaatccttcaaataatggtaagagaagcagctttgcatagttgtgagggaacctggggcttactggagaagtgagcacacttctccaggcatgccatctgcagccttccttttctttctaggctgacctatggtcttctggtcactagtcattccatttggcagtagaatcaccttctcagttttgaaataggtgtaaccagtaggggaaaaggattgtggtgtgcgtggtgttctttgcgcacaaagatgaccgtggaatttttgaaggaggcaattattgtcattgtttaatatataactggaggcttaatttccaagtagctgttgtagcattaaatgtccctggctaggtgccagtagctatttccattgtacattgaatctattgcttctttttaaaatacaatggttcgtaggttgatttatctttattttaaagaaagggctaatatcacaaggtaagtttttgagcagatactatattacgaagtgttctgactcggatactggagaggaacagtggccctggatacctcctctgtgaaggtcaggttaagatctctttatgctcacagtataaagattaggtttggctgagagttacaggggagaggaaataacaattgtgtaactcaaattaaagtttgttcactcacattaagattccctagaagtagtcattccaaggctgtttagtgctccagcatagcaaggcctcgggctcctcctatgtttactttgctgtgcaaaggttcttttttttttttttttt

SEQ ID NO: 20282 - DNA, 1782 bp, Homo sapiens
gcgagttaaaatcacacagcttattgcatctatcagttccagtcagagctgatggcaaactcttgttctttcagttcagtaaccagagagtggaatctgtctgtctgtgtcttccataaccaaaatacatcaccccacgcaatgcctcctaataactggggctttgtggtcagggtttttgcagggcaggccccttttctgcaggcaaagtgctaatggccagcgcctacactgcaggcctctggcgcattctctgccgagagttctgtccgtcccacttctcctcactgtctagtcttcttctgaccctcccagcctggttcacgtttgctcttcgttaccctcttcctgtttctttctcctgtctctcctcccaccacaccatccctcacatgcaccatggggtgctccttcagattgtcatctgatcgagccacagtcccactcagcccatgtttgtcaggactctgccactggtcacttgtccacaaggaaccactgtctttgagcttcttcctccggtgctcttagcatctgcccacactgtatctatctgtgtccaggtcttgttttctgtgtcattgtttgatgaaaggcagggactcattcggtgagtgggtctcccctgcctctgccccacaccagcacactgctctgcccttggtgggcacccgttggtgtgtgttgagctgggtgttgtacctcggtgtctgcgtggagaaatgcgaacagtgagtgccacagcacagccacggaatggttgtcatcggcttcagaaggggaatgaaaggggcagcaccgtgggtgttgatgatctccgaggctgcctgtttagagcgtcccttccctgagatggaggcgtagcttcaccgtgtagtgtttaagctttaaaacgtgaaatgcagtgaggccgacagtgagttgtaggaagctcagaaatgggatgcccgcactgccttcaattcaccctccattgtccatcgccgctggcatacccaggtcagcgcctgcaggcccctgtctcaaaagatgtggccggcttcttgtcccggtactgcctgaagcttcacctcagcaccgctagcttcacactggccacacccacctccactcagcagtctccatgctgtagcccaaagcatgtagtggcggttgagtacctgagtgggggaaataattaactgggatgcttttattgataagtagtcagatgcctgttaagtgacatttatgaacactcacgtagcactgctgcctgttagccaggcactagtcaaaggacttttgatgtattagctcatttaatcttcacagaaactagaagttagacactatcctctccactcccttcacccccagccccaaacacacacaattttatagccgaagaaacggaggcacaaagaaggtgaagactttgctaaagtcacaaaactggtataagcatgggctttgtgtgtgtccaaagttcatccctcaaccgtttctctctggatcaataattaaaaggtttatcaagaagtctgaaggtaaatggttcagtattgtcaggttctggataagtttctctgtgttcttgacttttccctcatgatgacaagaaggctgccaccactccaaacatcacagcctcacagttgtgctcaaagggagaaagaagaagggacggccgttctcctttgagcacactgtttcactggcttcctgtgggttccactggcctgacttgatgcctgggacactttaagcatctccggtgctatgcgggctgggaagaagtga

SEQ ID NO: 20283 - DNA, 1029 bp, Homo sapiens
tgtgtaccacatgtgatgacacgtatgcgtaaccttgggtacatttatatacgcacacacgcacacagtgttttctctttagggaagtgctgtatgttgtacatggtttcttctaccttgcttcttgttgctgtattagactggaatccacgtgtcctcattggaatcaaagcttcattgtttcctctaaagcagagtttctccagcttggcccgattggcatttggatcagctaattcatgattgtggtggtcgtgtgctcatgtgctgtgcggacagtcacaggatgtgtagcaggtccccaggccattgccatcagatgccagcagggcccacttctcccagcagtgccgaccgagcctgtctgcagacaacaccagtgcccccgagggcagagttgctcccagcggagatggtgtttctcgggttcattggggggattctgagcacccatttcagaagtggatttggccccatctggaagcaatagcttttctttttggactttgaataataaaccagctattctagttcttgtctgcctcttctgcaaattaaggaaggaaggaagaattgttactgaataatacataaaggaaagagtcgatgattttacaaatttcacgtaactctgcccttactgggcagacacgtgttgagaacattacgagttactgtgaccttgtagtccctttgggttcggtgtacgcaatttcctactctcagcatctgccagcccagactctggcagacttatgccagccctgggtgctgtagggtcagccacccccttccacgcagggtgggcgtccagatggtgctgtgggaaacagcgttttgccaggggccagagagctgactcagatagtgacctggaaaacagactgtggatcaggtgggcacgggcctggaacagggtccctgaaacacccagcaagaggctggggaatgtctggagagcccggcatggtccggagcgtccacgcagccagcagctcacatcctcttgctcctggcggccgatgctct

SEQ ID NO: 20284 - DNA, 1065 bp, Homo sapiens
cccagagcaggcggggctgggaaagctgttctgtggcgcagcatcccagtggctgttacggggtgaaagcccctcttagaatttaaagtcctagagcagagaccaactggggccatccatggccctgtgccgtgctgcctcctggacgcacgctaggaggtggagatggtccagccccagcaggactgggccacgaggaccctgccggtaacctggtgctcgccgcccacagatcacggggcgtggagggagagactgccagtgctgtcctagtgcagcagtacctcatggttatgacggatcatcttcctgaactttgcatctcagaatttaaaatggagattttgattttgattttggcaaatgtggaaaatagatttcagctcaaaaagcaagacctgagaacatggtgtgttaaaatatctttcatttcatgccactttgcagccctgggaccctcggggttgtacctagaaggtagtaaagatgacagcagcccccgtttcactgatggtggcgcagaggacgttgtgaggtggctgtagggtcaggtggctgtagggtcagggctgggcaagttgtattcagatgctgttcgctaagcccagaacattataggaggtaaataaatagcacgcagtgttctgggggtaaaaagatacacccatgtcccaggctgctgccaaaatcctttctcctgtcagcgtggggggtgatcctgcccaattaaaggacgtcttttggcccttctttcccttggcagcagcatggaagtgggtgggggaggagaggagcatgcttcccccaacccctggggacctgtgagcgcagcctgcaagctccggctccaggaggaagcgtgctcaagtgcacctctgaccacgtcacgctgcgagaacgtgggcgctacacctccgaccacatcgtgctccgagaacgtggacgctgcacctctgaccacgtcacgctccgagaacatggacgctgcacctctgaccacttcctgctccgagaacgtgaactctgcacctctgaccacgtcacgccccgagaacgtggacactg

SEQ ID NO: 20285 - DNA, 1030 bp, Homo sapiens
cccctgtttccatttctagttcttctggagggtgtctccttccctgtagatgacatgctgagaccactgcttcttgatttgtcgtttttagattatcagtgggctttgtcttagggtacaaaccaagaacagagctgccattaagttctgtttaaagaagggagaaacgatgtggaagcctgttagcaaagaagtcaattatgtgtagattacatgctggtttaaattcctatgtgttatttgtattcagtagtgaattctaaagagaaaattctagattgaagaggctgcgtcactcacgacgccttcttgcgttccctcttattcactctattgggtttctttatactttgtaaactttgtggtttcaagtaatatccttatgcttttatttctagttttatcagtaatagctcatttcttccattttcaaggctcttagcttccttgtactttcttctgccttttttcttttacagcttctgttatctgcactttctgtgattgtctttcgttctctgaccacgattaacacctctgtgcttgagtggagattgattctataggaagacaagcattaaaccttgtacctgattatgaccacataaatattgctcgctcagtggctagagtactgtgatttccatttttataactgttttcgtttgtttgcttttcctggacatttcctcttttcttcttgaattacctatcgttaccacttcctccactgatagatccacaaggagagcggagagcacagaaggcgccctctcccctcacatcttccaagctctcctgcctcgctcagccgatcgtgcctgtggcctgctccccggcgtcagctggctcccctttgtaattctccaggatccgtccctgtgtctagatcccacttcttcccctctctcgattttctcctttgttctcctaggggaaatcctcaagcactgccctaagaaaggatgtttggcagtctgagaccatcagtatttgaagcagtggaagtaatgaaaaatctcattactgg

SEQ ID NO: 20286 - DNA, 1025 bp, Homo sapiens
aaaccacctgatggatgcggtaagaaagggaattgaagcagatggaggggcacgggctgctgactccccggctgaaccccgtcctcgggtgctgcaggaaagagtgagattgatgatcctggagggagcccactcagcagcacagccggagactttgctggtcccttgagatggctgagtccccactgggggctggggtgaggggtgaggccggaggagacagtggagctggcgagggccccagggtgcaggcaaggctgagggcactcggctctcctcccactgcccttgataggcatggcctgctgtgctgtgtctggggctcagaaagatggaaaataagagggtggaaagaaagagtttgtcctaccgcccttgtgaaaagagaagtaatccaataataaataaaagtgataaaagacaattggaaatatgaagaagaaacaggaagaaagaccagttggaagcattaagtataaaaaatataattggtgaaataattgaagagatggattgaaaagcaacattatggatagagccaagaataaaccaggaagctgagaagcttgtttgaggagttcccaccaaagggatggagctagaaggaaggggagaaacatgagaggcagagacaaagtttaaatatctaggaaataacattttcttctctctaaaaaaaaacgtagaaaaggagaaaagacaggcttagtaaatagaaagtgtgagatacgatggctaaaatgttttgaaataaagttgtaactgtaaacgaattgaattcacctctcaaagggccatgattcttgtgttggttaaaatcatgatacagcagtctcttgtccatgagacacagatttaaagcaaaacgtttaagcctgggcaaaacagcacgaccctgtctctactaaaaatttaaaaattagctggacatggtggcttatgcctgtggtctcagttcctcgggaggctgaggcaggaggatcagttgagcccaggagttcaaggctgcagtgagctgtgattgt

SEQ ID NO: 20287 - DNA, 1021 bp, Homo sapiens
ttgtagagactgtgtcaccatgttgcccaggctggtctcgaactcctaagctcaagagatcctcccacctcagccttacaaagtgctggaattacaagcatgaggcaccatgtctggtccttttttaaaaaatagagacagggtctctcccttttacttagatgggagtgcagtgacacagtcatagctcactgcatccttgaactcctgggctcaagtgatcctcctgctttagcctcccaaagtgctggaattccaggcatgagccaccacgcctgatcccagcatgtgcgttttcacacttaacatatctggggtccagaagcatcttacaataagtaacatacctgtttagttggcagttcttttcctttgttaatagtgtatagaaatgcttgcaaaggtccacctagaggtgtgcactgtaccctttcttactgctgtttgtaagctcactgtttgtcactagggaaagaaacaggcaccattacttaactaggtgttcatgtaccggcaataattgatctcaaaatttaatgctatttgtagtttttaattaaaaaactctcaaatgtatggtctaagtttttctttaagtccagaaaaaaaagaatacattaaaccctaagtaagtagaagaaaagaaataataaagagaagagcaaaaataaacagaagttgaccccaaaatttgtaaaaattcatgaaactagttgatagtttttgaaaggttcattaaaattgtcaaaactttttctagagtgctcaagaaaaatagaaggaagatacaaatgactttcatcagaaatgaaagagggcacatccttactgatcctacagatgttaaaagaataaggggccaggtgcgggggctcatgcctataatcccagcactttgggaggccgaggcaggtggatcgcttgagcccaggagttcaagaccagcctgggcaacatagcaaaaccccatctctacaaaatataaaaattactcgtgcgtggtggcatacgcttgtagtcc

SEQ ID NO: 20288 - DNA, 1032 bp, Homo sapiens
ttatgcctaacccatcaaaggtgcagcattgttgggcacaggatgaaaaacagacagcccccacgtttggctgtcaaaccacatgacccagaaatagccatcattgtaagaaccccagagggagcctttgctatcttttaatttattgcacaaataatattataacagtaaacaatgaaaaggaagaaatgaaagaaaaattacccagaatccactgtttttgctattccatattcttcatacatttgtccatatatgcacataattttacttacttggaattaaatatattttgtattgtttttaatttgaagatcactgattttatattgctattgatattttcaaatttagtattccatcacatttatagacagtattacttaatcatttccctctcataaaattatagtgcttgcaaggagttttttcctgttcatctttgcggtacatagaaccttccttagctgtccatggtagcatgcagctgtagtctcagctacgtggaaagctgagatgggagggtcacttgagcccaacagtttaaagttatgatgagctatgattgtgccactgtactctagcctgggcaacatagcatagagtaagatcctgtctcttaaaagaaaaaaataataatattttcttattttggactatttcttagaatatgtttctgggaataagatcagtaggtcaaagtatatagctcttgatatcttttgccaaacttcctttttttttttttttttttgagatggagtctcactctgtcttcccaggctggagtgcagtggcgtgatctcggctcactgcaagttctgcctcctggattcaagcgattctcctgcctcagactcccaagtagctgggactataggtgtgcaccacaatgcccaatactaatttttgtatttttagtagagatggggtttcaccatgctggccgggctggtcttgaactcctgaccttgtgatccgtccgcctcggcctcccaaagtgctgggattacaggtgtgagtcactgtgcc

SEQ ID NO: 20289 - DNA, 1030 bp, Homo sapiens
caccttttggagtctccggtgcctgttattccacctgtgtgtccctgtggacccgttgtttagctcccactcacttatacatgagaacatgcaacagttggttttctgtttctgagttattccactgagcataatggcctcctgtttcacccatgttgatgcaacagacacgatttcattctttttctggctgagtagtattccatgatgcacagacgctgcagtttcctcatccagtcctctgttgaggggtgatctcggctcactgcagccggagctccgcctcctgggttaaagtgattcttgtgcctcaacctccagagtagctgggatatcaggtgtgcaccaccgcacctggccaagagtgattttataggatgaagttttagtcccttttcctagatgtcacagatcagtgtgagcatttcattaggaggtctatttgctctctctccgtgcatcattttttttacaaatagaatgtggggtctgaaagtacaggattgttatcaggtgacagcagaatgacaaactagagtgatgttatacataccatgtacatcggggactccaaaaccgccctgctcatcaggtgcccgaggcaccctggcctgcagcacctggcactccagggctggaactggagaatcttttcttatgaagcagctcttccagtatgcctgtctgagcactctcttcatatacaaggcaaatgaaatttgataaccttagcaattctgttttaatttggtcgcctcagctggagtgcagtagtatgatcatagctcgctgcaacttccaactcctggggtcaggccaccctcctgactcagcctcctgagtagctggaactgcatgcatgtgccatcatgcccggctcatttttgtattttttgtagagacggggtttcaccatgttgggcaggctggtctcgacctcctggcctcaagcgatcctccagcttcagccttccaaagtgtttgcattacagtattgagcctctatgccggccaccatgattaatcttta

SEQ ID NO: 20290 - DNA, 1029 bp, Homo sapiens
ccatgtcgcactggccaccaggacctgctgtgctcgctgaagctgccctgttgggctttgttcagccaaattcactgaccctgttgtccaggcactggcaggcaccccgagccacaggctcgtaccccgcactgtgcgctctcacccgtcagccctgcacaccccacacaaagccactgctgtgtctcccacccacagccgctgctgattcaagtccagcccaggccatcaggtccccaactgtgctgcccacggacccctgggcccctgctcagcccttctgctccctgcacccagccctgaccatagcctccccacaccccaagtcctcacgtactactttggtgtcacagctgaagtcagggggcagtggggaggctgctgccgaagcggacggtgagggcttccaccttggaggcaggcgtcagtcgtacccagcaccagttgacctctcgctggttccgctgattcttgtagattccctgggattttctgctagttcactggttcttgtagattccctaggattttatgtatatgctctctccaagcagaagcagcttccagcccctcttccggttctgggatctctcactctttttctgggcctggggcactgaccatggctctgctggcacgggtcggctaccgtgcttgccatctctcccagctgctcctgatttcctgagctggatgcggggagctgctgctcttcctctcagcacagctgaggttgaccttgacctcagttcaaccttgaaccctcctgggcccagtgctctgcacctggctgtgaccagagaacgctccataatggtgacctgaataccatatatttcagcaaaatattttccctgctacccattaaactacagataaagaatgactgctttgaaagattggctaaagcactggatttaaggttaaaaccctgagtttgatcccatcaccgcatttgctcttacaagtcattttcacttcccttggccatgatttgcctctgtaaaatcatgagccttcggccgtctg

SEQ ID NO: 20291 - DNA, 1045 bp, Homo sapiens
agagcttccgtctgcaggtccccacgcccacagcacctccctttccccctgggcatttggataccacatgggcatctccccttctgctggcgaaggctacagaaagttcacagctgtggagtttccaggtggctgaacttgctgaggctgctgtttgctgtgcgcgtgccatgcctgaggccctgggtgctgtccacaggcaagagggactgcggaggccccgcccaactcctgtgtgaaacttagctcttgtctgtgatgagtgaatgccgttgttatcctcggtactggtctcggtggagtacagggcgaagaatcgcagtttcatttgagggccacccagacgggaagcacacagcagcctggggcccggacacaggggcttggcctccatgagttttctcctctgccggttctttcttttctgtcttctcgaaggagctggactccccattccaccatccttcttatacaatgtgattcctgacttttttttttttactggagaaaactgagttttattcgtatatcattcaaatcttaggaaatttgacaggaaagagtttcacaatgagctggagtttaggaaggaaagaaaacaaagtcgcccctgcaaagccagcctcattcatattcagtgaggtgtcactcacaccacctggaaaccaccgtgcttacctaagtgtttagaagtcataacttacacagaatcccattgtgcacagcacttccctgtttccagccaatttcttctttcatttcagccaaagaacagcaatctctttagtcctttcagtgaagattgcagaggctttcagaaccatggcaacctggagagtccatgtctccccatctttcctggtgccccagaagccctgccccagcgcctccccatctttcctggccccccagaagccccgcccccagcgccctccctgctctgccttccccagagcacttgcattcttacaccctcagtcacgtgtttcctttcttccccgtggcaatgaagccccttggctggtacttggcttcctttgatcgc

SEQ ID NO: 20292 - DNA, 1041 bp, Homo sapiens
aggaagcactccctgggtcacagtgcacagcagcacgtgctgaacttggtgcagtgcagacgtccatgccacatgcaccactacccatgggctgcggcagctcctagaaatctaggatgtgacatcagacgctcctccgggagtgtggtcatgccctccgatccgctgaggcatttcaaggaaagttacaccctttccaacgcagttttccttttagaaagatttggcctcagtagatgaatccatgtgatcaagcctagtgatcagctaggattcttgaatctcgggacccgttgccagaataacaaaatgggggcttcctgtaacctcggctctttaaagcaacacttctgataccagggttagggtttcagaaaatgcagccgccttaggagcctcattggcagctactttccactaaaacatcttccatttctctctctcaggagtttcctttaacagtgtttacactcagatttggagagtcctgctgcacctggctgctgacccctatccagaggtctcggacgtggccatgaaagtactcaacagcatcgcctacaaggtacgtgccgggcgctccccaccgcgctccagctgctggttctcggttacgagtatgcatgccaggaactccaggtgtgcccgggtccacaccacagtttagaaagtaacaaaacgagcttcagcaaatatcttaaatctggagatgtacacagtacaccccaaactgtgtctgtgcagctcccacgtgggcagagggtgctggatttactgatgcctgtcaaggcaattaggggaggactgacattatctttcaggatcctctggtgtctgggtgagctacagtgctggcccttcttccattttttttttctttctttacttaattatttataagagatggggtctccctgtgttgcccaggctggtcttgaactcctgggctcaagggatcctcctgcctcagcctcccaaagtgctgggattacaagcgtgagccactgcacctgttttttgtttttgtaagacagtctcact

SEQ ID NO: 20293 - DNA, 1031 bp, Homo sapiens
caattctgctgcctcggcttcccatgtagctgggattacaggcacgcgctaccatgcccagctaatttttgtatttttagtagagacggggtttcaccattgttggccaggctggtcttgaactcccgacctccagtgatccacctgtctcggcctcccaaagtgctgggattacaggcgtgagccactgcacccggccatggatacatttcttttaaaatcacattgtcatgccagaattttctctcctcctacttgacagcctctcttagaacccagagagcccggtctgtgtctccctaccctctgttctctcaagctgcctgaatcgtaaggatttcttaattcagcatgtttgcaattaacctctagaccaaagtagttctgcactgctaaaactgtctttacctctgaaattctctgaaatttctcttccagtgatctcagccgatctgcatatagatattctgatttctttttaacctcgtcaaatggcatttccttaactgagacagacagttctctgttgccaccgtgatccctccctctagaactgcacctctctgaagccattggactctctcccagctcagggcccctccgggaatcgtgagctctacgtccagcccctgaaggccgtgctgcccatcccacccctgcctggtttcagcggtggcctgctgtgtggaagtgtctgactgcctctcccaccaagccacgggcgtgcacaccctctgcatcctcagcaagcgttcacctcacctgtcttagttcctgcacctccaccacaaggatggatgctcagaacagtgggatgagccgccccaggaatgtggcatgccagcagcactaatgaacatgaacagcctggacacatgtcacacctatggcttgaaagcttgtcatgcacatgctcattcccctcactgcagacctggggaacgagggcagcatcagcctggactagcatagctacagaatcagatgtggccctgccttagagccacgctgcccaatgctggcccgtgggc

SEQ ID NO: 20294 - DNA, 1050 bp, Homo sapiens
agctgtgcgctccgtccaggccacttcacatgggagtccccgctctcagtctggtgtcacggggccatcacaggagctgtcctggaaccaagcggcagaggctttttgggggttgataaaccagcacacatggacgcacgtggcattgtctgaacagtcagttagaattgacttgggagctgtgctgggtcggccctggggatggtgggaccgacgtggctcacacttcacagcccgggcccctcaatccctggccagacgttcaggggttcttggtcaccaggatacggaagtgagcagagcacagaagtgccgtccttaggggcagcccggtgctcccggcagcgcctttgtccccagctgcagctcttttgagctcaggagtggcatgactgactggtgtttctttttccttccaaccctcctgcttaaaccctgaagactgcggacgacgcggacgatgctgctggacacaaaagtttcatctccgccacggtgcagacggggttctgcgactggagcgcccgctattttgcccagcccgtcatgaaggtgcgcccggggtgtggggttcagagtagagtcctagcgaacatgtgtctgtcccacttctttgagcataaacgctcaaggcttgtggctgtgggagcgtcccattgtggtcgtggtagtgatggtcacggttgaggtagaaccgcagaagaaacaaacttcacttaccttcctgtcgccaaacgaaaagagaaaacctgcctcgctggagcttcccagtgtgacaggtgtcactttgccttaactgacagggtcaccacaggccttcccactccctaatggtgaggatcactcgaggcccatcccaaggccacgcttgcgtggctccgaggtctggggactgttagacgcagcctgctgcagccaatcctagcgcatttggggttacaccacaagaccatctctgaggctcaaccctgacacagccctaacaagcgccgtgtgctgtggacgcagtggctgtgttcctgcaggctggggcagggcggcggctctcgg

SEQ ID NO: 20295 - DNA, 1027 bp, Homo sapiens
acttacaggggaacaaggacaagaatcaccacagacttctcattagaaactgtgtaagacagagatagtccagtaatatctttaaagtgctgaaagaaactgtcaacctagaattctgtacacacaaaaatatctttcccaaaagaaggtaacaagacaaacatatcctctcttgccacttgtcttcaacactgaactggaaattatagccagggaagttaggcgagcaaaagaaataaaacatatcatattggaaagaagaataaagccatctctgttcacagatgacatgatcctgaatattgaaaatcattcaaaatccattttaatagagtatcagaacttaaaaaccaatgcagcagtattgtacccacaagctcaatatccagtaaccatttgtatcagaatcccctacactagtaatgaaaaccctaaaaatgcaatcaagaaaacactttcatttataatcatagcaaaaataataaaatgcttaagaataaacctagtaaaagaaatgtaagacttgtactgaaacattattgaatgatactaaagaagacttaaataaagggaaagaaatcacacattcataggtcagaagactaacattaagttggcagaactccccaaatagctctacagattcagcaccatccctggcagccttttttgcaaaaattgacaagctgatactaaaatttgtatggcaatataagggacccagaataacaaaagaaaaatgtaagagacaaacatactgaacaactcacgcttcctgatttcaaaacttactacatagctgcactaattaagataccatggcattggcttaagagcagacatataggtcaatggatttgaattgagagcccagaaatataccttccgtcactgctttatgcctataaactctacaatttaggcgagatagacaaattccttggaagagattactacccagcgtcatttgatagcaaagagataacctgaatagttcctgtctattaaagaaaatgaagttttcttg

SEQ ID NO: 20296 - DNA, 1041 bp, Homo sapiens
tgcaagccccgccccgccctagagcaggcctgcaggagtggcagctcgggactcggatgcaccagggcgatatgtggagcaaccagccccgctgcgcacacagagggggcgcctgctacccgctgggcccccacccaccacggcctcatcaccagggctcgtggctccttgaggacgtcccctctcactcagtgctgcactgaatggcccttcggggcttccctcgtgttcatgtcattcctttttccaggatagattctggcacccactgcagcctgggccctcctcactgagcccggctcgcctgcctccctcctccactttttttttttttttttgacagggtctcactgtcacccaggctggagtgcaggggtgtgatcatggccactgcagctttgacctaggctcaagcaatcctcccacctcagcctcctgagtagctgggaccacaggcgtgcaccactacactcggctgatttttgtttactttttgtagagacaggactcagtctcactatgtggctcaggctggctttgaagactcggtctcactttgttgcccaggctggcttcgaactcctggattcaggggatcctgctgcctcggcttcccaaagctctgggattgcaggcgtgagccccacgctggcccctcctccacttttaaggaccttgtgattacactgggccccccgggatgctccagggtcaccaccctagtttaaagtcagctgatccaaccttatttcatctgcaacctggatcccccgagccaggtagtcacaggctcccactaggatgtggacatcgatagggaacactatgctgccaaccaacccctgtctacaagccaaagagcatcccaccaggtagagcccacgaacactcaggggtcttgggcaggaggtgggtggacacagggcgggaaggagatgctcagtggggttgggggaagcaccggccgcgatgggcctcccagatctcagggccaaggcatgggaagctggcaccatgtccgggtccttggggctgtcggta

SEQ ID NO: 20297 - DNA, 1076 bp, Homo sapiens
gtatttttagtagagacggggtttcaccgtgttagccaggatggtctcgatctcctgacctcgtgatccgcccgccttggcctcccaaagtgctgggattacaggcgtgagccaccgcgccgggccttttttttttttttttttttttttttttttttgagatggagtctcactgtcacccaggctggagtgcagtggcgcaatctcatctcactgcaacctccgccttgcaagttcaagcgattcttgtgcctccacctcccgagtagctaggattacaggcgtgcgccaccatgcctagctaatttttgtatttttcgtaaagacgggattttgccatgttggccaggctggtctcgaactcatgacctcatgatccacccacctcagcctcccaaagtgctgagattacaggcgtgagccaccacgcctggccacgggtttgtttttgttttacttttaaaaactttttggtctgggagaaaaatgacacactagcaatgaacaatctgaaaaggaaattaagaaaccaattctatttacaataggatgcaaaagaataaaatatctagaaacaaatttgacaaaggaaatgaaagactttgacactgaaaactacaaaacattgctgaaagtaagaggctctaaagatggaaagaaatcccacgttcatggattggatgacctaatattgttaagttagcaatactccccacaatgatctacagattcaaggcaatctctatcaaaattccgatggcctttttcacagaaatagaaaaaccaggctaggtatagtggctcacacctgtaatcccgacactttgggaggcggaggcaggtggattgcttgagcctaggaattcaagaccagcctggacaacataacccccattctacaaaaaatacaaaaattagccaggcatgatggcgtagtagtcccagctacttgggaggctaaggcaggaggatcacttgtacccgagaggttaatactgcagtgagccgtcgtcacaccactgcactccagcctgggtgacagaatgagaccctgtctccaaaaataaaaagaaaaa

SEQ ID NO: 20298 - DNA, 1083 bp, Homo sapiens
ttggccaaagtggctcggaagcaccatctcatgtcactcacctggtagggcctcctgctctctgtgaggccaggctgtgtcacggcccctctgggctcaggcggctccatgcacagtgcacccaggggcccatgtgtcccagcctcctcctgcaggtggaggccgcagcctccctttgggccagtgactgtgacagcagtgtatgggcatgacacctgctttcaggccctcacggcagggccttgccttgtaggctgccaagtcttcctgacagacaccatttgaaggccttaattagatcaaccttacatccccgagggggcctgacacggaggtccctggttggtcccggacctccagcacagcggcgcctgcagatgagagggaagcgagatgcccctggcccaagcccagcctgggggcttcccttccagagcccaaccgcttgctccgacctgcctgtacctcccttcccccccacactattcctccctccctacagtaggactccggcaggggtgctccagagacagccacctgaagaagccaccaggatgcttgggaaggacgctgccctgggccctgcctcccgccccatggggatctttcaggcccccaccgcctgttcgcagaggcgcgtgctcctgctgaactctgtggggaccctccagcacctgagcaggggaagggggcgggggggcctcatggtgggcgggtggagggccttgttcccctctggctgtggctggggatggcccagccctgcccgcctgccaacagctttgcggtgcaggctgagctctgcagggagattagcagccgtcctgattggattggccgtgttgcagccgcggcagccaagtgtgggcccctggtctggctgctcgtggtttgatcctgagccgtttcctgctggtgatcagtagctccgagcgtcacccacagaggggctgctggagtctcactcagcaagaggctctgaggcccggccaggtgtcctctgccggcgttgctgctgctccctttggcccagcatcgcagcggggaggcaccctccctgagcgctcacgccacagcgtcagg

SEQ ID NO: 20299 - DNA, 1048 bp, Homo sapiens
cgacagagacaggggcccctgacactgaggcttgcatgttggtgcacaggcaggctggggctgtcccctccgggaggcaaggccaaattccccatcaggtcaggtcagcactctccctgaccccatgccccagctcacatcctggccaggtccaggccagctgcattctcccccttctgcccttacttccaggtctaggcagcacccgggtaggtgggcgcctggtcgggtggcctagccctttgtcttgctcattctaagtttggccacgtggttcttggcgtgtaggccccggagggctgtgagaaacggctctgggctctggcctggcctgtgtcctccctgcttcttcttgatcccaggtcctcccagcctccccaagcgcagggtgctctagagggcgctggaggcccctcggggctgcctctttcagggtctgaagggtcatgtgtccccgtccctggaggccccatttcctcccccctgcggaccgaagagaacgcttgtgctcggagatgttcaacccatttgtgatgggcaacttggtcatgcagacatccagctagaagcatctgtagctgaaagaaagccttttgaaattgttaagagccagaatattgtattggtttttaaaatttagctgcatgtatttttttaaaaaaagaattataccccagatcactttgctttggtctgtgtctatatatgatctagtttagagagaaaaaagcataattacgttaaacaatttttttgcgtcttgtgtgcggacttccacatggctggtttggctgccttgcttcccattttcctggatggcttcagtccgcaggccacagctgcagccagcccgcccctccctctgctgactgccccttggaaaggaaaattgacccggattcttcccgcctgtctgggagtagaatccaaccatcggggatggaggccctggcctccatgaggctgcctctttttgctgggctgctcttcctgtgcctgtctggcctggcactgccaccccggctggactgaggctgttcctgctggc

SEQ ID NO: 20300 - DNA, 1056 bp, Homo sapiens
cctgctgcagggaggcctatgggactgggagctcctgggctcttccgcccacccaggggccccaaggacagccggacaacagtgggcgggtccagagcacctgggacacccgagggccaggtgtctgcttcgtccaccctgggccttggtccgggcactccctgcggtccagtgctcccgggaaagcgcccgcttcctgccgtcttccctgtgggccccagagaaagccccggggtggagggcgtcccccagccgggcacggcgccgtggttgttgatagcacgaagctgacagtcttcagggctcggccgctgctttctggatgcataaagctcaccaccgcgatgaagagaatgttctcgaacagtgcatttccccaggggcccgtggtcaccctgtgctggatgaggctgctggcccgcacgcggcaggggtggttccgcagtgctgggagctgcctgccctcgggggtatctggcccagagtccctgcttctgggtggggctgtgcagagggtttgaggaagcttggagtcctaccagggtgggctccacctggaccccccagaggccctcccttgggcctccagctggcaatatatgagaagttagatagggcgaggtggaggcaccttggggcagggcctgagctgccagggacccgccgtgggagggtctcagggaccctcacctggcagcatgaggaggcgtcagtagatagcaggtcccgtgtgtatggccagagtggccggtctgcctgtgtgaatgcctgcaggacaggagcccgttcactgcatgaatactcatgtgtagaccacgtgtcccgggtggtgggccatgtggcttaacccagcatggatgtcgtcacactccggccaggccaggtgtcccaatccccagggtgtgcagaagtggagtcagggccagctctgccctccgggtctccacctcatggtccccccctgggcccccacccctgcccctgccctccccttgtccccgttaatgggcaggtctctgcagctgctgggctcagagctgatccctacaagtgtag

SEQ ID NO: 20301 - DNA, 1063 bp, Homo sapiens
gggttgtgcatgagcctctgaccatcccccctgcggcccccaggagagacgagagttcacggagccctgcacggcgggggcctggccggccgaggaagcgcaaacactcaagctcgctgcctgccccacgtcccacggggccgctccccaggagcgatggcaagaaagtcaagtgagtcctgggcactggcatggcagggcgcgtgtggccggccctgggccctcgaggctggggagcagggtccaggctcccctgaggcttccaggctgctggtgccccttcacacctactctgaaggcctggccctgcccttcctagaccatcgagagtgaccagcagacagagccctgctccagacaggctttgcccttctggcagctcccagcaccaccctggcccgggtccccctctggaagtcacggcccccaggcccagccacgccggctctgcacacctggctgtggcatcgtccccgcccggcccccctggagtgtgaggcggtgttgcgtgcaggcctctttatctgcactgtataaagtcgttggtcacgctgtggagctgctcacggctgccggcgcgatgttattatccattacccgcccggcgcagtcgttggcgcactcccgggcctggtataattgtccttctcggctacaaattgcctctcccggcaggcccatttgcataaatcctccgagctcctccaaacacgattggcgcgtgcgtgtgcgcactgcatcaatcctgatgatttggtaataatagttaaatcggcactaaatggttccttcaattaagacaggcaaaaaattaatctcagggcttcatgtcacaaaacattagcaaatgcagagaaggttacggggaggggctgtgtggctgtgggcagtggaggggtcaccatatggctgcccccccccagagctgcccctgccctgcccaggtgtctcctgggggggggtctcctggggtctccctttgagaaccagccagcactgtgggaactgctgggcaggacagggcccctggaaaccaggatctggctagaaggcagcagcctca

SEQ ID NO: 20302 - DNA, 1025 bp, Homo sapiens
tgtgttgtctatttatttctctatgtaaatattgtatttctgcggggaaattttatggtaaaaagtggaaaagggtttttccccatccgcgtgacaaggtgtgtgtgagcgtgtatgtgtgtgcgcgtgtgtggcgatttttgtcctggggtttcctttggaaatgcactgttctcagcccagctgggttccaacgggggcacctgggacgacagaggcatctcggggcagggggcagaggccacgggagggtcaggtgggacccttgacggcaccctctgatctcttggggggacgaccgtgtaagatgaaagtcggtcaagtttatttgctttcagtgcatctcctagaaaagaagtgttggagcagggggtggtgatgaggggcccgtggggaaaggattcaagaggcaaagcccagaccagggagtgtgacaacagccgtgagcatctcacctgtgttcaaaacaagacaaagacgaacaaatattttaaagtattgataagaaaaagcaatgtttggattgtatctgctgaatcatattccaacctatatctgatttctgtttccggggccagttggtctgaggccaaggagtctggcctccacccagagcagggaggggctggcccctcgcccccctcaccctcgccgccctggcacactcgggaagcagggcccagctctgagcccctcctcacccctggggtcctaactttcctgaaagtagtaggtgccgtgagaaggggcagtttggccaggttcctgaactgggcagggctcggggcctatgagggcaggttcacagtcccaccagattctctcctcacccccaagcagaatgcatgcaaaagacaccccttttcccacccaccttattggtgcccccaaacccctggcctgctgcgtagatggtggtgaggccaggccagcagtgctgtggccaggggagaagaaaataaaacgcaggccctgcccttggggaaggcccctttctgggcccccttttccaccagccaaatctg

SEQ ID NO: 20303 - DNA, 1052 bp, Homo sapiens
tcacctgctggctggaccccctgaagggccgttcccagaggctccccaggaggctcaaggctgggggcttatgttgtggtcgggggtccccgcctccagccccccgctcccacccccgagcctaccctttgtctcgcatgagtgcaatatttcattcccggtggttgtctggggaggtggttggacgaggtcctgcttgaggctcggggatcagaacgatgtcaagtgaagaaaaatgcacgggggcatgctgagccactggagttccagagagggccgaggagggtgcagccacggaggttggatcctctgctccgccgcctcgtcctcgtcccgcttctgctgggttccgctttgtccctggttttttcctttctttttctgtgtgcgtgcgaatggtgcggcccctcccctctcaccgtggttaacgtgacgaaggcacgattcctgtaaatgtgtaaactaaggggatggttggattttttttcaatgtaaacactaaaaacaaaatggacaaaaaaacacacaaaggttttatgaacagcagactctatgtaaaggcattttagtatcaaattttttattgataacttgcttaagaataaatatatggactattgtacaggttttcggtggtccagggtcctgtgtcccacggtactcctgggggttccccagggctccgggggctcagcagaagcctctcgttcccagagctggggcttctgggccaggcctccccaccgccccctgtgttggcccaagtgaagcccctcaggccaggaaagggtcatgtgaccggaatgggctcagagtggtcttaggggtggggtccctccaggaggagggcccctttcctggttgctctcacagtccctgtccagcctgaaccagtccagggccagagtaggttccactggagaggacgaagggcaagagcagtctccgagccgccacgctgggcagggtctcagacgtgaatgaccatcctgggaggggcggcccacggcccgggtgtgggaacacagatgagtgcacccccagctggagag

SEQ ID NO: 20304 - DNA, 1077 bp, Homo sapiens
gagaagaagaaagtgaactgcaagcccaagaaccaggacgaacaggagattcctttccggctccgggagattatgaggagccgccaagagatgaaaaacccgatcagtaacaagaagaggaagaaagcaggtgtgtgcaggcccatactgggcggcagtgaagctttgtgtgtctcaacccgcccaatcgcccaaatacttcagaacgtttcaggcagaggaaatatgccaagacccggtgctcagaaggtgggggagcgtggccaaagctaaagcagtggctggcagctggtggcgctgtggttccagacgaggcttggaaggaggctgtggggtgggcggggaggacccgttatggggcctcaggatccatgctaaggagcggcgtttttttctccccaaaagtagcgaagattcatcagagtttttagcagggcacggccaattcatgtttactctaagcaaaaaaagggtcaccgagcgatgatggagtgagggagagtggacctggcaactggcggggctactgccagggagaagccatgattcttgggacaagagtgctgaagcaatggtagagagaagtgggtggagtcaggagctgaaggaggaaattccatcaggcccctctgagaagtcttgccttcctcccccaagtctgggtagggtgtccacatgtccaccgctgcaacccagaggtaacactctgggcatgttgggaaacggagtccactgtgtgtatattttgcttatagacacatttctcttcccaaacgtggcactggttttacagcaaagctgttttataatttgtgtataaactgtaggcttcttgttgggggttatatggctgccaaagggatagtgagatagaggtgaggaaggtgcagggaggaggcgcactggcctgggtagcacatggcacgttctgaaccgtgctgcattgaattggcacctttgtttgtttgtttatttatttatttattgagatggagtcttgcttcctcgcccaggctggagtgcagtggcgtgatctgggctcactgcaacctccacctcctgggtttaagcagttct

SEQ ID NO: 20305 - DNA, 2038 bp, Homo sapiens
ggctctagggccggcgcggtgacgtgcgcgtgcgcgcactggagggaaaaggcggaagcggaagtcggggggcgcgccagctcgtagcaggggagcgcccgcggcgtcgggtttgggctggaggtcgccatggggcgaggcagcggcaccttcgagcgtctcctaggtaacgcgtccccacccgacggctcggccttggtcagcccgcagcctccgcccggcgctgagtcagcgcggccccgagggcccgaggggcgcggaccggccgccctgcccgcctctccccggcccgctgtcctcccgggttcggagccgccgatcctggaccctcggcgcggccgtggggtcggcgtccgtcgggcgttggcaaatggggctctgcgagggtccgcgcagggcgccaggggcgctcggcgacctcgctcctccgcgggcccgggcattcggccgatttcctcttgaccgacgagcacccggccgagtgggccacaaggcctgagtcatgaaagtgggtgactcagtcggatgttaggctcgcacttgggcttctgacccaaaacactgggcctcgaagggtggagccggcagtgttctctctgggaccttcgagctctcttgggggctgcgggtcccagacccaccttttgttcccacactggcttcgggaagtgcctaatggtttaggaaggcgttttctcacgtttttggaggtgaaagctgatcctatctgagcctcctggaattgacgcgttttgggagggaaacgaatgttgatgtgcacgtgcccagcagcacgtggaaaatgcgtctaatgtttgggggtaggagcttgggtggtcgaatgggctgcccaagcttgcctttttgtcaagtagggttttcaaggagacttcaagtgagacaccttccttgccaagggaaccagcaagcagactgagtatctcagccacacaggtagttcagtgcttcagggatgaatccagaggttaactactgaatcagtatagaaagtggacgtggcttggcttgttagatcgtttctgtatccgggaaaggcgatgtgggcagagctggagctgcccccccagaggggccagttgttggagacagcagtgatgtggtatgatgacaggtatgctggcgagtcctccttggagccccgttctgcccttatttccaaagcacttggcttggagcaaggggcctggagtctacactgcaggcctctctagcccttgcccaagctaaggtcccattgaaaccgggagcatctgggcgaacggggactccaagggacgggtgatagggttctttgttgagaagcagccgagcctgatgtttaagagtgaatcagcctctgtctctggtgagctgtgtgactcacggcagtgccctcgcctctctgctgagtgtctttacctcgctcgcgggttgtgggagggcttggaccagcacctggtgtgctcttacgctgtttgctgcttccctggggaggatggcacttccctgcccatcagcacgctcaggaggattctgtcatgctttttcatttggtccaaatgtctaaaggggaaggagagagtcccccccagctgctgccaagctggggtgctgcacggggcgtccagcaggataacccctccctttcatggcattttctctctcagacaaggcgaccagccagctcctgttggagacagattgggagtccattttgcagatctgcgacctgatccgccaaggggacacacagtgagttagcggggcctgtgccctgatgcggaggagcagccgtgcactaagctgggctcgcttggtgcccgttgggtctccacgacgtagctgaccgtgttaggctcttatgtggagaactgcatgggctacatgctaggattttttgacatcttggaggattaaggggttttctctgtacagcttgcagatacctggttatgtttgtatttgcttcggggttctcaaagactaagatggcagacagacttttttttttaagacggggccttgctttgtcacccag

SEQ ID NO: 20306 - DNA, 1101 bp, Homo sapiens
cgggttcagaccggctcctgcctttctggacccacggcccacgggcaggggcaggcagtgatggcagacaacacacaggtgaaaaggcagcagacagcctgtttcagagtggcaggactcctgggggccgggttgggctgtgcagtcagggaaggcctctgaaggagctgtcccaagtgtcgagactggaacagaagccagagccggcgtgagcaggcaggcagcacccgtgggcagacactcagggttgaggccccagggcagaaaggtggccagcgtgccagaggagagtgcagccgggcctgtgcgccgagggcctccaggctgttgggctggagttcagggttgctgtcagcgcagcaggaggcctctggtgggttttcgtctaggtcgtggctgccaaggtgtgtttcttaagggtccctctcggccattgtggccgtggagaactaggggattgtgtagagagaggtgggggcttcaggatgcatttgggagtcttggctggtgctcagggcccactcagtgagagagaggtgggcatggctgctcacatctgtgcgggttctctgtggccctgagtctgctgaagacgaggctgagagcgtggggaatggggcaggctccaggggtggtgcgtccccgctgcaggagttggacgcttgccctgtggctgcagggtgggcaggaccagtgtggagaacacgggaagaacgcagggggcgctgcacgagctgccttggaccctcaactttggggtggtggatgctggtggtctgtgctcctgtctccttcctggggtgggagctctcctggattttttctggggtcgtgtgtcaagaatagctcaaggtcttgtcctcaggatcagtgggagccctggccagagagcagagggtgagggagccactcagcaggcggggccacgcaggggcctcatgccctgatggagtgggagcagtgtctcaggaagagggcagcagggcctggctcttgtctcccgccacagtgaggacagaggccccatggggacacccaatcttgggggcaggaggctgtctcggtgcccccagacaccttcacttgggtgcacggtcactg

SEQ ID NO: 20307 - DNA, 1028 bp, Homo sapiens
gggcataggggttcacgcctgtaatcccagcactttgggaggccgcagtggcagatcgcttgaggccaggagttcaagaccagcctggcctacatggtgaaacctcgactactaaaaatacaaaaattagtcgggcgtggagtcacgtgcctatagcctcagctactcaggaggccgaagcacaagaaatgagctgagatcatgccactgcactacagcctgggtgacagagtgagactctgtctcaaaaaaaaaaaattaataaaaataaaagtaaaataaaatagaaacagggctcacgatgtttcccaggctgggttcggactcctgggccggtatgatcttcctgccttggccccctgagtagctgggactgcactgtggcaggcttatacctgtgttggtgcctaaacgttctagctctgcagactcaatttagccagtcgtcctgttccctccgccgcaggctctgctgccatgaaggtgaagattaagtgctggaacggcgtggccacttggctctgggtggccaacgatgagaactgtggcatctgcaggatggcatttaacggatgctgccctgactgtgagtgtcccctccatgctgtctgagcggccccgactgtgagtgtcccctctgtgctgtctgctgcctgctggactagcctcagtagctcctgttaaatacctgcacgaaatacccagtttcattttctttttttttttttttttttgagaccgagtttcgatcttgtttcccaggctggagtgcaatggcgcgatctcggcttgccgcaacctctgcctcccgggttcaaacggttctcctgcctcagccttccaagcagctgggattacaggcatgtgccaccatgctgggctaatttttttatttttagtagagacggggttttgccttgttggctaggctggccttgaactcctgacctcaggtgacctgcccgcttcagccttccaaagtgctgggattacaggtgtgagccactttgcctggcccacatttttat

SEQ ID NO: 20308 - DNA, 1050 bp, Homo sapiens
tgggtgtggtggcaggtgcctgtaatcccagctactcgggagactgaggcaggagaatctcttgaacccgggaggcggaggttgcagtgagccgagatcgtgccactgcactccagcccgggtgacagagtgaaactccatctcaaaaaaaaaaaaaaaaaagaaaacaagaagtggccaggagggctctgtgcacatggccccggcctcggctgtcccctgggcactcgtgctacgtgtcccggaactcaggtgaggtcaggagtttgcttcctcctcctctggccacttctgagtgaagcaacctcatgcctccctcttgcctcccggccacacacctgggagggcagaggccgggcgtctgcaccgtgttggatgtgggggctcccatctagcccggcgtcagggtccagcccctctgttttctgtccccctggctgtcctgggactgttcctgttgagtggacaagggagtggggagtgagggtgttgggtccattctaggactatgatggtgttggcaccccatcctccctctgggaactctgccaaactctgcactgtgacacctgagtccccatgaagcgctcgtgcccctcgacccgtgtgctccgggtgagcaggggctgaccccctctaggcctgctcttgtggggacccctcagtgtgagagacacagtggctgtcatgttcccccattctagaggcgtgggcctcagccccttccctccgtgaccagggcgggtcttgtctgcagagcgtggggcgtggagcatggggctcgcagcccagagtagtgcccgcccgtgctcgcccgtcgggaggcgctgttggggtggggtcttggctggcaggaggggtccaggggagggagcgtgtgcctggcctgcatggcgtgctgagggcctttgatctgggacttgggcagctgattgatggagggcgtcctgcctgccccgcgcctcccatcgccgccagccgcacacgcagagggcccggggccacatgccgctgctgggtccctttcagtgatggggggaggggagaagg

SEQ ID NO: 20309 - DNA, 1058 bp, Homo sapiens
gggctgcccttgctgggcagagggtccgaggccgggcccgggagccacgtggcttgccctgtccgcagcgccgtggggaagacatgcttgctgatcagctacacgaccaacgccttccccggagagtacatccccaccgtgtgagtgtgggggcttcccgggagagcacaggccctccgtgtgagtgtggcatgggggggacacgggcagggtctcctctgggcttccacgtcggctcaggtggccctgtctctgggcttcccggctggagctgaggtgctggccagagttctagttctgtgcagacttgtgaaccccaagacacaggccagcagggctgggggtttctgggacccctcccaagccctgaccctgccctcactgctctgcagttttgacaactactctgccaacgtgatggtggacgggaaaccagtcaacttggggctgtgggacacagcgggtcaggaggactacgatcggctgcggccactctcctacccccaaactgtacgtaacaatggggccagccccgggagctgggggggtccctgagatccgcacaagggagggagcagggccctggggagcccctgaccactccaccaggtcccacctttttcccaaggacgtctttctgatctgcttctctctggtgagcccggcctccttcgagaatgttcgtgccaaggtagggcaaggctgggggcccctgtggggagagggcttgccccagtacctgccccgacaagttgtcctttagaggcaattgcgatacgggttctgcctggggtaggcacacggagtggggtctgaagatgaccatgggggctgatggggtgccgtggtggtggtcacagctctcagaatggagggttctgagggctctggctgctggggatgggccttgactaggaggccctgggaggtctccaggttccctggctgcgtgtttgttcctggtatctccccaccaaatccgcccctggtcaccccttgaaggaagaagagccaagtgtagctctggaacagtggggaaagtccctgagggccgtgac

SEQ ID NO: 20310 - DNA, 1028 bp, Homo sapiens
tgtgatgaaccacccccagtcaccctcctgccggtcgcagagcattgtgttcgtgtggaggacacgcgaggactcttggaagtgctttttggcggggtagtgcagtgtgttccgggcggacgggcgtcagtttacgtgtgcgtttctcatccttgcaggtacctggccccgggcactcaggtggcagggacattttgctgttatccttcgtgggggtggacgtggaaggcccagcagtgaccgctgtccccggttggcccccaccctgccagcacctgacatgcacaccccaacctgcatgaggcccaggtgcccacctggcttccaggggtcaccttggcccggttcactgggatccaaggctctcactccttctgggagggcccctcccatggtactctcaggagacgcctgctttgtgggtgggctttctgatctgccccctacctgctaccaggctctgaggaaggccacactgtccccaacaccactggtgtgcagatggctgtgggtggtgacacgggcaggccaggctctggcacaggcacttgatactgcatttcccaagtaggacagataaacaacgctaaggccaagcagacgccccagggaggaacctggttttaatgggccctgtgctcagggaggccttcagtcagcagggtcgcctcagcagcatttgggagcctgccctgcagctccctgcctccaccctgcacgctgtgcccacacccccccacaacacgtaggtgaaagcacaggcaccatgcggaggccccgagcaccccttagtggggcggggtggggggaggaagtcagtccataatgttgtagttacggatcttggggggcctctggcagcctttagcttttgcaggatgagaccgggaggctcctgtggtcttggcctttgcctgggctgctgtcttcatccctggggtggcaatgcctgcctgcatcttgacgggcctcctgtcggctgctggaggagctgggagctctgtcaggtaaagaggaaaaaacagcat

SEQ ID NO: 20311 - DNA, 1042 bp, Homo sapiens
ccaccccatgtgtttggctccctgtcctgctgccttctcagtgcttgtgcacccccagcctcatcagacttgtcactctattagaacaggatgtagggcctggactgttggctccctgctacccccacccacaggacagtgctggggttgacccgactttggctgcacatttgactggcccctggatcagctctaggactagatgtacccaaaaggatgcccacatccttgcctcagctcctgcctctgcccacccagagagctgccttgcccccatgtccacgatgcagccaccaggcctgggtaagcgtgggtgtccgagacgggctgggacacccagaagaggagccaggacttgcttggtctgtatcccggctctgcatgcctcagtgtccctgcctgtaaagtgggatctatgggaacccatgtgtgggccgggcacagtgctcacacctgtgaacccagcaccttgggaggccaaagggaggatcctttgagctcgggagacagggtctcgctctgttgcccaggctgtagttcagcggcgtgatctcagctcactgcagcctccgcctcccaggttcaagcgattctcctgcctcagcttcctgagtaactgggattacaggcacttgccaccatgcccagctaattttgtatttttagtagagatggggttttgccatgttggccaggctggtctcaaactcctgacctcaagtgatctgcctgcctcggcctcccaaagtgctgtgattacaggtgtgagtcatcatgcctggccaaaaaaaatttttttaaattaaccgggtgtgatggcacatgcctgtggtcccagctacctgaggccaaggtgggaagatcacttgaacacagcacttcgaggccacagtgaactatgatcgcgccactgcactccagcctgggtgacagagcaagaccctgtctccaaaaaaaaccctctaaacctatgtgttatggatagggcctctaagaaggtaattaaagttacgtgagtcctaagggtgggaccctgaactgt

SEQ ID NO: 20312 - DNA, 1029 bp, Homo sapiens
tgaactgaggcacagggcagtactgaccatggggctgagggcaagtcccaagtgtgcagactgtgcgttcatggcgccctcacctgcagcctcctggcacagtggagcaccctcgtgcaggagctggaggctgccctgcagctggctttctacccggatgccgtggaggagtggctggaggaaaacgtgcaccccagcctgcagcggctgcaagctctgctgcaggacctcagcgaggtgtctgcccccccgctgccacccaccagccctggcagggacgttgctcaggacccctgaggggagagctcatgccagggggctcctgctggaggctgggggggctctgcactgccaaatggcctgggcaatacgggcccacgtgggcgtcgtgccctctggcccagcagtgtcttgcccacactcagttcctgagggccctgggcagcccctgggggagagactagaaaacacagaaggaagcagcacagggagacccgctttgtgatctgcatgtgtgacactgattctttggaaataaagagtggaagctgcaggtgacacgtgaagggttatttatggttatgatgaccctgtcctgcaacgagggactggcagccactactgaggaggagggtcccatctctctcctgtcggctttcaccgaggtcacagccagacgtggggcaaaggtgttccctgtcctacccagccattcctgggcctgccgcctaggggctcacagggcccaggagtccccagctcacaggccagggcatcaggccaggcgcgctcggtgcacaccgcacctgggaggacctgggtacactcaggagaccaagagcactggcgggtcaggatggttggcgttcagctcctacggggtggggagaagtctgtagccgagagcccagccccctcctgccaggtcttcccaggttcgagagaggctggaactcaatttctgcagaaaatctcccagtttttcctgtttggttagtttttttacaaagacaggatcttgctgtgttg

SEQ ID NO: 20313 - DNA, 1774 bp, Homo sapiens
ttcccatgacccacagccgggccaccgaggacgggttttgggtccagcacgagctcctggtaaggcctggggaaaaggtgttctggcttcaccctggggcggcagggactcgagctcagcattccctggtgcgttacaggaagaccagaggaagcagtaaggagctgaccgtggatcccttctctccccaggctgggtccgatacgccgagcgggtgctgggtcgccccatcactgcccacctctgcaccgccaagtccccccagcaggtcatgggctctttggtgaaggattatttcgccagacagcaggtaagctgacctctctggagggcaggaagggcaggtgagggaggaccatggcacaggggcccaggaaggggaggttccccatctgtccagcgtggtcacggccccccaggtgagcaaaaaggaagctgtggcttcaggaaacatcagcagtgctgtttctcaccaacgcccgtctctattcctcccttcctcttacaacctttttctttcttcttaaccttttctgtggcatctggtggttttcctgggcccattcggggtagagtagaaatgctgcccaccctgctgagaatgaggccccggaccttgcccagagatgctgcctgcctgctgttgggatgcctcacccaaggaggcctaaagtggcctgtgcctggaggctgagggcagctgtcatttagggagccaaacctggcctctgccctggcctttccctcagaccacgggcatcacatgacttccttagccacttctgtgagattccacagtggccatgatgctgtcctcctcttgatggagtgagtcccggcctgaggctcctgcgtgccccctgcctcggcccgtcgtgttctcccttcccacaaccctctgcggcccccaggtcctcccagaactccctgatgtctccaaggccaccctcaaagggaccctaatcccatggtttattctccagccgctggcatgccccacactgctcttctcaatcagactttacacctccctccggggaagcagccatgtccaggcactgtggtaactggagtagagggtaacatcaggatctttcagacatttgaagtcagcctaaaaaggcacgcacatttggcagccttgttattttagcaataggcagtgttttccttctatctagtttctttctacccataaagtcataatttggcaaattataaacatgatgtcagagtatacacgttcagtttaggcaggaccgaaaaatgagctatgggactttctgtcccttgccctgcccccacctgaagagagccatgtgtttctaggtcttccacgtgctgccctctcccctggatggagcccagagctatgtgtcctcctgtaggtgccatgaggggcagccgcagagacccggcctccagcagcctctcacctgaccacctggcacagctgcaaccaggggcgggtttcctcttttgctccgcccctgccctgagtgggtcctttccacccagacctcaccacagggtcacttggcaactgctggctcctggctttgccaccagttcaggcccagccacaggcacctgctctgtgtggacccaggagaggggtagcttgggtgggcatcgcttgggaagattcaggaaagtctgtgggtgaagtagccagcgcgcgcacacacacacacacacacacactcactcaggcctcctgcaatggctccatgctggaccagcaacagctccacgccggctggacttcctctta

SEQ ID NO: 20314 - DNA, 1055 bp, Homo sapiens
gggcgctggggtaatctcctactggccagtacacaccagagccaggcagatctgtgtcccagagccatctcagtgcctgccaatgtggtcgcttgtctgaagttactgacagctgagggtcctaggggcttaactgcaggtgaagagaagggtcatgttcgatctagcctcctgtctcctctgtgcatcttcctcaagataaatcaggtctcagctgggcacagtggctcacgcctgtaatctaagcactgggaggccaaggcaggtggatcacctgaggtcaggagttcgagaccagcctgaccaacatggagaaaccccgtctctactaaaactacaaaaaactagccgggcatggtggcacatgcctgtaatcccagctgctcgggaggctgaggcaggagaatcgcttgaacccgggaggcagaggttgcagtaagccgagatcgcgccattaccctccagcctgggcaacaagagtaaaactttgtctcaaaaaaaaaaaaaaaagataaatcaggtcctgggagaaccacttgggcagtgtggtggccctaactttacattacagtccatgtaaggtacttatctcttggtgggaaagttgtctatagccatagcgggtctcctaatcacaaaccaagtctgcacttaaaacacaagtgaagtttttttcattcagaataaaatgaaaaaggcacgtttgctccagtgatattgcctttaccacggtattggccactcctttcagatgttaagagcctacagtgagttctgtgtgtgttgtggatggaagtgattccctggaattatgtagaacccattcagaagaatgttgacatcagttggtgggggaagcttaagactttgttaaaattctggcggaactgttttaattggtctctgaaaacaggtccctgcaggtatttagatcagtggtagatgaggcagagaggtcagctctcagggacaatctttaagggcgccaatgtccctcacaggcccctgacttgaaattctagcacgcagacgcctctggaaaggtccccacccca

SEQ ID NO: 20315 - DNA, 1742 bp, Homo sapiens
actttgggaagccgagacaggtggatcatctgaggtcaggagttcgagatcagcctggccaacatggcgaaactccgactctactaaaaatacaaaaattaactgggcatggtggcggatgcctgtaatcccagcaactcaggaggctgaggcaggataatcacttgaacccacagggtgaaggttgtggtgagctgagatggcgccactgtactccagcctgggtgacatagcaagactttgtctcaaaaccgaagatattcatttggcaaattgagatacattgttatcactgatttgtagacacagaacacattgcagctattttagcataattgttactttaagttaaaaacccagtaaccaacttacttctgcctcaccttagtgtttagtacttcttccagtggtaaaactctgtgttccttttattttattatttagagtctcactctgtcacccaggctggagtacagtggcaccatcatagctcactgcagccttgaactcctggactcaagcgatcttcccacctcagtctcccgtgtagctgagagtacaggcctgcatggccattcagggctaatttatttttttttggacgtggggtctcgctatgttgcccaggctggtcgcaaattcctgtcctcaagcagtccccccacctcagtctgccaaagtgctgggattacaggtgcgagccaccctgcctggcctatacatgttttcaagtgctgatcatttattaatagtgaagtgattgtagtcaggcgtggctcccccatttactggcaggtcccatttagacctgcggttgcagaagtacagcacagctctgtgcatgattggtggaaatattccaggagatgaggctgttacagtaacagcagatttttccattgtgaaaatgtaactattcctgctttgttgaagagaaagatttttttggaaaatgaagaaaagaggatttctaaattaaggaagcttttagtgaaagcagttggcatttgggtagtagtattcttatctgtttaacatttttgtggggctcttgttttcttttatgtttggtttttggagcaatttataatatcttaaataatgacagtcatagtaaatcaacctccacactttttcatgaggaatttttgaatttgctgctaaaatgcagtacaggagggcatgtttaaggcacacattaccatctctacaatgtgaagcgggctttgagcacggaacaaggtgttacagctgtacctaggaagtggtggcagggagaccagaaagtacctcgtgccagagccacagcccctgcggccctgctttcctcgtgcacgtcagtttagagtgcacattgggcttcaaacgcctctgctgatttgttaggaacagagaaggtgctctgctgagaattccgtagatttctagacagtatttggtttttgctgcagtttgtcatttgagatggaatgcttgtgttctttgtcctgtgaagggcattggagtacgacaccggggtgagtctgcctccttcccctccctgggacgtatgacagtgtctggaggcacatttggttggcatagactgggaggacgggtgctactggcatctagtggacagaggccagggatgccactgaaaaatcttacaacgcacaggacgcaggaggggagagccgcctgttgcgtagcaacctggcagctgataatataataaaagttggttatgactcttggtccta

SEQ ID NO: 20316 - DNA, 1272 bp, Homo sapiens
cctcctcccgggttcaaacaattctcctgcctcagtctcccgagtagctgggattacaggcgccaccaccacgctctgctaatttttgtatttttagtagagacggggtttcaccatgtgggccaggctggtctcaaactcctgactgcaggtgattcccctgtcttggcctcccaaagtgttgggatcacaggccaaagtgtgagtcactgtgcccggtctactgttgtgttttcaaagtggcttttttggtcttgtatttttcagaatacgatagcattttgagtatatagagaatgttttaaaaattctgtgtttttgccatttctgagctgttggaggatgttaggataatgaacatcattttgatagccatttgagctgggtggaagaagatgtggtttaaatataaaatgtctgttctgggtcctccttgaggacctgttcccactttgccaagcttccccctggacttgtccacacgtgattaaacacagctgaaatcctgtacacttgagtgaactgcatgtaagtgttctgtgggctgggctgattcatctttacattgtacacttcctggggttgtagcctttgacccctgggtgacctcctccaggaattctgggtactcgataggactcaaatgtttattgctgaattggttggatgtgggcttctgagtttggattgggtgactactgtaccataggaaaccatgtaaaacagttataaatgtaagtcagattaaattcacttctgattctacagttgctcccacttttttttgtttttgttgatggtagactccccaaagtgacttttttggccttgtacagtcatgcatcacttaactgtggaaatcattctgagaaatgcattgttaggtgatttcattgttgtgcgaacatcatagagcatacttgtacaagcctagatgacacagcctgctgcacacccaggctgtgtgtatatcctgttgcgcctacagccacatgctgcacaaacttaagcaacatgtgactgtattgaatgctgtaacatggtgtttgtgtatctaaacatattaaaacatagaaaaggcacagtaaaaataaggtacaaaagataaaggtacagctctctagagcacttagtgtcagcagagcttgcaggacggggtgagtcagtgagtaaatggtgagtgaatgtgaaggcctaggacgtgactgtacaccgctgtcaacttcataaacactggacatttaggctatactttatttatttgagaaggag

SEQ ID NO: 20317 - DNA, 1152 bp, Homo sapiens
cctgtctcagcctcccgaagtgctgggattataggtgtgaaccaccgtgcctggcattttttttgtatttttagtagagatggggtttcaccgtgttggccaggctggtctcaaactcctcacctcaggtgatctgcccatctcggcctccccaagtgctgggattacaggtgtgagctacggtgcccggcctgtgtttttatttaagtttttgagcatatttaaggcagttgtttcaaagtctttgtctagcaaatccagcatctggccttccccagaatagtttctgtcagtttttatttctttgactgagtcatactttcctgtttctttgtgtgccttgtgatttttgttgttgttgcaaactggacctgtgatgatgagaacgcagtagctctggaaatcagattcttctcctttccttgggtttggtggggttttttgcttgccaaaggatataggggcccttttatttaacgacttttccaagctattgttattgcagactatcttccttcgttatgtagtcactgaagtccttgttcctcagcttgtgtttagttggtgttttgacaaagatttccttgaatgccaggaactcttacagtctttacgaactggctctgtgcctgagccctccttgaactcttgatgggcttgcccttggcctagggatcagcccagagtgaaagcaagctcgaggccgaggaggtcttcgcagagggggccttttgccctgggcatgtgtgtagctttctgaattttccagcacacactgaggcctctgaatgtcctgatttcccagaaacacacccaggttttcgccttaggcagtctgttgtatgttgggactgtaatcttctgccccaggcatctgagagttaaatgggtttgaaatgtttttaagctttttttggccttggatctgacttaggcaaaacagaagaggagtgccttgtgtcagtcagactccagacacattagaacagacacacacaatacattttgaatgaggtctccagcagcttctggtaggcacttaaggttagaaaacattgtttaggaaaagaatagaatataaagcttagcggttggttgtagaaggttcttgctgctggatccactcagctcctgggcagttggtgggggcca

SEQ ID NO: 20318 - DNA, 1031 bp, Homo sapiens
tggagtcttgctctgttgccaggctggagggcagtggcgtgatctcagctcactgcagtctccgcctcccaggttcatgccattctcctgcctcagtctcccgagtatttgggactacaggcgcccaccaccacgcctgggtaatttttgtatttttagtagagatggggtttcaccatgttagccaggatggtctcgaactcctgagcttgtgatccgcccacctcggcctcccaaagtgctgggattacaggcgtgagccaccggacgtggcctcaagtacttttttgaaactggttgtagggaatagtttgacaaatcggctagttggttgaacttgctttgcataaagagacatcactaaatataactctccttaaagttggggacttatttaaatctgattcatttctgtggggctgtatgatgttggttaatactgaagtcttgcaacaaagtctggctttgttcctaaggaacctgtctttggagtccttagagcttcttcgtgagtctgttaattcataaactccagaccattggcctgcacgttgcatttgtaataatttccattcccacaagaaactagaacaggagaatgagagagccaggctgggagaaggatgtttgcgacactgaatccagtttaagttgttggtttgttcaagtgaaggaaatggaatttttatcagggccctctgaacaggtttgaaactttacttagggatttgccattctgctttctgccacctagtgttcctttcctgtagtgcatctcttaacctgtcccttccttccatttttggtcagacgtctcaggcttgtaaacagattcctagtctatactgagcttcattacaaatcttgcagaatccagtgaggttttttttttttttctttttttccaagacagagtctcgctctgtcgcccaggctggagtgcagtggctcgatctgggctcactgcaacctccgcctcccacgttcaagcaattcttcctgcctcagcctcccaagtagctgggattaca

SEQ ID NO: 20319 - DNA, 1020 bp, Homo sapiens
caggtaaaagaaataggtcactgtcaccgggcgcggtggctcacgcctgtaatcccagcactttgggaggctgaggcgggcggatcacaaggtcaggagatcgagaccatcctggctaacatggtgaaaccccgtctctactaaaaatacaaaaaaaaaaaaaaattggcgtgggggcgggcgcctgtagtcccagctactcgggaggctgaggcaggagaatggcgtgaacctgggaggcggagcttgcagtgagccgagattgtgccactgcactccagcctgggcgaaagcaagactctatcacaaaaaaaaaaaaaaaaaaaaaaaaaaaaaaagaaataggtcatggtcagcacaaaagcatagaaaatggcacagtgaacccccacgcctgtcatatgatccacattttgctcatttctacatccatctgcatggacggcttttatttttttaaactgtctattgaagtatactgtctatacagaaaagtgtgtgtatcgtgcgtatgcaactgatgcatttttacacacaggaactctcactgacgcagtcagaatctagatgaagaaaaagcaagttggccgggcacggtggctcacgcctgtaatcccagcactttgggaggccgaggtgggcggatcatgaggtcaggagattgagaccatcctggacaacatggtgaaaccccatctctactaaaaatacaaaaattagcagggcatggtggcgggcgcctgtaatcccagctactcaggagactgaggcaggaggatcgcttgaaccagggagtcgaaggttgcagtgagccaagattgttccattgcactccagtctgggcaatagagtgagactccgtctaaaaaaaaaaaaagcaagttaccaggacatctggatagcttttaaatgtattccatggctcatcaacgtggagaggctcacacttagatgaaaacacagagcacctccctcaccttgctggggctggggctggggctggggctggggctgggcttg

SEQ ID NO: 20320 - DNA, 1050 bp, Homo sapiens
ggctcactgcaacctctgcctcccaggttcaagcgattctcctgccttagcctcctgagtagctaggactacaggcgcccaccaccacgcccacctaatttttgcatttttagtagagacagggtttcaccatattggtcaggctggtcttgaactcctgacctcaagtgatccgcccacctcagcctctccaagtgttgggattacaggctgagccactgcacctggcctgtttactcattctttaaaagatgtttttaaagtggtttttttttttttttttgggagatggagttttgcactgttccccaggctggagtgcagtggtgtgatctcggctcactgcaacctctgcctcccaggttcaagtgattctcctgcctcagcctcctgagtagctggggctacagacatgtgccaccatacccggctaattttttgtatttttagtagagacgggatttcactgtgttggccaggctgatctcaaactcctgacctcgtcatccacctcccaaagtgctgggattacaggcgtgagctaccacagctggctggtttttttttgtttgtttgtttgttttgttttttgtttttaagagatggattctggctgtgttgcccaggatgaactcaaactcctggacttaagtgatcctcccgccttgaccttctgagtagctgggacaacagatgtgctccactgtgcctggcctggattctttttattggagtataaatgaaagggcagacagtggtctaaagtctgccctttcaaaattttaattttgaattttttttagagagcccacagcctgaagaaccatgagccaattaaacattttttctttattttttttttaaagaagagtagagagcccagaaataaaccctcacataatgtagtcaaatggttttttttttttttgagatggagtttcaccctttttgcccaggctggagtccaatgtgcggtcttggctcactgcatcctctgtctcccaggttcaagcgattctcaagcctcagtctcctgagtagctgggatta

SEQ ID NO: 20321 - DNA, 1700 bp, Homo sapiens
tttgaaatatagaatattaaaaacatagagaagaaatgtatgtatgcttatagttttttaattcattaagtaaccaggaacatctatagaatttctttgaggctttaatgagtaaatgatcctttaaaaaaacatctaaactacatggcttagtggtaaggatggtgcaggggcaactgttttctatttattgaaggggaaaaaccttttttgttttaaccacagatgtataaacatgttatgttaaaaaatagcctaccggccgggcacagtaactcatgcctataattctagcactttgagagccgaggcaggtggatcgcgtgactctaggatttcgagagcagcctgggcaacatggcgagaccctgtctctacaaaaaataaaaaaaaattagctgagtgtggtggcttacgcttgtagtcccagctactccagaggctgaggtgggaggatcacctgagcccaggaagcagaggttacagatatctgtgatcacaccactgcactccagcctgggtgacagagcaagaccctgtctcaaaaaggaaaaaaaaagcctaccagccacgtcttccatatttcctttgtggaggggcttgggggtctttaatcatggaaggtacagaatgagacccagcctcccctctggcccaccttgtgcccaccccccatacctggagtgtctataccctgtcctgcctgccttcctgtctacagcaagggggtatctcttaattgaccattaggaaaatgctggatttggagagtagttccatattcagttacatgtcagggtctcttaacatattgcatgctaaattctggccgtatttactctataaaactgaggctgtgcttcaaactatatacatacacacacacactctctctctctctctctctctctctcacacacacacacacacacacacacacacacacacacaaccagataataacttctacccatgttccagtgaccatggctttatggctttgtcaaggagagaaactccacatggggtccagcttgctctgtgggagtgtgtgagggtccctcagagtttacagcttattctgatggtttgagataccagttacctggggctttgtcagtgtgtttctaagaagctttattagactctaatgtgtttctcttaagtggtatttctgtgtgttttttctaacatccatttatttgagaactacctatgaacaggacaaggctttcttgctaaagagggtggctggataaaggcctggcctcagttttgggggggcccaagtcaggacaggtcttttggggagcagagcccttggagcaaggctctcctggaccacagtcgtgaagtggcgaggaccccacgggacccctcatgcatgccctgctttctgtcgtctattgcaggtgcctgcacagctcacgtcggcagggaatgacagactagcacacgtcaggcacccttctctgctgaactgctattaaacttgtttctgttgaaacattttctctcctgtctagatggaggtctgtaagtctacagctgcatctctttccccagtaaggccactcctgtgtcatttcatgcctcgtggctccagctaattaagcgggagagggattagtttctccagattcctcctagttcatggacattactctctctcttttttttttttttttgagatagagttt

SEQ ID NO: 20322 - DNA, 1003 bp, Homo sapiens
aaaaagaaaaagaaaaaaagaaatgtattcattaaaaataggtgtgtaggtgagtttattctcttccgtgtcttcaaactccaggtagtacttgtccatgtaatttctctgtaataactggaactcgttatccatgataacgttctctaaatatccaaccacaacagcaaattcatcagaggtggaggagaaagacagcacaaagctctcttcttctaaggtgtccatcactgcagccccgagcaggctcctaccccgcctgtggcccaacctgcatgcagggcgtggcgggcggccgggttaaggtctcgcagccaaagctgcggcgtgctcactgcccagtcagggcagcacctgcgtgccaggcccagccctgggttagggccccgccgggccctctgtgcataccgccgacactgcgggccaaggtctcggtgactccaaaatgatttttatggttttatgattttacttcacccagaattgagataattgttgtgactatgagaagtttgaaaggacgggcctctcagcctccaaagggactagagctggttccttttatttatttttgttttatttatttttttggggacagagtcttactctgttgcccaggctggagtgcagtggcgcgatctcagctcactgcaacctttgcctcctgggttcaagtggttctccattctcagcctcctgaggagctgggactacaggtgcatgccaccatgcccggctaatttttgtgtttttactagggatgggattttgccatgttggccaggctggtctcgaactcctgacctcaagtgatccacccgcctcggcctcccaaagtgctgggattacaggcgtgagccaccgcacccgtcacttgatctcttttaaagggaggactgtactctggactcaccctcacccttgcacttttggaagcgttcctggacattagacccatcctctgaaaggaacttgtcctgttccttctcctcagtttctgtac

SEQ ID NO: 20323 - DNA, 1051 bp, Homo sapiens
ccacagacttactttgcgtctcgtaagtgatggtggtggtgacgcaggggcagggcttctggcccgtgtcacgttcttctgctcacatggctggagtatggccccaaagtcaccttttctgcttccacattcccactgtgctaaccttctttcctcctaagagcatgcaaattaaatgactccacatcagtcagtacagccacagccttcacttcggggcttgttgactgttgtctgttcttcagactcggatgctgcgtggggtagctctttctgagtccccgcttaggaggactggtcctggtagaacagcgagaggggaagtcgtccttctcaggcagtggctgggattgccatttgcactgcttgagggttttatattaccatcgtgtgggtttgcttttcttcagtcctagtctcagaatctaccttctacttcacacttaaaattctgagagcagttggcaaagctttgccttctctgtctttgtcggggcaccaataacagtcatgtttgattttctggaggaattgatagaaagattgggcgtcagctaaagccaaataaaacattatagcagtatctgtggttattagaatatttgaaatctcatctgatgcccttacctataaacagtttcacaaatcccacacatggcctagcccacctcttcatgtcgcccatgaagtagctccatccacagggcccagatccctcccacacatggcctagccctcctctccatgtcacccatgaagtagctccatccacagggcccagatccctcccacacatggcctagccctcctctccatgtcacccatgaagtagctccatccacagggcccagatccctcccacacatggcctagccctcctctccatgtcacccatgaagtagctccatccacgggcccagatccctcccacacatggcctagccctcctctccatgtcacccatgaagtagctccatccacagggcccagatccctcccacacatggcctagccctcctctccatgtcacccatgaagtagctccatccac

SEQ ID NO: 20324 - DNA, 1059 bp, Homo sapiens
aacagtacttggttgtcaggagacaaatgacaccccctttgcaaagtgcacttattaaaacagcaagtgctttctgagtgcgtcagctgtaaccatgcaatgtcttcttctcggtgacacaggagtgccccagcctctcccaatcacgcgggagtgctgtctgctcactctagtggcgcccagacccctgagagcctgtcgagggaaggttcgccggcccccctggagcctgagcctggcgctgcacagcccaaactcgctgtcatccaggaagcccggtttgcccagagcgccccaggtgagacagcgggagaggaagcgagggccccaacagcgtgagccagacgcggacgcctgggctccacagagaagaaacagccggactggaggcctgcctgtccctctgtaccttatactagtacctgattttataggccttggaaaactaatagcactgggagtgttttttaaaaatcaatgaaggttctttaaacgacactgagtagatgcctgaaataacttagaattaacctgtttcttagtttgtcattcaaaaatccatgaaacagcccccgcacccccaccccccgcaaaaaaatcaaaacaaaacaaaaacccatgaagtagacaaactagacactggaagcaaaaacatgtcctttttttttttttttttttttttttgagacagagtctcactttgtcaccaggctggaatcttggctcgttgcaacctctgcctcccaggttcaaagaattctcctgcctcagcttcccgagtagctgggactacaggcacacaccaccacacccagctgctaatttttgtatttttagtagagacagggtttcaccatgttggccaggatggtctcaatctcttgacctcgtgacctcatgatccacctgccttggcctcccaaagtgctgggcgtacaggcgtgagccaccacgcccagcctaacatgtccattttaaggaataggtaaaacagtttgcagtttacttagtcataatgtggaataaaaatgtgtgccctggggaattaaacaaacaaac

SEQ ID NO: 20325 - DNA, 1050 bp, Homo sapiens
tggaaagggtgggagtccctgctggctgccgagtcaactctggcattggggcctggctcaggtgtgggctcccgctgctctgggttgggtacatgtgggctgttgccggctgtgtggctgatcctggcgcttgcgggatctcaagcaggcaaatccgaagctaccgactaaaactgtctctgtgcccacgacacgctttctttgaaagagggtacaggtcagaaggctttatcacgacgtttgaatccttaccgaacgctacgaacagagaccttgaaacctgcaggtacctcctactctgactcagcaccaccctgcctctccccaaatttatggaagaacaaggtctggaaccttttctagggaagactgactacctggggttttttttgtttttaagtaatagcaacacttgctgcctgtagatagatcgcagagtttgcagtcatcagttacctgtttgaatgccttcgtccccaagccctgtgtctcctccttctcttctctctgggtaactgtggctgtggatgctctaaggtgataaacctggtggcactgcaggtagctgggaggagatggaagccgggagggctggcgattggagggcaggcggttggagggctggctattggagggcaggcggttggagggctggcggttggagggctggcggttggagggcaggcggttggagggcaggcggttggctttctggtcttagtcactcccagtctgaagacaaggcagaggcctagtgattcccagattcgatatgtgtcagaatcacccagaaggcttggctgttagaggccagagtgctgcgttccccagagttcccgactaggcctgtctggtgtggggcccaagaatgcatttctgaaacagtccaggtctgccaagagcctccggtgcaggtcagaggctttctgggtccacctctcttagaagcagtttgaaaaaccgtatccctgcctggtatagtgcctcacgcctgtaatcccagcactttgggaggtcgaggtgggtggatcacgaggtcaggagttcaag

SEQ ID NO: 20326 - DNA, 1520 bp, Homo sapiens
ctggtggcgggtgcctgtagttgtagcttctcgggaggctgaggcaggagaatcgcttgaacccgagtgtggaggttccagtgagatgagatcatgccactgcactccagcccgggcgaccgtgcgagactctgtctcaacaaaaaaagaaaaacggtatcctttttatgtatttaagttatctggaatttttcattataaatttaagcaagtgttttaatttttcactattgaaaatattgatgttttaaaataaagcttttacgggattattttcagtgtactactggactccaaatacagacatcatgagatgtccacttgcccacgtgtggacacacaggcaggagcggcccagatcctcccttgtctgtggcctggtctttccatctcacattccctaacaggttttgtacgagtcacatactttaggcttaaatgtcatttattagtcatatcttttctctgcagcaataaaatatagatataaatattaaagtttgtctatgagtaacaaaattgataaaacccaaaaatataacaaattcttataaaaccaaaaattaaaatgttactgaagatgcctttcttagtgtatttagctttaaaggaaaccacctgattcgttctgtattcactgatggttgcacagtcctagtgtcaacactgagggcctgtttccactcaggaaggagaggacagtgtcagcactgagggcctgtttccactcaggaaggagaggacagtgtcagcactgagggcctgtttccactcaggaaggagaggacagtgtcagcactgagggcctgtttccagatgaacgtgaaagtctgtcagtgatcttggctgggtgtggtggctcacgcctgtaatcccagcactttgggaggtggaggtgggcggatcacttgagatcaggagttggagaccagcctggccaacatggtgaaactccgtctctactaaaactacaaagattagccgggtgtggtggcacattcctgtaatccctgctactctggacgctgaggcaggagaatcgcttgaacctgggagatggaggttgcagtgagccgagttcagaccactgcactccagcctgggcaacacagcgagactccatctcaaaaaaaaaaaaaagtcttgtcagcaccagtatttcctattattgctttcatgctccatcccatagttttcatccccaaagccagtgcccagttgagcagatgagagaggctgttcagagagaggaggtggcagatgggctttaagaaaagacttcaggaccaagaggagattctggaaatgattttccttaaaacagtgtcggctacagcctggatgctgaacacctaggatgagaaccactgcacaggtgctcataattttggcctcttgtagtcttttattttttatttgggaggtagtgtctcaccatgttgcccatgctggtctcaagctccggggctcaagcagtctgcccacctcggcctcccaacgtgctgagatgacagggtgag

SEQ ID NO: 20327 - DNA, 1020 bp, Homo sapiens
gttgtcgccgttgtccacaccctgcccacctgccaatgctcctgtgtcccctgctctgctccagggccccaaaccctgtgcagagctggggtgcatcatgctgccgccccatggagaaggcctggaggagatggaagccgggaggcttcctcttacaggaagggaagccccagaaatgtgcctggcaccaagaaactgctccaagcttgttccagagtgtggggagggcttgaggcctcccctttttgagtacatggaaaggaaagcctggcattttctggaaacgctcccaagtctccctggcagggagatgtgggaagagtccaggcgcccaagctcttgcatattcacttcctcccatcacacgtgctgtgtacaagcaccctcagagctcgctttgggagacccctgcctcagggctgcgggtgccgccgtccacaccacaggcccttctgcttcctgtttccaaagctcatctcctgtctctgggctgcaggcgctgtttctggtttactggcacaactgtggttgtgtttttgtcaatgacttcatctttgctgctgttgttttgagatactgtcttgctctgtcacccaggctggagtgcagtgccgagatctcaactcactgcagccccgacctactggtctcaagccatcctcctgcctcagcctcccaagtagctgggactacaggtgtgcagcaccacatccagctaagtttttgtattttttgtagagacagggtctcactatgttgcccaggctggtttcaaactcctggactctggtgatcctctagccttggcctcccaaagtgctgggattacaggtacgagccagcatacccagccagtgttgtcgttttgatttgggagttcggggctgagctgtgtttggccagggcctcgcctgctcagtgtgctcctgggctgagctgcggtcctggagcatctcttggctcacatattgactcctccggcctctctactgtcctggtccttcatggggctcacatgtg

SEQ ID NO: 20328 - DNA, 1050 bp, Homo sapiens
cagcactttgggaggccgaggcgggcggatcacgaggtcaggagattgagaccatcctggctaacacggtgaaaccctgtctccaccaaaaatacaaaaaattagctggacatggtggcgggcgcctgtagtcccagctattcgggaggctgaggcaggagaatggcatgaacccgggaggtggagcttgcagtgagctgagatcgcgccactgcactcccgcctgggcgacagagcgagactgtctcaaaaaaaaaaaaaaaaaaaatgctccagacacttcagtttgaaaatattggaatttatgtggggaggattagtgtgcatggaaggccaaaaatgtgaatgcatctccgcagtcatctttccaaaagccgccctctgaatcagtgaggaccctcagggtggggaacgtccccttgtgagtgtctgcagattggagtaggcagcagcggagcccgtctctgtagatggactcgcagaggaacttagttctttccctaaaggagtaggaacagctgggcgccgtggctcacgcctgcaatcccagcactttggaagaccagggtgggcagactgcttgtgcccaggagttcaagaccagcctggacaacatggtgaatctctgtgtctacaaaaaatcacaaaagtggctgtggcggcagcacctgtagtcccagccaccaagaggctaaggcagggagatcgtttgagccagggaggttgaggctgcagtgaaccgtgatcgccccactgcactccatcctgggagacagggtgagaccctctccacatagtaagtaaatggaggaatagaaacgcaagccggcatacattgtctttgacagcattttgtggataggcaagttctaaccatgggggcaacgtgggatgcagcagggtttggtgtgccgtggggcaggggtaatttgcttgtttctctaagactttgtacagctctgtaaacagattcccattaggtcgtcctttccttgtgacaggtaatagtggaggtgtcacaaggtaagtggcctgtcttgcctggttttc

SEQ ID NO: 20329 - DNA, 1026 bp, Homo sapiens
tgacacagaataattgtgcaagtgtatggggtgcacagtgatgttgagaagcatgtgactcgtgatcggcacatccgtcatctcattgaccatttctaggtgttgggaaccttctggctgtttgaaaccgtattgttgactcccatcatctcgcagtgctgcagaacactaaacttattccttctgtctagctgtcgtttctagttttacgtctttttaaaaattattcctcctgtctgtcatttctagttttatgtccttttaaaaattatttattttttatagagacggggtcttgctatgttgtccaggctggtctcagcctcctggcctcaagggacccgcctgcctcagcctctcttggggttgcaggcgtggaccactgtgcctggcctacgcctcttgtattctctgggtcatccagtcaacttgagccctggtgagggtgaggctgttgggttgggtgagtcagccgtgttgtgctgccgtaacagaacacccaagatggaagactttagcatgaacagaaacggattggcttgcagttctggaggctggcaagggccttcttcctgtgtgctcacgtggtgatggggtgaaggcatattcacccttttagaatgaactcactcctggaatcatgagcctgtcccttggtgacagcattaagctgttagtgagggcaaagccttcatggtcaagtcaccttctgaagatgccacctcctaattaggctgcgtgggcaagtgagtttcagcatttcaggagacagatgcccacaccatagcagtgacctcatctcattcagggtattggtgcttgtcagacactggctgtgactcgcatctgggtgcgtgtgcctctctctgtgggggccaccctgccgtcaggcgccaggaaaccgacgtcagggaatgtgggggtctccctgagagggtgccgacctaacacggctcctccgggtcacgtgggtgggctcagcggcctcccgtgcctcccctaggtctggagtctcccctgccctct

SEQ ID NO: 20330 - DNA, 1050 bp, Homo sapiens
aggctggtctcgaactgctgacctccggtgatccgcccacctcagcctcccaaagtgcctttcctctttaagaacatcctcccctttgtttcctgacacagtgtggtcttcccccacacccccgcgtgttgggatgtgagacaggtcccctgagaggtgcccgcaggctgcctgtcctgtgtgtgtcctctggtgcccctgctcgggagcagctagtgtctttgatgctgacgtctgctggaggccacaggctcctagtgtttttgatgctgacatctgctggagcaggctctgttaggggtgttgtgtgagctggtggagacccaggccctgtttgtctctggcaggggcataagctggtaggagctcgctgaggtcgtgtctgaaggtgactcagtttcgagagtgggcgctgggatcccttggaactaatttcctttcttttacttttgcttgcaagggagaggaggtgggcaggaggaacggccctttgtggcccggtttggatttgacgtggtgacgtgctgtggatacctcccccaggtgagtgcacggcgtttgcttctatttcacaatcaggtcagctgttcagacacacgggttggggggacacacccccctcctttttttgtgagcttcagtaaaagtatttgcaccattttttctttgctgatgtttgagaggttgacgtaagattgacccacctaatatgctaggtaagcatgaagaaactgaggaggaccagcaagttaggagctggatttcaaggtgggtaaaaatgagggaatttaacaaatgttttaggtatactaaactctcaaagagggtggaatgacaagggtttgtcacttttggttgtgtgattttatggtggcttccctccgcatttccacctggggagttctgcttgacgcccagcacatgtgcagtggacagggctcctgtcctgtcctcgagaggagggtacagatgaacccagaaaacttgccagggtttcctggcgggcgcgggggcagtagaaagactttgaaatgttgaagtttgttcaga

SEQ ID NO: 20331 - DNA, 1050 bp, Homo sapiens
ctcagcctcccagctgtttcttttttctttttctttttgagatggagtcttgctctgtcacccaggctggagtatagtggtgcgatctcagctcactgcaacctctgcctcctgggttcaaggattctcctgtctcagcctcccgatgtagctgggattacaggtgtgtgccaccacacctggctaatttttgtatttctagtagagatgggattttgccatcttggccaggctggtcttgaactcctggcctcaaggaatctgcctgccttggcctcccaaagtgctgggattacaggcctgacccaccatccctgacccaactattgtttcttaaaaaaaactctttttaaccttgcctttttgttagggtagaaggatagctcagagcttcaaagagcaggactagcctaagaactgtctgtgatatttgaccagaggtgcagcctagctgccattcttcctcaccctgtggaagacattaaagggagaatgaaagtagctgtagaattacctttgggggaagaagccacttggtgaacttggcaaacacccgtgtttgaggggtcacccagggtgtcatgagctgggccggaggggatggattgattacttgtcttgtttgcttgtttctgttgtaagtcagggcccctcagcagaaggcagaacagaaccgagttcctttagaatgctggtttttgtgtggagtgaggaaggaccgtgagtgtggtcagtttccaacctgacaggacctgctcccgttggccaggactgcagcttgttactttgaccctgggaagaaggtaagtgttcccaagaaaagggacgtcccaaagcggcgccatcccgatggcacgtgtgctgctcgactccctgccgggtaggtccatcctgacggcgcatgtgcccctcagctccccccactgggtaggtccatcccgacagcacctgtgctgctcgactccccccactgggtgggtccatcccgacagcacctgtgccgctcgactccccccactgggtaggtccatcccgacagcacctgtgctg

SEQ ID NO: 20332 - DNA, 1035 bp, Homo sapiens
gccggccgggtgtgccgtgccttttaccttcccagcccctgccctggacctgaggccccgcctgatgggcccagccctcttcttccctgcctgacgtgtgtgcccaagttagctccagtgaggcctctgctgtggctgccccaccctaagaggcagcaaggaaggtgggtagcccgggggtccagctctggaccttggttcactcacacctccccacgccctcagtgctcccgggcacccacacgtggcctgtgcatcctcctgtcacagcagcctgcagaccccacacccctcacggcccaggctcagcctcagccttgcagcctctcgtctccgacggggggcccctctgcaccctgccctctgtggtggacgccagctcccagccagagccagctatcagtgaatgaaggtccttgtgactcccacgtggtagcttctgtcaagggcccagtgggcagaggccctggctgagtcaacaaggctgacaaggctgtgttctggatgcaggcccggcagatgtttgagggggaggtggccagcctggaggccctcaggagcacgggcctggtgcgggtgccgaggcccatgaaggtcatcgacctgccgggaggtggggccgcctttgtgatggagcatttgaagatgaagagcttgagcaggtgagtgtgtgtgagacccatatgcgcacatgtgtacaggcagagagagactcagagacaaacagagagagacagagaaagggatagagatggggagggagacagaaacagggagaagcctgtggctgagccgtccacacaactgcccggttatcagaggcagggccaagagttccaccctgccattcttaatggagataaaaagttactgctttctggtatgtgactggttttcctagataagtttggctgtaatgaggctgcataaaatatatatatatacacatatatatatatatatatatattttttttttttttgaaacacagtctcgctctgttgcccaggctagagtgcagtgcagtggtgcaat

SEQ ID NO: 20333 - DNA, 1101 bp, Homo sapiens
ctgcaccctttgcctgtgggttcaagcgattctcctacgtcagcctcccaagtagctgggactacaggcccacgccaccatgcccggctaattttgtatttttagtagagatggagtttccttatgttgcctagactggtctttaactcctgggctcaagggatctgcccacctcagcctcccaaagtgctgggaattgcaggcgtgagccactgtgcctggcctccagctttcttttgactagtgttagcatggtatatcttttctatcctttcaagctttttttttttttagtagataatgtctttttgcacataacttattgttggatttgctttatttttccaacctgccaatctgtcatttaccaagagtatttatttttgacattcgtatttaatgtgcttagtcatatagttttgagtctgtcatcttgcaatttgttttttgtttcatctgccctttgttctctctttacctgccttcctctgggttgagtattttatgtttctgtcttacctcctttgttggcttactaggtatctttgctgggttttgaatggtccctctagggtttaggcagcacttggctccgaattgcaacagtggcctcttttcccttgttgtccaggtgaatgagtggcaggatgactggccgacctttttcgcccggcaccggctccaggcgcagctggacctcattgagaaggactatgctgaccgagaggcacgagaactctggtcccggctacaggtgggcacggcagtgacttctctgggaaagagctggtcctctcatgatcccgccgcatttgtgcgggttcatctgtaaaacggagctggagcagggaacactgagtcctggagcacacatcagggaggaaggggggcaggggcgggggttcccccaaaagggagtccgaaaggagtgaggagtgaagacacacttggctcctcgtgcccctctccactgctaggtcaccaggtatttagcctcagactttcctcatgtgaaacacaggtgcttgtaaatggtggtgtttaccatgattactgttcttactatcagtaacacttgtccactccatcgtgttcctctcc

SEQ ID NO: 20334 - DNA, 1049 bp, Homo sapiens
gctacttaagatcggttttaatgctaatactgatcagctgtgcctgaattccaacgagaggagggtataatgaggcctatgtggaccactccccacaatcccttaatatcatgaggcctgaactagtttttcaggttaagtttggaatgcccttggccaagaggaggggtctgttagatggctagggggcttagaattttgtttttagtttacaggcatgtttggcaggggagtgtgagaggagtgccagggatgtgtgtctcacaaggacagagttgagcttggcccttaacggctggcagaggcaggagagagtgaaggaaggaagaggcgaggaggagactctgttaggaagagtatcgaggcagtgggaaaagaggaacagtgtgccaagcaagtaaactgcacgaggctgggccacagtggccctcaaaaggctagagggaggtggggcattccctccaggtggcctgtgtggcctcctttagtgagaggggaggtgtgctcttgagagctggggaagaggtggagctgccctgtggaagctagcaagggaaaatggggtttctgaggctcatgggtatgtttggcctagtgataattaattttcatgttatatttgtttttagtaataatggacaaataccaggagcagcctcatctgttggacccgcaccttggtaagaatagaagctgctgattttgatcattcagttacagatgaccacggaggccttggtgtgtggtgctggcacatgcatgtgctttgccaggatcaaatgccaagaagtgtccctgtcttgcttgcctggctggttggttttagccgacctgtgatagtggcttgagttccagatgtcactctaggctggggggagatgtgtctgagctacttaattcctttctgctaaggaaacaacatctgctcctcatgtgttttttttgtttttttttcttttttttgagacggagtctcgctctgtctccaggctagagtgctgtggcgcgatctcagctcactgcatcctccagctccctggttcaaggga

SEQ ID NO: 20335 - DNA, 1068 bp, Homo sapiens
tttccctggaaggcccctgtacttcagctttaaaaacacgctttggtttagtcccaatttaagcattaagattaatgcaaattgaggaaattcaaggaaggagaaaaacacattaaaaatggaaaatgggctgggcacagtggctcatgccggtaatcccagcgctttgggaggccgaggcaggtggatcacttgaggccaggagtttgataccagcctggccaacatggtgaaaccctgtctctactaaaaatacaaaaaattagttgggcatggtggtgcgcgcctgtaatcccagctacttgggaggctgaggcaggaaaatcgcttgaacccgggaggtggaggttgcagtgagccgacatggcgccactgcattccagcctgggcaacagagcaagactccatctaaaaaaaaatttacaaaaaggaaaatggctgtcatttcatgtgtgactctgcttgctgattgatagttgtgctctcttggtttctagtgctctgattggaagattgtcgactgtgtggagtgggtttctccctgtgtgttctcacaatggctgggaggcggcggcggggctgggggactcggactgcgagacggggctgttgactatgaaagtggtaataggatgctcttccccttatcggctgttaggctcgagtctcccctttgcagtgcggtttctttttatttttatcattgacaaaagcacaactcttgttaaaggataaaatagtcacacacaacagcattaaaaaccaagaaagccaaagaacgctggcactgtcagcctcactcccagctcccgctcggcccttgtgaagagaggtgctgaagccactctgcttttttatagttaataaaagcagccaggtccccaagtaggagtggttgtggccaagagtgtgtgggccgggaaccagggcttgagctgctgtgagctgtgcccaggccctttgctgactccgtctctcctgtgacctgaggccagggtgagcaccagcgcccgccccacctgggagggaagcagcagacctctcaccgcagaggctggtgtgaggcta

SEQ ID NO: 20336 - DNA, 1032 bp, Homo sapiens
ttttccaggctagtagtgccctgaacttaaacctgggcacgttttgtgatgccattgatgagggaggggtggagaggctgcagtctccatgaggggactggacttatcattgcatccctattttcagatgaatttttgggagatgatttcactagtctcttataattactttatcatgtacagaaactgttttctttattattaggtggtgagtgtttagaataaaaattctgaaagatgtgatgaattgttttcacaatttgtgtgtatgttttaaacttctatttgtatttgtaacattaaaaatctttttttttttttttaggcacaaatatttaaacatggaaaacgtgaagactgtttgccctatggtaaggtttatttttaagagacgatatctttgtgatgtgagtttgctcatatacaatcaagtgtctttccttaacattttattcatagatataggaactgtacattggtatgtttggacactatcgttcttttttttgttgtgggttttagtaactgaacttttttttttttttttttttttttttttttttgagactgagtctccctctgttgcccaggctggattgcagtggcacaatcttggctcactgcagcctccgcgtcctgggttcaagcaattcttctgcctcagcctcccgagtagctgggactacaggtgcctgccaccatgcccagctaatttttgtatttttttttttttgagatggattttctctctgtcgcccaggctggagtgcagtggcactatctcagctcactgcaaactccgcctcctggattcacgccattctcctgcatcaacctcccgagtagctgggactacaggtgcctgccacaatgcccagctaattttttgtatttttagtagagatggggtttcaccgtgttagccaggatggtctcgatctcctgaccttgagatccacctgcctcggcttcccaaagtgctgggattacaggtgtgagccaccgtgcccggcctaatttttgtatttttaa

SEQ ID NO: 20337 - DNA, 1071 bp, Homo sapiens
cagtggggtggggacagagggcacagcatggcagatgcaggggcactgccccagaccagctcttgtgccgtggccacacgcagccctgtctgtgtttggtggggagagtccctgggtgtggctggcagtgccctctgagggcaggaaggaaaggatgtctgtacaggatagagtgggggcccatcctgagagggcctcaccacagagacttgattctgtccaaaataaagacacctgagatgtggtggcctcacgtcttcccagtgtggagctgtggtggcgtctgaagtgaccgctttgcacttggcattttgatgtatggggagagcttttagagcctgcagttcttttttttaatgtctctgcttatttttttccagacttctttaatgtttagacctctttattgcgatctaatttacatgccataaaatgcactcatttaagtgtacggttaagtggtttttatatatttacagagttgcgcaactattgccataatttaatttccgaacattttcattgcctccaaaggaaccctgtgtttaagaactcactctttactctccccagcacccccgccctggcagccatgtctccagtgtctctgtgaatttgtcttttatagacatttcctaacagtggaacctacgacatgtgatctttggcgtccgaattcttcggctgagtttctctgtgtcgtagcctgtggagtgcctccttccttcctgtggcagagccttgtcctgctgtgtaaatgcaccacacgccacgttttgtccatccttttcatcagctgatgtacatctgggttgtttccacctttcactgttaggttaatgctgccatgaacatcgtgtacacgtttttgagtggatgttgggtgtaggcctagtagaaatgctgggtcatacggtaactccacgtttaactttctaagaacctgccaaactttttccaaaatgattgcaccatttcaagttcctgcctgtagtgtgtgagggttctgcttctctgatcctcaccaacacttgcttttatctttttttttttggacgcggtttcactttg

SEQ ID NO: 20338 - DNA, 1034 bp, Homo sapiens
gagtgtctgttctgagaatgcctgtaagcctttgagttttgggaactttcatcctgtgacctggacctttcctcgaaagcgccctgccgggggctgaggacaccgagccccctcccagggtctggacagagtcctgtcccagggctgcccgactctgcttgggggttacacgcttgaagcagtgggtgtgtgatcggccacactctcacgtgaaatacgaaggggtttgtggctgtttccccttaacatgtacccacagtcacagagtgcccctcacttttacacagagcgtgggctggccaccgtctacttgctcctacctgctggctgggagctctcccaagtgctgtgcgcccctgccgtcggcctgtagaacccaagaccatggatgctgctgcctcccctggggccgatccctaagcactcgtggcagtttctgcccactttagccacgtcgttggtgtattctagtgtgcttgtttaaaaatgaagaacattcgaacacaagactctaccctactgcttctaaagtcagctttatcattaagtagcatttatgttgtctcagatatgaatacaaatgctatatttatgttgacttaaatggttgaaatactgttggtgaatttgtacatcctgtgagtgacagcagcattgtgagacatgctttcacggtcacccggttcctgctggccaggaggcatggccagcagcgcctgcccgtccagatgcaccaccaaatggaagaaccaaagctttgccacactcctgcccgagaggagaccagagtgagtagtatccgctttagagatggttgggtcatgggaggaagctgtcctggcccttaacctttagggagtgggttcagccctctggccacacccactcaggtcctgggacccaccagaggctgtgtgtgtgatgtcagagctggcctgctcttttggattcttccagagggtctctgtgtcccccttaccagcctcaggtttccttcagaggctgtgccgcacgcccaaggctgagaacaaagg

SEQ ID NO: 20339 - DNA, 1245 bp, Homo sapiens
gtcctacagttgttgcttatggtgttttgcctaagaccatttctaggtgcatttttctgggagataatgtatctgatgacagttgcatgtgcagataaccggcctctcatgtatccatcccgggagtgccttttctcagactgtgtgtagtgttagtgaacttgattggtgggtgtgaagtgtacagacggcgtgtgcgtggagcgggtcgtgtgcagagccccgaacgagaccctggcgtgtgcgtggagcgggtcgtgtgcagagccccgaacgagaccctggcgtgtgcgtggagcgggtcgtgtgcagagccctgaatgaggccttggtgtgtgggtgcttcagcgtgagggccacctggggaggagtgcttatctggggaggctgagctgggttggaggcttgggtgctccccctggctccgtgggtctccattgctggcttcatagctgtgttccgttttctttgttcagcagttgatctcaagtatttattccaaagcacttgaaatacatgaacctaataaatcgaacaaatacagtaaaactttagcttcttggaacatccccatatacttacaccacgtcctaaaatcctctcatgtctatgtaaaaaatcgggtagcctgggtaacgtgggatgccatctctacaaaaaatttaaaaagtagctgggtgtgatggtggcatgcttgtagtctcagctacttaggaggctgaggagggaggatcgcttgagcctgggaggtggaaggtgcagtgagccaagattgtggcactgcactccagcctgggagacagagccagaccctgtctcaaaaaaataagaaataaatgaaatcacacttgtgtgatgtcagattacccattaacccacttttgaatggagctggaaggataatccacacctacctcggatttctctgcgtggctgttttgcataggagccctgcatgggttattcttgaagtcagcactgtaggagccgtggccggctttgcattttcatcctggttcaccccagacctgctctgggcagagccaggcatcccctgggacgctctgcctttgcgtgtccacgacagtacaattccaggcactgcctggcatctgcgtctctccctcccctgaaccaggggcgcctctccctcccctgaaccaggggctcctcttcctccctgcctggcaggagctgcgtttccttgagtctcctcagactcggcagacccctgggtggtatcat

SEQ ID NO: 20340 - DNA, 1071 bp, Homo sapiens
ttaagttttttgtatttttagtagagacagggtttcactgtgttggccaggctgttctcgaactcctgatctcgtgatccacccaccttggcctcccaaagtgctgggattacaggcgtgagccactgcgcccggctgtagttatataacttttagttattagaagatcacattcatatgtcttgatcagtttaatgatttctaagatatcattaacaaaagccattatgatgtattgaaataggattgatcttaaaacgttcgtgctaatgtaacgtgagttccctttaattttaaaccagtatttttctcttcttatttaggctatagtttgttataaagagtatagagaggaaaatggagtgcttttctgttcatagagtttttctgaaattaaagtcaaaattttcagtttcaagtagtgaaagcagtgttaacagaaagtttcccagatactaatcctgggtcttttaagatctttagataattagttgctttccaaaatagcttttaattctgaactcattttagacttaaagaagaattgcaaaaccagtggagttcttctagaccctccacagcattctccgatgtgaacatctcacatttggaagccaggaagtgcagtgtgggataaaggccactaacaggctggtctgcccgggaccccgcatggcatctggtggtcctgtgccctcagcctcctctgctctgtgagctcctcagtctttatctttcttgatcttggggcacttaaaaaataggttttattgagatgaattcacttgccataaaattcacccctttagggtccacagttcagtggtttttagtgtattctcagacttgaggagacctcaccccagacagaagccatgtgcaccaggtcccgtcacccgctccaagcctggcactgccagcctgctttccgcccctgtggatttgaccctgagacctccagagacgactggccagatgttctgtaggacgcccctctctctgatgctttctcgtgtgttactggaaagagtgatgtgaggtgacctgccctcctccgtgtgctgttgggcc

SEQ ID NO: 20341 - DNA, 1033 bp, Homo sapiens
cgtgctgaggccagagcccggggtgacgaccgtgctgggtgggccctggggcgcactccgccatcactctgtgttccgggttcccagatgctgcttcctgggaggagcagcccagtcgcatagggagccacggggccctgcagctgagctgaccagcctccctgtgtgtgtggctggatttgagccacgttacctttatcggggcagctcaggttggggattgattgacagggaaaggaaaggcctttacacttggtctaaatttaggcaagcagccagaaaatgggatattcccgtgggtgcgggagtcttgcacctcagtcctgagcctgagcagtgtgagtctcagagcatcctgcacagtgaccagcatgcggacggcagcgggagcctcgtggaagaagcggcacagattttgaagagacacagactttgaaagaaatgcaagacgcgcaggtgcggagcgtctcccagccccgcacggccatgtcctgctgaggttggatagaaacatttgagaagaaggtcgagaacttggcaaggcaaagcaaacgggagtggacgtgtcgcatagcacacagggaagcagcctaaaaaccctcggatttggaggaggctgtttctaatacacagatttggaatgaagttgtaagaaatgcgttacagtggaggccgctgggtaacagcagcagggatggggggtggttggggagcggcctgggggacacagagggggctgggggcagagacgagggaccagcttctctgtccaggttcgtcttggctggagttggagactctggtcctgagtggtctctgccttctccctactgagcccaggggctcttgagcaggttgtgactaacccatgggcagcttccacgttcagggcctgtccgacattccagccctatgaccctgctcctaggcgagtgctgtccaggcccccgacaccatcaggcccttgtggtggcctgtccacacccaggccccccacttcccccctgcacaggtgaggaagttgaggctcagg

SEQ ID NO: 20342 - DNA, 1023 bp, Homo sapiens
gtttgtcatttgtattttcttaggaaattatttatgttgtttccagaatttcacatcctggaacctgagagtggtatcagtaacaccatgtaggctgcggggctggagctggggctccactgggaggctgtcgtggcggggtgggaggaggtgccgcctctcccatgtcagagcctcggcggctgctggtcctcgatgcttctggggtcagctgtcaccacccccaagaaccggctgggccagctgcccccagtcaacgtcttgcctgcccgggactgctgagtgaggcctgggctctggtccaggctttgtagaccgtgcaggcggctgcatccccgacctgacccaggcctgctcgctctggtgtgcaccgacctgccagctttgtggcactttgtggcatggggctcaggccgatggaggtcagtggctgtaacactgttgagacctgaagaccgtttacggtgtatgttttcgggaaaggtctcttaccacgtaccgaagtggaaatgtttgagttgtttgaaaaagatgaaatacttgtgagtggtttcaatgatttagcgtggtgttgcctgggtagaccgtcaggaagtcagtgtgacgtggaagtcctcggcgagccatgtctgtggtgtgtggcttgctcaccacctgcctcagggctcggggttcatgagtgtaaatgtctgtggatgtgattattgaacttggtgaaatgcctttgttcattcaaattcttctttttcccccatttccactttcttattagggcactttccctcatggtattgatattttgaccacagctgactattttgccgtcggtaacagatccaactgtttcctggttataaggtaagtctttaatgtatatcacaaaaatagaatactctaaaatcagattggatgtcagaaatcagctaccaccattttcttttttcatcctgtaatgtccactcaatggaatgtagtttttgtgtgaaaaattaaaaatggaattgggaacagtgactgaaactt

SEQ ID NO: 20343 - DNA, 1008 bp, Homo sapiens
tcttctttggcttagggtagttgagattcagattgtgtgtgttgttgctgagtattcgattgtgtggatcaaccacggtttgttttccccgtggatgatgtcagggtggtttccagatttcgccgttacacatgaagctgtgtgcacgtttgtgtaaagcccgtgtgtgcacagatgctcttttcttttgggtaactgctcaggagggaatggctggatcacgtggtagatttgaagaaatgggcaaactggttttgaaagtaactgtgctgaattcccacccacaggcagtgagttctcgttcttccgcgtctcaccacctctccatgctgtcttttccagtgtgtttattgccggctttcctgagtacacgcagccaatgatagaccacctggttaccatgaagatcagccactgggatgggtaggttttctgtttttgtttttctaagagctttttttccccccaaaggagagattcagttgagcttataagccttgagtgtattttctcactgtggatgtcgtattttaaaataacttctgagaagtaatatgaattccagtcttcatgccggatgtgttgagtcatggtctgtctccagttccacttctggagcgcctggtccagtgtgtccgacgtggcggtgtacccgtgcaaatgtccacgctggcgtgttgtggagtgccgctgccgtccgagggggcgcgggcgtagcttggaggcggactctgcgttgtctccctcagcagtgcttcccgctgactctgctccatgtggctccacaggtggtttctgcgctgtctcctgggagcccagcagttcttagtggccgttttcatcattacagtagcagcttcagggtttccttgcatttcataggcagttaaatgtgtctcagaaaggaaaagtgaagtgcggtctggagcataaacagcgcgttagtgctgtgaccgccgccctgaggaggtcagagggtcccctcctaggacagtgccgtgctgtggc

SEQ ID NO: 20344 - DNA, 1039 bp, Homo sapiens
gagggtttccctctgtgcctttgcagcccaggcagcctgtctgctctgacagattgctttgctttttctagaatttgctaccgagggtgtcacacagtaggaagcctttgggtgtggtttcttccccgacgtgtctttgagatacctgtgttgctgtgtgttccgtggtgtgcatgtacggcgccgtgttatccactcaccagcccaggctcatctgggtttccagcctttggctattgtagggaagctgctgtgcacatctagacgtacaagtcttggtacgtttcacgtttcctggctgactaccaggagcagcatcgcagggtgtggggcacatgtgtgacttctcagcagccgagccaacttcccagaccctgctgctgcacgtccccatccacaagtgaccccttggtgtggtcggctctgaacgtgggccctctgggtgagtagaggcctctcgctgctgctggagtctgcctctccccagggctcctggtgctgagcctctttccctgtgctgacgaagcattcctgggtctttcgtgaagttttttgctcattaaaaagttcagactttttgctcattaaaaattttatcgtctgtcttattgagctgttagaactcttcatatattccagatgccagctctttgtcacacacaggatctgccagtgctttctccagctctgtggttcacttttcttttctcttagtgactttttttttttggagaagcagtctcactctgtcgcccaggctggagtgcagtggcagcatgtcggctcactgcaagctcacctcccacgttcaagcgactctcctgtctcagcctcccgggtagctgggactacaggtgccccccatcatgcccacctaatttttgtatttttaggagagacggggtttcaccatgttggccaggctggtcttgcactcctgacctgaagcgatccgcccgcctcggccttccacagtgctgggattacaggctgagccaccgcgcccagcctcctagtggctttttactgggacttgtgt

SEQ ID NO: 20345 - DNA, 1028 bp, Homo sapiens
tgaatattttgccctccccagggcagcgcgcctgcccttgtgcaccagggtcccgctgtcagcgccagggctggggcaggtgtcccagatgggcagagcagcccggagctccgcctagcttcgctcatggtagaaccgcagtgcactgcttctctaggctggatagggggctctttctggcatctgagattagtttctataaagtaagagctgagcgctgcttggaattagttctgtgatgggataccagtcaggactagaatgtccagtaaaaattaaaaatcagcatcaccccagctaggatgggagacctctggaagatggctgtaccacgttttttcctttcttttcataaaaggttgctcatgctcagtaacacattcaactagttctcattttaatgctttttggagcctgaggttacattggcaagcatatttcatggtgttttatacgtcaagaggttcttctaattctgatgttttcattccttttcaggggtctgggaggacagctcatgagacaagcaggtaagtctgaaggcctttgcagccctctgcagccctttgccgcagccatcgttgagggaggtgtgctcgtggcgtgcagggcggcccattagcccccagggtgaagggctgggtgtgtttcttctgtggaggcggcatctgtgatgtgcttggtttgtccagtggttcctacgagggagagattgagagattgagattgagagagagaaagaggaagttgtgagctgggaggggttgcacccaggagccactggttctggaaatttctcaggaagcagaggcagctggggcagtggggccagtgcttgcctgtggacccagtggacattgcagatccctccgagcacggccccagcgtggacagagcagccctggtcgtgccctgtggactgagcagcgcagggaccaagagccgttttgggcgagcacaggaagctcaggcgggggcaagaggaaagctgagcagaggcgaagctccttacacacccgagtccaggc

SEQ ID NO: 20346 - DNA, 1071 bp, Homo sapiens
cttgtctccgtcttagtctcagtggctcttgcatttcatgctttagaatcaaaggaaagaaacaggaactctgtttagtgaagcagcgatgaaggaggggtttgtcagtcagggtggactgcgttttgctcttgaaacaatccccaagtttcagtgtcttaaaaccacaggtgtttttttatcctgctcacatgtggatcaccgagggcaggggccgggaggaagggggtcatctggctcacagccttgcaccagaggcgtcacgagaatcaggaaaagttctcctctcatgccgaagacgggagggaaaccagagggactggtgagccttgagtcggccacaggtgtgtggaggatcgtgacttagcaagccggggacacgctgttaatggacttcctgctgtgggggtgagggctccgtgctccatctctgatgccctgtacacacctgccacctcccctgtcccctcagcagagacatggccggtgctgtcgtgcctttcgcttttacctgtatcttaaatcacacaggagttcattcggatttacctgtacagataccctgttctctttcttgttccgtgggaattcactgggatttacccacacagccacctgctgcttctccttcttgttctgtcctgcatttctcaccttctaagaggaccattttctctttgcctggagaacactctagtgttttccatagtgtgtgtctgctggtggcaccctctcgtttgtttataccaaaatggctttttccactttttttttttgagacggagtctcattcactcttgttgctcaggctggagtcacagtggcgcgatctcggctcactgcagcctccatctcccaggttcaagtgtttctcccgcctcagcctcccgagtagctgggattacaggcatgcgccaccgtggcaggctaatttttgtatttttagtggagatggggttccaccatgtgggccaggctggtcttgaactcctgacctcaggtgatccacccacctcggcctcccaaaggtgctgtttttttttttttccccactttgattcttaaaggtta

SEQ ID NO: 20347 - DNA, 1031 bp, Homo sapiens
tattcagtttggacttttttttttcttttcttttcttttttttttttttgagttggagtcttgctctgtcaccaggctggagtgcggtggcacaatctcagctcactgcaacctccgcctcccgggattaagcgattttcctgcttcagcctcctgagtagctgggactacaggcatgcgccaccacacccagctaatttttgtattttttgtagagatggggtttcaccacgttggccaggctggtctcgatctcttgaccttgtgatctgctcaccttggcctcccaaagtgctgggattacaggaacattttctttgatttaaatttcattgtcacaaattctttcaggtgtgccttatctgccgttaaacgcatccttgaatttttttatttttcagaacttattttttatagttttcatttttttcacatcctggaacatattaagcatggtttaaaatctttgtttaatgtcatcatctggagcctctgtggctgtttctgaaggacggtatatcatacatgaaaagcatctccaccaagctgcaggaacaagacatgacagaaatgctttgaggtctgcaatgttctcctctcccagagagacttgatgttggctcttgacgggaggcgggtgcttgctgtcggggtcacctccattgggttttgggacgtaggaggggtccgtgctgggctggcccacgttttacacctatttctaggtgtggtcctctgggttcagagcctgtggtgagggctctaccgcttctccctttggtcatcctggactcccgttctcctgctagctggagatgctcctggatgcactgttgggggtttctggttcttgtggcgccccctggagtcagccgtgagccggggagagttggcccccgccgctctgtccctctcaggtcttcgtgagctctctggtaactgcaggcacttcctgtgtgttttcattttgtctggcttttaaaaatgtcttagtggagggttggtctgcgttatctagtctgttagttttt

SEQ ID NO: 20348 - DNA, 1027 bp, Homo sapiens
gtgagccgctgcacctggctgggatttacattgtaaaaattattttgttggccgggtgcggtggctcacgcctgtaatcccagcactttgggaggccgaggcgggtggatcacgaggtcagcagttcaagaccagcccggcgaacatggtgaaaccccgtctctactaaaaatacaaaaattagccgggcctggtggcgggtgcctgtaatcccagctactcaggaggctgaggcagaattgcttgaacccgggaggcggaggttgcagtgagccgagattgtgccgctgcactccagcctgggtgacagagcgagacaccatctaaaaaaaaaactgtaaacatgaaacgtcttaggctcaaacgtatgtgaggatcacatttttataacgaccttgacccctagaccaccccaaggagaatgttcccaccattctgagcaaacattcctttttaactctgaatttcttcatccctgtcatattttaatttacccaatatttggaccatgatgttcttgtgtaacttttcgtttttcctggagtttttattgactgtgtttcttattgacaacagaataatgaaactttacatcctcttttatgcagcttttttattttaccatctatcgtgtggagccttctgttttcctgtgagacgccctccagaccccagagtagttcctgagcgctgccttccgggaacttcccctcagctcaccttttgagttggagactgtttccaggatcctgtgttttccctttcttgtttttcacttgtgtttttctggaacccgtcctaagttcttaaaaagagtgtgtgtaagggaaactcagcgtccttatgagtttaaaaacatctgtgttctgccctcccattgtgttgatagtttggctgatagaattctagatccagagtctttgggcggccactgttaccagtgataagtctaatgcgattctgggtctggtttccttatagctggcctatcttttccatggtagtcaacttgagccaccataacaac

SEQ ID NO: 20349 - DNA, 1034 bp, Homo sapiens
actgtggctgtctcctgcctgtctgcgtggacactttcagctgctttaatccatcctgacctgcaaaaatccagacctggtcaaaaaatgaagttggggcaagtgactttccaaagcatttagcataagcttcctttaaataggaattctgcttatccatttaaaatagattttgactttgcacagtttgatttccatttgggctgatatctttctagattgtcctctgtgtatatatagactcctccatagatgtaggcacatctacatatttacgtggtggagcgccctgctatgcagactgtttccaacgtgctttttttaacttaacagcttatggtgaatattgccccacacagcttcgttgtcatttcgtcacttttctatttacatcatcatcgtctttgttgctgcaaagctctcccctaaacctagtaagattttcccttttgaagatttggtttctggcatcaggagcacattgtgtggcatgaaacacacacgtggaggctctcattatgctgctttgtgcatgcaccgaggccattcagacgtagctatttcttatcctattttatcggggcagggggatgacccctctgtaagcaccgtctgcagcgcggttcccaatgagaaaccagctcacctgccgatttcaactcactggaactctcaggaaagtaattttccagataaaagattgctattttattttattattttttaaaatgagatggggggtgggggagtctcattgtgttgcccaggctggtcttgaacttctggcctcaagaaatccccccacctcggcctcccaaagcactgggattgcaggcaggatccaccgcacctggccctgagttttgctaatggataaactactccgttcaatgggacactctttgaggacaaagggccgtgtcttgtttgttttcggcattcttagaataatgccttccctacagtatagaaaacatgtttgtgaattgaagctccacacgtttaaaccagccatcttcagtgttcatctccac

SEQ ID NO: 20350 - DNA, 1046 bp, Homo sapiens
ttctcctgcctcagcctcccgagtagctagggctacaggagtgtgcctccatgcctggctaatttttttttttttgtatttttagtagagatggggtttcgctgtattgaccaggctggtctcaaactcctgacctcaagtgatctgcccacttcagcctcccaaaatgccaggattacaggggtgagccaccgtgcccagcctggcttggagactgttgactgtatcccaggcatgggaacgaacacagggaagggagagggtatttttacggactgaccttttaagagttatgataatcctggaacatcagagaggccggtgctctacccctgagattggggtcgggggagggctactgaggggccccagcaccccacactgagctggtgggggcagagctggaggacgtggacggtctcctgactttggctgggtggtctgtgctgactcagtttctggtggaccctggcactgggtcatggaggaggaaatgtcagggttcctgaaggatgtgtagaagtttgccaggtgtgagccacagggcacggaggcagagaggtggctagagggttgggagaggacagcaaagtgtggggctggcgtggtgggcttggcaaggccggtggggacaggactagagagaggtgggggccagggagggaagtttgcatgttcgtccgtgtgtcattttcttgcctctctccccatcagctcgtgaagcctccctgtccgctggctagtccagggcccgggagtaacggggacttacaagtgtttgcggaatgcccttggcaacatcagccctgacctgtgaccaaccttgctcttcaccagattctagggaaggggatggtggagagaggaccgaggctgctgcctcaccctcctgggaggttttaagccttccggaagcacaggacttcagtgtcttgggcatcaggctctgaaaatagaggaaaacaccaagcaaagtggtttttcctattctcttacagttactcaacacagcacactcctgggacctctggtcaccaagatgtgtg

SEQ ID NO: 20351 - DNA, 1050 bp, Homo sapiens
gagggtccaggcctgcctctcggggtgactgagggtctgggcccacctcaccgggtgactgtaagggtctgggcctgccttggggggtgactgagggtccaggcctgcctcgcaaggtgactgagggtctggactgtctcgcggggtgatggagggtccgggcctgcctcggggtgactgtgagggtccgatggaagacatctgtagtgtcctgtgccatcaccagccccagaacaagctcgtgggacccgtgtccatcaggacaggcagtggtggcggtgctgatgcttctgtccctccttctgtgtgttcctgggacccttcctttctctacattagctggagggtggagggagtggtgattccctgaacctgggggccctggcttccaactcccttcccctggcccgggaaccacacgaagtgtgtcctggcccatcactgacccctggagcctccgaaatgctcagatggaacaaaccagtaggtaggggttgtggaggggatattgctttttggggcctgaacccctgcatgtgtgcagttcataggagcaaggcaggtagtccaggcagaggctgcccactctactggccttgccccccttccagccctgccctgctgccccggtattttccttccccagcaccgtgagcactgcttggaaagcgttggtctagggcattgcagtttttttttttttaaattggaaaaaccggcagtgtagaagtatggatccctgaaacaccacacaccacccatgccccctgcctttcgtgtgtgatctcctctgcctgaacccgcctccctccttccatggggaagcacctgttcatcctgcaaaagctcacacatggtaaagccatgcctgacagccctccccatgataattacagttatcactattaacgaccatttgcaggcaattgggaatttgctatgtaaaagcaccttatctaccctgcctcattaattctcatggcatcccttaaagagacagatcagaaaaccaagggtgagagcctcatccgaggtctcgcatctgggaag

SEQ ID NO: 20352 - DNA, 1043 bp, Homo sapiens
cacagcctttactccctgactgcgtttatattctgcctctcccgtgcctgttggtccttggggacggccctccggcaggttctggcctcaggaccccgcaccagccccggccgtgccagctgccctcccactggcctggcccagctctccagagaggcttcatgcagccagttccccagggaacaccgttgcccacacgttgctaatgttaaaacatgaatttattgcatctgtagcatcttaccttgagcacggcttctttcaatgcttttattttgcaattataggtttattttcttcctttcctctctcttgagctttttaaggtgttttctgtcactcagctggagactttaaatttcctatttatattaattatcaaattatttcatatatgagtcattcagctcagccctttttggctccttcttgcaactcttacttgtggatttattgggcagttcagcgcctactttcatgggcagactcaactggcgagattttaactggagggtgagagatgtcctggccacggggccctgttgctcacagtccctggatcagaggatggtgccggatgggcaggtgctgaggatgcacataccgccctcgggttagcaccgaaggttcttgtgtcagacgtgaggcttccttcctgggttctttctggctgcgctagtccagaagaccagcaaacccgagatggtctgaggtggacgatggagcctgaatggagagcctggggcgtgagccagggtctgggataccctgggacagagttagatgcccctgcagacgtggatgagcggctgaagactaagggagcaggtcacacgtggtgacagacaggagaggctgctgtgccatccaggggctggggaaggagcccccgtggagaggctccatttcggccacgtggctgctgcagacaaccgggagtcagcgtcggcacaaacacgggtgcctcgaaagagagcagtgccggcctggtgtctccgggcccagctgccactggcacaggcctccgaaggggcaggagcagg

SEQ ID NO: 20353 - DNA, 1045 bp, Homo sapiens
agacatatcatagagatggggtctgtaaatctctgggatccgaggcttggaaaggaacatcatggtggatgcagtttggtgagaactgttaaaataaatgcagctgccctgtgacatagtgattcagtgattctacttctcaggatctaccctaaagaaatgctggcacctgtgcacaggtgacaacttctgggacagcctttgtgacggtctgtggtggtgaaagatcgtacacagtctgaatgtttgttcgtggtgagacagctccgtagacttgtattttcataccttgggctactgcgcaacgttgaaaaggaattagaactttatataagaacatgaatgacaaggtgggcagatcacctgaggttaggagttcaagaccagcctgggcaacatggtgaaaccccatctctactaaacatgtaaaaattagccaggtgtggcaacacacgcttgtaatcctagctacttgggaggctgaggcaggagaatcacttgaacccgggaggtggaggttgccatgagctgagattgagccactgcactccaggctgggcgacagggcaagactctgtctcaaaaaaaaaaaaaaaaaaaagtgatgtctagtctaaaccccttcctgagtggagattctttgctccattggtccctgagtcctaggtggactgagacagagagcttcactgcataatgctttgcattcaggggcagctcagaaggtggaaattcttccctcttttgagctgaaatctgcctttgttgtccctctggagcctacaccttcccttttccatggggcaagagtttcattggtttacgttccctcttgtgccctcctcctctgggcacctccagggtttcctgttgtctatagggtaatacagcccatggcctcccgggtctgtggtgccggctccttgctcacgctctgccaggctcaccagccatcccctaaagtctgtgcagaactggactgtccgcctggatgttgcttgactttcacataagagttctttaaaaaaaaagtctttttttttaa

SEQ ID NO: 20354 - DNA, 1027 bp, Homo sapiens
tcagttgcgatctccttttctttgaggacgttgctcacagatatccgggcaggggacgcccagagcagggtactgcaggggtgttgagaaagacaggataccttcagcaggaatcattgctatgaacactgatgagtgctcaccttgtgcagatgctgctcccttgtttaaacctcagccaaatgatgttagagtactattcccatgttacaggtaagaaaactgctgcacagagaggttgagtgtttgtccaaagacacacagcaaggagggaactttagtcctagaaagtctgactcctttggccaatagtctttaaaaaatttttttttcatctttttattacccagacttcaaggagatggccaataccctttacatggtgctctgtagacagtggaaggaccatgtttaaagaatgaaagggtaaattggagaggtggggcacattggctttcccaagatttgaggcttaaagcagtagttttcaatgatgtatattttaggatgggttgcagtgaaaaggcatatactagaatgttcatagcagcactatttgtaatagccaaatccaccccccagggaaatcctacaatgtttatcagcagtagaatggacacataaactggggtgaaggcagacaatggagcaccccactgtggtgagaaggaacaatctgaccacacagcatacgtggatgaatcacacaaacacaatgtcgagtaaaaggaacgagacagaaaggagcatgtcctgcctgattccacgtctataaagtgccaaaagggccaaatgcacggacggtgttggaagtgggggtcgtggtttccgggaggtatgaggagggcttctgggagcgatgaggagggcttccgggaggcatgaggacggcttccgggagggatgaggagggcttccgggagggatgaggagggcttccgggaagcatgaggagggcttccgggagggatgtgggggggggggcttccgggagggatgagcagggcttctgggagggatgtggggg

SEQ ID NO: 20355 - DNA, 1084 bp, Homo sapiens
gagacagagtgagactcagttaaaaaaaaaagacttttggtggtggtggggaccatgcccaggattgggctctctccatactgatgaggattcttcttgttttgatgaccaacccccaagcagaagctttatttattaacatcacttcaaaaataacgtatcaaaggggcaccctaggccgggtactgtggcatcacacctgtaatgccagtgctttgagaggctgaggtgggaagattgcttgagcccaggacttcaagacaagcctgggcaacagagtgagaccccatctctattaaaaaataggccgggcatggtggctcacactggtaatcccagcactttgggaggccgaggcaggtggatcatgtgaggtcaggagttcgagaccagcctggccgacatggtgaaaccctgtctttactaaaaatacaaaattagccaggcgtggtggtgggcgcctgtaatcccagctactcaggaggctgaagcaggaggatcgcttgaacccaggaggcagaggctgcagtgagccgagatcatgccattgcactcctgcctgggtgacggagcaagactctctaaaaaataataaggtaaaaggagtacctgtggatgaaagcagcagctaacagctctgtgattcagctagacctagatattgtgcccattccttcccctcagtccattttctgtagcccctttaaaaaccaaaaaacaactttgaagtcactttgggtttaaaataaatagtggtaatttgtataatcaataaagagttcactctgctcttactgaggggacttgtctgaaagctggcttagcggtgtccaggccagagaacatcctgtgtggactcttaacaatgaaacaggagccgcaatggacaaggtgttctgatctccaaacccagctcagggattgaagctaactaccgccactccttcctctctcgaagaacaaagagccagtacccagggctctgcccacccccgagaaggggtgcctgatttcttatgtctagggtggctcctctgtgcagatcagacaggactgagagcagacaagctgagaccagcatgac

SEQ ID NO: 20356 - DNA, 1050 bp, Homo sapiens
ctgtagtcccagctactcaggaggctggggtgggaggattgctggagcctgggaggcagaagttgcagtaagctgtggtcatgccactgcactccagcctgggtgaccctgtctcaaaaaaataaaaaaataaataaataagttatctaacttaatggggatcttcagctgccttgaccttgctcacctgcgttgccatcttctggctactgtctttctctccctgtgcctcactgcttgacattccaattagaatattgtttctgtgaatgctgactgcaggcccaccagagaaatggccttggccatccatggataaacccagtctgcaatggcatattttttctcctcactttagtttttccctctactgataccactctgcaactgtcttcattcctagggcatgtaatttatcagtggaactcccagcagtatttcgggaaggaggtatttccttccttctcccttcccctcccctcccctcccctccccttcgacaatgtcttgctctgttgtccaggctggagtgcagtggtggcattatagctcactgtaacctcaaactcctgggctcaaatgatcgtcctccctcagcctcccaagtaactgtaactacaagcacacaccaccatgcctaactaatttgtttatttttttttagagatagggatcttactttgttgcccacactattctcaaactcctggcctcctcctagccatgcatggtgatggacgcctgtagtcccagctacttgggaggctgaggcaggagaattgcttgagcctgggaggttgaggctgcagtgagccatgatcatgccactgcactttgtcctgggtgacaaagcaatactctgtctcaaaaaaaaaaaaaagaaatgtgatcagattggatcatgtattcaaaactaatgagccttacgcattcccattggggtaacttacattcttctgttctgtgaaatactggctactgattttctaatgtctcatgtggcatcaaagcatgctgatgcagggtgaaagatggaaggcaggggaaggt

SEQ ID NO: 20357 - DNA, 1035 bp, Homo sapiens
aaggtctctgggacgcactaggtcctgagggaggttctctgggaaagcattagattctgggggaggttctctgggaacgcattgaggttctgagggaggttccctggaacacattagatcctgagggaatttctctgggaatgcattaggttctgagggaagttctctgggaatgcattgaggttctgaggaaggttctctgggaacgcattaggttctgagggagattctctgggaacacattaggttctgagggacattctctgggaacgcattgaggttctgagggaagttctctgggaacgcgttaggttctgagggaagttctctgggaacgtattaggtttttagggaggctctctggggttgcatttacgcatttaggtctgattgcacttcacccctccccttgtttttaatgcttctatcatgggtgagcacattcttagtttcaaacatgtttcttaaaccgtaacagtaagacaatgtttcaattagaaacttcacatggaactgtattattcactcacgtgattttatggactgcttctatgcttttcatgcccgattacaaagtacttcatattaaaatctcagaaaatgaacttgcccagtagcttctccatcatcaaatggaagtctccccatcagcccaccaccaaaggcaagttgccttgccgtcatttgccttgcaaagacccagtagtgcccttgctcttgcccagtgggcacgtgcccagcaggcacaccgaggtacagtggggacttctgcctctttgtccttgagagcaccctgtcttctacattcacagtttgcctccaggaagttactaagacacccctgaggggcaggaaaaaggattggttatttgcctattagagtcacaggtctttgaggaacccccctggatgactcttttcagccaaagccccatcttctcttaacccaaatttttcgttttaaaaggcttaaaagttactgggtccagggtttatttttatttatttatttttgagacggggtctcagtgtcag

SEQ ID NO: 20358 - DNA, 1030 bp, Homo sapiens
aggtggccagtggcatatttgaagagttacttttcagagcacactaacactttaatttcctttggatttttctgtccaagtctaaatttcctctcccttcatcctacagaatggtgtttttggttaactgccatgttatgacaagggaggttagagcaataaatcagaacgtttcccttctagattagtgatccctgtttttaattgtctacacttggctgctggaggattattttacggtattgttttgctccagacaccaccaaaagggaggctggctgggaggaccagctctgagaaacctgtaaccatgtactttgcagctagccctgcattcattctttcccagcaccacaagggcaggagccaagagagcagagcttccaggagcagttctgaaatgatgcaatcaaatgtgtctggtcccttgattaaatgattgtaatagaatggatactcacacttttatagtcctttgcacttttaaattcttttacatgctttatgttatcgtcacaattcctgcctcttgctttataggtgatgaaactgcagctcagagaggttaagtggttggcccagggttgcacagcttggaagtggaggagcttaaactggaagccaggtctcaatgtcagaaactagaattcctttcccagtgctattttgttgatggactcatgtctcattgaagagtagaggacatagaactgaatctcaggaatagaagtaaatgaacaaaactgatgggacatcttgaggaggctccatcccggagatgtatttataggattagatgcagttgatttaaagccgtcatagtattgactggcatggaagaaaacaaacagtttcttgtaactaattaaatgcagttctcaattgcattttgggagcagggactagggtggaaagaaggctctgggtgtagagcccatgcttctggcatgtcctccacccacacagggccacctctgccctgtgagcatgctttgcgcaggagagccatttgcagagccctgatgtctca

SEQ ID NO: 20359 - DNA, 1164 bp, Homo sapiens
tcactgtgtgaactcactatgtgaatatttgtacaggttttcactgtgtgaattcactatttgaatactgctgtgaatatctgtacaggttttcactgtgtgaatactgctgtgaatatctgtgcaggttttcactgtgtgaactcactatgtgaatatttgtacaggttttcactgtgtgaattcactatttgaatactgctgtgaatatctgtacaggttttcactgtgtgaatactgctgtgaatatctgtacaggttttcactgtgtgaactcactatgtgaatatttgtacaggttttcactgtgtgaattcactatttgaatactgctgtgaatatctgtacaggttttcactgtgtgaactcactatgtgaatatttgtacaggttttcactgtgtgaattcactatttgaatactgctgtgaatatctgtgcaggttttcactgtgtgaactatgtgaatatttgtacaggttttcactgtgtgaattcactatttgaatactgctgtgagtatctgtacaggttttcactgtgtgaactcactatgtgaatatttgtacaggttttcactgtgtgaattcactatttgaatactgctgtgaatatctgtacaggttttcgctgtgtgaactatgtgaatatttgtacaggttttcactgtgtgaattcactatttgaatactgctgtgaatatctgtacaggttttcgctgtgtgaactcactatatgaatatttgtacaggttttcactgtgtgaattcactatttgattactgctgtgagtatctgtacaggttttcactgtgtgaactcactatgtgaatatttgtacaggttttcactgtgtgaattcactatttgaatactgctgtgaatatctgtacaggttttcgctgtgtgaactatgtgaatatttgtacaggttttcactgtgtgaattcactatttgaatactgctgtgaatatctgtacaggttttcactgtgtgaactcactatgtgaatatttgtacaggttttcactgtgtgaattcactatttgaatactgctgtgaatatctgtacaggttttcactgtgtgaactcactatgtgaatatttgtacaggttttcactgtgtgaattcactatttgaatactgctgtgaatatctgtac

SEQ ID NO: 20360 - DNA, 1287 bp, Homo sapiens
gttgtttttcatttttatctatcttatggttgaaaacggtatccggttcctttaattttcattttccttgtagctagtaagattagtgttttgttttgtttttttgagacggagtcttgctgtgttgcccaggctggagtgcagtggcgtggtcatagctcactgcaacctggaactcctgggctcaaaccatcctcctgcctccacctcctgagtagccaggaatacaggcaaataccaccatgcctggctgatttttaacatttttctgtagaggtgggatcttcttatgttgcccaggttggtcttcaactcctgggctcaagtgatcctcctgcctcatcctcccaaagtgctgggattacaagcgtgagccactgtacctagccccagttgtcttcttcctctaaacactcatgagtttctcatactctaagaaattattctcctttattcctttctttgagtagtctctacaacttggtctctgcattctttccttgtggaattcttgttacgtgaacgttggatcttctagatctgctgccatgtctcttaattttcctttcatgctttctgtctctttgtccttttgaactgctttctgaaagaattcctcaacccagtcttcctattttaatttattcttcacttgcatccattgtgctatttggcccagctgttgaatttttattttaaaaatccagctttttaatttccagcatatctagctgattcttttctcatgggcataatattctcatgtctctcccacggaatagaaattatgtgtttgttaaagcactgggttgcctgttccatttctctgtcctacagtgtacaatcttcagtgcctgttccattcctctgtcctccagtgtaagatcttcagtgcgtgttccattcctctgtcctccagtgtaagatcttcagtgcctgttccatttctctgtcctcaagtgtaagctcttcagtgcctgttccattcctctgtcctccactgtaagatcttcagtgcctgttccattcctctgtcctccagtgtaagatcttcagtgcctgttccattcctctgtcctccagtgtaagatcttcagtgcctgttccattcctctgtcctccagtgtaagatcttcagtgcctgttccattcctctgtcctccagtgtaagatcttcattgcctgttccattcctctgtcctccagtgtaagatcttcggtgcctgttccattcctctgtcctccagtgtaagatcttcggtgcctgttccattcctctgtcctcca

SEQ ID NO: 20361 - DNA, 1101 bp, Homo sapiens
ggctgttctgggagagctgggggtgaggcaccccgagatgtgtcagcagtagtaggctggggggaaatggtctggtccccgcccccagacagcttttcaggagcggaatggcagagctctaagggcttggagcccctcagccgtaattgcttcccagccccaccacattcaggctgggacaccctcagcaaatcgtttctgcgcctcagtgtccttatctctagagcaggaatactagtcctcaaaaggtgattgtgaatagaagagatcttacctgtgtaccacctagcacagtgtctggcatggagtaggtgcttaataaacctaagaagcgggctgtggcaagcactagttaaccatccatgatagagtaccggagtattttccagctagtaaccgccctgggacttactacttcaaactgtgcgtacttaatgcgcctggaaggcaggtgtttagggccaaacatctgctcaactaagccaataatgcaataaaattaaatttacagcgtcaggagggactatattttgggaccctgggagagcctcctgagccagaaagaagggcggtaacccccagggaggtccccttcgcagcgtaaccctccctgggagtcggtctcagccactgtgagatgagatggattgcctccacaagtgggttacatagtgctgagcccttggcctgctgccgctcccataaatggtgggaggggtaagatggtccttagtctcctggagtcagtgttttctctgctggtgtctggcctgtgaaaatggggaatatgagctcttgggggcatgacagactgaggaaggagtagcatctctcactcctgggaaaggggagatgactcaggaatgaggaatagggagcagtgtttgcaccctcgttttagtttctgggccaaaggaaacatacctgataaagacctacatcctttgatgtttctgagctgggggaggcaaagaatagtgacaagattctggtcttgccaaccatgaaaaggtttggggaaaccaacatttactgagcacctaattagactctgtaactggattcttactgtagctctatctcatttatccatcatagcgt

SEQ ID NO: 20362 - DNA, 1049 bp, Homo sapiens
atagagactcagtttttactttattcctttagtatataatatttgaatttttctaccacatacgtgtaatgaatgtataacctgttccaaaaaataaccccctttcctatttcagtgtaagctggagctacagggcgtcaagggtggggtggaccatgcagcagcttttggaagaattgccttctcttgcccccagaaagaggtaacgcttgataccagatcgtttgagctttctgactagctagttcaacccagctaagaactttgtccttcccttcttgaggtcctttttgattgtggctttagtatcaagttcagcagttgtttcaagagcagctgagataataaattcaaacaaatggcgccttggttctttatggtatctgatactcctctaggactgacgagggccgtgtcctgagtagtgtgtgacccctggctcacgttgcctctgttttcctcaagttgccagacttagaagacttgatgaaaagggagaaccagaagattctgactcccctggtgagcctggacaccccagggaaagcaacagtacaggtggtcattctggccgaccctgtaagtatttctcaggcagggggcaggctggaccaggggtttcttcaaggatgtctttggcaggtgtcttttctctttattggtgtaggacggacatgaaatttgctttgtcggggatgaagcatttcgagaactttctaagatggatccagagggaagcaaattgttggatgatgtgagtcccatttctacatttatgtcaccatgggcctgagagggatggcattaagtgtgtgtgggaggagactaagcaacagggtccaggttcttaatgtcagaaccacgtcctttcgctgttgggttgacctcagccaaggaccgatgtcttcactgccacctgtgtagactgcttgtctagacttagcatttgtgccttaccacaacctcaggctgccctggaaccactgctggtggatctgtgcttattctgctctccacatggagatgcctctatccgaccccctcagctc

SEQ ID NO: 20363 - DNA, 1050 bp, Homo sapiens
cgaactcctgacctcaggtgatcctcccgcctcggcctcccaaagtgctgggattacaggcctgagccaccacgcccgtccatctcttaagcttagtaccgtgacaagttggaacagtccaaggcctattaggaatttcatgcttgttgattgatagtcaaggaaataacaggtcagttggagaactgtctttaggattctgttccttgctttacagaaaaggtgaacaaatctttccttcaggtagatgctggatagtctttggagcttgtagtagggtcccatgagcactgcccacagctgctttctgtaccatctgaggtcatctcatccttaagagaacttttaggaccagacaggaatgctcatctctctgtgcccagtagttctctgggggtggcctgaggctgacttgtctgtagtcactgagttcatttacttttattttctaggccttatgatgggaaatggagtaaaacaatggtgggatttgggcctgaggatgatcattttgtcgcagaactgacttacaattatggcgtcggagactacaagcttggcaatgactttatggtaaataccgtttttttctagcagagttttggctgggggtaggtggctggttgtaaatttgagtagagtgccaagggtgtgtgtgagtgaagagataacatttgagcagagactcaaaagaggtcagggagttagccacgtggatatctgggggatgcgcgttccaggcagagaatattctggcaagagccgtcaggtaacatctggcgtgttcgaggaggtgtaaggaagccagtgtggctggaatagagaacgagaggggagcgtggtaagagatggggtcggcagtgccatggggtaagactgcagggggcctcctaggccgtaagtcaccgagtgaaatgagccattggcggactttgagcaaagggaaaacaaggctggctgcagtctgggggtggactataggatgcgttttggaaagtttactttggctgcagagtgggtaatggatttacaagactggaggcagagagg

SEQ ID NO: 20364 - DNA, 1044 bp, Homo sapiens
aataatagccaatacttatagaatacttacaatatcaatataccaggtactctgctaataagtgttttacactggccgggcatggtggttcacacctgttatctcagcactttgggaggccgaggtgggcggatcacctgaggtcgggagttcgagaccatcctggccaacatggggaaaccccgtttctactaaaaattatctgggtgtggtggtgtgtacctgtaaccccagctacttgggaggctgaggcaggagaatcgcttgaacccgggaggtggagcttgcagtgagccgagatcgcgccactgcactccagcctgggcagcagagggagactgcgtctaaaaaaaaaaaaaaaatgtgtatttcagagaacctgcttcaagggctgggggaacagggcgtgtgtgaagggggagaaagggaaatggtggctgtggtctcagccttctcccccaggagcagagggaggtgggtggtgcagaaagctgcaggtacaggacttccccgccctggttaagacagtccccatcgcaggtgctgtgaggaccccagaagcgtccacggcctggcaggaagagcagcagcttctgcaacaggtggatcagggtcctgtccccagtgtaaccactgcctggctgggtgacccccatccctactgtaaccactgcctggctgggtgacctgggggtcaccttgaccatctgttagggggatcctgatgctgcccgccccatctgtgataaggattagccagtgccatctgtgccgtgcctagcacagggcagacggccgcagaagccagttccgtttcccgcccctggttcacctttggagggatgtgcactcgtcatggctgtaggccaagctcgtcaggaccagctgaggggaggcagcctggcacagcagacatgggtgctttcccccgtgcaggggccgaacacgagtggcttccttgggcccaagttggtttctgcttatgcagacagtcacgcggcccaacacggcccgtcccggcacacctcgtcttaggaggagccg

SEQ ID NO: 20365 - DNA, 1132 bp, Homo sapiens
tttgtcatcccatctcacccccacggcctttcagttctgattttcatctgatgttaacgagctaaataggctgccgttaaagaaaacgtaactagacatagatatctcgctgtcatcccacccacattcctgcctcagcagcaactcacacggactcttaacgtacacgccactcacatgcactcgtaacgtgcacaccactcacagactcgtaacgtgcacgccactcacagactcgtaacgtgcacgccactcacagactcgtaacgtgcacgccactcacacggactcgtaacgtgcacgccactcacagactcgtaacatgcacgccagtcacagactcgtaacgtgcacgccagtcacagactcgtaacgtgcacgccactcacacggactcgtaacgtgcacgccactcacacggactcgtaacgtgcacgccactcacagggactcgtaacgtgcacgccactcacacggactcttaacgtgcacgccactcacagactcgtaacgtacacgccactcacagactcgtaacgtacacgccactcacacagactcgtaacgtacacgccactcacacggactcttaacgtgcacggcactcacagggactcttaacgtacacgccactcacactgactcgtaaggtgcccgccgctcgcactggctcgtaaggtgcccgccgctcacacggactcgtcacatgcacacggcactgtgcgctcggcagtttttactaaacagtgtggcgcaaaaatttgccgtgtcgctatggtctttgtaaggaccattttcatgatcacttaatattttgcctgctggtgcgtcctcaccagctctttctgtcctagaacctgcttttccttccattgctcctcccagctcccagcaatctttgggtaattcctcctggctgcctcagatcacgttgccatccagatgcagagaaggctgggtcacagccctgcccgctcctctctgcctcccagggtcctggaccccttcagcttccttgccccagcccccacctgcttcaaaactccgtgtctcgttggcagtggaaaagtcaccagactaaaccgtgggacagtctcggcgcacctggctttgagatggttttaaatacttg

SEQ ID NO: 20366 - DNA, 1152 bp, Homo sapiens
tgcggggccttggccggcatgcagggataagccagggccacaggattctagctcccttttctcactgctgcctccgttggcacaggacctgagggattagggtggcagggccgttcctgagactggcgcccctaattgagctacagcgtgctttttccagctttttccactctccatttcaagtctctggttagatcaggagaaagtctcgctgtggcgccatctttaaaccactggaaaacttgctaatctcccttccatagagaaagccgacctccgctttccgcaggcaacgcgagacagatcacttgtaataatggcttgttctttgttcttttcattttgacacttagcctctatttatggcgagtggtgctggttctccacttacaatagcaatataaagtttcctttcaaaataattttttgaaggagtctattcaaagcaaaataagtaaataagcatcggagtgaggagggcgcaaattgtaaatgatacatgtggacgcctgagcttggaaactgggtgctgggagcagccatctggatttcacatctggcttcatcatagcaagcctatgaggcaagcactggtttctcccagtgtgcagcggaagtagcttctcaaagaggtgaagggatgttcccagcctggctgactttgccaccctgctctttccacctgccctttcttgtggccggcggacacagtgacctcagattcattctgtagcccctcagcccctctgcttcccgtcccccgctcatgccttctaagcatcttctctcccgtctgcagcccaaggctgcccctgggagcaggcagaggcttgcgctgtcttttgtcctggcgtcttcatttcagccggggaactttgggtggagctggagccaagtggcaagcggagctcaggcttgctgggccccggcctccccaccgcatcccccggcttttggacacagacctttctctgggtggtctggagaccaggttgaaacgtgttgatgtttagcagttcggttctgctaaacgttgacaggattatcatgctctttaaagcggtcagcctgtcccaggaagctgtgctcccgacggagaagctgtttgtgtgtggtttctgttccgaaggcctcagcagttttaagtttcct

SEQ ID NO: 20367 - DNA, 1049 bp, Homo sapiens
ctcagccgtccagtatcacctttgtggttctttcatgtcaataccagctatattaccatttacttacatttttctttaaatatactcattttaaaaatttagatttaggctggacgtggtggctcatgcctgtaatcccagcactttgggaggccaaggcgggtggatccctggaactcaggagttcaagaccagcctggccaacatggcaaaacctcatctctatagaaaaaatacaaaaattagccgcaacatggtgaaacgtcgtctctacacaaaaatacaaaagttagccaggtgtggtggtgcatacctgtgaccccattactcgggaggctggggtgggaggatcacttgagcctgggaggtcgaggctgcagtgagccaagattgcgccactgcactccagcctggggcgacagagcgagaccccatctcaaaaaaaaaaaaaaaagatttatatctttggttaaaaaggaagatgagcaggtgttagagaaacgttagtaatttattgacatcaaagcaagactcttctcttaaagtaattggaaggaccgaaagaaaactacaaaaggaataaccttctcactcttctattcagtgttatttagtgagggatactcgtgccacctagaggaggtctctaccaggtatcggtgaagaattccacttagaggatgcttgccccctgccctattttgatggccctggtgatatctgggatggtggtgaccattgagaaagagagctacagcttttatgctcagctttttagaatattcttgaaaactgaaggtttcacggtagttttaggtatgtcttaaacaaatccttaacttcagctttagaatagttggtgtttaggctgggtgtggtgtctcacacctgtaatcccagcactttgggagccaaggcaggcagatcatctgagggcaggagttcgagaccagcctggccaacatggcaaaaccccgtctctactaaaaatacaaaaatgatctgggtgtggtggtgcgtgcctgtagtcccagctactcggtaggctg

SEQ ID NO: 20368 - DNA, 1018 bp, Homo sapiens
ggtcgcttgtcggggctcctggatcagagagcatgagctggtgcctggtgagtcagaagctggatcactcttgggttggtgtcagcagccagttctggacggccctcttaagccgtgctggcctttcgttctggcctttgatgtaacccagggtgtgtaagggctgcctgccctttacagagaaacagatctgtgctgggaagttaacaaacaggaggcaggatgtgagatgagagagaaggaactgtctggtcagtggggttcacccaagtctagaggttcatctgtgtggagggtgggacttaatataaggcaggaggcttgggtagaatctgccccagccaccacctggcgtctgcagtgatagaaagcctgggagaccttccacccggggccctgggaagctccaacactcagcctccgtgttttctgtgtctttctctggctgcagggatttccgaggtttcctttttgtgcatctggacattttcctttctctgctcatttacttatcctacaaacacaggcgggatggtgggcccggcccagggtcggtgctggcactggggtgatcacgatgtagagaaggtagtttcgaccgggtgcggtggctcacgcctgtcatcccagcactttgggaggccgaggcgggcggatcacgaggtcaggaaatcgagaccatcctggctaacgtggtgaaaccccgtctctactaaaaatacaaaaaaatgatccgggcgtggtggtgggcgcctgttgtcccagctactcgggaggctgagggaggagaatggcgtgaacccgggaggcggaggttgcagtaagcagagatcgcatcactgcactccagcctgggcgacagagcgagactccgtctcaaaaacaaacaaacaaacaaacaaaaaaccaaaaaaaaaacaaaaaaagacaaggtagtttctgtgcttggggagcgcgaaggcgttaagtctgcgggtgagagccgaggaggagctccctcaccctgctggctggatga

SEQ ID NO: 20369 - DNA, 1160 bp, Homo sapiens
agagatgactgtaatataaaacttctatatggtccaaaataccagaaaccagatcaaatgataaaccctagggtgagaaaagatatttccaacgtatatgacagagaaaagtgctatttttcttttctttctttcttttttccgtcctttcctttctcttttctcctttccttgtttcactctgtcgcccaggctggagtgcggtggtgcaatcttggctcactgcaagctccatctcccgggttcaagcgattctcctgcctcagcctcccgagtagctgggattacagacacgtaccaccacgcccggctaatttttcgtatttttagtagagacggggtttcaccatgttggccaggctggtctcgaactcctgacctcaggtgatccgcccgcatcggcctcccaaatgtaatcttcatgctgggattacaggtgtgagccactgcccactggcctgttttttttcttaatgcataaagagcttttaaaatcaatttgggtaaagaatttgaacagagaaagacacataaacatgaaaagatgcctggttctgtttgcaattaaagaagtacaacttttgaaatatgtgattattaaactggcaaaaggaacatttgataacatacagtgttggcaaggatgtagacggggtctctcccgcgtggttgggggagcgtaatctgatgcggtgtctttggcagtgttttaacacagttaaaaatgtgtggaccgtttgacctgtcagtccaatttctgggaatttctcaacagatcttacaaatacggttgaccctcaaacaacgttggtttgaactacaccgttccatttatacacagatttttttcaaccgaatgtggattaaaaaatagagtatttggccgggtgtggtggctcacgcttataagcccagcactttgggaggctgaggagggtggatcacttgatgttaggagttcaacaccagcctggccaacatggcaaaaccccatctccactaaaaatagaaaaattagccgtgcgtggtagcgggcgcctgtaatccctgctacttgggaggctgaggcaggagaatcacttgaactcgggaggcagaggttgcagtgagccgagatcgcgccactgtactccagcctgggcaacagagtgagactgtcc

SEQ ID NO: 20370 - DNA, 1035 bp, Homo sapiens
tagtcgggtttggtgatacacacctgtggtcccagatatgcaggatgcagaggtgggaagacccttgagcccagaatcgtgccactgcacggcagcctgggcaacagagtgagaccctgtctcaaaaaaaaaaaaaaactttttgagaatttgaaaaatgtagaaaagcactagaatataggaatcataaacctccccactgctaacattttgcactttatttgtatatctttcctttcttctgtaaaatatacttaaaaaaatacaaaagtggggtttaactatatacctgtcgttttgtcgtttccacttaactatctcacgaatattctcctcgctcatcaaatattaccaagtgtttcatcttcactcttgcttgatgtttcatcattcctgacccccgatgaggttgtccttctggtatcaaacgcacttgtgtcctatctgtttcttttatgctgcttatcaaagtttctagttacatatgttttggggatatttgatgtctgttttcttacaagagcgtaaactctgtgaggacctgtccccaatgctggacgcagtgtcctgcacgttgcaggtctgcaaatagtgactatatggatatgttgttgaacattacattttccaatttttgcttggatgggatggcctttattttaaaattaattaaaaatttttgtttgtttttgagacacggtctcgctgtgttgcccaggctggagtgcagtggtgtgatcacagctcactgcagcctagacttgctcaagcaatcctcccgtctcagcctccggggtagctaggactacaggtatgtgccaacacacctgactaatataaaatttttttggtgtaaagcggggtcttgctttaagttggtgcacaagtaattgcaccaacgtggttatttttctgtgcgaaacactggagtggcacccaggtggatgtaaacagagtgaataagacaagggccctgcctggagatgttgtagtaaaaacctcctgccttggcctcccaaagtgtcgggattccag

SEQ ID NO: 20371 - DNA, 1025 bp, Homo sapiens
tgggtttggggtttctgaagctgcctggatgtgcttctctggaatgttggggcctccttgtacccgtcactggacttgttcaggcaggtgcagtgtgaccagctgtcaagagtattcctaggtttgctttccgggaggcgggaggcctcattcttgacttaagtctctgtatctcctttccaccccttctttcttcctccctgtcctctcctttggtgcttctgcgagacaccaaagcctgagacagtcaaacctgagacaatcagctttgaacaagagatgcagaggcttttggtggctagttcttacacctgaatccgccggctgctcccaaggccctgggccaaacctcaaagcaaatagttacttttccttcccatctgacttgtaaaatctcttctcccaacccccatcccaaattgccacccaggcctgtctccagctctgtgtacctgtacttcctgcctttacctgggcattcctttctgagtgatgggagtttcgcagatgaaagtaacttacaccgaaggtgtgaatgaggcttggtctttgaatgtttgcattttaaaactgaatgaggcttggtgctgccaagggctggggctggggagcaggggaacggaacggaacggaacggagttagtctttactgaggacggaatttcagtttgggaagatggaaagttctggagacagatggtggtgatggtagcagaacaggagatgcacctaatgctgcaggacggtccaccggaacacacttgaaataggacattttctgttatgtatgttctatcacaacaacaaattaaaaatcggccgggcgcagtggctcatccctgtaatcctagcacttcgggaggccgaggtgggcggatcacctgaggttgggagttcaagagcagcctggccaacatggtgaaaccccatctctactaaaaatacaaaattagccggacgtagtggctcacgccttgcaatcccacctacgcggggggctgaggcaggagaatcgcttgaaccca

SEQ ID NO: 20372 - DNA, 1043 bp, Homo sapiens
aaccttggtctgtctgactccagcccccccacagtgtgaccgtccgtggtacctgccgggttccaaccttggtctgtctgaccccagcccccccacagtgtgaccgtccgtggtacctgccgggttccaaccttggtctctctgactccagcccccccacagtgtgaccgtccgtggtacctgccgggttccaaccttggtctgtctgaccccagcccccccacagtgtgaccgtccgtggtacctgccgggttccaaccttggtctgtctgaccccagcccccccacagtgtgaccgtccgtggtacctgccgggttccaaccttggtctgtctgaccccagcccccccacagtgtgaccgtccgtggtacctgccgggttccaaccttggtctgtctgaccccagcccccccacagtgtgaccgtccgtggtacctgccgggttccaaccttggtctgtctgaccccagcccccccacagtgtgaccgtccgtggtacctgccgggttccaaccttggtctctctgaccccagcccccccacagtgtgacctgaattttctgcaacctcctgtggccttgtcctggcaggaggtgggtaactgtcatgagtttctcagaccacaaaaaccacaaccaccaccgccccccacaaaaacggaaacgccccttctttcagcgctggccatgagggagcggtggtgatggatggctgaccgtggagaattctgcattccaggggactgaggtcagggcaggcgggagctgcgtggccctggtttccaggactcaggctctggtgcattctcggggaggctgagctccccttcccgggtgccctccgtctactgagtgtgccgagctcattgctttcctgcctcccgtcctctctgcccctgtggctctcccagggaaatacccacgggaccccaggtgaaggttcctgctgcccgcccctctggggctggccctgctgggaggaatgccggcccccacccccagccctgcccagactcatgcctgaggttttactgctttcattc

SEQ ID NO: 20373 - DNA, 1234 bp, Homo sapiens
tgctagactgttgtttatacaagcagttgataaaaatgttgattagcctgagtctggggatagagttggggggttatgccgctagacaccttctccaggctaggaggagtctgttagtcagttgctcagccgtcttcaaatccagccgattccaaacttgccctgattggattatgattcagcccacactcctcggtgtgatcagcatgtttattgtaggaggccctcacagacagcttgctatcacttagatagttcctattgatagttttcaaggaaagatagtctgaaatgacgtgtgtttggtgaatgcatgcttgcttctaacagatcccttcttttcctaagtgtgtgtgataactaaagtaagccggaaggtctgttgaagggttgatgtcgagtccagctctctgccatctggagaatctcccacttttgtctttttgaaaatcgagactccctccgtcggtgggttgctggtcacgaaatcacggatgacggttaagtgagcttaaggcccacgttctccctcttggatgtaatctgagaactgctttatctgctgggcatgtgtggagtgtgggtacaattgtttcctgcagaggaccctgtggaaatagctggctagatacgcccaatagtcagtgtgcggttgagagtcccccatttgtccagaaggcgcagagcttgtacttcctgagggccatgtggtaatcctgactgccctgccctctacccaacacccctctccccgcctcctctcattagggcattaatggagcctgagggagtctttttcttaataccattctctccgtcacacacaggatgcgaagcccgctggctaattaagtgtggcattttgtttcaaaattatccatagacagtcactagctgcaaagcagcccactgtccttgtgctgatagatgtttttcttaatattttagggtgactcagtccatttatttcatgaattttaccttactttgaaataggtttcttttcttacacaagtgtctttgaccacctaaagttacacacaaatctgtaatatacattgcagtttggcacctaaggattctgacatttcagatgtaggcgtgagggtgaattggaagtaaatgccttcagacattttcctggggggaaatcagtttcctaaatttgcagaaagtcccggcttcaacccttggatgcgttgctttaagctttttacaaatgttcttaagaata

SEQ ID NO: 20374 - DNA, 1245 bp, Homo sapiens
attcaagtgctgtttctacagtgaatgacggttttatctcatatcgttgtcgaacagtcaccaaacagggtgtggtgagttctgctgtcctagggatagggctttctctttgttttcctgggagaatttcatccagatgcatcagttccacatttttttttaatttgtctttttttggtcaatatgcctgggataaaaatctggatggatttaatctgtttaaaatcagaaggcgctgcttttcctcccgttaaacgtgatcaggtcaagacggttttcttttgatcgtggtggctcacagcacagctgcctcatctgttactcatttttcaggttttgatgtgaaatctgaagattgggcgggaccacgtgcaatagggaaaaatcgcagtgtgaccgccggagccccgaataggcgtgaatgtagctgtgagtgcagcgttttccagctctgggcatgttcttgactgcaattgtaaaaattgtttttacccgtgatctttcaaaaatactccattatggtatgtgaatatttaaagtgtgttccatagtagacgaagaatatagactggaaatccagatccaggtttcccgggttggaaacttggctgtttcccgggggtgtgactttggggccagttctggaatttctgtgtctctagtttcctggtgagtaaaatggagatgatggtaccagcctcttagggtggttgttaaggattgaatgacataatatttgacaagtacttaggatggtgcctggtgcatagcacgtgccgtttaaatgtttaccaggcgcttcggtattcattccacattttatggttatttggattataagagagaggaattcagcctttttacctctttgtacccctcccccattccaaagcacctagttatttatttgtatctagagactatcacagaacctggtttctcttcatttttttgcttcttttctttcttttcttttctttttctttctttctttcttttttttgagaccgtgtctctctctgtctcccaggctggagtgcagtggtacgatctcagctcactgtgacctctgcctcttaggttcaagcgatactcctgcctcagcctcctgagtagctgggattacaggtgcccgccaccacgcctggctcattttgtctttttaataaagacagggtttcactatcttgacgaggctggtcttgaactcctgacctcaagcgatccgcctgcctcagcctctca

SEQ ID NO: 20375 - DNA, 1049 bp, Homo sapiens
ggtgcagatttgaaaattaggattttctgccttcttcataagaagcccggaccagccaggacaggctcccactggtgactgtgtttctaggacttgggccagtcttttagtaataaaggacaacagtccagttaggagcaggccgggtgtgatggctcacacctgtaattcagcactttgggaggccaaggtggggggatcacttgagcctaggagtttgagaccagcctgggcaacatggtgaaacattgtctttgcaaaaaataacaattagctggtcacagtggtgggtacctgtggtcccagctactcgggaggctgaggcaggaggattgcttaaacccaggaggtggaggctgcagtgagccatgtttgtgtcactacactccagccaggacaacacagcaagaccctgtattaaataaataaataaataaataaataaataaaaataaagtaataagagcaatgttccttgagaggctttttcttgttccatcatttgtaatatattttttaatctctttgttttttctctgcataataaggcagtctaatacatggctaaaaatatagagtcttttgtccttctgcttgagttcacgcccccgctctgccgtttattagctgtgtgtccttgtgcaaggcgctgtacatctctgtaccacacgttccttttccatttgtgataacagcacctgccttattgtgtaaaggctacgcgagataatatacacgtgcctggcatgtggtgagtgctcaataaatgctattattgtgtttagataaatgatcattaagtttagtcattcatttcatagcttgagccttgggaatctatcacattactgaactgtaaaacggttatgaggtatatccatatatctatatatatatatctatatacttttttgagatggagtctcgctctgtcacccaggctggagtgcagtggtgcgatctcggctcactgcaagctccgcctcccgggttcacgccatgctcctgcctcagcctcctgagtagctgggactacaggcgcccaccac

SEQ ID NO: 20376 - DNA, 1075 bp, Homo sapiens
aaattagccagacctggtggcgcatgcctctagtcccagctactagggaggctgaggcaggagaatcgcttgaacctgggaggcggaggttgcggtgagccgagatcgcaccattgcaccccagtctgggcaacaagagcgaaactctgtctcaaaaaaaaaaaaaaaggaattattttcccccttgaaaccaaagagatgtggaacaaatgccttttctgtaactgagtttttgtctcatttgaagttagggtgcttagaagcccgtgagctaatgatgctaatttccccatcagaacaagtgaagagccggagttctcccagctgagggcactggatgggtgaacacgtcttgtggatggactctatccgtgtcatttcgccaatgataaaaataactctagagaagggaattttgttttacactgaagggaaaccagagttccagattgctaattttttttaaattctcattaacatttgttctttaagcccatgcgtatacttcttcccattgggataacaaagggtatggttctaattagttattggctggcatttctctaaagaaaattgaaaaattatggtggggaaagaaaatgctgtgtggtatttctttttttcttttattaatttctcctttatatagttaaaaaaaacctggggatgaccgtatatgttaagcctgcattttgcctggttcctctcaccttgacaggaactgtgagaaaacaccaaaaaaaaaaaggacaaaaatgtaaaaaaacattctttatacaaaattgtcctgtttctgcctgttgtcatggtaggtacaaaagtaattgaagcttaatttttttggcttccaaaacacatattatttcagcttccaaaacacacattattatatagctgtgcataaattgtaattagatggtaatagaactttgagagcatttataacaatttcatcagcaaatctataatcctgaagttaaggcagttagacttgttttaataagtaggttggtagatgattttcacatttctagagagaaggaatgtgatcgatagtcaggaggtggtgaaattt

SEQ ID NO: 20377 - DNA, 1020 bp, Homo sapiens
tcccagcactttgggaggccgaggcaggtggatcgcctgaggtcaggagctcgagaccagcctggccaacatggtgaaaccccatctccactacaaataaaaaattagctgggcgtggtggcaggcacctgtaatcccagctactcgggaggctgaggcaggagaatcacttgaacccgggaggtggagcttgcagtgagccgagactgcaccactgcactccagcctgggcgacagagcgagactccgtctcaaaaaaaaaaaaaaaaagaaacgttggggtcagtgttcagaaagtaaaagactctagtggccacttagaacctttcaaaagtcaggtggtatccagttctttgccttccacaaaactgatggaggactcaattttcaactgagagatcatttcaagtaattttcagtaataggtatatatgcgatttaaggcggatagcatggagagaggttaaagaatggtgtaacgcggctgtgataaaactcttttcgacctcatctacttctttatgtgaacaaaatgtttcattgttcacatatttcttgttcattttagagacatggtcctacattgcccaggctggtctcgaactcctgggctcaagtggtcctgtggctgggagccacagcacctgcacatctttacaacaaaaccagaaacatgaaccaaattgatgctgagcctcgtttcactctagcaaaaaataataccctatagatacgcgaactaaagcaaaaaatgttccgcccatctcattgagagagcattccaccaaaaagttactctgctacttaatatttattaaaatgtataatgaggccaggcgcggtggctcacgcctgtaatcccagcactttgggagaccgaggcgggtggatcacctgaggtcgggagttcgagatcagcctgaccaacatggagaaaccccatctctactaaaaatacaaaaaattagccgggtgtggttgtgtgtgtctgtaattccagctactcgggaggctgaggca

SEQ ID NO: 20378 - DNA, 1062 bp, Homo sapiens
gcagagagggtgctgggggccttgattttgaaccccagctctgacttcctaggtgtgcactgggtaaattcctcactctcgttaagctgcagcatcctcatctgtgagatgggagcggctatgagagcttaaaccgcatatgtctgctatcatgatcatgaacgcagatgctgtgtgtagaggattcatcagtgtcagacttgcaggaagagctcgagataagtccgttgctctcactcttccataacagccctgtgagtcaggtgtggatgcctccatgaggaaattgaagttcacggaggtgaaaggccttgcccgagtgcgcacggttgaatgggagactcagatcagcctgcctccaaatcctgcacactccccccgaccaggttgtgtccaggtccccctgagacttgggaagggaccattggctcagcttcctgcagaagctgccaggaggcacccagtcgtgggaagctggggcggaggaggggctgtgggtgaatcggaccaggggccatggaattggcctgaggcttatgctgatgtgtggagagacctgcctcaagaaggggtggtctcaaaacatcgaactgcgccccataaatacatacaactgcaatgtgtcaattaaaaaataagggcccgggccaggcgtggtggctcacgcccgtaatcccagcactttgggaggccgaggtgggcgaatcacgaggtcaggagatcaagaccatcctggctaacacggtgaaaccccgtctctactaaaaatacaaaaaattagccgggggtggtggcgggcgcctgtagtcccagctactcaggaggctgaggcaggagaatggcgtgaacccgggaggcggagcttgcagtgagccaggatcgcgccacagcactccagcctgggcgacagagcaagactccgtctcaaaaataaataaataaataaaaaataagggcccacacagtggtacatgcctgtaatgccagctcttcaggaggctgaggcaggaggatcactgaagcccagggcaacatagcagcctggacggcacagtgagaccc

SEQ ID NO: 20379 - DNA, 1052 bp, Homo sapiens
tgaatgtaggtgccatgtctgtttatccatccatccatccgtggatgtaggtgccacgtctatttatccatccatctgtggatgtaggtgccacgtctgtttgtccttctgtctgtccgtggatgtaggtgccacgtctcttcgtccatccatccgtctgtggacgtaggtgccatgtctgtttacccatccatccgtccatggatgtaggtgccacatctgtttatccatccgtccgtggatgtaggtgccatatctgtttgtccacccacccgtggatgtagctgccacgtctgtttatccgcctgtccatctgtggatgtagctgccatgtctatttatccatccgtccgtggatgtaggtgccacgtctgtttatccatccgttcgtggatgtaggtgccacgtctgtttattcatccgtttgtggatgtagctgccacgtctgtttatccatccatccgcggatgtaggtgccacgtctgtttatccatccattcatggatgtaggtgccatgtctgtttatccgtccgtccgtggatgtaggtgccatgtctgtttatccgtctgtccgtccgtccatccgtgcacatttgggttgtttccacccaaaacgctcttgcctttcgttgagaaaaagaaccttgtccctgaggatggagacagcacagcctccttctctccagacccaagctctgtcccccacctgcctcccagctgtaatagatgagcaggacccgtgaccctagggcatgactggtcactattagtctcctgtagttgaagcacacagttgggccccctgcctcggccttctctccccctcccggccaagtgtccctgccccttgaccccttcacccttcttcctgggtcagctctttcctcccctggtcagtggtttaggtgcatcgaatgcagacgcagtcaccctgaggccgcgggaacaacctctggtcccttgacttcttggcatctcagtttcttcttttatttatttacttatttatatttatttgagatggagtctctctctgtcgcccaggctgagt

SEQ ID NO: 20380 - DNA, 1012 bp, Homo sapiens
caaaaccagggtgttccgggacacagcggagcccaagtgggatgaggtgagtggcaggggctggcatctctgtggggaccccaccaccccgtgctcgtggcttgtctgctggggacggccagcccattggttggaccagctatgtctgcacccccctttctgctccctgctcctctggcttctgatcgcggtgtgtgtctgggtgtcagaccctgtggtgtcagctcaggcccccagactccaggggtgatgggaggcctctgggagctccagaaaatctgacgtgtccttcgtgggccgtgcttactccctcctccttgcaaagctgaggcacgcacctgccggaaagccaggcctcccagcttcggaggttcagggccctttgtcccatctttccccaggagtttgagatcgagctggagggctcccagtccctgaggatcctgtgctatgagaagtgctatgacaagaccaaggtcaacaaggacaacaatgagatcgtggacaagatcatgggcaaaggacagatccaggtgaggccagggcgccggggcgaggctgagggagcctccaggaggtggttccagttgaaaaggaattctggtcaaggagcctgctctttcgtgattttggttccaagctggttggaggaaagttcccaggaggtggttctcccctccctgctagaggtggctgcctgttgtggccccggaagcccaggcgtgtgcgtggctcctcaggtgggtcatctgcgcttctgcaagatggaaacaaccagctttgttttcacacgccagctttagtctatgggtggttgtttcccggaacgccatgttgagaaggactcagaggctgcgtcggtgaacgggagggaggaatgctgtgtgtgaggagccgtgtctgccattgacgggggaccggagttaggcacacggaccaggcgtttgctcttctgcccgaaagacttagggtcctgctggttggcttggggggaggggggtctctgacttgt

SEQ ID NO: 20381 - DNA, 1046 bp, Homo sapiens
tcccggggcgggttccccaccttcccccagctctctcctcctgggcccctgcttggctctttcttgagcagagaccagagggagcaaaggaagaactcgctgggaggccaggtctgtggtaggagggctcaggaagaggagtaggaccctccacagccacagcctcagaagaaaacctcagagtgaaagaatcacacccttcctcctctcctccctgagctgggaacccctgcaccctccccacccctcagctaggaggaagctaaaccttctgctcttcggggtggcctcgcaaaggtgccagcttgaaggagaagaaattcgttccctccatgctcgctttcccactcctgaccccattcccaccgctctgccccagcctgtttgctttcatctgaacacttcctgatatgcaaagggctgggtgtgtgtacctaaaaccatgtgcacacacggggcagacgagcctccacacagaagcctccgtcctggcctctggggtgcttgtgggggtcatcttctggggccctcctgcttcctggtgggctctgattacaggaaaagcctgggagcctgggccgaagtagggggtgaaggaaaaaagatgaagccaactgcattgaaattctggatctccttgacactgggaactgagcttgggaactgtgtcttgctacgctggggccacagggtgaggccactccccagagcccctcccaccgctggccacgactggccctcctggggtggactcctggccacgctgcatcgcaggctctttatctataaaacaggtgaatgaggccttcctccctgggctccagtgacgagtgactcgggtggcatggcagcaagcatgccaggccttctggggcaggaggtggaggaagtgggtacatttctttcccttatttcgaaaggccggtcgctgggggacagagctgacaaacggctatgtgaagtcccactggcaagtgagaaccggcccaggcccgtcttcctgagaagcagctggtatgggagccagggttgaagtcactcacggg

SEQ ID NO: 20382 - DNA, 1033 bp, Homo sapiens
aggagatcgagaccatcctggctaacacggtgaaatcccggctctactaaaaatacaaaaagttagctgggcgtggtggcgggagcctgtagtcccagctactcgggaggctgaggcaggagaatggcgtgaacccgggaggcggagcttgcagtgagccgagatcgcgccactgcactctagcctgggcgacagagcgagactccgtctctaaaaaaaaaaaaaaaagaaaaaataaatgtctttcccactagagtctaagccacttgagaacaggggccactgtctgtttcccatggtatctatagggcctggtggacattcagtaaatatttattgaatgaataaataaatggacacatagcccagtggaatccccaagtactcgcgttttgcggtattcatactcggtccttggcaagcatcgggcaaggtggcactcttaggagttgaatccagctctggtgtgtgggacaggcaggaggagaggaagagagggaggaaaagtcggttcgagaacccaggtggaaaatagattgagggaagcaaaacgagatgttacaggaggaatatgggtgattgtcttttccttttatatttctgcatgttttgtatattttttataataatatctgacttttatcccctatgaaagtgtcgcttaaaataaaaggaaaggggaaaggggggccgggcgcggtggctcacgcctgtaatcccagcactttgggaggctgaggcggacggatcacctgaggtcaggagttctataccagcctggccaacatggtgaaaccccatctctactaaaaatacaaaaaaaattagtctggcataatggctgggcatggtggctcacacctgtaatcccagcactttgggaggctgaggtgggtggatcacctgaggtcaggagttctatatcagcctggccaacatggtgaaaccccatctctactaaaaatacaaaaattatctgggcatggtggcaggtgcctgtaatcccagctactcgggaggctgaggcagggga

SEQ ID NO: 20383 - DNA, 1086 bp, Homo sapiens
ctgataaaagggcaccaaattcaggggagaagggaccacttctagtggagttggggatggcctggatgcgtgcatgtgtgtgtgtgtgcaggccaagggtcatttctggatgatacactcctgtcctgggctgcagaggttcttggcacacccttccctggcagctagtaggaatccaaggcaattctctttgctattactttactttaggggtacttaccttaagcagcagttgcgttgtgagcatgtgcccaagtgccaggcccataaatcaatcctgtttccagtgtcatttccaagacgcttcatcttcctggggggcagaggtaaagttggctgcagttttctccaaagctatagctggagtttgctgcatatctcagcccagacttacctttgaagagttattgatctgtaaaactggtaatgcaaataaaatactgatagcagcgtcatgttgcatttgtaaaatggcttacacttgccaaaaatgtttcatgccattctatttaaagataggtagggttgtgacgggggcgttgtagaaggtgctattttaaggaacttatttgtcaggaataaaaacccttttgtaatgcagattaaccctttaggtatcattctgtgccatttttttttttcttttgagacagagtctcactctgtcacccaggctggagtgcgatggcacaatcatggctctctgtggcctccacctcccagactcaatcagtcctcccacctcagcctccccctcactacaggcacatgccaccacgttgggctaatttttatatttttgtagagacagggtttcaccatgttgcccatgctagtctgtaactcctgggctcaagcaatctgcccctcttggcctcccaaagtgctgggattacaggagtgagccactgagcccagcccaattctgtgccagtttttaatggatcatctgaaacatctctatttctgtttcacctgcccaggtctcttgtgcctgcacatcatgcctgtatcccccatttggatgtttttctaagtgcgggccccacgtggtgatttgagaaatgatcggtggcacctcgatct

SEQ ID NO: 20384 - DNA, 1026 bp, Homo sapiens
gcttccgcctcccggggttcaagtgattcttctgcctcagcctccctagtagcggggattacaggcacccgccagtacgcctggctaattttttgtatttttagtagagacggggtttcaccacgttggccaggctggtcttgatctcctgacctcaggtgatctgcccgcctcggcctcccaaagtgctgggattacaggcgtgagccactgcatctggccaacattagctttatgtagttgaactatgtatatgattttggagtgacctgtactagaacagagaggaggcagagggaggagcaaggtgatctggaaggtgacgaatccagtcccatctgtggctgcagttagtggctgcaactgccctggcacttgccctttggtgtcagttcccattggctgaagagctactgagcttcatacagtctggaggtggggcttgagtttctgccaggaaagctgggagagccagggagaagccaagaggcgggagaaagtgcttcaagccgaggacctgccgttgttaaaggcctggaagtgagaacgtgccaggccctttgagaggttactgtcaacagtgagatgggtgagtcatcagctggggccccacggctcttgtttgggctggcttggtggcttcctgctgggcatagagtgagcagtgttttagaaagagtcatctgatgtcagcaggagggatgcaggatgaatgtcctgtcacacctgtcctgaaatcctccagcaccttcccttcgcctatggggccccccttccctttgcacagctgtcaaggccttgtgtgacctgacccctggaccccctgcctacctctgtggcctcaggaccaactccgtgctagaattgtgaactctcacgagagagagattttgtcggttttgtaacaaaacttgctcattgcagtctctggtgccgagaactgtgcctggcacacagtaggtgctcagtaaatattagctgaatgaatgcatgaaccagccagactaaactcatgtcattgtgcct

SEQ ID NO: 20385 - DNA, 1053 bp, Homo sapiens
gtaatttattcctttttgtcaacaccggcccataatcttcatggctgctggagtctcagaggtggggctggcagaagaattaagtcatctactcagagaaacttaggtttctgtggttgtgattgttggctactgttgttcttcgggaaaaggaaggaaatttgtggggaattggctggaagatgctgttaggaggatggaagatggggaatggcggggaggctctgcctcactcttgcgagtaggatggaagacttgttctctgtctgaggtatgatctgctttctgggacaattccggtaccttccttcgtagagggagggcatgatggctctcgtgggtgttgtgtggattaattcatatttataaagtgctttgaaggtgaggagagctattgagcagctcagctgtccagctcattgcgctcctcatccgggaaagcctcgagggactgggagaggccggcacaggacttaggaaggggcagggaatgtggcaggaggaccggcaggaacagggtatcagaccagctctgaggcagcgcctcccacagcggctcccgcacaggccctccataggtgttggttgtctgagtacgggtgggaaaaagaaaactcgagttcttggctccttgagctcctccccgcagcagaaacccctgttagctgaaacctgtcagctggcccgtccatgcgtttccggctgtgtggatttggtcattgtactcgctcgtagtggagtcagagacccccaaagggagtctcgcgcttttgccagggtttatgattggaggacttcactgccagcgttggcggcagctgtttggctgagcttgagccctttgggcgcaaacctagggcaggcggcttcaagacaaccctgcgcccactgcccctgccaggcccttggtggtggcgggtgttggtgatgtgtggggggtgggctgaggtgatgtgttgagtggactgaggtgatgtgttgggtgggctgaggtgatggggggggtggactgaggtgatgtgttgggtgggctgaggtgatgtgttgggtggg

SEQ ID NO: 20386 - DNA, 1327 bp, Homo sapiens
aatgcctcagattcacgcgtgcttatgttcctgagtgtttctggctctttgcaaaacccagttcttgtttccctatttcccgaagcctggaatcgtatggaaccctgtctctagctttctctgcagcagaagactcctctgagctgatcatttccaagtcttccataccccaccctcttcctcccacgcctggagcaaaaaagcaaaattgcctgaggccaccttgaaaattcctgaccagaggaatgccagaaaagggaattaggccaaggcctcttagggggttctgttgggcagccctgattcaggcagattggcacctgagctgtctaccctcctgctgctgccctggcctctgggcggctcctggggtggcctggatggtgggtgggagggggcactgatgtggccgcagtgtgaggagtccctgcctccctcttcggaacagcttagtggagagctgtagcaggaggcttcccggggaggtgctgtgcagtcatgtttgggctgttagccatcaactttcctcttgacaagagcctaaattaaaacaaatacccgagctgtcatttgcctggcagcaaggttttgtggctcccagaggaagttcctctgcttctcaggaagctgtttgcttacaaggctcacagtcctggggtgacaaatctccacaaatgccagatccatcgggaactgtaaagggggtatacccagggcacagggtggcagtgtgacttagagatgggaatgactcggtgttagaggttccctgccttcctctctctgagcattgttcctggtaacaatgataatagcgtctcctgagcacctactgtatggcaggcactgggatagtcactttctctttctttcttttttcttttttttttttgttttttgttttttgttttgttttgagacggggtctccgtctttgcccaggctggagtgcagtggtgcgatcttggctcactgcaacctccacctcctggattcaagcagttcccctgcctcagcctcctgagtagctgggattatgggcgcctgccaccacaacccagctaagttttgtatttttagtagagatggggtttcaccatattggtcaggctggtctcgaactcctgacctcaggtgatcttcccaccttggcctcccaaagtgctgggattactggcgtgagccactgcgcccggcctgtgctaggcactttctatccattctctccaaatctcacaactctgcaactcttacagagtaggaaagtgaggctcagttagcataaatcatagacctaagatcacataagtaacaaatggctgagctg

SEQ ID NO: 20387 - DNA, 1036 bp, Homo sapiens
gagcagttagagaattaattggaacagcaattctcccaccccaaatcccatcctaggggccatttgttctttctttgcatctttccagagagggtggtcattctcgacgcgacgtctcaaccagccaaacagttcttttccagctggtggaggtgggctgggtggaacacctgtactgcctcattccaggctctttgtgaccaggaatatgcttggtcattcattcattcacacttgctcattcattcactgaaactatttgtgcaaggtcctggggttacagtgaataacagatgtggttcctatcctccaagagacctcagtctagcaggagagacaggcattgaacgtttacaagagtcctgagcattcagaagcagggaacgacgcaggccttcctggtctggtgggtcgggaaagctccctggaagacaagatacttaagttaagaccagaagggagagtaggagttacccaggcagagtgggggtagagcgtttttgccagcgatgtcaacctatgcaaaagttccaaggcaggaaaaagtagaagagagcaaggagcagaatgtgccagatgaagctgaaaggggtgcagaggcccggccacaggttccttaggccaccaaaaggatgtgcgggtctctatcccgacagcagtgactcgggagactgaggcgggagaatcacttgaactcggaggcggaggtttcagtgagccgagattgcaccattgcactccagcctgggggacaagaacgagactctgtctaaaaaaaaaaaaaaaaaggaagccatagacaggtcttagtaagagaggaatgacatgctacatgtgttttaggatgtcttagagcaagccttcagttgctgttagacactgggaaactctttcctctaattgatcttcatatctttgatgtcagtctcgtgagcctgggactgctccaaccaacggacccagccaaaacgtggccactgtggccggagtctcacccttcttcactctcctttcgggagaacacgagtcatgtgtg

SEQ ID NO: 20388 - DNA, 1056 bp, Homo sapiens
ccgttatcccagctacttgggaggctgaggcaggagaatcactttaacccaggaggcagaggatgcagtgagccgagatcacgcccttgcactccagcctgggtgatagcgcgagactcagtctcaaaaaaaaaaaaaaaaaaaagaaaaagaaaaagaaaagaaaaaaagaggttctgagaaatgtgtagatgatttcactgttgtgcaagcatcatagtatattttacacaaacctaaatacaaaaatcacctggctgtatatttcacacaaacctaaatactaacatacagcccaggtacatagtaggctcaatggtatagcccactatgtgatatagatatgatatatgatatagacagcttactgctcctaggtacgaacctgtatagcaggtcactatactgaatactataggccgttgtaacacaatggaaaatgtttgtgtatctgaacacgtctaagcgtacaaaaggtacaggaaaaaatacaggattataatcttctggaccacctttgtatatatagtcctttcaggtcatatggctcaggactgtagtttgaacccatgtttctcattttttttgtttgtttgttttttgagacagagtctcgctgtgtcgcccatgctggagcgcagtggcgcaatctcggctcactgcaacctctgcctcccgggttcaagcgattctcctgcctcagcctcccgagtagctgggattacaggcgcgcaccaccacgcccggataatgttttgtattttagtagagacggggtttcaccatgccgtccaggctggtctcgaactcccaacctcaggtgatccgcccgcctcgtcctcccaaagtgctgggatgacaggcctgagccaccgcgcccggcccacattaagtctttaaatgccccgctggggactaagatgcccctggtggaatccaggagccctggtggtggcttctgcggggcccaggccgagatgagggagaggccgggaggagtggactgggctggcccgtgggccgggggtcggtggtttctcgtgccctcccctcggc

SEQ ID NO: 20389 - DNA, 1009 bp, Homo sapiens
ttcttcttcttgttatagtaatttttttttttttcgagatggggtcttgctcttgtcgcctaggctagagtgcagcggtgcaatctcggctcactgcaacctccacctcccgagttcaagcaattcttgtgcctcagcctcccgagtagctgggattacaggcttgtgccaccacaccaggctaattttttgtatttttagtagagacggggtttcaccatcttggccaggctggtctcaaactcccgacctcaagcaatcagcctgccttggcctctcgaagtgctgggattacaggcatgagccaccgtggccggccttgttacagtaatttacatattgttcccaccttgctagcattgctgaaggcagataccaccttatggcagtaaaggatgcaggttctggggtcagactgcccacgtttgaacctcagctctaccccttactagctgtgaggatttaaaaacgttatttcacgtctctgtgccttggatatcttatctgtaaaatggatgtgttaatagtgtctatttcctggaatgttgtggggattaatgaggaaatctatggtaaaaaaatcacggtgaataatcaatcaataatgactcctatgattcacgctttgttttctaagcacctgccacaggacctggaataatttagataaggactgactgcaagtcagacacctctgcaggaacagcagaagaagatcgatttttggtggctagctccactgaaatggaatcccactgggtcagagcaaaacctggaatccatatttttatttatttttcattatttatttatttatttatttatttattcatttttttgagacggagcctcactctgtcgcccaggctggaaagaagtggagagatttctgctcactgcaacctctgcctcctgggctcaagcaattctcctgcctcagcctcctgagtagctgggactatgggcgtctgccaccacgcctggctaatttttgtattttttagtagag

SEQ ID NO: 20390 - DNA, 1050 bp, Homo sapiens
ctacacagacacagcaacaatccgatttctccttcttttccccacatttcccccttttctattcgacaaaaccgccatcgtcatcatggcccgttctcaatgagctgctgggtacacctcccagacggggtggcggccgggcagaggctgcactctgggcactttgggaggccaaggcaggcggctaggaggtggaggttatagtgagccgagatcacgccactgcactccagcctgggcaccattgagcactcagtgaacgagactccgtccgcaatcccggcacctcgggaggccgaggctggcagatcactcgcggctaggagctggagaccagcccggccaacacagcgaaaccccgtctccaccaaaaaaatacgaaaaccagtcaggcatggcagcgcgcgcctgcaatcgcaggcactcggcaggctgaggcaggagaatcaggcagggagcttgcagtgagccgagatggcagcagtacagtccagcttcggctcggcatcagagggagaccgtggagagagagggagagggagagctctttcttttcttttttttttttttgagacagagtcttgctctgtcacccaggctagagtgtagtggggagatctaggctcactgcaatctctgcctcctgggttcaagtgattctcctgcctcagcctcctgagtagttgggactacaggcacacaccatcacgcctacctaatttctgtatgttttgtagaaatggggttttgccatgttgcccagggtggtcttaaacacctggactcaagcaatctgcctgcctccacctcctaaagtgctgggactataggcgtgagccaccccacctggtcaagagcaatacttttttggtctgagtattttatttggagagaaatagaacttggccattgagcttatatacaccgagatagctgccacattacagggaaaaactatgtacaatcaaatatatatatttttttctttgaggtggagtttcgctcttgttgcctaggctggagtgcagtggcacgatcttggctcgctgc

SEQ ID NO: 20391 - DNA, 1979 bp, Homo sapiens
acgtgtcgagggagggacctggtgggaggcgactggatcatggggcggtttcccccgggctgttgtcctgatcacgaggggagttctcatgagatctggtggttttaaagcgtttggaagtttcccccgcaggcttgcttgctctcctgccgccttgtgaagaaggtggttgcttttcctttgccttccgcggtgattgtaagtttcctgaggcctccccagccttggggaactgtgagtcaattaaacctctttcctttataaattacccagtctcgggtagttctttacagcagtgtgaacacggacaaatacaggtgctgttattatttccattttccatgagaatcacgaggcctggagaacttcaataacattgcccatggtcacccagcttataagtagcccttaggatttgaagccaggcagtctggcttccaggtccatgctttcgcacaccaagctgtaccgcctcaaatattagtacttccctctcaggatagttacgaagattaaatgcaagagaataattaaagagtgtagcagaacacctggcgtagagtgacgatggagggtattcgtgtctctgtgtgtgtgtgtgtgtgtgtgttgttactgattttttgtttgtttgagatggagtcttctgagtagctgagattactggtgcccgccaccaagcccggctaatttttatattatttatttttttgagatggagtatggctcttgtcaccccggctggtgtgtaatggcaagatctcggctcactgcaacctccgcctcctgagttcaagcaattctccagcctcagccccccgagtagctgggattacaggtgcccgccaccacacccggttactttttgtatttttagtagagacggggtttcgccatgttgtccaggctggtcttgaactcgtgacctcaggtgatctgcctgactcggactcccaaagtgctgggattacaggtgtaagccactgtccctggcctattttattttaagacagggtcttactctgttgcccaagctggagtgcagtggcatgaacacagctcactgcagcctccacctcctaggctcaagcgatcctcccacctcagcctcccatgtagctggaactataggcacatgccacgagccggctaatttttaattttttgtagagacggggtctcactatgttccccaggctcgtctagaactcccgggctcaagtgatcctcgctccttggcctccacaagtgctgagattacagatatgagccaccacacttggccctgagactttttatttttaatctttatgggaaatgaatttcctactaagtagtcatgttacctgaacctgattcatctgtaacctgatgggttttctgcccttcccatcagtgactaatgagattgttgctctaggaagaattccttgtgttcagtggatgtctgagtaacttaatttgaaggattgaattttcagcctcagctgtgatagagtaattttttcccatccctattgtgaagagatattaagaagccatttgaggccgggcgcggtggctcacgtacgcctgtaatcccagcactttgggaggccgaggtgggtggatcacttgaggtcaggagttcgagaccagcctggccaacatggtgaaaccccgtctctactaaaaatacaaaaattatccgggcagagtggcacatacctgtaatcccagctacttgggaggctgaggcaggagaattgcttgaacccgggaggcagaggttgcagtgagccgagatcacgactctgcactccagcttggtgacagggtgaaactccgtctcagaaaaaaagatgggatcctccatggtgctgttatcgttactcttcctcgatggtgtctttattgttgctgttataagtccaggaattttcagttggctaaaccaggctactgcttatatttgaatctctccaggtaataaagtttcc

SEQ ID NO: 20392 - DNA, 1077 bp, Homo sapiens
tgcacatgtacatacatgtgcacactgccacatacatgtgtgcacacacaatctaggagaaagagccctcaagcatacagggaggcattagagtggagcgattaagggaaggcgttttcgcactgtgggaaacagctcattgaaattagtgcagttggcaacagaagcacccgggcggtcttccttggccacccttgtcctttgttgcttcatttttctctacagcattccccaaattaccaccgtggatgctgcaattttgcatgtgggtcttattcactgtctccctccagtcaaacgcaagctccaggcaggcaggggtttttctctctcaagatgagtgcattggacacggcgagtattattctgtttttggactccgtttcggttctatgcggacgcgtatgtgtacactgggagctgatgtagaatgtatttcttgctgtgagatgaacaaaaaggtttgaaaacacggaattaaaccatgtttctgaagctagactgcctgtgtgacattgggagaagttatttgacttttctgagcctgagtcccctcatctgtaaactgaggctaataagcacctcttctctcctgctgttgatatgagaaataaatgggtcatatttctaaagcgttttggacgggtcctggcacgtaggaagcacccataagtgttaattaaccactactacaggtcatttttctttgagttgcttcttctttctttttcttttttgtcgagacagagtcccgctctgtcacctagactggagtgcagtggcgtcatctcgggtcactgcaacccctgcctcctgggttcaagtgattctcctgcctcagcctcctgagtagctgggatgacaagagtgtgccactacgcctggctaatttttgtattttagatgagatggggtttcaccatattggccgggctggtcttgaactcctgacctcaggtgatccgcctgtctcggcctcccaaagtgctaggattacaggcctgagccactgtgcccagctgagttgcttcctcagagcttcccactccccagtcattctggatcgcagatggtttg

SEQ ID NO: 20393 - DNA, 1567 bp, Homo sapiens
gttagtagcagagatttaggaaatgaacagatcagcgatatcctagtagcgtttagtgagtgctggcaatgagaataaacatgtttttgtgagttgcttttccgagagatagggagaccattgaatataattatatgctgctgtttggagcaacctccaagaagctttcaagttgatttgctctgtttccagcacacctgctacacttaaaggtcaaaatccaaggaattcgtcaagtctgttgcagagtttaaagaaaccactcggctgggtgcggtggctcacacctgtaatccctgcaatttgagaggccgaggcgggcggatcacgaggtcaggagattgagaccatcctggctaacacggtgaaactccgtctctactaaaagtacaaaaaattagccaggcatggtggcgcacgcctgtactcccagctactcgggaggctgaggcaggagaatcgcttgaacccgggaggcagaggttgcagtgagccgagatcacgctactgcactccagcctgggcgacagagtgagactgtctcaaaaaaaaaaaaaaggaaagatccttatcaaaaattgaaaggccgggtgcggtggctcacgcctgtaatcccagcactttcggaggccgtggtgggtggatcacgaggtcagcagttaagagaccagcctggacaacatggggaaaccctgtctctactaaaaatacaaaaaaattagccaggcgtggtggcgggcgaccttgctgggtgtaattaacatccagtgacttgggaggcctgaggcaggacaatcgctggaaactggaaggcggagcttgcagtgagccaagatcgcgccactgcactctaatctgggcaataagagcagaactccgtctcaaaaaaaaaaaaaaaaaaaaaaaattgaaagggagccagggaagctgcagaaaggtgccgtagccctgtgaggacggtgtcactcccagttcctgtatttgtgggctggaaagggaattgcccccaaacttttctggttttgatttgagtcttactttgaggatcagtcgacttaagtagaagtttttagttagttacaacttgaatgtagctaatatgtgtttttaattacaaatctcagtactttgctgccttggaaaacccaaaggcttcctacaatgttagaagcgacagtaagtgggtttgtgtacatgctctgttccgggtgggtcctcagaacagcacgtctgcaaagttaaatttcggtcctataggaagatggggatgaacttccatcactgaaaggggaaactggtgggataaatggagacattaattggcttctgtcccagacaaatgccttgagccttataaatgagaccccaaattagctgcttcctgatcctaggacaatagaggagagtgaggcttgctgaaaaagcgggataaaggtgtgacccctgtgttcttttgaaaattgtaacaagtaatagttcatggaaaactggtgaaatcctagagtgtgtcattaaaggaagcctttgtgagcactgtgagaggaaatgggaatgctcccagatccaa

SEQ ID NO: 20394 - DNA, 1108 bp, Homo sapiens
agctgaaatatttataacagcagaaccccacaataaaatacgatagaacttcttggcaacagtttattgctcagttaactattttgaagcatttctgataattagcttgtgggtaaattagattttgcaaaaagtttgcaaaatactcttgattcttgaagaggtgaggttattgagaaagagtattttgacccaagatttatgtgaaagcttgaatgtcattttagtaagatggtttccttggctgtctacgtcaagagcttatttagcgtaaaaacattgagttgtactgcgcatcagtttttttcattctgttgaccaataaatactttcaggaccataatcccttcttggcttaggcatctcaggtgtcaaggatgatagaagtcctttgcctgcgtttaataccaattgtagcaagtagaagagtctttatgcttggaatgacacctttgtttgtggctgccatagcctaatgtagtcaatacgaaataattgactttttttcttttttaacaggtgaagagcagaataaagaagcgctgcaggacgtggaagacgaaaatcagtgagacataagccaacaagagaaaccatctctgaccaccccctcctccccatcccaccctttggaaactccccattgtcactgagaaccaccaaatctgacttttacatttggtctcagaatttaggttcctgccctgttggttttttttttttttttttaaacagttttcaaaagttcttaaaggcaagagtgaatttctgtggattttactggtcccagcttttaggttctttaagacactaacaggactacatagaggctttttcagcattactgtgtcgtctccgtgccagatgtggcaagatcaccattagcaaatggaaattacatttgaaagccattagacttataggtgatgcaagcatctaagagagaggttaatcacactatagaggcataagtggtatcagttttcatttttctaattgtttaaactgtgttttataccagtgtttgcaagtaattgggtgttagcttgagatggttaaaggtggtttggggagggacttcgttgtaatggttttgctgtaaaaaatg

SEQ ID NO: 20395 - DNA, 1070 bp, Homo sapiens
cattccggtacaactaacaaactctgaatacacaaataattgtgggtacaaagaaattgttcatcagtttgagaagttgaatttgtcaaaaattagagtttttgagatggagtatcactctgttgcccagggtggagtatagtggcgcaatctctgctcactgcagcttccacctcccgggttcaagcgattcttctgcctcgtcctctctgagttgctgggactacaggtgcccaccaccacgcctggcaataattcgtattttcagtagagacagggtttccccgtgttagcccggatggtctcaatctcctaacctcgtgatccacctgcctcagcctcccaaagtgctgggattacaggcccgagtcaccgcacctggcctagtattacatcttttttttttttccttttttcgtgagacagagtcttgctttgtcacccaggctggagtgcagtggtgctatcttggctcactgcaaactccgcctcccgggttcacgccattctcctgtctcagccttcctggtagctgggactacaggtgcccgccaccatgcccggctaatttttttttgtatttttagtagaggcggggtttccccgtgttaacccggatggtctcaatctcctaacctcgtgatccgcctgcctcggcctcccaaaatgctgggattacaggcgtgagccactgttcccggcctacattttttaataaattggttttgaaactgcaatggtgcctgcctgtaatctcggctgttcagcaaggtgaggcagaaggatcacttgagcccaggagtttgacaccagcttgggcaagataaaacttcatctcacaaaataaaatactacttttgtgacttgggttccgtggtgaatataggagaatcgtcatgaaagtggcagtttactaggatgtgactttgcatttagtttaaggattatttagatttttttgttttttaaagagacggtatttatgtcttttaattttagaatatgttaatgtctgtcccagcatgttggaacataatttctttaaagggagggatcattgctttttctca

SEQ ID NO: 20396 - DNA, 1068 bp, Homo sapiens
ttgtttagtagaggcagggtttcaccatgttggccaggctggtctctaactcctgacctcgtggtccacctgcctcggcctcccaaaatgcttggattacaggcgtgagccactgcgcctggccatttttttttattattattattttaataaaaacatatgctgggcacagtggctcatgcctgtaatcccagcagtttgggaggccgaagtggacggatcacctgaggtcaggagtttgagaccagcctgaccaacatggagaaaccccgtctctactacaaatacaaaaattagccaggtgtggtggcgggcacctgtaatccctgctactcaggaggctgagacaggagaatcacttgaacccgggaggcagaggtgcagtgagccaagatcactccattgcactccagcctgggcaacaagagcaaaactctgtctcaaagaaacgaaacaaaacaagaaaacacatttgataccaactcataaccaagtctggattacttctgtagctcattatcactgataaccaagagttgattaatcaaagtagactacctgtcagtctatgtacagaactaaagataatccttattcttggttgtcgagtacagttttaggaaatggatcatcttaaaatagggtaatacggcctggtgcagtggctcacgcctataatcccagcactttgggaggccgaagcgggtggatcacctgaggtcaggagttcgagaccagcctgaccaacatggagaaaccccatctctactaaaaatacaaaattagccaggcgtcgtgtcacatgtctgtaatcctagctactggggaggctgaggcaggagaatcgcttgaacctgggagttggaggttgtgatcaactgagatcgcgccgttgcactccagcctgggcaacaagagagaaacttcgtccaaaaaaaaaaaatacagggtaatactttcgcagtttttaaaaatctagtgaaattcggctgggcgcagtggctcacgccggttaatcccagcactttgggaggctgaggcgggcggatcacgaggtcagaagattga

SEQ ID NO: 20397 - DNA, 1583 bp, Homo sapiens
tacaggcgtgagccactgcgcccagccaatgtaaaaacattctaaatggctagttgagtttgtccagatagggatcgtaactgaagaagctgtggctatttagctaatactggtggttgcacctttccttgtcagactccagtctagctgtcccacgtgtagctccagtttaaagtcactcgcatgcctttgctcatgcttctgcttaaacctgaagtgtgttttgttttctccttatccattgagattagttcaaatttgactttccctttaattgctcctccttctgggtccctgaaatactttatttggaatagcacttcattcttcttcttcttttgtttttgtgctctcttgcccaggctggagtgcattggcacagtttcacctcactgcaacctccgcctcccaggttcaagggattcttctgcctcagcctcctgagtagctgggattacaggcatacgccaccatgcccggctaattttgtgtgtgtgtgtgtgtgtgtgtgtgtgtgtgtgtgtgtgtgtgtttttagacggagtcttgctctgttgcccaggctggactgcagtggcgtgatctcggctcactgcaggctccgcctcctgggttcacaccattctcctgcctcatcctcccaagtagctgggactacaggcacctgccactgctcccggctaatttttttgtatttttagtagagacggggtttcactgtgttagccaggatggtctcgatctcctaaccacgtgatccgcccgcttctgcctcccaaagtgctgggattacaggcttgagccactgcacccggcctaattttttgtgtttttaataggttttgccatggtggcccggctggtcttgaactcctggcctcaagtgatctgcgcgcacgcatcagccacccaaagtgtgctgattacaggcatgagccaccacagccagcctcctccttgtaaaatagttatgtatttgtctaccctccatttctaaatttttaagttgatgtggacttagattatgtctcttttttttctattggtatatcgtatcgtttgttggacatagtacacagtactcagtaagtgtggattttcttttaaaactgtaaatggcttacataatcacatttccatggcgtctgtgttgccttttattttctttgcttccctgcctccattaacgtgaaattaaatttttttaaactttgaggtattgtccaagattttctttttgcattaatactttgttaaatatctcaaccttgtaatccagcactttgggaggctgaggcgggcacatcacgaggtcagaagatcaagaccatcctggctaacacggtgaaaccctgcctctgctaaaaatataaaaacaaatcagccgggtgtggtggcgggcgcctgtagtcccggctactcgggaggctgaggcaggataatggtgtgaacccaggaggcggagcttgcatttagcctacatcccgccactgcactccagcctgggtgatagagcgagaccccgtcccccaaaaaaaaaaaaaaaaaaaaaaaatttttttttttttttttttttttttttt

SEQ ID NO: 20398 - DNA, 1024 bp, Homo sapiens
ccgtctcaaaaaaaaaaaaaaaaaaaaaaaaaagtttttctgtgggtaaatgctgtccaacagcgtcagatgctacagagaaatcatgcaggaaaggaaaagcccatcaacatggcagacttcattgtcttgccacggccactccagccttcagcagccatcaccctaagcagtcagtagccatcaacatcaaggcaaaaaccttccaacagcaaaatattatcacttgctgaaggctcagatgagcattagcatttattagcaataaggtgtttttaaattatgtacagtttagacataatgctgttgtacacttaatagattacagtgtagtttaaacataacttttctatgcactgggaaacacaaaaattcatgtgacttgctttattgcaatatttttttttgcagtgctctggaactgaacccgcagtatcttccaaggtatgcccgcacctgaaatgtgcataagagacaagtgtgtagaggcggaaaatagattggtggttgaccgggctggggttcgggtacatgggaattgatggttaatgggtttggggcttttctttttgaagtgatgaaaatctaaaattatgatgattgcagaattctgtgaatatactaaaaaccattgaatggtacagtttatttattttttggagacggagtctctctctgttacccaggctgtagtgcagtggagccatctcgggtcactgcaacctccgcctcccgggttcaagcaaatctcttgcttcagcctcctggttagctgggactacaggcgcctgccaccatgcccagctaatttttgtatttttagtagagacggggttttactatgttggccaggctgttcttgatctcctgacctcatgatccacccacctcggcctcccaaggtttacaggggtgagcccctgctcccggccgaatagtacactttaaatgggtgaattgttaggtaggggaattatatataaataaaggtattattaaagggataattgttgcttctataatt

SEQ ID NO: 20399 - DNA, 1049 bp, Homo sapiens
gacatacagtcagggcaacgtagtgagaccctgtctcttgaagcaatagaagtgtctcctgactcaatgctacttctgttccttaatctgctaccttaagggatgcagagggggttgggggaattaagaggagtcagtggggttttaaaaatgaacaactcctacataccaataatgaaaagacaaataattaaatatttggcaaagtgtttgaatagatatttctccagagaacatacgcaaaaggctcataagcacatgaaaaggtgttcaacactattagttatcaaggaaatgcaaatcaaaaccacaaagagatacagcttcacacccactaggatgactagtttaaagaataactaacaagtgttcctgaggacgtggccagattagaatcctgtgttgctggtgggagtgtaaaaacggtgccgctcctgtagaaaagtttgggatgtccttcctcaaaaagctagttaccatgtgatcctgaagttccttctaggtgtatactgaagtgaactgaaagcatttattcatacaaaaacttaaagaacgttcgtagcagcattgtttataatagtccaaaaatggaaacaacccaaatgttcattaactaacgaatggatttttttttttttttcctgagaccaagtctcgctctgttgccaggctggagttcagtggcacgatctcgggtcactgcaacctccgcctcccgtgttcaagcagttgtcctgcttcagcctcccgagtagctgggattacagacattcgcctagacatcatggcagcctaatttttgtatttttagtagagacggggttttgccatgttttggccaggctggtctgaactcctgacctcaggtaatccacctgcctcccagagtgctgggattgtaggcgtgagccaccgcacctggcctaatgaatggatttttaaagcatagtatatccatacagtaggtgaagtactgatgcatgctacactaggcatgaaacttgagaccatgctatgggaaagaagccagtcacagccgactccatacg

SEQ ID NO: 20400 - DNA, 1031 bp, Homo sapiens
ttttttctttcttgagacggaatcttgctttgtcacctgggctggagtgcagtggcatgaggtcagctcactgcaacctcagcctcccaggttcaagcaattctccttccccagcctcccaagtagctggaattacagtcatatgccaacacacctggataatttttgtattattagtagagatggggtttcgccaggttggccaggctggtctcgatctcctgacctcaagtgatccgctggcctcagcctctcaaattgctgggaatacaggtatgagccaccgcacctggcctgtttttcatttcttactgcaaaagatgaatttaaatgtaaagtcagcagtacagccatatcaagtaaataatgaaaactactggccaggcgtggtggctcacgcctgtaatcctagcactttgggaggccgaggcgggtggatcacagggtcaggagattgagatcatcctggctaacatagtgaaaccccgtctctactaaagatacaaaaaaaaaattagcctggcctggtggtgggcgcctgtagtcccagctacttgggaggctgaagcaggagaatggccagaacccgggaggcggagcttgccggtagagcttgcagtgagctgagattgcgctgctgcactgtagcctggtcaacagagtgagactccatctcaaaaaaaaaaaaaaggccgggcgcggtggctcaagcctgtaatcccagcactttgggaggccgaggcgggcagatcatgaggtcaggagatcgagaccatcctggctaacacggtgaaaccccatctctactaaaaatacaaaaaatttgccgggcatggtggtgggcgcctgaagtcccagttacatgggaggctgaggcaggagaatggcgtgaacccgggaggcggaggttgccgtgagccgagattgcgccactgcactccagcctgggtgacagagcgagactccatctcaaaacaaacaaacaaaaaaactactacttatgccgcaagtaacttgtcagtggtttgagt

SEQ ID NO: 20401 - DNA, 1051 bp, Homo sapiens
gagaaaacatgtcaaacttcttaaaaatctgaatgtaaagttaatccttctactaaaccgaattggacccaagggttatttgtggtcattttcttccttagtattccaaaacagaattttaaagtattttttgtttcagtgtcttttctaattccataaaaactgtaaaaagattcagactttgatctacctgtttttcctgtacttagtgttttaggtcattgatctccccagcctcttattttccacctcaggtttcactggagcttcacctgtttggttctactgcagccgaacgtgtttatgagggagtatcctcgtaaattgagaggagaaatctcccattctgatggagcaggggattactcccccacccccaatatttttatttttgttttttaatctttgtgtcattccaactttagtacatgtgctgccaaagtgagcacaaccctgccctaaatattgagaccaaagggaaaagtagcttttgcagtcaaaattgtagaatcttggtaaaagattgtcttgtttttgtttctttttaacctagcaaaagctgatttggaaaggagtcttaaagtttcatagaaggttacacaattcatgttttcctcttttttttttttttccttttgagacggagtctcactctgttgcccagactggagtgcaatggcgcgatcttggctcactgcagcctccacctccttggttcaagtgattctcctgcctcagcctcctgagtagctgggattacaggcacctgccaccatgcctggctaatttttgttttttcttcagtagagacgggtgtttcaccgtgttggccaggctggtctcaaacttctggcctcaggtgatccgcctgccttggcctcccagagagctgggattataggcgtgagccaccgtgcctggctcatgtagttacttttagagtgaggagaggtacctctgtataggctggtatatgaagagtaaaagttgtccttgagtgtcaagattattgtcttttgaaaagccttaatcaaagtattaaagtactaaa

SEQ ID NO: 20402 - DNA, 1028 bp, Homo sapiens
atggccatttgttactagattttgtcatttagactcatacaacagtttcctaaacgttgtccagctttttatcacagagatagcttagatctacgtctctaggaggttgaatttttttttttcaaatgaagttagcctttggcagaatataagtcaaaggaaaagtgaaaatttcctcctcctagctccctcccccacaaatgggaacgtgctagttaaggatgtggtagttgctgaaaatagagcttgctggcattccaaatcctctgatggtgtcaacacctagtgtgttggttttcttatggctaccttgagccagttctgtgtttaaaaatataatagacctaggtgttggtagcagtgtcctaagctcagagctttccctacatacattttatttttttatttttacaagtgtctttcataccaaatacccacataaaaatttaaaggctcacccatatcttgttacaactgttatgtttagaatgccaaactgtgtagttcagaccatatgaccatgatcctggcttatctcttctgaaatttttatcttgaatttattgcccttccaacaatctaccatagtagctggacggatctgttgttggtgggcttgatttgtgatcagatcaggattttatcgagctaaagcaatatgaaatgtgtttaactcttcattcatatctaaagtttgaaggagatgcattactgtaagagttatgacagtatttcatcatttggcagatgtggtaaatctgccatcacagaatgcacaggaatcactgggttccttatctttcaaatggggattagtgatgtctctcttgcctactaatttgcagggtggttatgaaattttgggcttttgtaaactgtaaagtgtaatacttgtcggtactatttgttgtgaaacattcttatctaatgtgaaaggtcagataattgtttttgttactgctgtgctaggatcatattagatgataacctacctttttgagttattcttagcaagtgtagtcttctgg

SEQ ID NO: 20403 - DNA, 1086 bp, Homo sapiens
ttaattttttaatgggcacatattaggtgtatgtatttatgggaaggctaaattaaaaaaaaatttttttttgaaacagggtcttgctttgtgacccaggctgaagtgcagtgtcgccattatagcttactgcaggctcgacctcctgagttccagtgaccctcctgcctcagcttccctagtagctgggactgttgcaccggcctaatttttgtgtttttttttttttttttttttttttgtggatttgaggtctctatgttgcccaggctggtcttgaattcctggactcccaccttggcctcccaaagtgctgggattacaggtgtgagtcactgcttctggcctaaactttacatatgtgtatatgacattatgcagtacctcagttcacagcccacgttgacaaaagtttttaatttatgtaacaagattgaagcaggtagagcgttactcccattttctggttcaagaaagtgagtttgagagagagatttttttatgatcatgtggctaatcagttattaaatggtaaagccagaacttagtgtctgctgacctttagatcggtacacttactctcagccactcaaaagacctctgtgaagtaaggtggtgcctttcaggggagtagggggtgagtagcgtatgcttgatgcttgttctttaacaattctaatagcatctacttcacatcttgatgtttgtgatgactgatatccatggtgaattgtagacaaaatcttttcactttcctaaagaaacctgatggtttttttcagagataaaatcccatctcaaggcacagcgaaattaaaatgaggtgaagtttaggtactctcagaatgtttattcgcatacagattcttaaaaaacatgatttattgtaggcagatgtcacctctttaagcaaaagaaaaaaacaaccaaaaaaagaaaagccccagccgggttccgcggctcaaacacctgcaatcccagcactgtgggaggccgaggtgggcggatcacctgaggtcaggagtttgagaccatcctgaccaacatggtgaaaaccagtctctactaaaaatacaaaaattagct

SEQ ID NO: 20404 - DNA, 1043 bp, Homo sapiens
acggtttctccatgttggtcaggctggtctcgaactcccgacctcaggtgatccgcccacctcagtctcccaaagtgctgacattaaggacctgagccaccgcgcctggtcaagagctgtcttttttttgagacggagtcttgctcttgtcgcccaggctgtagtgcaatagcgcgatctcggctcactgcaacctccatcccctgggttcaagcgattctcctgcctcagcctccaagagtagctgggattacaggcatccgccactatgccaggctaattttgtatttttagtagagatggggtttcgccatgttggccaggctgatctcgaactcctgacctcaggtgatccgcccgcctcggcctcccagagtgctggggttacaggcgtgagccactgagcccgctgagagctgtccttttaaaacaccagatcctcatctctagctagcttattctgctagttagtgaagaacagggaagggagcatgtgtggaatgaactttttactacggtcttgttaggaaaaaaataggtagtagtaaattaacgttgttaataagtttagaagtatttagattaactaccagttctttgactgtaggccagtaattttccattgccgtttcagttaatggactaactttctggagtaaagtttatttttctccttcttaaatgcatagacagaactgagtaacgtagtgttaaaaatcccttctacgactgggctctgtcccccaggctggagtgcaatggcgtggtcttggctcactgcaacctccgcctcccaggttcaagcggttctcctggctcagcctcccaagtagctgggactacaggcgcgtgccaccacactcggctaattttttgtatttttagtagagacgaggtttcaccatgttggccaggatggtctttatctcctgatctcaggtgatctgcccacctcagcctcccaaactgctgggattacaggtgtgagccaccgcacccagccaatttttgtgtttttggtagagacagggttttaccatgtt

SEQ ID NO: 20405 - DNA, 1020 bp, Homo sapiens
atatttaggaaatatagtgaactaaatttcgtcttgtaaattcttaaattgctatttgtattcaacaaggttcctgttggggggggggataagatggggaagtacagctcaaggtctgctttgtctttatttcagtgtttaaaaatcaaagagatatgaatgtgcttgtattggaagtctcctcctccgccccctcatctccagatgttcccctcttaatctgttagtgttcttgggaggaaacaaattgtacttgaatgctttctattttgtgggtattggggctttttaagtaaacttgctgtgataactagaaaggatgtgaggaaaggtctttttctttttgaaagctcctttaaaaaactgatttgaaagcttgtgattgtagtttccaaataaagtacaggttagtgataattatatttttgatgtgagtggtgaggatttctgaccagagcccttattggttattgaacatgggactctgatacagccacattattacagttgttaatgttaggtgtccccttcaggatctaaaggggtaaggaaataggatctacaaggtgaggagctattgctgtgacttggggcataaggtagggactcagtggaaaggagaggaggaggaggagacagaaaccaggaatttctacctgtgtcctctacctgtgtccattcctttattgagtgcggtatttttttgtttctggtggcaaagttttcccggagttctggtcaccaaacagaacttagcaggtgtcgggggtggaagaaggtaagacagtgtattggcaggatttctttgttgggtacttgtacccaaatgctgggtttccagctgcccttttatctctctgttactgcagcaggcttattttattttgcttgctgtgttgaattagtgcctaaacttctttgtatcctcatttaattctatcctggggcgttggaatcaatttatatggattatttaacagtacgggaggaagagctaacctgtgttcaggaaaatgacaa

SEQ ID NO: 20406 - DNA, 1033 bp, Homo sapiens
cttttttaatgagtcccacaaaagttccttatgagccaacagggccctgctattcaaatgaaagttagcacagagctggttactaaagaatatgcaagggcacagggtacgcaacgcagcaaaatgaagtcagcacaaaacgaaagacacaactcttattaatggatcagaataaatcaatgaggaatagagagaaacgcgagcaaggaaaaacaacaaagactcagtgaggttaatatgtctacattgaattcagaagtcaccggaaaaacaaagcacacaaaatatgatttatttctataaaagacaaatctatagagataggaaatagatgagtggttgcctagggctgggagtaggaatggaggttgattgtaaatgggcacaaagtttgattttagtttgatgggaatgctctaaaatgggactgtggcgatggcgggataactctgtaatagactaaaactcattgaattcttgctcaaaataggtgaattcatggtgtggaaattgtttctcaatgaacatattctttttattttgttttgctttttgaggcggagtcttgctctgtctagagacggggttttaccatgttgacccagctggtctccaattcctgacctcaggtgatctgcccacctcagcgtcccaagtgccagggttacaggcatgagcccccgtgcccggccccagcaaacatattctttaaatattgtcacttgtcagtcttagcacaataagaccaaaggaagcttgcagcaagcaccacctctgaggtattctggcaaaaaaaaccaaaaaaaaacaaaaaacaaaacctgaacctggctgtcatccaaccaccactttacaggaaatttaaggaataggaaacaatttaaacagcatcacaaggaagcaaagaaacaagtccagagggccgggtgtgctggctcacacctgtaatcacgaggtcaggagatcgagaccatcctggctaacatggtgaaaccgtatctctactaaaaatacaaaaattacctgggcgtgg

SEQ ID NO: 20407 - DNA, 1047 bp, Homo sapiens
agtcataaaatactgatttgaggggaccataagaatcatataaaggcctgaaagcaggccaggtacagtggcttatgcctgtaatcctcgcacttgggaggcctaggtggtggaatcatttgagatcaggagtttgaaaccagcctggcccacgtggtgaaacactgtctctactaaaaatacaaaaaaaaattagctgggtgtggtggtgtgcgcctgtaatcccagccacttaggccgctgaggcagaagagttgcttgaacccaagaggctgacggtgcagtgagattgtgccacttcactccagcctgagcgacagggtaagaccctgtctgaaacaaaacccaaaaccaaaaaaaaccctgttgaatggcgtgttcttttatatagtctacagtattcataccagctgtcgtattttatgacctggacttccaggttaaattctgttcctcttacaggtatgaaaagatgagagggggccggtatagaagaaaatgtgaaaataaccattaaccctgctaagtttgacagggagaggcggagaaagtggcgtgctgttgccacccatgttctgaagactgtgaaatgggagataaggtagaggcaaaaaagaacctttagccatctagaagtgaagctcaaaaacagagcaggccgggcgcggtggctcacgcctcatcccagaactgtgggagcccgaggcgggtggattatgaggtcaggagatcgagaccatcctggctaacacggtgaaaccccatctctactaaaaatacaaaaaactagccaggtgtagtggcggacgcctgagtcccagctactccggaggccgaggcagagtggcttgaacctgggagacggagtttgcagtgagccgagaccacgccactgcactccagcctggacgtcagagtgagactccatctcaaaaaaaaaaaaaaaaaagccaggtgtggtggcaggtgcctttaatcccagctactcgggaagctgaggcaggagaatcacttcaaccggggaggcagaggttgcagtaagctgag

SEQ ID NO: 20408 - DNA, 1410 bp, Homo sapiens
aaaggcagcacggcaatgcagggaagatacataggctgattgggggtgccaggagggaggacaggctcacaggctcacgctggccagggcggtgggcattcctatgggagtcaggtctgagtctccaggatggagaccactaggcccccaccactcctgcctgcatcgaacccatgaatctgagcgctggggctgggtgcggcggctcacgcctgtaatcccaactcttagggaagcagaggtgggaggacagcttgagcccaggagtccaagaccagcctggacaatatagcgagaccccattctccataaaaaggaaaaaacaaggacgaaaagaaaagtctgagtaccggggcccccgtctgctcccctcaccacttggccgtctctctccgcccccacaggtcgccccacggctgaattctcggtgataaaggcgcccactggaccctcccaacgcccaatgctttgcttttctcctcctccccttcccagttaccaaagactcgaacttccagacagggacccagggacaccccgaagcccacctgcaatctcccacctcctgcccatccctctcttgagggagcagcaggggccaggagctaccccaggagtgggccaggccgggccacagcaataggaaagccagggccagagcgagccatgccagccctactgccgatgccaaatatttgagagaagggaacttttgctgaggttttctctgaggtttttttgatgctttataggaaactattttttaaaaaaagccatttcccacccaaggacacagtggatgtgttttccctgactccagcagggcaaggaatgtagccgagaggttgtgtgggctgggctctggtgccctcttccctggccaggacacctctcctcctgattcccttggcaccttgtctttctgtctgtttacctgtctccctgcctgcccatctgcatcttttgcagcccactctgacttccatctgggggctgagaccacccttgcctgcccccttctttctgccttaagaatgtccttttaggctgggcatggtggctcacgcctgtaaccccagcactttgggaggcggagacgggcagataacctgaggtcaggatttcgagaccaacctgacctacatggagaaactccgcctctagtaaaaatacaaaattagccgggcatggtggtgcacgcctctaatcccagctactcgggaggctgaggcaggagaatcacttgaacccgggaagtggaggttgcagtgagccaagagtacaccactgcactccagcctgggcaacagagcgagactccgtcttaaaaaaaaaaaaaaagaacgcccttttactgtcctcatcatcccagtttgaggcagtgctggagtggggaaggccgtcttagac

SEQ ID NO: 20409 - DNA, 1052 bp, Homo sapiens
agcctgggaggggcaggcccccggccagaaatctgggcctttcgtggtcagaggacaccggcggcccctttgggatccacccccaatcaccaccaccttgttcttctctgaccctggatactctgggtgtccattttttggagccctgagaccctgtttgaagagggatccatctcagccctggttgtggggcgagggtcttgctcagcctgcaccaccctccaccctccagtaggacccagaggcagctgggctttccatggtaaagcccccatcccctgaggcttctcaggactctcagtggaggaggtgcctggggagcccagcagctggaggaaagggagtggccccagccatgcgagggagggcctcccccgcgttctggagtgggtggctgagcccagctggggtgggaggccctctgggggaacccctctggtgtagtctgggagtaacctcttgcttggtgctcgacgctctaccggtggaggtgggggtgggtctgggtgggagagacggccccaccctgcctgcagaattgaccctgagccatttgtcctccaaagcacctgtcacacgtggctcagagctgagggacctgaggtcacctggtctaactcaactcctcctcctttaggaggaaggaaccagagagaggaggggattggtccaagctcaacagagcagtctttctgctatttcaaggagttccttcttgtgaccccccctttctccacccaaaaccagcacctcccgggttctgccctctggtcctgcctgcgtccatgccctgtgtccgagtcccaagtggttcatgttgtctctgttctgtgcccgcagcctcggtgatccctctgctgccacactgggacccgggccctccacacccggctttccgcacccggcccaccacacccaggccctcagcacccaggccccccgcacccgtcatgctcatgtcccgtgtctagcccggagtccacaagcccctacgttccctctcagtcccacaggcgcagggaagtggccttgccccgcccccgatgactctg

SEQ ID NO: 20410 - DNA, 1031 bp, Homo sapiens
tagagagtcagatacaaagcatgaaatgaattatttaaaaaagaagaataggggccgggcacggtggcttatgcctgtaattccagcactctgggaggccgaggtgggtggatcacctgaggtcgggggtttgagaccagcctgaccaacttggagaaacctcatctctactaaaaatacaaaaaaaaattcgccgggcgtggtggcacgtgcctgtaatcccagctactcgggaggctgaggtaggggaatcgcttgaacccgggaggcagaggttgcagtgagcagagatagcgccattgcactccagcctgggcaacaaaagcaaaactccatctcaaaaaaaaaaaaagaagaagaatagggaaccagaagggctttgcaccaggtaccatcatgcgtcagcccatcgtgtccctgtcgtctttcccatccccagcctcgtttccctcttggagggtgaggtgcccctttggagaaccctggcttccccaggttcccctctgacacatgtctgctagtgatctcccctagagatggaattccaagttgggtccctgcagtctaaggactgggaaacggcagacagctgcctcccctgggccttggtaatgtttccgaaaggattcgcctgctttctggtgggagtgggctgctgagtagtcactggggcagtgaggaattggagtggcattgcttgactcttgccccatttgtgacggcatgtgctgatcccttgaatggagtgtggtactgggccactgggtcgagactactgggagacggggactatgactttgtctgcagctcagcattgccaagaaacatgacccgctgctccgggagttccaggagggccgcctactcttcccgcccacctacaagtttgataggaactccaacgactatgacaccaggtgaggagggagtggggggccagaaggtctaggaagtcaggttacactgaccctgctggcatgggaactgtctcagaatagaagtgttagggggggcaggaattggtctagtca

SEQ ID NO: 20411 - DNA, 1150 bp, Homo sapiens
tcccagtaacccatcgttagggcactctagcactatggaggtacccaaggctcagccagtctctatttaagaaaatttaacaaatacgagtaaccctgtcccaatcactgaatctctagttactactcttagaaacacctgtggcttcttggccctcctgttgcccgctctgaatctctctgcagtctacaaaatcgccccagtcaactctccacttggagggaattgtccagtgtggcccctagaattgagtcaccccctagataccaactgtctgaccccgaggagctctgtaagtccctgctcctcctcttccctttggggctggtgctgccactcagcaataatcctcttttctctgtgctttcttaggtccctgtcctctgtctttgaggctggttaggaagcaagagtcctgatctttcatgctgcacaatatgagcatgcaaaaagctttttccagcagaacatgttccctcgtctccagttgccggaaaggaatttggggatcaagaacttagctcgtcctacccccatgttgagttctgccctggaaaacccaaagcaagtagtgatcatagtacagaacccgaccaaagtaggctggtgaggaagtccaggctccaggggaacagacgctgcccagtgttcatagcttcctgcaacttgacagagcctgagtttgcctcttagtgggagaatgagagagagctgtagtgtcacctgacattccccaaaccttgtgaagcacgttggcctaagtgtgccgtgatcccagcccacactagcctgggtgcatctgctaatgggagaccaaatctttgtccgggaagcaagaagtgggtgggagaatgtatcctgtttttgtcagtttgtttgccttactcatttctaagtgcaataagggagtgtctcacaggattgcacctgtgacatcctgatggatgcttccctgtggccctcctggggcaagggtggacagactcagacccccagcatggttagcgctgaccttcattgaggtccctttggaaccagatgtcttgttacagacaccttcctctgtgtaagtctcctcaccttgaggggtctttagtaatgcatctgggtagcatctcaactgctggtagcatttatctgacttggaaag

SEQ ID NO: 20412 - DNA, 1116 bp, Homo sapiens
ccatgctgcacggacggtgtctgcttcaccatgctggtctagggcgaaaattgggtccagaagttcttcctctggaaccccgcagggaactgtttttaccatccagaatgacacttttcctgggctgactcactggtaagtggtgcactgagttggttcctcttgaagacagatgttttggttattcatttagctacatttagcagggaagtggcaggatttcattggggcacagtccctgattctttcgctaaggatctttaggaaggggtagacctcagtgtccaggggtctggtgattgtgactgtgtaagagaagcctgaggcttttggtcaccctagtcctgacaaaaagaaagggaaaatgttaacaaatgaggaaacatggagactttcattggagttttagcctggagcttcagccatccactgcctgacaaaggccagcatgacgtatgttggggttcgtggaagtatttgctgtccacctttcattccttcgggtagaactcaaattcttggagctagaagaactctccagaggatctactggatctgctttgttcagatccaaactttgagagccctcagtgttagagagttattttttaatctctcagacccttttgaaaatctttctcggccaggcacggtggctcacacctgtaatcccagcactttgggaggctaaggtgggcagatcacgaggtcaggagtctgagaccaacttggccaacatggtgaaaccctgtctctactaaaaataaaaaaaattagccaggcgtggtggcggacacctgtaatcccagctgctcaggaggctgaggcaggagaatcgcttgaacccaggaggcagaggttgcagtgagcagagatcatgccattgcactccagcctgggcgacagagcaagactccgtctcaaggaaaaaaagaaaaagaaaagaaaatctttctccattccatggagaatcatgccaaaagcttaggtgatcactgtcctccaggataactgcaaatagaagaaactctctttggaattagaattttaaaactcatctgcagtgggagagaaagcaagtccacctcattgtggtacatgttgtggtctcttcag

SEQ ID NO: 20413 - DNA, 1068 bp, Homo sapiens
cctgtcttgacgcatatttctagtcatttccagatgcctacataatccagtaaaactccttctgtgtagatcttctgatgtacttgtatatgcagatttttagcaaatattcctaaaattgaattcctagaattgctgggctggtagggtttttaattctgatatcgtgaaatcgatcgctagagaaattttggtacctctctttggatcaaaggcatcagcatttttaaatgaagcttgaactgatttgtgtactggaatccatatcaaactacacaaatttgctaaatccctaacgaaaacagtaatgtttcagcaaactgtgagcagacccaaagggcgttgatggtattaattatacatcagcttgagtggaagtcaaaccaagctagttttagaagctatccagaactggtaaaggtaaacctgaatctttttaaaaattgtgataaagtacacgtaacataaaattcaccattttaaccatttttaagtatacagttcagtgacatttaagtccatccacactgctgtgaaactgaaagctggatcttaatttctagtctctaaactgaactgaaatcaattgactttcatttggaaaaagccccacttcactgtggtctgtcactttgatggtgtcagagggtccaggacctcagtgccagggtgcgaggagagcagtgctgtgcagtggggaggaacctcaccatcacccagtctcctcgccagagggtccaggacctcagtaccggggtgcgaggagagcagcgctgtccagcggggaggagtctcaccatcacccagtctcctcaccgtcacccagtctcctcgccagagggtccaggacctcagtgccggggtgcgaggagagcagtgctgtccagcggggaggaacctcaccatcactcagtctcctcaccagcacactttttctccatgtctcgttttgctcctcctctggtatttgtatttcttaaagaggattttgaaaagagatggtgaagttggtattttaggtagaagggaccaattgtttcctcaagactaagttggtccaaccaaact

SEQ ID NO: 20414 - DNA, 1040 bp, Homo sapiens
gaacagatctcaagagcaaggaacatcatcgcaggtctgaggaggctagattcccagtcctgttggagttttttaaatctgatttaatgatctgaccctcccactcctatctctgccccatccgagtctggctgctttcccagggggcagagcagctgtgccaaaaggaactctaacgtgaaaagcgcccttcacttgtagcttgtgcaggccagtcttgcttacccctttagattaacaaaactgccttcacttgtctcattgggattaaaggatcagaatatcaagagagattgaagggggaagatgccagccaacaggctgatcctcttagaacctgccctctgattcctgcagctgaagagaaaccaaatgaaggcgattagtctctgcctggggtcccccttcccaagtggtaccactagctgggaacctcgccccctccaccaggccctctccccagcctgtcctttaggattgctgagtcagtggttagatgttcttacggctcttctctgaaacggagttactgctccttcttaggcacccctggctcagccaagccctgacccacctgacgggttttcatgtgtgcctagctgggtggtggacttggagaggcacagggacagcttggggctccaggggggcattgaggcagcactgatgcagcttaggattagcaaggtcaaggtgactggctttcacccatatgttcctctgtatggatttcactgagcctcgattgctgccccttttcatggcattttgttctgggattttgctttgaaagttagggctctttcagccttgtggtgagcagtgaattgtcctcgtcctctgcttcactttccagattttgcccagaaatttccctgcagtgcttaggaagctgcctggtagagcaggtttctaagtttgaggcgaagcagctctggaagctgcctctgtccttgctgttggaggcagtgatttaagtagcagttgcctagagatacatcctttctgttttaatctcaaagagagaaaaacccagtccc

SEQ ID NO: 20415 - DNA, 2074 bp, Homo sapiens
aattttgaacatccgagaccctaagtatccgagactgctgccaacacacacacacaccttcctcccctcgtctccctccctgtcatcgtggcaaccaaaattatccatagggtgacggacaataccacctctgattaagaaccagtattctagggtttctggggtttccatttctgagaacagttccatgccagagcattgttttggtcaaggaagcgtagggtttatggatgctaaacagtgggaaggtgcacacgcagtgtgctgtcccgcttggatctgacgaatcttggaagtgttagtgcacctccgtttcacacttcctgtagaagcagctcttgtggattgtctggggcgtgagtataggctgtcctgtcctaccaagttacaccctttccattgaggcagaagtgaccaaggggaagggatccttgtaatataacccacaccatccccacagtgtgaacgtggcatcactgacacaatcagaaattcgagacatcatcctgggtatggagatctcggcaccgtcacagcagcggcagcagatcgctgagatcgagaagcagaccaaggaacaatcgcagctgacggcaacacagactcgcactgtcaacaagcatggcgatgagatcatcacctccaccaccagcaactatgagacccagactttctcatccaagactgagtggagggtcaggtactgtcgggcaagagggtggggatggaaaggccggctgcactacctaaggtgctgggctgagcgatgctgacactccctgcctgtttttagggccatctctgctgccaacctgcacctaaggaccaatcacatctatgtttcatctgacgacatcaaggagactggctacacctacatccttcccaagaatgtgcttaagaagttcatctgcatatctgaccttcgggcccaagtgagtaagtggactcagctaggccacagtgtgtgcccaactcattttgtgcctaaaactcagacctgagattgtctggaacttgagatgctggtttcaagattcatggatgagtaattatacaaggatagccaaaacaacgaggtgggttttggccccatgagatagcaaaagctgtggcagctgagagaaggtagtaattgtagtattggcctgatagtatttggaagagaacagatatggtcagaaacaaattcctgaccaggtgtgcgtgctggctcatgcctgtaatcccaacactcggctgggcacagtggctaatgcctataatcccagcactttgggaggcctaggtgggtggatcacctgaggtcaggggtttgagaccagcctgaccaatatggtgaaaccctgtctctactaaaaatacaaaaaattagccaggcatggtggcatgcgcccgtagttgcagctactagggaggttgagacaggagaattgcttgaacccgggaggtgaggtggagcttgcagtgagccaagattgcatcactgcactccagcctgggcaacagagcaagaccccgtctaaaaaaacaaaaccaaaaaaaacgtggctgtagtcccagctactcaggaggatgaggttgcttgaacgcaagcagtgagctttgatgaccccactgcactccaggctgggcacagtggctcatgactgtaatcccagcactgtgggaggccgaggtgggcagatcttttgagcccaggagttcgagaccagcctgggcaacatgacgaaatggagtctctacaaaaaaaaaaaaaaaaaactagccaggcatggtggcatacacctgtaatctcagctactcaggaggctgaggtgggaggatcacctgatcctggagggtggtgagtgtagtgagctgagatcatgtcactgcctgctagcctgggtgacagagtgataccctgcttcaaaaaagagaaaagatgcataactttactagtgtatcagggatattatagtttataaaacatcattttgggccaaggtgggtgaatcacttgaggtcaggagttcaagaccagcttggccaacgtggcgaaaccccgtctctcttaaatatatgaaaatta

SEQ ID NO: 20416 - DNA, 1324 bp, Homo sapiens
tatcaggtatgtagagggagcagattttccctgagtcaggaaaatccatggctatccccgaaacttggggcaataggcacccagaagcttgaccgtgcctgccttgccatctaggttttgaagcagaatccgttctggtggacacaccagcggcatgatgggaagctctggaacctgaacaactaccgtacagacatgatccaggccctgggcggtgtggaaggcattctggaacacacactctttaagggcacttacttccctacctgggaggggcttttctggtgaggattctcctctcttagagggacctgtcacaaccctttgagctcatctcttgtatgcctctgtgatttcctgtggtgtttcccagacagccacctccaggaggttagcagtgtgctgggaaatggcaggatatcacctcacctgcttctcttgctccccagggagaaggccagtggctttgaggaatctatgaagtggaagaagctaactaatgctcagcgatcaggactgaaccagattcccaatcgtagattcaccctctggtggtccccgaccattaatcgagccaatgtgagtgtgattgacactggagaggggaagctaaagacagttgctgcttcttgccttggttatgtcgtgagcgcccgagtctcttgatctctaatgtcacattgtcgttttcctggcaggtatatgtaggctttcaggtgcagctagacctgacgggtatcttcatgcacggcaagatccccacgctgaagatctctctcatccagatcttccgagctcacttgtggcagaagatccatgagagcattgttatggacttatgtcaggtgggctggaatcgaggggagagggtactgtagagagtcagctcaggtggaattgaggggagagggtactgtacagagtcagctcaggtggaatcgaggggagagggtactgtacagagtcagctcaggtggaatcgtggggagagggtactgtagagagtcagctcaggtggaatcgcagggagagggtgctgtacagagtcagcttaggtggaatcgcggggagagggtgctgtacagagtcagctcaggtggaatcgcggggagagcgtgctgtacagagtcagctcagcttgctcttttgcatatgggaaatccaccctggaagctctgaggatgagactcctattgcctcattatcttattgtacaaactctgattttaattgggcttccttaacaagtcttaatctctccatgttttccttcaggtgtttgaccaggaacttgatgcactggaaattgagacagtacaaaagg

SEQ ID NO: 20417 - DNA, 1045 bp, Homo sapiens
ctcctgaccccgaggcccgcctcagcctcccagagtgctgggattacaggtgtgagccaccatgcccggcctttttatttaaatccaatttgacaatgtttgccttacaaatggtctaaatacctcaattaaggttaatgtaactatcaatgtggcaatgtagctcagtttaaatctaccgtcttactcttttttttttaaattattttttctgcttttctcttgtcctgccttcttctgaatttagttgttttgtgactttatctccacttttcacttatttggctacatggtttttttcttattgtttgctctaaggtttacagtatatacatagctcacttactgtgatctactttgaccattagtctactacggatcacttcacatatagtacaagaaccttagaataatacactttaagttccactcccactcttagtagtatttttgtcataacattttaattgtacatgtattataagtgctataatactttgttactctttttgctttgaacagcctttatcttttgtagaaattgcaaaatgagaaaaaatatttttttgcattttacccacatacttaccatttctggtgttcttcactagtttgtatagctccatctggtgtgcttttttttttctttttcttttcttttttttttttttgagacacagtcttgctctgtctcccaggctggagtgcagtggtgcgatctcagctcactgcaacctctgcctcctgggttcaatttctgtatttttagtagagacggtttcatgttggccaggctggtcttgaactcctgacctcaggtgatccacccacctcggcctcccaaagtgctggcatgacaggcgtgagccaccacacctggcccaggggaaccatttttttttttttttcccctgagatggagtctcgctgtgttgcccaggctggaatgcagtggcacaatctcagctcactgcaacctccacctcccaggttcaagcgattctcttgcctcagccttctgagtagctgggattacaggcgtctg

SEQ ID NO: 20418 - DNA, 2121 bp, Homo sapiens
cttaggctggcctcaagctcctgagctcaagcgatcctccttagcctcctgagtagccgggactacagatgtgtgccacagtgcctggctggatcctggcttgattgtgctttttggacttttaggtccctgggctgccgacgcccatagagaatatgatccttcgatacgtgaaggccaaggctgactggtggaccaacactgcccactacaaccgagaacggatccgccgaggggccactgtggacaagactgtttgtaaaaagaatctgggccgcctcacccggctctatctgaaggcagaacaggagcggcagcacaactacctgaaggttgggcagagtaggctgggctgggtgtgagtggtgggggagtgggcaagagggaggactgtagagttgtgactgaaccttgttctggcaggatcgggctgtagcgggaggctaatttcatgtccaccttacaggacgggccttacatcacagcggaggaagcagtggcagtatataccaccacagtgcattggttggaaagccgcaggttttcacccatcccattccccccactctcctataagcatgacaccaagttgctcatcttggcattggagcggctcaaggaagcttataggtgagtagtagggtagataggttcctgctgggaaggtgacagcagggaatggcgtcatcctcagagtccaaagaaagaaggtgtagccccagtctttcctggttttacttcctcctagttttcccattcacccttcccattgcttttgtcagtgtgaagtctcggttgaaccagtctcagagggaggagctaggtctgatcgagcaggcctacgataacccccacgaggcgctgtcccgcatcaagcgtcacctcctcacacagagagccttcaaagaggtgagtgaggcctcccaagttttctttttggttctaccaaaggtagcagttgcctttggttctaccaaaggtagcagttggtggattggtgtgaaccagcctccttgtcccacaggtgggcattgagttcatggatctgtatagccacctcgttccagtatatgatgttgagcccctggagaagataactgatgcttacctggaccagtacctgtggtatgaagccgacaagcgccgcctgttcccaccctggattaagcctgcagacacagaaccacctccgctgcttgtttacaagtggtgtcaaggtagaactttcatgagatcgccctgtgaggaacggggcaggaatttagttctacgtcaaaaatctcatctgggtagcatgattggtttactctcttgatgcgtggtagtaaagggaagtagtgttcgtgttaaactgaggaaaagcccatagtcaaagcaatccaaatgaatacgtggaatcatagtgggattggttatggaaggtaatgatagttcctgtggggctagtcttgcaagaggatttctaacctgctggagacctgccttgctactcctcaggcatcaataacctgcaggacgtgtgggagacgagtgaaggcgagtgcaatgtcatgctggaatcccgctttgagaagatgtatgagaagatcgacttgactctgctcaacaggctgctgcgcctcatcgtggaccacaacatagccgactacatgacagccaagaacaacgtcgtcatcaactataaggtgcgtctcaggcgcagtagcatggaattgtgtgtggagtgcttgtctggcccactgactcagaatttgctgaggaggaggctgggtgcggtggctcatgcctgtaatcccagcactttgggaggctgaggcgggcagatcacgaggtcaggagttcgagaccagtctggccaacatggtgaaaccccgtctctacttaaaaaaatacaaaaattagttgggtgtggtggtgggcgcctgtaatcccagctacttgggaggctgaggcaggagaatcacttgaacccgggaagtggaggttgcagtgagctgagattgcgccagtgcactctcagcctgggtgactgagcacaactccgcctcgggagtggaaaaaagtagaatttgctgaggggagaacaaaagaggttaactctggagaatcctggggcatggc

SEQ ID NO: 20419 - DNA, 1085 bp, Homo sapiens
acagcctccgcctcccgggttgaagtgattctcctgcttcagcctcccaagtagctgggactacaggcgcgcaccaccatgcctggctagtttttgaaattttagtagagatggggtttcactgtattggccaggctggtcttgaactcctgacctcaggtgatccacactcctcggcctcccaaagtactgggattaccagcgtgagtcaccgtgcccagcctcactggacttaactttctcagatcttttttcatgtatacatttagacagggctctttccagggacctatttggagagcagctatgactgtgtccttactgctcctttaaattcacatgggcgatcttagttcctggtttttgccttaaggtttctcatttacccttttgttttagatgttgaggtcccagagtttttttttctttttacccctctactgccatacctacattcctctgtatgtatattatacatatatgccccacctctgcccaggtttctattgttgtttaaatgcattgctaacttgtattcttaacttctgcttgggatcgtagggccctgtagggaagggtcctggctgtggcttctgggctgccggttggcgagtctggctctttttcatgcgtggcattacccctttattagagcgatggcttggcaacctcctggcccggcagtttgaaggtgagtggttttctctgtgtccaacttctcctgttattgcttcaaaagtacctgcccctgtttgagtctgttccctgctcttgtatgagcactcttcctactggattgcctttaggtccagttctgaaatgagtctgacctagtattctatttcttgggcttccttctggggccttgagaggcagtcatgcatttgcaggagtggaaattcctcagaagcatagttgtgaatgtttaaggtagctcgtctttttgcatatgctgggcacagggacgctttgttaatacctaattttattaataaccataatgagtgaggagcatgaaggtagagacccttattgaaagcaaggaatcttccttgtaatccccttgggacactctacttccaggt

SEQ ID NO: 20420 - DNA, 1022 bp, Homo sapiens
ccagctgaactccctgggaacaagtcagttgggctgatcactgaactcacatttctggacctgaggtaccacacttctagtacctgcgtgctggtggggtgtgtccagggtcccgggccccaccctgtctgaatgctgaggaggctgggcccccaggggccgctagggcaggggagggtgagagcaggactgggtttctctagactccagttctggaaagaagagcaagggaagtctgtttacagccacctcttgctgctcagcgaggttaacagcttccgcgggcccagatcagagctgcagccctgcattagaatctcagaggtctactggggcaggaccctgatggccagcgagtgggtcagcgttgcagcaacatgccctgctcagatctttcccattttccctccctttcccttaggagcctgttcctctcacgccctcacctggctgagccgcagtagttcttcagtggcaagctttatgtcctgacccagctaaagctgccagttgaagaactgttgccctctgcccctggcttcgaggaggaggaggagctgctttccccatcatctggaaggtgacagaaatgggctgggaaggtccgaacagcagggtggatgatacgttttgggcaagttggagagcctttgcccagattggcccagcaaggagcggttttagattagagacactggctggattgaggagtagaaggctcaaacaacccaaggttagttggtctttgtgtgacagtgggaagaagtggagagaacactctgtctccccgacttccttcttgaccctccttccgtatctttcattcttccccactggcctttccagatgaggtccaaaagtaagctcactcttcagggaaaagtgatactaaacccaggcgtgaggagtcatccttctgctcttacttttccctgcatttccttaggctggcccagactctagattcctgggcacttacctgtatctgagacccttagacctcctgtctcagtttctccacc

SEQ ID NO: 20421 - DNA, 1057 bp, Homo sapiens
aggcgtgagccaccgcgcccggccctgagttctatttgttgtcaagcctgaaaagagactccttttctccaccagacctctccaaactggcgagtagaatacagacagtatgagaactggaggctgcaggggattctaacaatgctgagggtatggacgttgctgtttgtggttcagatttaagagacagaaggcagaaggtagggatgatagctgccttccaccaggatgtgtagcgacagcccagaccccgttccagtcagaaggttacgggattctctaggtcggaaccctggttgctgtgttaccactggtgccaagtagttgaggtgcattcgtggaaaagaatgccagatccacgctgcttttgaaagcttgcccaccctcaccatgcccaagtgcccgttggttgccattgcattatgatcaggaaatcagtagccccagagatacctggcaatagctttttgagaatctggaatacagttagcactcaaacatttgtagaatgaagggcagtagaattatcatttctcctcctgtctaataactgtgacaagggagtggccggtgactttttttggtagagctttttcaagaaaaagtttagtcctacggacagttcggtagttattctacttcagacactgggcatgtttcatgttcttcaaaaagcccagttatactttggttttttgttgtttgagacggagttttgctcttattgcctagattggagtgcaatggcgtgatctcggctcactgcaacctccgcctcccgggttcaagtgattctcctgcctcagcctccccagtagctgggattacaggcatgtaccaccacaccctgctaattttgtatttttagtacagacggggtttctccgtgttggtcaggctggtctcaaactcctgatctcaggtgatccgcccgcctcggcctcccaaagtgctgggattatagccatgagccaccacacccggctgtactttataaaataggcatacctccttacaaagaatatgttcagaatctttacgtatcgggtccatttcc

SEQ ID NO: 20422 - DNA, 1025 bp, Homo sapiens
ccctgtctctactaaaaatacagaataagctgggcatggtggcgtgtgcctgtaaccctagctacttgggaggctgaggctggagaatcgcttgaacccgggaggcggaggttgcagtgagctgagatcaccccactgcactccagcctggacgacaacgagagactctgtctaaaaaaaagaaaaaaacccttgtatgtatgtcatttttcatatataactgtaggataagtgattgtatctgtaggattaattcctagaagaggaattgcctggtcaatggatattttatatgtatataagatatacatacatatagaattttgacatatattgctaaattgccctccataattatgaaaccagtgtacaccctcactaacagcataatgaggatacccatcatcccacttcttgaccaactctgtgtgccatcaattttattttgctttgcctgataggtaaaaaaatggcatttctgtacagttgtaatctgcattttattgattgtatgaggctgagcattttttttcacatatttagtagccatttttatttcctgtgagaattgtccatatcattgcctattttcctgttgatttactggttgtcatcttagtgatctgtaggaaatcttgacaaagtaaagaaattagctctttgcctatagtataaattgcagatattttttccagttcagtgttcgccttctgcttttattggtttttggtgtgaagatagtttttattttcaggcggtcgagtttattaacctttgataacttctgggttttgtgtcagagttagggattcgtccagcaatactttacatgctttctacagttcttccagcacttctatagttttgtttttacattaaagaatttcatgtatttgttgggaggccgaggcgagcggatcacgaggtcacgagatcgagaccatcctggctaacacggtgaaaccccatctctactaaaaaatacaaaaaattggccaggcgtggtggcgggcgcctgtagtccc

SEQ ID NO: 20423 - DNA, 1058 bp, Homo sapiens
agtagctctcagcaggttgggagccagaagggagatggttttcccctggagtcaggccactcagaggcccacctctttaccagctgctctggccaaagtccgtgtccttctgcactggtcgatggcatgccgatgcctgtcggctgctcttccgccggcatactcctgacaacatccagctgcttatgtgtctgcctgctagggtcttgggtttttataggcccaggctggggggcgtggcaaaccagggtggtcttggaaaatgcaacatttgggcgcgaaggcgggagtgcttgtcctcacctgggtcagtggacacaggcccaagggtgaagccctacccagggacccgcctttctctacacagcagttccctgcccccctcccatatcagtcccagccagtcaggaggctgaggcaggagggtcactgagcccgggagttccaggcttcagtgagctgtgatcactgcaacatttgcctcccgggttcaagcgatcctcccaccttagtctcctgagtagctgggattacaggtatgcggcaccacgcccagctaatttttgtatttttagtagagatgggttttcgccatgttggccaggctggtctctgcactaccctgggtgacagagtgagaccctgactcaaaaaaaaaaaagtaatttatgtgttctgaatttcttcaagaaacttctatttccatattccttccgataccctgtagcagtaagcttatgggcccctcgcctgccttgcccatgtctgtcagcccttgttgaactacatgccatttttgtctgaatgtctgatgagactgttagcttgatagaattagtaatctattattcttggctgggcacagtggctcacacttgtaatcccagccctttgggaggctgaggcaggaggattgtttaagcccaggagttcaagaccagcctgggcaacatagcaagaccccatctgtaaaataacgtataaatgggccggacacagtggctcacacctgtaatcccagcattttgggaggccgaggtgggtggatcaggagattg

SEQ ID NO: 20424 - DNA, 1117 bp, Homo sapiens
gtggagtgccgtggtgtgctctcggctcactgcaacctccgcctcctgggttcaagtgattctcttgcctcagtcccccgagtagctgggattacacacacgcaccaccacacctggctacttttttgtatttttggtagagacgggggtttcaccttgttagccaggacggtctcaatctcctgacctcgtgatccacccgcctcggcctcccaaagtgctgggattacaggcgtgagccaccgcgcctggccaaaaaaaaatttttttaaataagcaaaattctggtttatactacaacatgatgtaccttgaaaactttttgctaagtgaaataagttagacacaaaaggaaaagtaatgtatgattacatttacatgaaatacctggaataagtaaattcacagaggcagaaagcagaatggagtttgccaggggatgtggagagggaggaatgaggagttatggtttaatgggtagagtttcagcatgggatgatgaaaaaactttggaaatgaatagtgctgatggttggataatatgaatgtatgtaatgccagtgaactgtatgcttaaaaaatggtttaaataggccgggcatggtggctcacacctgtcattccagcactttgggaggccaaggcgggcggatcacctgaggtcaggagttcaagaccagtgtggccaacatggtgaaaccccgtctctcctaaaaagacaaaaattagctggtcatggtggcaggtgcctgtaatcccagctactcgggaggctgaggcaggagaatcgcttgaacccgggaggcggagattgcagtgagccgagatcacaccattgcactccagcctcggtgacagagcgagacttcgtctcaaaaaaaaaaacattagattgctttttccatcttactacctcaattttttttttttttttaaggcagggtcttgctgtgctgactgggctggagtgcagtggtgtgatcgtagctcactgtagccctgaccttctgggctcaagcgatcctcccacctcagcctcaatttttttatcataatattccagaagacattaaaaaaaaaaaaaaaagaatcggctggatgcagtgactcacacctg

SEQ ID NO: 20425 - DNA, 1035 bp, Homo sapiens
tggcgcaatctcggctcactgcaagctccgcctcccaggttcatgccattctcctgcctcagcctcccgagtagctgggactacaggcgcccgccaccacacctggctaatgttttgtatttttagtagagacggggtttcaccatgttagctaggatggtctcgatctcctgacctcgtgatccacccgcctctgccccccaaagtgctgggattacaggcttgagccaccgtgcctggcctaaattttttttttgtagagacagggtctccttctgttgtccaggctggtctccaaggcctgagctcacacaaccctcccacctcagcctcccgacgtgctgggattacaggtgtgagccaccatgcccagccaagtacgtggctttgcagttagaccttcctgctcagagcctcagttctacctctttctagttattccttcacctctttgaggctcagcttcctcatctataaaactgaacaaatagtagcgtattactccgttttcacactgctgtaaagaaacacccgagactgggtgatttataaacgaaagaggtttaattgacctacagttctgcgtgactggggaggcctcaggaaacttacaatcatggcggaaggggaagcaaacacatccttcttcgcaaggcgacaggagagagagcatgtgaaggaggaactgtcaaacacgtataaaccatcagatctcatgagaactccctcactatcacgagaacagcaagggagaaactgcctccatcatccaatcacctcccccttcgacacatggagattacaataagggatgagatctgggtggggacacagagccaaaccatactgagtagcatctaccttgcaggatgtttggggtaagaggtcgggtaatgtacacaatgtgccttcacagtcactggcacgtggtaagatcttagtcaagggcagccgtcattaatatactgcagaagtgtgagtgattatgtgtaggctcgcttctctagggagagggtctcctacagctttcatgag

SEQ ID NO: 20426 - DNA, 1182 bp, Homo sapiens
cgagactctgtgtcaaaaaaaaaaaaaggaagaaagaaaaataaaagaaaaaagaaagagaaggagagagagagagagagagagagagaaagagagagagagatggtcttgctctggtgtccaggctggagtgcaacagtgcaatcccagctcactgcagcctccacctcccgggctcaggcgatcctcccacctcagcctcctgagtacttggaaccacaggagtacgccaccacaccagccatgagccctgtggcctctctggatgtaccagtgactgtcctttctcaatggaagcttcctcctcatcagaggaaagggcttggtagggagggcctaattgcaaaggtcagtggccaagcccttcacctctgagtggagtgattaaaccagagccaggttgaaatctgggaattaccttttttctccagacttgagttcatctgtaaaatgggcctaataacagtgcctatctttagagttgtgaagattaaagaagacaatgcttataaagctcttggtggccggatgtggtggctcatacctgtaatcccagcactttgggaagccgaggcaggaggatcacttgagcccaggagtttgagaacagcgtggacaacatagtgagaccacatctccacaaaacgtgaaaaacattagccaaatgtggtggtgtgcacccgtagtcccagccactggagaggctgaggtaggaggattgcttgagcccaggaggtcgaggctacagtgagctaagatcgtgccactgcactctaacctcggcaacagagccagaccctgcctcaaaaataaacaaataaataaaaatttaaaaagctcttggcactatattgtggcctgacccagaacaggagctcaatgaacgccgccattcctactgctagcagcggtggtaacttccttccaggcatgctccatgtgccggccttagctacagcccacatctcactgccctttggagttttgcctctctgcctccagagctgtgtgagtgatcaggacagacacatgccagccctggccaggggcaggaaactcaagaccagcagggacaggtcacgtagggtggagggggccaccctgtttgccaaggactatccttgctctgtcctgaaccctctgccctctctgcccagggccagggagaagtcccctaaggcg

SEQ ID NO: 20427 - DNA, 1056 bp, Homo sapiens
tccctgcctccaccctccccgtcttccttcccctccccatgtggcctggccagaacctcttaaatccaggcccttagacctaagggaaggctttctgctcttcaacagtagaacagtttctgtcaccaaggcagggcagcagaaccatcacgttgtcccaggctttcccttctcctcgctggggcgggctgccttgccgggtcatatgtctctctgctttcctacccaggagcttttcaggggaaagaaagtgttttgctagatggtcaggaaagggtacaactgaaagaggctgtggacatctcaggagccccctaagagccgtaaggtgcctcagacgccgtcccaggctgccagggttttttgtcaccaggactgatcgtaccccaggctgtgggctgagtctccttgttcttgatccggtgaaaggcaggctgtagcccttggccctgaggagcttagggtttagtaaggaaatccggattcggtggggagggagcaaacgcatgagaaaacccagcagatacatgcaggacaaagagacgacgcctaagggtgctgggaactgacagttgtgctacagccatacaggccagcctctctggacctgcctcagctgggcaggctcctggactctcccagaggctgtaagaggagggctcctgtttactgatgctttccttggtagactcacgtcctgtgcccagagcagcaaagggttaagccgccagctttcccttcttgtttctggtgctctttaacctgctctgtgctccgcagacctgaccccagcgtggagaagccccgcctggtgcagaagcacaaacaagcttcctctttgaagcctgtttagtttggaagcaggaaagcagattttgggatagaatacccgtttttcctgtttgatgttgtttgctgtaccatacacccatctaccactgcttcccaacctcagccatgcactgtgtggacactgcagcctcagggtgccgaaagcatgggcattgtgtgtgtgtgtgtgtgtgtgtgtgtgtgtgtgtgtgtgtgtattcccac

SEQ ID NO: 20428 - DNA, 1069 bp, Homo sapiens
atgggtttttctttctagaactttccctgccctgaatttgttcagtatgcattgtcacttgtgaggacttcttttcacaataaatacccaagtgctttagaatgtctggatggtggccaggcacagtggctcaagcttgtaatcccagcaatttgggaagctgaggcagacggaacccttgaaatcaggaattcgtgacctgcctggccaacatggtgaaaccctgtctgtactaaaaatacaaaaattagccaggtgtggccgggcgcggtggctcacgcctgtaatcccagcactttgggaggccgaggtgggcggatcacgaggtcaggagatcaagaccatcctggctaacatggtgaaaccccgtctctactaaaaatacaaaaaattagccgggcgaggtggtgggcgcctgtagtcccagctactcgggaggctgaggcaggagaatgacttgaacctgggaagcagaggttgcagtgagctgagatcgtgccattacactcctgcctgggctacagaacaagattccaactgaaaaaaaaaaaaaaagaatgtgttgatggtgattctcctggaagtcaagcctgctttctctgtgccatcacagaggtgttgctggcagactaatcttgagacgacttcttacctctttgcaccaaggctcttattaaggggtctttcctgactttagatccggtgatgagttagcccaaaagagtgtgctcagtctcctatagggctcacaggtttggcttataccctccaagtggcccaatgggagctacagggtgttggaggtggtcatgggaaagaaacagctcacaagaagagcgtggggcgagagccagccgttccccactgcctgctggagcaagctcagtgaggccgctgacaagagtcctcagaacactaaacaggtgattaaaacatcagtataagtctttccaagcttcacagaaagccaaaaacttagtttggacagcaacagaaattttccgctctgtagctttataaactggtccgctgtttcttcctctgctctgtggccagaggggagctctgt

SEQ ID NO: 20429 - DNA, 1065 bp, Homo sapiens
ggagacggaggttgcagtgagtcgaggtcacacctctgcactccatccagcctgggcaacagaacgagattctatgtcaaaaaaaaaaaaaaaaagctacattgagccaggcacagtggcccatgcctataatctcaacactttatcagtctaaggcaggagaatcccttcagtccaggaattcgagaccagcttggacaacatagtgagacccccatgactacaaaaaaattaaaaaatcagccagacatggtggcctacacctgtggtcccagctacttgcagccgtgcacggcaaggctgcagtgtgccatgtttgcaccactgcacttcagcctgggcaacagagcaagaccgttgctcaaaatttaaaaagacaaaaaaaaaaaaaaaagctatctagatttagcttttatatttaggtctatgagacattggaaataaatttttttttgagacagagtctcactcttacacccaggctggagtgcagtggcacgatcttggctcactgctacctctactccccaggttcaagtgattctcgtgcctcagcctcctgagtaactgggactacaggtgcacaccactatgcttggctaatttttgtatttttagtagagacggggtttcatcatgttggccaggctggtctcttaactcctgacctcaagtgatctgcctgcctcagcctcccaaagtgctgggattacaggcatgagccactgcgcccattcctgttgttttgttttttgagacggtcttgctctgtcacctaggctagaatgcagtggcagggatgactcactgcagcctcaacctcccaggctcaagtgatcctcccacctcaacctcccaagaagctggaactataagcaagcaccaccacacctggctaattttttaattttttatagaaatggggtctcactatgtttcccaggctgctcttgaactcctgaactcaagtgatccccctgccttggcctcccaaagtgctggaattacagacatgagccagtgtgcctggtcttcaaattaattttgtatatggtgtaatataag

SEQ ID NO: 20430 - DNA, 1869 bp, Homo sapiens
tgccctgggcatcgctgctgctgccagcgcccttcacccatgcttcagcatggtgcctatactcacttcctgcaggagtctgctggatacctgcagctggagcacaggagagatttcagctcttctgggagtaggaagctctcctttgacactcgttccttagtgtgctttctggaagaccatgggtttgctactcagcaagcagaaatcattgtgtctgcattggtccaggtactggaggccaacgtggacatcgtctacaaagatatggccaccaagatgaagcaggagatcgctcttcagcaaataatgtctcagactgtgaatgtgaaaaacgatatgattactttggagaagagtgaattttcagccctcagagcagaacgtgagaaaataaaactcaaactacatcagttaaaacaagtaatggatgaagtgattaaagtccgaacagatactaaattagacttcaacctagaaaagagcagagtaaaagaattgtattcgttgaatgaaaggaagctgctggaattgagaacagaaatagtgacattgcatgcccagcaagattgggccgtcacccagagagataggaagatagaaactgaggatgctggccccaaaaccatgcttgagtcatacaagcttgataatattaaatatttagcagggtctatatttacgtgcctaacagtagctctgggattttatcacctgtggatctaataaagtgtctatttaaagagggggggaaaaggatttaccatttcaaccatttcttaagtgtacaactcagtggcattaagtacattcacagtgttgtgcgaccatcactactatccatttccagaactcttcatcattccaaacgccgtaaccattacacagtaactcctcattcccccttcccctggcaacttctactttctagctctatgcatttccctattgtaagtatctcatataagtagaatcatgcaatatttgtctttttttttttttttttttttttgagacaaggtctctctgtgttgcccaggctggagtgcagtgtcaccattacggctcactgcagcctcgaactcccaagcccaagggatcctcccacctcagcttcctaagtagctgggaccacaagcacgtaccaccacacccagctaattatatgcacgcgtgtgttcacgcgtatatgtgtgtgtgtgcatgtgtgcgcatgtgtgcatgtatgtttgtgtctgtgtgcatgtgtgtgcgtgtgtgtgtaaaaatagggtctccccatgttgtcaaagcttctcttgaactcctcagcctcgagtgatcgtcccaccatagcctcccaaagtgctgagattactggtgtgagtttccacctttgatgcacaaaagtgtttaattttgataaagtccagtttgcttttttttttttttttttgaaactgagcctcactctgttgcccaggccagagtgcagtggcttgatcttggctcactgcaacctccacctcccgggttcaagtgattcttgtgccccgcctttcaaatagctgagattacaggggcccacctggctagtttttgtatttttagtagagatggggtttcaccatgttggccagtctggtctcaactcctgacctcaagtgatctgcctgcctcagcctcccaaagtgctgggattacaaatatgaggcactgtgtctggtctgcttatttttttcttttgtttcctatgcttttgatgtcatatccaagaaatcattgccaaatccagtgtcataaagattttcccttatgctttcttctaagagttttctagttttagctctttttaggtctttgatccattttgaatttgtttttgtatat

SEQ ID NO: 20431 - DNA, 1062 bp, Homo sapiens
ctgtagtcccagctactcagaaggctgaagcatgagaatcgcttgaacccaggaggtagatgttgcagtgaaccgatttcaccccactgatcagcctgggcaacagagcgacagagagagactgtctccaaaaaaataaaaatataaataaataacataaaatgctaactataatataacgcatcctgagctggcatgaaaacgagaaatctgcagatcttaagaactaaatgaacaaaagatttctgaaaagtaagcgagtgccaaagctggctggtgcttgccctgatgatttctgtcaagccctggaagctttgggcttactcactaaaaactgcttggactatggtgagcgggcctgaaagcgtggggtgcgccctaggtgaggaatgatgtaggaggccctgcctaaagctgggattccagctttaggaaacctcatggtgagcattttacgaccatgagctaaccctcacctgagttttgagtctgaattcatactacctatgtactctgaaaaaccttgagcagcagatggtttaatttaaagtgatctctgtgtctgacagtgtcccagggtaacccgcagaagcaaagacaagtcctctctggaaaaaagcagcttctactcaggccacaaagaattcccgtggatacagttccatggaaatcagcccacagcctttaatatacttaaagtaaataattatcattcccaaaaaagctaccttgtaaaggataaacaaaggtgaccaggcatggtgggtcatgcctgtaaacccactacttagggaagtcaaggcaggaggatcacttgagctctggagttccagacccgcccgggaaacatgatgagaaacccatctctacaaaaagatttaaaaattaatggccaggcgccatggctcacgcctgtaaccgcagcatgttgggaggccgaggcgggcagatcacctgaagtcaggagtttgagaccagcctggtctcgaggtcaacaaggcgaaaccccgtctctactgaaaatataaaaattagctgggcgtgatggcaggcacctgtaat

SEQ ID NO: 20432 - DNA, 1008 bp, Homo sapiens
atccgcccgccttggcctctcaaagtgttgggattacaagtatgagccatggtgcccagcttttctctataaatttgactactctgtgaacctcatataagtggaatcataaaatatttgtccttttgtgattggcttatttcactcagcataatgatttcacgttttatccgtgccgtagcacgtggcaaaagttcatttctttttaatgctgaataatattctgttgtatgcatacatctaccacaatttgtgtgtccattcacctgttgatggacacttgggttgcttccactttttggctgttgtgaacgtaaatgtacaaatatctctttgagatcctgctttcaattcttttgggtgtatacccagaagtagaaagtagaattgctgaatcctatggttgctctatgtttaattattttattttattttattttattttttgagatggggtctcactctgtcgcccaggctggagtgcagtggcacactctcagctcactgcaacctgcacctcctgggctcaaacgatcgtcccacctcagcctccccagtagctgggaccacaggtgcgcaccaccacacccagctaagtttttgtgtttttggtagagatggggtttcaccatgttgcccaggctggtgtcgaactcctgagctcaagcgatccacccacctcggcccaaagcactgggatttaaggcgtgaggcaccgtgcccggtcatctgtgtttaattttttgaagaatcgtcatacattttccacagcggctgtactattttacatcctcaccaatagtgcacaggagttccagtttcttcacattctcacaatacttttgttttttagtaacagccatcctagtcggtgtattggtgtgaagcagtattgcactgtggttttgattttgcattttcctaatgacaagtgatgtcgaacatctttttgtgtgcttatttgttgtgttcattttaaatgtataatttctcctttctcagttgatt

SEQ ID NO: 20433 - DNA, 1011 bp, Homo sapiens
ggctatcctcatcattttattgttaatgacatgaagagaaactttattttcacatggatactttatgttttttcccttacccactgaaaacatgacagatttcttggttcattcgccgtggctcacgcctataatcccagcactttggaaagctgaggcgggcagatcacctgaggtcaggagcttgagaccagcctgaccaacatggtgaaaccctgtctctactaaaaatacaaaaagtagccgggcatggtggcgcacacctgtaatcccagtaatcccagctgctaggggtgctaaggcaggagaatcacttgaaccagcaaggtggaggttgcagtgagctgagatcccaccactgcactccagcctgggtgatggagtgagactccatctcaaaaaaaaaaaaaaattttttttctcagagtatactttgttttttttgagacaacatcttgttttgttgccagtgctggaatgcagtggctcactgtggcctcaaccttctgagctcaagggatcctcccacctcagcttctgagtagctgggaccacaggtacatgctaccacaccccgctaatttttgtatttttttgtagagatgagatttcaccatgttgcccaggctggtcttgaagtcctgagctcaagcagttcacccaccttggcctcccaaagtgctgtgattacagccaccatgctgtccttatactttttaattagaggttagcaggtgtttattattaacaatagtttcagtattcatttttattaagttctgtgcacattaatcccttccagccagcaggcctctagttagtctaggcctctgatttcagcttgaatatacactttgctcttttggagaaacagagacctctgcctaagtgaaacaggacatgtaaagggaggaggaataccaggctgagatttcatacctttgtaatctctaaagaaggttgtattgtctctacaacaaggaaaaagttgaaggacaaagggcataaaat

SEQ ID NO: 20434 - DNA, 1003 bp, Homo sapiens
ttggttttatgtttttggagggtttttttgtttgtttgtttgagacagagtctcgctgtcacccacactggagtgtagtggcgtgatctcagctcactgcagcctccgtctcctgggttaaagcaattctcctacctcagcctctcaagtagctgggattacagctgtagcatgccaccacacacccacctaatttttttacatatttttagcagagacagggtttcaccatgttggccagactggtctcgaacttctgacctcaaatgatccacccgcctcggcctcccaaagtgctgagattacaggcgtgagccactgtgcctggccatagttttaatagtcattttcctgaataatgatgagcatctttttatgagtttactgacaattattatatcctcatttgggaaatgttctaatctgttggccatttttaaacattggggtgttttcttattgagttataagagttcttcaaatattcttgacacaaatacttgtcagatatacatcctgtgaatatttctcgtggtctgtgactggtttgccttttttttttttttttaaacatagtcttgaacagcaaactttttttttttttttttgaaacagggtcttgctctgtttcccaagggatcctcccaccttagcctccccagtagctgggactatgggtgcacgccaccacacctgtctaatttttgtaattttcgtagagccatggtttcgccatgttgcccaggctggtctcaactcctgatctccagcgatctacctgccttagcctcccaaagtgctgggattataggcatgagccacggcgcttagccttccggtggaattttgactacacagtagggacttccacttttaactgtttcaaatactctagaattgccatcatttaggacaaaggcttttgaaggtttgatgttttcgtgggctattttttgtgatatcattattgtcagtgacaggaaaaatgaatctttagctgcct

SEQ ID NO: 20435 - DNA, 1047 bp, Homo sapiens
gtcctgccttgatgcttattctgcagatacttacgaaacacgtattgccaacacagcctgggagatccagacacataaggcaggtatcttcctagttcgagagacagtttgtgccatatataaagatgtgagtggcaccataagtgaatttgaagagttcttgagttttgttgagctggtaataccccggtgaaggcgtgcttcaagagcactgatttggcattaacgtaatcattgtatctttgaagcagaaaagttttcaccttatatgcctttgagtgcaaatactctctttgttctattcttttcttcagtaatttctgctgtcctgatacattagatctccattctttgtcctatatgtcactttttctgtcatcactttaatctgtttttgcttttcttctgcattctaggaaggtttctcaagtttgtcatcttgatatatttttatagcattgattctactctttactacttctagttcaggttttaagtcttctattgcattatttgttctcttacattatatcttataacctttattttttttgcctgccttttagtcagtccctttatatctttttttttttttttttttttttttgagatggagtcctactctgtcgcccaggctggagtgcagtggtgtgatctcggctcactgcaccccctctgcctcccaagttcaaacgattctcttgcctcagccccccgcgtagctgggattacaggggcacgcgctgccacaagtagctaatttttttgtatttttagtagagacggggttttgccatattggccaggctggtctcgaactcctgacctcaaggtgatctgcccgcctcagcctcccagagtgctaggattacaggcatgagccactgtgcctggcctcagtccccttatatctgtctttgctttttcatttttcatttagcatacttcacagagtctataatttgaagaattcagttgaaggtcaggagcagtggcccatgcctgtcatcccagcactttaggaagtcaaggcagacagatcacttg

SEQ ID NO: 20436 - DNA, 1387 bp, Homo sapiens
caatctcagctcactgcaacctctgcctcccaggctcaagtgatcctcctacctcaccctcccacatagctaggactacaggcacccaccttcatacctagctaatttttgtattttttatagagatggggtttcaccatgttgccaggctggtctcaaactactgaactcaagtgatttacctgcctcagtctcccaaagtgctgggattataggtctgcgctaacatgcccagctgtatatactgtttgtaatctgcttttttcctaacatttttaatatattcttatatggaatcatttttatagttacccagaattcttttatattccaagatttctttaaccaatctttgctttattgaaccaagagaatgttcccaatttttttacagttatgaatagtgtatcaatttcttgtagcagaatttgagcatatattccctttggttaaattgctgtaagtagattaaggttctagacattgatatatcaaaaactcatactctttggatgcacttaatggctactacatcttgggaatcagagaacccttctttcccaagaggaatacttactttttgcctttccaacaaaaacgtagagtgaaattctgctcttctagtctcagaatgggaaaataatggggatttgtagtatgtgaggctgaggacagctaacaagttgttttatacatgtggaagatgttgagttagaagagagactggatgacatggcttgggccagaggatccccatacttttctttggtgatcacaaggtggtcttgattccagaggatgctttggggagttcgctattgaagctgtcttttagtgtgggacaggtgctgagtagaagagtcctaacgagcttcagactcttcctacgccccatcttcatcagctctctcagctctagtgtcagataccacgtatgtgttttggctcgaggagaacacagagccagcagaccagccctcagcctatgtagtgatccacaggctacctagggggcagtggcggctcagtgagactaaggtaggtctccacttcaacgactgtgaaataggtatgtcaaacctaacatgtccaaatccaaactcctgaatcctgccccacccgctgcccgccaacctggtcttcctttacccttccccatcttggtaaatggcagccttgatttttgggctgcttgtgtcaaaatgcttggggttattcttggcacttctttgtcacacttccatatctaatccatcagcaggtaatgtcttctttaccttcaaaacacacacagatacaattctgtcttcccactgcaccctggttcagttctctgaaatgccttctgactggttgctctggttccttcccccttctactcttcagt

SEQ ID NO: 20437 - DNA, 1082 bp, Homo sapiens
ttaaatacaaaagtaagatgtattcattatgggagaaatcttttctttctttacagtgctctttgtaaagtatttagaaaactcagcaaagaagaacaaataaaaaattacccatattcctaccacctagagataactccaccgttaaaatttggtaaaattttttcaatttttttcctacatatcacatacacactttttttctattgctttacaactattttcatttaatatgtttggaagtttctctcacatgattaaaaaatgtaatacaacttaaaaaaactagtattcaattgtgtgcatgttccatcttaatcatctattgttgggcactttagattgcttccaatttttggcgattataaatgaccactttttgtatgttttctctgttgcttctcttcctgctttattgctgagactgctgtttcttcttggctataattttataattattacataagtattatccagaaatccttataaaagtataacattaaaactaagagtaaaatttcttttaactctgtgccctccaaaaagatagtagtagacatcagggcgtgtattcttccagacctttcactcatctacctacatacttacgtacgtgtccatcagtaatgcggggtgaagcaaagattatttctcagagagaaagacataaaactacttacaggtagtttgaggccagaattagatagcattttggttacaaaactggaaaccagaaaccacctactgagccctgaggagggttcctctctttatctgtgcctcccgtggttactgctgaacaaggctggttttgcatgaatagatccaccttctctcacatctcacatttgaagttactctaacttatatccttctgctttcagttttttcttttgttttaatcatgttgaattagttggaaggcaaagggagaattttttttaaaaaactttttataaaaaggaaatgtggacatttgacctggtgctcgttcaagacttcagtctgacccagagagtgttaatggatctgtttccaattcctactccagggaagaggcttcctcagacacagcttcgaag

SEQ ID NO: 20438 - DNA, 1020 bp, Homo sapiens
gctgcgcttccaggcatggtctgctctgtgcctggtgctccacactgcgtcagcagagactcgaatgcctactatgtgcaagataagtctcttaactcccagcactagctgacgagaggttcagagctttagaggaaatattcagtgccaaaaagagtttgtttttcaccacttactagttacaagatcttgagagtaaacaagtcagagctgctgcgggcttcaactaacctgatcagtggtttaaagatatggtctctgaggtccattccagtccttatgttctgtagtactatgatttgtttttttttttctcatttccaccctgtcacatggcttagttttttggttttggtcttttgctcctgggttattcgtatcttgctcgttttttaaaaataagaggttgagaaaaactaacctggattgttttctgcagagaatgttgtctagcccagctgtgttcctcagcatctgagggctgagtcctgctcggttagtcaccgtctgagtcagtcctgggcctaggtcccggtgttgtctgaaagattggtttcttgaaactgccattcaaatgaaacaaggtgtctctagagatcacatcacaaggcagccactttagtcagtgacacacacagcccgaaaacgatggtatcttctgaggttttaaaggatagggacagagtcatctcggattcgggagaagtactcagtcggggtgccatatggctcctgacagaccctttcctggtgagaggcagatcacacctgcacttggactccactgagagaggttaggaagctggcagcctataggctctgaatttgtgacaaatagtatgcttttgcttcctcttattgccttgatcacagttaccactttagcttttacttgcttgcctagtcatgctatttgcatagcttcgaagtctcttggaattcaaagactgatatatttattttgtacttttaatttttaaaaatataatgtttgtgtctgatttgctttttaaattaaca

SEQ ID NO: 20439 - DNA, 1030 bp, Homo sapiens
taccattgccagcattttctccaagccactgtgactattcctgcaacatgcttggtgctgattgtagcaaataatgtctttagacaagagaaatgccattgtatatttggccaagctcttgtcaaaccttccttctccttggcctctttgaatgttttgtggttcagtctggactgtaccatagaagctcctaatctctgttatccaaatagaatgtaatacgtgtctgtctgttttcctttttctctatcttcacccaacaaatgattttgtttaccttgttctctctccttttgctcttcttccttctgttacatatcattatctattttatttatttgcataatgtcttttttcaggacttgttcaggtctggagaatttaatgcagttgcccctgagtttttggagtagaagaccatgttctgggctcagtgcttaagtagactaaagtttacctgttctgttgtgccagttttgtgctaggattgtaaagatgaatacactattgttactttctctgattgtgtagtctagtgtataggtcagcaaactttttctatgaagggccagatagtaaattactttatagggcatatgttctttgttgccaccactcacctttactgttgtaccaccaaagtagccatggacaatatgtaaatgaatgagcatgactgtattccattaaaactttatttacaaagacagatggtggattgaatttggcctgtgggcctagtttgccaacttctgttccagtggaagaaatggttacataaatagaatacagtaaacagttgattcttgttatttgtggtggttatgttctatacattcaataaattcaccacaaacactgaattagtgaatagtggattgttgctcctaagggaaatacagaattacattccttcaagcctctgatcacaacattttaatcaactggtcaatatataaccttgctttttttgggtttttttttttgagacacagtctcactctgttgcccagggtggagtgcagtggcg

SEQ ID NO: 20440 - DNA, 1081 bp, Homo sapiens
gttagcattgaagggtgcatgaaagctctgatcagcctgtgtttggcttaaatgccagtcattggtggaggtaaaggatgaacccgtgtttcagcatctacactccaccattaattagcattgtcagttcttagaatgagtctgaatctgctagtttggtttgccttctttcagtttaggcaattgtattcctagactatgaagatttttgtttttcttacttggtccccagatgtcagtattgaatatggtggtgaggcgtgaccctggcaacactgaacctgtgaaagccaaggaagagctcatatttcactgtggattcaggcgcttccgagcctcacctttattctctcagcacactgcaggttagcaatggggaagctgggttcttgtccatcttgtcttttgggaaagtgacttgtggtggaggggtgccaaaatatatggtttcaaaatcttacatctctgggttagaggtattttcagtactctggcttaagagccaatgatgtttttattcaaaatgtctgaacctgtctgaagcatcccagtgatgcaacttctgtgtgatactgaggcttttttgccatgagtatttgttccatagcaggttttgaatagaagttggcagctttataaaaagggtattagggtgggtgcagtggtgcagtggttcacacctgtaatcccaacacttgtggcattagaacggggaattgaagaccaaaaaaggtaagatttaatcttgtttttgtttctgttttttttttttttttttttttttttttgagacggagtctcactctgtcgcccaggctggagtgcagtggcgcgatctaggctcactgcaagctccgcctctcaggtttacttacaccattttcctgcctcagcctcccaagtagctgggactacaggcgcccgccaccatgcccagctaattttttgtatttttagtagagacggggtttcaccgtgttagccaggatggtctctatctcctgacctcgtgagccgcccgcctcagcctcccaaagtgctgggattacaggtgtgagccaccgcgccccctcttgttttt

SEQ ID NO: 20441 - DNA, 1081 bp, Homo sapiens
atatgctgcatttggggattaggggagcccctgagtcattgattagaatgatactgggaacaaagaggtatcagctatgttaaatgaaaaagtgtgatctgggtaaatgaagcatcttgaaggatgagggttggctttaaaaattttatctgagagactcaacatatttggagaaagcttcctcgctattgggactttgaaaggtaactccatgattgctttctgctttcttgtggcaggttggctggtatgtcacacttcatgtctctgaagtccccgtctcagtggtcgagtgcttcaggcaaggaacacccttgattgcattttctttactacctcatgaacagaaggtaaattgctgtcttgtgggaaaatggggggttgtgaaactttccagctgcttctgacagtctaaaattctgtttatgtgtgactaaaattttgctcattgggatgcaaaaagtctgcctttatgattaggaattggagaataatagagaagtcaatgatggttttattcatatcgtctgaacctgtctgaagcatctcagtgatgcaatctctgtgtggttctgagacttctccaagtatgtttttcagaccagattttgaataagggttggcagccttaaaaataaaggtttggctgggcgcggcggctcacgcctgtaatcccagcactttttgggaggccaaggtgggtggatcacctgaggtcgggagttcgagaccagcctgaccaacatggaggaaccctgtctctaccaaaaatacaaaattagccaggcgtggtggcacatgcctgtaatcccagctacttgggaggctgaggcagaagaattgcttgaacccagtaggcggaggttgtggtgagccaagattgcaccattgcactccagcctgggcaacaagagcgaaactcttatgtcaaaaaaaaaaaaagtttatgccaaagtgcagatctcttttctcttggtggccagtagttgtgtatgttgtggggtatgtgatagttctttgatcggttttggtaagggctcaagaagaaggggcttgaatgagtgtggttttgagattgtgg

SEQ ID NO: 20442 - DNA, 1031 bp, Homo sapiens
ttgctcaggctggagtgcagtggtgcgatctgggctcactgcaagctctccctcctgggttcacgccattctcctgcctcagcctcctgagtagctgggactacaggcgcccaccaccatgcctggctaatttttttgtatttttagtagagacggggtttcactgtgttagccaggatggtctcaatctcctgacctcatgatccgcctgccttggcctcccaaagtgctgggattacaggcgtgagccaccgcacccggccgtgtatggttagtttcttaggaatgactctgtagttgccaggaatgaggcttttgttttatactttagactgtattagaatttatgttggttgggaatagggatctagtacaattattttactcttagcttattggcctttggggtagagacaggtgtggatttcttctgaaaaaactgtaatcctattctacaggatgagagtagtgaagaagaggaagaatatgaaactatgactattggggagtctgtgcatgatgatctgtatgataagaaagtagatgaagaagctgaggcaaaaatgttggagaaatataaacaagaaagactggaagagatgtttccagatgaagtggacacgccccgtgatgtggctgctcgaattcggttagtcaacaagtctatcaacaaatctaaattcagtcaatacgtttttaaaaacttggctcagagctgtgtcactgtgatgcaaaagaagaaaaacacattttttctgctcctgaagagctaacatttaatatgggaaggcaggacatacatacgggaaatggtcatatgtaattaagttctagactgtggtgcagactcacgttacaggacttgaatgaaggggaaatactaaggttaattagcaaatacttcttcccaaaggagccagtactcaattgaagtatataatgtttggaaattttagggggtttgggtagaatagcagaagtagaagagtgaagaagtagatgattatatctgttctggaggtgagtgacta

SEQ ID NO: 20443 - DNA, 1049 bp, Homo sapiens
tgatgctgtgtgcccaagtgggcagtcaccacccagcccttccttgggcgtctcccccagagtgctgtcgggaccacatctgtcctcaccctgtgggaccgcctggccctccctccctagcccttccagcctgggacacacacacacacacacacacacacacacgcacgcacacgcacacatcttacctctcatgcgtgttttaccttttgatgttcagagtggctcactggctgggagtccttacctcggggagagggggaggttggttccttggggggccaaagaaggcagggaatgcctggagggtaactggggggccaccatgaccccttctctctccagaaacagctgcttctccccccatcccagggtcccacccccaacccccagaggtggcccttgtttacagtgaggactcggccactgtgtctctgtttcctgaaatataaactgtagcgaccccagactgtagagatttttatgtgtttggatacatctgctgtgtggaaaaaaaaaaaaactacaaaaaccctaattttgtacatactgtatttttactattgaactgtattctagtggctgttcatgctccaagactttagttaccgagacatgaatactatccatgtaataagcacttgcctggaataaaatataaaactgaaataaacctgcactgaaacctgagatggagctgccagcctgcagcatctgggtcattttattgcaaaaggaggctgaggcctgtagggaagcatgtggcaggagcggtgagatcacctgtctcgaccctgtctgcccagcatagtcctcaagcggctctgacccggtgcctccgccgctctgaaaatggcagttctggtcggtctgaaacttttgcaaagcttcgtatttcctcagaccattttacaagcattatcttgtttcatctttcaacagccaagtgaagtaaataagccagacttagccccattttggcagataaggaaacaggattgaggtggcccagtgacttgttgaggccacacggctagctggagacttcg

SEQ ID NO: 20444 - DNA, 1128 bp, Homo sapiens
ctggtctggagtcccacccggacaggtggggcctcagcctggggctctctgacccggttgcagtcactgtgattcgttaccgtagatactacttaaaatgattctctaccaacaataaaccaaacccagccactgccaagcttcctgtgccctcaccccaatccctgccactgggctctggacctcaggagggcaggctgaggtggggaaggagggacttggctgtccttccccttccccgtcccctgcagcctgggtctggatgggaggagagccactgggcccctgtccccagtccccagtccccagccctgggcttggctcttggcttccagaaggcagcaaagaggggcgctgtcctgcgttcagcccctgatctctgacctctgctgagtgctgggcactgctccaagggacaggtgggcctggcggcctgtgggtttgggtgcctcctgcagtttgggagacatggaccagcatctggtcttgtttccaggagcatagaagccacatcgttgagacatcaggaaggtaaaaacccagcggcttagccaagccctaagcctgtccccagaccaaccctgggacctatacagaacagagggccagagctagggctgctgcttctgctccagcccctttgcctctgtcctcccatcccctcaacaccctgcttctcccggggacgcttttgagtgggccctgcccggggagctgcagagcagcagcacctttctctgagaagaggtccttggttgggtcaaggacagggctgagcgtggaagggggaggagtcaggggctctgtgttaggatgcggctttctctgcctctgggcagcctgctttggcctttccttgtatgtgggtgtttattacaagtggctttgtgtcagacacgctcggctccccacctggacacacactcaccagtggcctttcagtgtagcgggaggaagccggtgtccctggatgtgaagctcacactgatgggctggggcaggggcctgggccggcgagggggccggggggaggggacagagctgaggatttcctggagtgccctgcaggcacagaggaggtcagcaaaggtcttgaatagattttctctggaaataaagaatccttag

SEQ ID NO: 20445 - DNA, 1028 bp, Homo sapiens
agaaatgtatgcaggagtgggtgtgggaagctggcctcactggtgggtggggttggagactttgccaggcctggtcaggaaaagctgctacaaaacagcaaaactgctcctagtgcagcgatccccaacctttttggcaacagggagtattttcctggaagaccatttttccatggagagggagggcggggctggtttcgggatggaagtgttccatctcccatcatcaggcattagtcaaactctcctaaggagcacacaaaacctacactcctggtgtgcacagttcacaggagggcttctgcttctgtgagaaccaaatgtcccactgatgtgacaggatcagagcgccatcgctgctcacttcctgcatgcggccctgttcctgacaggccacggaccagtacctggggtttggggtcccccgccctaggggatgaaagaagggaaacctgggtctaatgggttactgtgattctccctgcgatgcagggaagagacaggacagaggtgggaaggaacatggtcaccaggagtcgggacagcactcttccaggtccttcccctggggctgagtaagcaccctgcgcgtagctcttcctggccgcctgtgggctctgggatctaaacggactatgcagccattctcactttcattcacagctcggacagggacagtgtgtgttgaggcggaaagacaaaacatgtatgtgagagactttgtatgagccggttcctgatgaagtcctatctttcagcctcgtatttactgcccaggcagatggggctcttttcttcaccctcccgctttttttttttgagacagaaaacttaatagaaattttgtttgcagttcttacattctcagtgtgagccaatctgtgacccaccgccccacccagaagtggcccagtcctggtgcagggtaggaagggaagggtggagtgagaagagccccatttttcctcagtgccagggggctggagacaccacccccttctcctgcctctgggctccaggaaggagtg

SEQ ID NO: 20446 - DNA, 1064 bp, Homo sapiens
gcagcccagtttctccagcaggagggaacaggatgctttttggaaataaaagtgaggcacggtggcttgcacctgagtcccagctacgctactcgggaggccaaggcagtaagagcgcttgagcccagggagttcgaggacagcctgggccacagagtgcgacctccgtctctaagaacaaacacaaacatggtcaggaggctgtcactcagagacaggcagaatcaagagctggtcctggagagaccagtggggctgtgtagactgggagctttggttgtttgctgagagcaggaagctgcaggaagaaggcagtggtccccagccagaatacggagtggcttggaggtggtcaaaggtttgaagacagccacagtaaagtggacagagacaagaaaaataggtaccaaaccgtgcatccaggtagtcacagaaaggaaatgggtttagattgaagcaatgtgggttaaagttagaccctggggaaaccttgcaggggtctgtaggcctgtgaagaactggactaggtgagaagaagaagcttttgacccatgtcactccctggcccagaactatatcctacccacaggtgggttgagttcaggactgctgcttccagcccccagcagcaaggttcaagtgagagctgactcacctagggccccttgttagagcctcagagccaggtgaaaagccacacacaggctgggcgcgatggctcacgcctgtaatcccagcactttgggaggccgaggcaggtggatcacctgaggtcaggagttcaagaccatcctggccaacatggcaaaatcccgtctctactaaaaatacaaaaattagtcctgcctggtggcacatgcctgtagtcccagctactcgggaggctgaggcaggagaatcgcttgaacccgggaggcggaggttgcagtgagccgagatcatgccactgcactccagcctgggtgacagagcgggactctgtctccaaaaaaagaaaagccacacaggtgtgtgtgtaggggcaagggagtttcctactgtcttcctagcagaaaatggggaga

SEQ ID NO: 20447 - DNA, 1050 bp, Homo sapiens
ctcaccacctgtggagctttttcatgctgctccaggtgtaactgggtccttcctggcacctgtgaggtgtaccggcgtggttctgggtgagagagggcaggtgagaaggaggttgctacctcccaggtgagctttgggattgctttaaaatatggggaatgggggttggcttgcactctagggtcccacatgtccttgtgactcagggagggccctgattgttcctctgcctataaagagtggagtccatgtctcaaggccaatgaaaagttaggtctgtgtcagccaaaggaatggaggcagggtctgtgttaggccctgggatccagagccttgtcttggggtaggggaaggggctggggacaactgaggctgtgcccgactgagaagggccctgtcactggaactcagcaggctgcttggccactgcggtctgtgggaagcgggagcgcagggctggttttctcccgggcgtaacctaaggcctccccgcactggagcaggcctgcaccggcctggcatcgccccttcccgaagggctagggagatctggaagaggcccgctggctggcccagcccctgaactccggctgctgggaaaccactgaggcttcccctcccaggacgcttccccctccgcttcctcctcggcctcttccctctgcaggagggcggggctgggagcaggcctggctcacactccagttgttgattggccaaagggcctgaggcctcaggttttctggggcgcctgagccagtaagagtgtgggaggtgggtgctctcctccccagggggccttagccgactccagtcccccacgccaccccttgcccgggtgtttggggcgtgtccacgagcccgggctgtctgctgcgttcgtcagcggagcggggcgggcgtccggggtcagaggagagggctgcttgtcccggcggctccctggcctggagtctgcagactccaagggcctgggccagccccgtagccagggaaccagaatggtggcgcctgggagaggacgaggcaagcgggagatggaggtgcctc

SEQ ID NO: 20448 - DNA, 1022 bp, Homo sapiens
gagctactggtcggcttgctgcctgtttccctgttttagggtccttcccacctcttaagggaggagtccgaaggagtctacccatgggcctgcttgctctttctcccactgctggctgacctcatccacgccagtttcttcaaccactcctcatacattcattgtgcccagatccagacccatcctgaacttccagcatcctcattcctcacccgccggcccatggccgtgtgaaactcctctgattgtctgcacctgcttctcctgttgccttgctcaccatccacccagctctccagaggacaaatctctgttcttccccctcctttcccaccaggtgtaaagtcttccactaaatcccaccaattccaccttagaaacctctccccagtccagcccgatagagctctgtaatggcctcagcgagttccggggagcttcagagtaaagaagtagaaagagtagatttaggtattttgggcagagaacaagatgaaatctgctttgtttggggagtgaactggaagctttcaaaagaaagagtagaatgggaaatagatcccacaggcaggggagttggttgagatcaagagatgcgagatcccaaaaaatgggaggccctttctgatacaggacaggccagcattttccccctttgataatttccaggttttgttgttgttgttgtgttgttttgagacggggtctcgctctgtcgccaggctggagtgcaatggcactatttcggctcaccgcaacctctgtcttccaggttcaagcgattctcctgcctcagcctcccaagtagctaggactacaggcgcacgccaccacacccagctaatttttgaatttttggtagagtcggggttttaccatgttgggcaggatggtctcgatctcctgacctcgtgatccgcccacctcggcctcccaaagtgttgggattacaggcgtgagccactgtgcccagccaggtttttttaattcttagtccgacaattttattttattttatttta

SEQ ID NO: 20449 - DNA, 1038 bp, Homo sapiens
ggcacttaccatgagtggagcttgcaggactagaagctgctctgtgtgagtcagtgagagagtggcgagcgaatatgaaggcctagaacatcactgtatagtattgtagactttataaacaccgtacacttaagctacactttattttttaaaactgtgctatgatgttgcaacagctacgacatcactaggcaataggaatttttcaacttcattttattttattttattttactttattttattttgagacagagtctcgctctgtagcccaggctggagtgcagtggtgtgatctctgctcactgcaacctccacctctggggttcaagctattttcctgcgtcagcctcctgagtagctgggattatagatgcccaccaccacatctggctaatttttgtatttttagcagaggcagggtttcaccatgttggccaagctagtctcgaactcttggcctcaagtgatctgccgccttagcctcccaaagtgtgagccaccgtgcccggcctcaactccattttaatcttatgggaccccctgttgtaagtgccatctgttactgactgagatgtccttatgtgactcatggctgtatgtatttattgttaaatgattcaatcaaactaactaacatatgcctcacccaattttttgtgtggtgagaacattttaagtctaatcttttagcaattttgaaatatgtaatatgtcattattaactatagtcaacatgctatgctaaaaactaaaacttattcctgctgtctgaaactttgtgccctcccaccaacatcttcccttttcccagcctaccctcccttgttaaggatttttatatcttatgttcatgaaggatacctggtctatacctttcttatcattataagaaataaggccaggtgcggtggctcacccctgtaatccccgcacttcgggaggccgaggtggacggatcacgaggtcaggagatcgagaccatcctggctaacatggtgaaaccccgtttctactaaaaataaaaataataataaa

SEQ ID NO: 20450 - DNA, 1038 bp, Homo sapiens
taatctctgtgctccatatacggatatgcagtgtttttggtggaggattgtactgattttcataagctgtgactgtgtgaaacactcgtgtatgtgccactgggatgagtgctctgtgtaactgtgtgtgatctccctgggaggttcggatgggtatttggttctgcctgtttgccgtagagcttgtacaacatagtgaatcttactaatcagttttacttccttttctttattcctcagccttaattttaaagaccccgaagcagtcagagctctgacgtgtactctcctaagggaagattttggactttctattgatattccattggagagactaattcccacagttcccttgagactcaactatattcactgggtagaagatctgatcggtcaccaggattctgacaaaagtactctccgaagaggaattgacataggtatatcattttaaattcttttttggctaaacagttttcataagttttgcgagatcaaattctttgtaaacttttctactgggtatttgttgttgtacaaaagaagctggctacagatacaggttgagcatccttaatccgaaaatccgaaatgcttcaaaatctgcaacctttgagcactgatgtgttgctcaaaggcaatgtgcgttggagcgttccagatttgggggttagggatgttcagcctgtaaatatagtgcacatatttcaaaatctgaaaaaaaaattgaaatccaaaacacttctcatcccaagcattttggattagggatcctcagcctgcattaccgttcttttttactacacctggccttttctcccactgatttctcttgagaagggattgtcagtccaaacagggagcaagaggttaagggaagtacaaaatgaaaatgaggctcttatttatatagcttttcattttatttttttaatttaaaaatttttttattttgagatggggtctcgtgttgcccaggttggtcttgactcctgggctcaagcagtccacctgccttggcttcccaaagtgctggga

SEQ ID NO: 20451 - DNA, 1038 bp, Homo sapiens
ccagctacatgagaggctgaggtgagaggatcttgagtccaggagtctgaatccagcctgggcaacatagcgaaatcctgtaattaaaaaaaaaaaaaaaaaaaagatatagttttgtcattgtttgtttcctctctatacttactattgtacttaatcagctatttaacaaaaacctattgattagccacattgtgctcagttctaggaaagccttaaaaaacaagaaagatgtcactgccacagtcacacgctagtttatacactagtggggaaaatggacaaatacataagccgttaaccttttagtatgggagaatccgggggatgtgcagtgggatcacatgaaaaggagaccgtaccctgactttgggatttagagaatgatttgaaaccgaaatggtctcttggttgtgttttaaggaatgagtggagtgagccaggtagaaagaagagtattccaggcagaggcagcagcatgtgcaaagaatactgggcagaggggaactgaagaagtgaagcgtggctggggtgcagtggacaagagacaggaggaggtgggctggggatggttatactttgtggtgctttataaggcccactgaggagtttgaaatttttcttaagggcgtggtatggaggattcttgtgccttgcccatccccatcctcatccactaaagttttatattattttctgagacacagtcttgctctgttgcccaggctggagtgcagtaatgtcatcttggttcactgcaacctccgcctcctgggttcaaacgattctcctgtctcagcctcctgagtagctgggattacaggctcgcaccaccacggccatctaatttttgtatttttagtaaagacggagtttcaacatgttggccaggctggtctcagaactcctgacttcaagtgatctgcccacctcaacctcccaaagtactgggattacaggcgtgagccaccgcgcccagctgatggttaggatttttaagatttttgttttgttttgcattgtttggagacagagtct

SEQ ID NO: 20452 - DNA, 1957 bp, Homo sapiens
aggaaagctccgagtacctcaagtgcctgacccagcaggccgtggccctgcagcgcaccatgaacgagatctaccgcaacggctccagcgccaacatcccgcccctcaaggtgagtccggggcggagcggcccctccggcccggcgagcgcgggagccccgctcaccgctggtttccccgccccgcagttcacggcccccagcatggccagcgtcttggagcagctgaacgtcattaacggcatcctcttcattcctctcaggtgaggcctccgccccactcgagtgtctcccggttgggggttttttgtgagtcggagtctcgccctgtcacccgggctggagtgcggcggcgccatcccggctcactgcagcctccgcctcccgggttcagcgattctcctgcctcagcctccccagtagctgggattacaggtgtccgccacctcgcccggctcatttttgtgtttgtagtagagatggggtttcaccacgttgaccaggctggtctcgaactcttaaccttgcgatccgcccgcctcggcctctcagagtgctgggattccaggcgtgagccatcgcgcccggcccgccccgcttatcttccccagcatcctcgcattccgcgagtgaagaccttggtgtttctgcttcacacaaagtatcttggcgttttcccaccagtccctaagaagcggcttcattccctccccacgcttcccatcctgcggcgggggggggctgaggagcaggccccgggctccccggggtggccacaagcagtgtggcctcctgtggggagtggatttggtcagcaaggcgtggcagcagccccccaactccgctttcctccccctgcgctggagggaggccaccgagggcagcgaggggagccccgaggccgggtcaggtgcggggtccttaccttctccgtgttcagggaccttccgccttcaggagggaagcgcttgttcacacacattccccactgaatagagcgcagagcctgagcttatcccacaggaaagccgggaggcgggtggagcccccaggactcctctgagagccacctccatccccacccttatcctcagccaaaaagacctggagaatctgaaagccgaggtggcgcggcggcaccagctccaggaggccagcagaaacagggatagagccgaggagcccatggctaccgagcccgcgccagcgggggccccaggagacctgggctcccagcccccggctgccaaggacccttctccgagcgtgcagggatagagagggagccagacggacagccagccagcggccccgtcaccagggagcccgactgcgggagaagggggcgagcctgcgggcggaagaggaagcaaggccctcttcctccacgtctcaccccaccccacccccgtgtcctcctgggagcctggcctgcctgccccgcagaaggtgtttttgcgctggttcaatgaatagatgatgcagaggccccattggagacacgtgaatggcgtgtgcggccatcagttcccggctggggggcaggtgttgcttcggcccccgccgtccggccggcgtgtgcgagtgcgcccctggctgtgagtgttgaccgttcctctcccctgtacatagcccgagccagtcctgagtgggtgactcctgagtgggtgacgcgcagacgggatttctcaggtcatttgtatggtcgacatgatggctgctgctttggctgccaccacccccgggcccagcctgtctgaaagttcagggtttaggccgaaaaacccggtggggaggggtggggagccggagctctgtggcggggctggagggctggggtgcactttagtttggggcgggacgggagccgccgttgtgactggcgtggtctggctgctgctcccgaacggaggggtcggggttggcttgctgggccctcagagcccagtgggtggctc

SEQ ID NO: 20453 - DNA, 1057 bp, Homo sapiens
acccaggctggagtgcagtggcgcaatcttggctcactgcaagctccacctcccgggttcacgccattctcctgcttcagcctcccgagtagctgggactacaggcgcccgccactacgcccggctaattttttgtatttttagtagagacggggtttcaccatgttagccaggatggtctcgatctcctgacctcgtgatccgcccgcctcggcctcccacagtgctgggattacaggcgtgagccaccgcgcccggccttgagtagtttttcaatgtcactcttgttgatttagtgacatcctacatctttgacaagatttgctatttcacttggcagttgatttgtattatgtttgcatgacagtgttggcggtttacaacactgcacattcactgtgatatttataaagacattgacccagtggcaggggtatacacacccatgttaactggggcagggatgggggatggttggaggttgcctgatgtcacctttataatttttttcttttttttttttttgagacagaatcttgttctgtcgcccaggctgtcacccagtgggcctggaccccagatcctgcctctttggctggtgctcgtcacccagagctgccctggtgttgagccactcacaggacaggcctcggcgttgctctgtggagaccctctctccctcccgctggggcagggaggagatggaggccgagaggggcaggcgatgggctctcctgaggctgcaagcaagtcggggtgggatggaggaagagaatttaaggaacagcgagagtgcatgaggctctttgagtagttgagggaggaggacattgcaccgatccaggtgcctcaggaagcactcgcatgcctgggcctcgttttttctttctttctttcttcttcttcttcttttttttttttttttttttttgagacggagttttgctcttttcgcccaggctggagtgcagtggcacgatctcggctcactgcagcctgtgcctcccaggttcaagtgattctcctgcctcagcctcccaagtactggggttacagg

SEQ ID NO: 20454 - DNA, 1143 bp, Homo sapiens
acctgggtcttattcacactgcattttggggttcctgagctgcttgtttgagcgagaggtgcttcaggttcaggtcttatgcctagccccttgggtgagagggcctattctgattggcccccaggccctgctgtggagtctgggtctgagttgaactgctgagaaagagccccagacctccagcatcgtggtggagcactggagatgctctggagccagcctgcctggggtcaagtccgggttccatctctgactgtgtgacctcggggacgtgccataactgctctgtgcctcggtctcctcatcggtgaagtatttccctcttagggatgttgtgggaatgaagtgggtgaaggaatgcgagtcctgagaaccgtgtctgctttgtgcacgtgctcagacgcatcaacgattctgcttctcattcgcttctggtgccttttaagtgctgccagggctgtccgcactgtgaacggtccttgacggggtgttatcttcagaaagggaagactagcacccggccccccaggcttccaaagcatcatccatgcaaccatgttggctttcaattccttggagttaaggctgacggccatctggttctaacccggcctcctgtcttcctgtcccactgacttcccgttcttcagctgctctaggcttccctgtctgtctccagaccctagcccacctctgttcccttcccaggctcagctcatccatcaccaactgccatggacccctcttcagcaccctgccccctcctgcagtccctccgcccagccagtacctggtttctgtctcagcggggagctgactcctctctgtgcccccagcgcagggctggactctgaggaggaggactcagtagataggtattgagtgatgagatgagggaatcggctttctgtggccgggaacactcctgctgcagggggtccacctgatgggtgagtcagagaaagactcaggcctgttgaaagtggatcaacaggcaggcagggagatggccagtagccagccgtccgtcctgttcacagcctgcggagtggtgaggctgcctctgtgttttcatggatctgagattcagaacgtagctggtttacagccatggcccagttgtgtgctctggagtttcactgc

SEQ ID NO: 20455 - DNA, 1110 bp, Homo sapiens
gtctagctggtgagtccctttctttgtctgatggccaatgcagacattagcttttaagatggcatagtgagtggccaaaagccgggccctgtcacttcccagctgtgcgactgtgggcaggtccactcacctctctgtgccccagttaccttatctgaaaacggggggtagtaagagtggctgcctcaaaggtggtcgtgaggctgaagcgaacttgtggtgccctcagcctggctccttggaagcacctgggaggtgagagtggaggttgttgttactggggtttgttcttgttgctcctgcatcagccgtcctcgggggaggaggctgcagctgctgctgagattgctggtgtgtggccggaggttttcagcgtgtcgccctctctgtggagtggacgagcgcagggctgggaagcaggcacactgggtccttgtgctgctgtcctatctctttgttcttcacccctgggttgggaagcccgcagcctactgcctccctttgacagaagggactactgagaataatctggctgggtcctgggccagcgttctcccagcttccagaaagtccccagtggcgagcgggaggtgctcccaagaacttggatggatggatggatggatggatgctttgggcagagagaggagcaggggagccacaccccatgttgtctcacttgcattggggagagaagggatccttcccccagagggtaggcagtatctgttctggctttggagttgagaaagactcagatcataccacgtctctgtgggcagaatcgattcttttaggattgtcctttagtccagattgatgagtttgtgagtcttgtgtaaaccagaatcaccatctccatcacacagccaacactcgtttgcctaaatcacggtagaagttcccctgatcactgtagaatgttttgcggtgacaggtgcatcaccacgggcttaggtgcagggtacactccaggcctggcagtggagggctgtcctgaccctgttccccggcccagcccagggcacatgacccctcagttcctgtcccaccccgttccctggaagaagcttggtttccagtagggaatcaggtgcagagtgtgcagta

SEQ ID NO: 20456 - DNA, 1048 bp, Homo sapiens
gttaatctcttactgtgcctaatttgtaaattaaattatattacagatatgtatgtgtagaaaaaacatggcatatgcaggatccaatactagccttggtttcaggcatctatgcagggtcttgggacatatctcctgtggatgacagggggctactgtattttttttttcttttaggcagagtctccctctgtcgcccaggctggagtgcagtggtgcgatctcagcccactgcaacctccacctcccgggttcaagcaattcttgtacctcagcctcccgagtagctgagattacaggcatgtgctaccacacctggctaatttttgtatttttagtagagatggggtttcaccatgttggcctggtcttgaactcctgacctcaggtgatccacctgcctcagcctcccaaagtgctgggattacaggcgttagccaccatgcctggcctgctactgtaatttttctttcagccaaatgagtttaagatgctgtcattgcagccctgaggaaggctgcatgagagagaagagtaggctgagtttaccagcgtcctttgtcttttgggaggagccaggccgtctaatctcagagtggcagcctgtctcgcctgcccagcatgcagtggatggggtctgcaaatgtaaggttaggaacgggatggacatccagcaagctcaggcagcccagccttgtgcctggtgtggccccggaactctctgtcctctttccagactatgcattcactctgcctctgaggactgagccttggagggtcccagtttgtcaataaacagggctgctcctgctgcttccgttgcctgaggcctggagcctccgtctaggtgggggatgagtgcagctgcctgaagtcacaaccacgtgcacaacccaccctccttcccaggaggtgccagtaagtggtttgaggccggcatgcttctgaagaagtggtgagcggggctcctttgctggccgtcagtatcccgatgctatgagcccacggcagggctgcaccttccccccgatccgcttcggccagtggg

SEQ ID NO: 20457 - DNA, 1050 bp, Homo sapiens
gccagtctgctgtgaccacaggctcaggtccgaccctgctgcttggccacagcagtggctgggcaagtgggaaccactatctcttgggagcccccaaaagctgggaaatgctggaggaaccaggcctttcccgcttttgcctggctgcagggttcggctctgcccctgccccccagccctcgtgtgtccacaccgcagtgcctctgcccctcgggggactggacacacatcctgccagaggcgctacgaagctttgcccagatgaagccaggtgggctccgcgttcactcccactctcccgaggggtgctggcctccccagggtttgccttcttacggatttagacgaggttcgaggctcacctatcagggcagctctcaggattgtcattttcctctttgcctgtgggtttaacttttgtatttttttaatcacaagtttgatacaaaatgtttttatcgtactctttggagatgcccattctacttttgaatttagcttttactaattcgcatctggaagctcagcaagtgcacaagccttactttggttaccgtggaaaccactgccgcccctccccgatgtggtgcgctcaataaaaatgctggaattcacagggggctttgctgaggcatgggctgggatatcggggtgggggtggcggtgggatattggggccagagctgtggttttaatgatggccccatcccccactgttctgggacaaagctcaactactcccaggcccacctgcctgaaagcccggggctggtggagccgcagcagctgcactgcgcctgaccagaaccacatctgtgggagtgtctgggagcactggggtgggaccctggggtgcgtgtgctttcttgggtgttactgtgaagcccctacttgctcccaacctcctttttgcaacctagcctcagctcccacctgggaggggccgtagggacacccagaggtgcctgggagagacccctgcctataagactccctgcctataagggcactccgtgtatcccagcgagggacacaaccccacgtgttgct

SEQ ID NO: 20458 - DNA, 1027 bp, Homo sapiens
ccttctagataaggggccagaatagtttcttacgaagtatttgggtgattggatagttttagatgatctaaaatgctgcatcagggaatatctagctttttgctttactgtcatcagctttgatcaatacacgggttgttgccaagtcctcgtattttgctccttaaaataacatgtaggattttttccttgtttgcttcacctgatttattgggcgatctctttgtcttgtctagatcactgtcgtcttcctgaaagatgagaagtaccattctttgcctatcatcattaaaggcagcgttggtggacttctggtgttgatcgtgattctggtcatcctgttcaaggtcagttctactcatggcatcacagtgagggaagactgggctctagttttgggcacagaactccttaggacagccaacctctgacttagagcagctgccctggcctcgtggccacttttttctcctccttcaactgcacacccccatttagacaaatgagtaaaacagtatctgtctgaaaagagaaaactctgagttataaagagtgattttatatatatttctttggtacctccctattctcaaggcccagaacttaatactgttatgttcggttacctgtgagttcaatagggcctggaaggtcaaccctaggccagcatttataacttacttggaagaggccttaacggtaaggccttaaaacagatgtgactgttgttcccctgttgaaatcttttccttgccttcccctgtcttaatgtgcaaactcttctactgctatttaagatcctctcctctctgtccgctacccgtctctgcccttaagtgttgcttttttttcttttttttttttgagacggagttccgctctttcgcccaggcttgagtgcggtggtgcgatctcggctcactgcaaccttcccttccccccaccctgaccccgggttcaagagattctcctgcctcagcctcctgagtagctgggattacaggaatgtgccaccatgcctggctaa

SEQ ID NO: 20459 - DNA, 1049 bp, Homo sapiens
ttgccacatctccaaatgctgtattttcacatggcaggatacaaaacaggaagcaagaagtcagtagcaaaaggatgttggatttttcttcatgtgccttcccttttcagggatgaaacagtttccaaaagctcccaggagacatcctcttacatcttattagtgagatctgaatctcatgtcagtcactggcaaaggagaatagctgtgtcatgatcacctgagaccaacgatgattcctgaataaaatccaaaaggagagaggggcccctgggcaggccagcatccgtgtttgctgcaaacagtagtacccggtgccttgcttctcccttaacctctacttgggcatctttggggcacttttgggaatctgtgggtttagaagaagataaagggaggtggctttgagaaatagggacatttcttctactcacatctggcctgtttcccgagtcaccttgggacttcctttcacttcccaaacccagggtcttgagtccccctccttctcctgtagaatattccagccctctttctgttcttcctccctctttgttgctatggtacctccctattctcaaagcctaggacttcactcctatttagttcagctacctatgagctaaataggactggaaggtcaactttaggtcaaccagcatttataacttaattggaagaggccttaaaggtaagtttgtccagcccttcaccccgtacagaaacctctccaaagcacccctgaccttggtgcttaaacatacacgtgaagggttgctctgggcaggcagagaagtcttgttggctctctggccccacctaagtcctgggaacttcctctggccacaacttggaagggccatacctgggtctcaggaaggacatctcctgaactttctagctgagccctgccagaagagagattagactcccgaaattgggagagcctttggaaaacaaaacctgcggatgacttctaatagctgagctctgcaagtagtacacatggatataatttgcatttattatgtcccttaggtaatacacac

SEQ ID NO: 20460 - DNA, 1055 bp, Homo sapiens
gcctccctgcaacctctgcctcctgggttcaagcaattctcctgtctcagcttccctagtagctgggactacaggtgcatgccaccatgcccagctaatttttgtatttttagtagagatggggttcaccatgttggccaggatggtctcgatctcttgaccttgtgatccgcccgcctcagcctcccaaagtactgggattacaggcgtgagccatcgcgcccagcctaatatcagtattttaatttacaaattgtcttggatttggccagtagagccccttcaagctgttttgacatactccatgattctttaagcactttctttctttatggcacaacaaaacatcttgcttttccagactcattttgcatcttacctgctccacatctggaatcagccatttctccaaggagctggtgggcatggtttgaggggttcgggggttgggggctatacatactggtttgtgttgtcacgtttacctacagccctggatatatttacagtggtgtttgttctttacagtcagagtgtccaagaactgtggaaggtctttgtattactacttttgacaaaaatttatgatgactgaccacctttctttcctgttaactgacatttcaacttgacaaatgtgatctttaccacatttactcatttgagtggctgagtacattctacatgtatagtattatgctgttttctttaagccattttgaggagcacaataaactggaaaaatgatttaccaaatatatggaattatatgtagtctgtttccttaatcctgatgctgtgttgttggcatgtgatccttcagaagtgaatatcatctttcatggggtggcaaaaatgccactattttgagaaagtctttttgattcctgggtacctgtaatgacctaaagctcttttatgccttttggaaccttgtatcttgtattgtttatttttgttttctccattaagtcatctggctccaaacagcagttttaacctcattcgtctctgtattttgctttatcccctctacactgcattgctgtagtggg

SEQ ID NO: 20461 - DNA, 1078 bp, Homo sapiens
ctcccaaagtgctgggattacaggcttgagcgaccgcgcccgaccttaagtttatttattgatatatttacaaattttgcaattgagattaaaggagataatgtacttaaaatatgtagtaaaaaaagccgggtgtggtggctcatgcctgtaatcccagcactttgggaggccgaggcaggcggatcacctgaggtcgggagttcgagaccagcctgaccaccatggagaaacgtcgtctctactaaaaatacaaaattagcatggcgtggtggcgcatgcctgtaatcccagctacttgggaggcttagacgggagaatagcttgaacctgggaggcagaggttgcagtgagccgagattgcaccattgcattccagcctgggcaacaagagtgaaactccatctcaaaaaaaaagaaaaaaaaaaaaaggtagttaaaaaagtacgcaattggctgggcgccgtggctcacacctgtaatcccagcactttaggaggccaaggcgggtggatcacgagggcaagggatggagaccatgctgaccaacatggtgaaaccccatctcttaaaaatacaaaattagccgggtgtggtggtacgctcctatagtcccagctactggggaggctgaggcaggagaatcgcttgaacccagaaggcggaggttgcagtgagccgagatcgtgccactgcactccagcctggcgacagagcgagactccatctcaaaaaataaaaagtatgcagtcctgataaggctaagtttcttttttgaccatagccttcaacctttctgcctcctcagaagtaacagcagttatcagtgtgactcatattggccttttctgggtgtctgtgtacataaatatgtacccttagtaaatgtatggtattgtttaatgtcatcaccttgcatgtaattttttacaacttgttttttcactctgtgatacatcttagaatctttctgtggtatataattatctcattttttaccacataatattttataatgtggataaagcataatttattaccctggtaactactgggttattagaaatcgtgccttagc

SEQ ID NO: 20462 - DNA, 1045 bp, Homo sapiens
attattatgccagcatggtggctcatgcctataatcccagcactttgggaggccaaggcaggattgcttgaggccaggagttcaagaccagcctgggcaacatagcaagaccccatctctaaaaaaaaaaaaaattagccgggcgtggtggtgggtgcctgtagtcccagcaactcaggaggctgaggtgggaggattgcttgagtctgggaggtggaggttgcagtgagctgagattgcaccactgtactccagcctgggtgacagagccagaccctgtctcaaaaaaaaaaaagaaaaaaaagtaataataattatgccaggacagcaggtggacggacacctggtccttctgactcagagcctgtggtccagcaccccctagtggtggaacaagccagacacaggataaggatacatttagtgtctagtttgtacctggcaaacagagtgacaagattgggcttaatactttccagctataaaattctagaattctgtgacccaagtttaatttggggtagagctttttaaaaaaaaaatagagatggagtcttgccatgttgcccaggctggacttaaactcctggcctcaagccatttgcccaccttggcctccgaaagtgccaggtgattacaggcatgagccaccacacccagcctccacgtttaactttgaaagaagattttacttcatcatcaagtcccaatatttatccttgatagactgctttggttttttgtttgtttgttttgagatggagtttcactcttgttgcccaggctggagtgcagtggcgcaaactcaactcactgcagtctccgcctctcacattcaagcagttctcttgcctcagcctcccaagtagctgggattacaggtgcatgccaccaccacaccggctaatttttgtatttttattagagacgggatttcaccattttggccaggctggtctcaaactcctgacctcaggtaatctgcccacctcagcctcccaaagtgctgggattacaggcgtgagccactgtgcccggccataga

SEQ ID NO: 20463 - DNA, 2033 bp, Homo sapiens
tcagcgactcctgctctcttctgcttatttcctgtgtggtccccaagccctgctgagccctcctcttccctgtctctgggccttgttgccacttataccccttgcctcattcaggcctcaggcccctccccagacttatctagccaccttccccctggtctcgctgctgctggcctccctccagtccagccaacacattcaggcggggacagccctgataaagcacaacaaatctgcctgcatctcttgcctgaagtttgtctgaagcttctcaaagccacaccctggcgctagcattcacacgtctccgggttctgccacccgctcgtctggggccgcctcactccctttcccgagcaccagccagctggcttctgtccatttcctcctcatcctgtggttgccttccctccctgcctccacagttgtacccctggtgcctctcttcctgctataccccctgctgaggggtgtctttcccctcagcccaggaattttaaaagggatgaagcatctaagacaacagggggaaccgaagtcaacagtcctgagagtggctttctgctccctagtcttggaaggatgggctccccaagaccactggtggcaaagaaacctggggtttggccgggcgtggtggctcacgcctgtaatcccagcactttgggaggccaaggcaggcggatcatgagatcaggagatcgagatcatcctggctaacacggtgaaaccccgtctctactaaaaatacaaaaaattagccgggcacggtggcgggcacctgtagtcccagctactcgggaggctgaggcaggagaatggcatgaacctgggaggcggagcttgcagtgagccgagattgcgccactgcactccagcctgggccacagagcgagactccatctcaaaaaaaaaaaagaaccctggggtttgggcagagagagttggagctgatgtggcgctgagggggctgctccctcccatctgagtctcccatctctgcctgcactcttctggctggcactgtgccagcctgctaacctccctgggcctcagtttcctcctctgtcaaatgagagaggatcttctctgggtgtagaaaaggacgaggtggtgagtgggtctgaaggcctctggtgtcccataaagcgactctcctcaccatctttgccacccattggggtgtccagcacccatggaactctgtctgtgcctctgtcctggagggagacttgacctcctgctcaggaaaggctctccaagcccttgttgtgaaattcctgcctgctgtccggaactcagtcttcccatccgagggacgaaggtttcgggaagagaggtggacaggaaggggtcctcatcagcggtcccaccctcctctccttccttcgccctctccaggccagaaatcagcgaggagctcaaggacctgatcctgaagatgttagacaagaatcccgagacgagaattggggtgccagacatcaaggtcggggaactgggggtcttgggctgggctgggacacagaaaacaggagtcactttccctttctggagggatcaacaccaggatgcatgtgtgttgggtttgagtctgtggactttggacccctccaggtgattctggtaatggcctgacctctccccctctccctgccctcccggccccgacagttgcacccttgggtgaccaagaacggggaggagccccttccttcggaggaggagcactgcagcgtggtggaggtgacagaggaggaggttaagaactcagtcaggctcatccccagctggaccacggtggtaagagagccggggtagatgctcccttgtcctggagggcctgggggacctgagccttgctctgtgcctggctccttggggggacagaggcctgcctggccagccagctgtgatcctgggccactggagccgccattctgctggaggcccatggagagggaggtcttgtggtcgggagaccaggaggcttggtgaggagagtgactgatttaaagaaatagcgggcgtgg

SEQ ID NO: 20464 - DNA, 1021 bp, Homo sapiens
agctgtccagcacggcgggaaccccagcattcatggcccccgaggccatttctgattccggccagagcttcagtgggaaggtgactcgcaggccctgggccaggctggggttcaagtggggggcgtaatagcttgccgcagtggcccagtttctaacctgagggtgccagggtctttgtgtctagggagtgacatatttgcctcttccttggagcctgacaaactccacaactttggccttctcctgttttccagcaaagtggtcccaaatctcccttgcagatatttactgttggttgctctgtgctgggttctggactggactgtggaagaggcagaaacaaagagaaccctgtttcctgccctctggatggtttcgggggaagttgggggtccccgcagatcttgggacatggcaggatttgaactggcccttgaagaatggggaggatctgagcaggacctggagcctagagaataaaccagagaacagaagggctcagggtggggggcagagggtataaagggcctggaagtttgggctttctcctaagtgacaggagcgtaggcaaagttgtctgaacaagaggttacacggtctggcgcagttccctgggcacatggctgtttcacctatggagtgccagccaccccactgccagggaggctgtgggtgagaggcatttggacacgtgtgagtatccaggaaagaggtcaggaggccgggcacagtggctcatgcctgtaatcccagtgctttgggaggccaaggtggatctcttaaggctaggaatttgagatgagcctgggcaacatagcaagaccccatttctacaaaaaaaaaaataaaaacattagacaggtgtggtagtgcacacctgtagtcccagctacttgggaggccgaggtgggaggatcgcttgagtccaggagttgggggctgtagtgagctgtgatggtgtctagcctgagtgactgagcgacaccttgtctcgaagaaagaaagaaagacgttggggat

SEQ ID NO: 20465 - DNA, 1034 bp, Homo sapiens
caggcttccacatgtctgccctatgcggcttttcagggtatttacagagcagatgacatggagtaatgagcacggggctgggtggtccgggaccctcactgccaaggcttgaatgcagcctgcggcttgtccctttgcctgggcggctccctacagaccaatctggggagaggggcagggagtggtgtccctttaagacttggaggctttcaaatgttttgacctctatccaaaacaagaaatatatatttctattgctatccatatctgtaactgaaaccaaaattttacaaagcagcatatatctttactacatgcaatatattctgatatattctacttatttaggaaaaaaaaaaaaaagcagttgccacccactaaattgatttcatgatcctctcttgggtctggatccacggtttgaaacagtgctctaaatggcatctttgcaattgattatggacaattaagtacttagaagaaggaatatcaagccaatcagaaattaagagaaagctgatttgaaattatgattgaaatgggatatgtatgagtatgtgtgctttaaattttttattatgtagcagaaaaagctaatatcttgagttgtagggactcatgtgggcacaggtttcccgggacgtcccgaccacctgaatggccgggtgccctgatttcagctgaatgcccctccccgcatccttctccataggcccgtcatggaagtgccctgtgacaagcccttctcggaggagcaagctcgcctctacctgcgggacgtcatcctgggcctcgagtactgtgagtgcggggcagcttgcccactggggctggggctaggggatctggcaggcggcagagcccaggctgagcagactctgagcagctcccgtcagtcagagctgacctgccaatcagcttcagtgggagtggggcatgcacgtgtggcggggccaaaggcctttttgtggggtggggcgggcggtggactccactgggcatgtgccagatccttcgtcgtgtctggtcctgtg

SEQ ID NO: 20466 - DNA, 1073 bp, Homo sapiens
tgcccaagccaggccctggaagcctgaggggtggggcaggagttgtgcttaggagatagaggacagggctgcctgagagtgagctccctgtccctaggggtatgcaaaggaatgagcttcctaaccctggggatatgcaagcagagactggattcctctgaggggaaagctccagaaaggcttgctgggggaataaggggaagggctaggctcagatatggccacccccaaccccgcttaacacttacctgggccacaccctcagggccagtagcagatgtccagtgtgcctctccggacctcagtccacatgtaccagcctgttctagcccctggtggctgcacagtagtgacatttctgtccctccttccttaggcaatgaaagtcctttccaaaaagaagttactgaagcagtatggctttccacgtatgtatcttctgatcctgtccctgggagctcctagcctggaggcagaggaggagacctcgatcctgagctagttttggctaggaatggggtagagagggagacagcgtgagcagaggcctggggacagaatgtgccctgtgggttgggacaagaccacgggcatgcaagactcttgcttgagactggtttgggggccacggtgaggcccagccacctggaacaggtgtttgagttctcttcctggtcacaggtcgccctcccccgagagggtcccaggctgcccagggaggaccagccaagcagctgctgcccctggagcgggtgtaccaggagattgccatcctgaagaagctggaccacgtgaatgtggtcaaactgatcgaggtagggggtggtggtgagcaggtgggaaccagcacctgagtctcatgggagccgcttctggtgctggggagcccctagcacagacccagggatcttgcccaggtggcagatgtggctgaggcctctgaggacagggccagacttggggtggggctgcaggaaggctttgggggcccagcctggtcagggatgttcccaagttcccatggagggtgaggggctgccccagaggcaagaagtgagcccctcattgcagct

SEQ ID NO: 20467 - DNA, 1032 bp, Homo sapiens
cacacactctggggacccttcgcctcttcctcggtctcccaccgtcagtcctcacagcagccatgggagtcgttttaaacctcacctaaccgaggcactcccctgctcacaacctccccctggctttgggggcctcctgggctctgtccaccaagctctccccacccccaaaccaagcccggagtcccagccaggaaatgactctcctatatgcacagtgcaaacttccatcctcgcctcatcctgaaatcctgctcagtgctcagaagagagctcaggtgccacctcctctaggaagccatccctgaggccagcacaatgagtgagggggctttctctccagatgtaactcctcttgctatcaggtgcctcttatgtggggaagactccactccagccacgtcagcctccctgctgttcttcatactgagcaagcactgtcccctcatggcgtttgcacctgctggtccctgcacctgaaatgctcttccccagataactacactgcctactgccccttccttccttcaggtgtctgctccagtcctgctcccaaaaggccttcctcaactacactgtatcagcagcatctcccagcccctttctcttgatccttcttactcggctgtatttttcttcctatatgtaccacttgacatatcatatctgaatcactggctttcttgtttgttgcttcttgcccccacgagaaattaaactgtatgagagcagagacttggtctttttggttcactgctgtatctccccacacaggcttgcacagagtctggcagacagcaggtgctccgtgactatttgtgcttgcatcccaggcgtccatgtccctggctgctccctagcctgtgaccccccccccaaccttgcccccagtctgaggccacttctgctcctctatccatgacattccgagttcctggaaggccaggtctgggagaactataaccacatttgcatgttggaaatccctccagcagctggtgtggaggatggggtagggtggggtggaggtgt

SEQ ID NO: 20468 - DNA, 1031 bp, Homo sapiens
ccactgcgcctggccaggatggaccccttgaatctaccctccatcttttcttcagtttggttgtatttttcatgtttatctcttgttctgagagatttcattaagttgactttttaaaatcaccactgaggttattttcccctaataatcttttttttttagcaggcactttggagggcaaattattagtttgattttagtgtaaaaactgcctagatagagtcctataaggaatatataaagaactcttacaacccagtaataaaaagacctctgtcaccataggttagttttgcttgttttgaaactttgtatagctggagtaagtcgctgcattcctcttgcctggtggtggtggttttttgtttgtttgtttgtttgtttgtttgttttttgagacagagtcttgctctgttgcccaggctggagtgcagtggagcaatctcggctcactgcagcctctgcctcccgggttcaagtgatttctcgtgcctcagcctcccaagtagctgggactacaggaatgtgccaccacacccagctaatttttatattttgagtagagccggggtttcaccatgttggccaggctggtcttgaactcctggcctccagtgatccacccacctcggcctcccaaagtgctggaatgacaggcgtgagccgctgcgcccggcctgtgtctggcttcttctgctcaacattatgtttgtgagatgcatccatgttattgtgattagtttcctttattcattttcactgttatccagaattccattatatgaatatgccataattttaaagttcacgttactattgttaagtgtttctaaactggaaattactccagacaatactatgagcacacctgtctgtggcttttgatgagcatctgaatgcaggccaaacttggcctgccaaacagtttctgccgttgtttgtaccagttcacactccctgccaaacagtttctgcaatgtttgtaccggttcacactcccacggcagcacatgaaagctttatttgctcca

SEQ ID NO: 20469 - DNA, 1073 bp, Homo sapiens
ttatgggttttattcacattaccaaaatgctattaccacaccttccaaaatcacaataagcaattcttccttagtccaatttctgcagacaacctctggggattgtgaaaccctgaaaggcatgttctgtgtttgtgtttcttcatttttctggagagagggcccacacctttctttacattttcagtaagcgcatcctagaggtgactaatgcccagttgcgaccacatgctctcctaaggccctgtgctcctgtttggagccacaaaagcttttggagggttgtaagctttaaatgtgtcttgcctttgcagccatttgcctacccacagcatcacggcccacccaatggtaaccattcggatcagtgaccggcagaggctcatccagccatatatccataactactcctggctgctctttgctgccctggctctctatagcgcccacctggccagtgcagaggatgtggatggggagaagctggacccccagacgcgcagcagtgccaccaccctgcggagccagtgcatgcagctcgtcggggactgtctgatgaaggctcatcagggaaaaggtgacttcccaatgcacagaaaccaaaaccagccctcagttgctggtgaaaaaaagccttggcaaatgtaaaatactaagcttagtttacaggtggcaacatccacttttccacaaaaggggcttaccctggtgtggaacttaatttttaagttccccgatggattttagagaaatgttggcattgaagttcaacatttaatttctctgaaactaatattaatacctcaaactaattttaaataataattaaaactctttatatctgtggatgcagtctagtatttgaatctaccaaactttgctgaaagaatccagacttcttaacctggagtgtaaatctgcttccacacaagtgtattctagatgagagctgtttacgagtaaaatagtttagcaatatatcgacatgaatctgactcgactaaggagtggtgggaagaaagcaacttgaaagttaaaccttggagacatctaagttccttcagataatggca

SEQ ID NO: 20470 - DNA, 1026 bp, Homo sapiens
tgggattacagatgtgagccaccatgcctggcctatgggaaggtttgatagtaatgaaaattgagaaagccagtctactgaattgcctgacaattttgagggcttatttgatcattatggttgcaaatttaaagtcatactagtcagcttgcttgtgtggtgtttcctccatgacattcagctgttttgatataggtataagatttctcaggcaagtacatggaggaaggaagggacacgggagttagtgtttgctaaggtatgattatgggccatggaatctaagctgagaagggagcagagagaaagcatggcaggagtagtagatagtgaacatgaggcagcgtcctgggctgacgcccactggtattgaagaaaaggctgctgttggagtcctacctgggtgagcaggagagctggggtcagagtagggtgctctggcatcagtgtgtcagagatgatgtcatcacatgataacaaggtccaggaaatgaccatcaaactaagatggctaagggcgtggaagagaagatcactggagatgcagatggcagagaattgagggaaaaaggaatggagacatcattttcatggatgttgaagtcaccaagatggccaggatcatggtagaaaagacagtgaggctggtgccaaagtcatcaatgaagggaggcagaggggtgagcgtgattgtgtggagaggatcaaatgaggtcatttgtgaaaaatacttaacacagtatctggcacccaagtagtggtgggagggatgggtttatattcacaaagaagataaataatctcatctccatgcttctgggtaactctcttgagcccgtcagagggactcacttgctgttttgtgtgttaccttctataggtattatatttgtatttacttaagttcctgtgccgctttgctcagctgactgccacttgctctttttcatgtaagaaatcattattattattaagaaaaagatgttctggcaattaagtgaatcagtgatttcctctgtttctagt

SEQ ID NO: 20471 - DNA, 1015 bp, Homo sapiens
tttctactatataatatattaattattttctttgtttcggtagatgtgggccagtttctggcaagcatgagagcgattttggaatcccttttctcacagtacagtggaaaaaccatagtagaaagattatgtaactcagtgttttcaatggcagctcgtcaactggtaagaaaaactagcagctatttgtaaagaaccggaagggggttgggggtctgcatccccaggcccagcctaaggtggacgctgagtgcttcatccatcttccattaggttatcttcctgctggacttctgcactttagacatcccacactgcgtgctcttgagagagttcagcgtcctcacagaactcctgaagaagctctgtagtggccccgaaggaggactgaggaaggtaactcgagtcagcacttgagccgccccgtgttctctctcaggagtgatgggacacacttagtgaagtggaccacggactgcagataggcacagctgagcagcctctagaaggctcccttgattttatcagtgggcttgccaacaagggtgaatgtcagtccaagtcgatgtggcctggtcagcattagaaaggagacgcagaggccgggcgcagtggctcacgcttgtaatcccagcactttgggaggccgaggcgggcggatcacgaggtcaggagatcgagaccatcctggctaacacggtgaaaccccgtctctactaaaaatacaaaaaaaattagccgggcgtgatggtgggcgcctgtagtcccagctactcgggaggctgaggcaggagaatggcgtgaacccgggaggcggagcttgcagtgagccgagattgcgccactgcactcccgcctgggccacagagcgagactccgtctcaaaaaaaaaaaagaaaggagacgcagaaaaagctgtagagatgaatctcatcattttatagttgatgaagttatataaaaaccatgtaagtgagtgacaaaattgaagtctagaagagaaaatgtatgttga

SEQ ID NO: 20472 - DNA, 1035 bp, Homo sapiens
atgtagtttatgctccaagtggatcagtcacttgggatatttgacagaaaaaagatttctagatcccaccctaagctactgattcaagatctctagggatagggcttaagaacctgcatttttctaagcaccccgagagattctaaagtgatagcacccctgtactaggaaaccaagaactatctctttgggctaaatatgggaaccagagagctggaggagattttgtggtagactagtccaaaccacatctttgaggtatctaatgatgtggacttgaaggtaacttttcttttgtggctgataacttatcttgtatcttttgactgaacttagtgtctttaaatctcttacatttttgcgggtgccttactgttttgagttgctgttagagccatgatttcattcattcccagctgcctggcatgataggccatcagcaggtgtctcccccaattcactgatggggacctcagagcacctgtagggtgcctaggttatcatttgccaaggttgctcttaggctgaccactgtttagatctagtattaatttagatctagggtaacgttgactttataagcctcaactttgtttttaattaaaaaactatgctctattttttgctgtcacattaattttctcttactttctgctttctggcttatttccagactcttctgcccatctctgagtcttccttaaaaaactcacttcagtctcatcagtatgtgttctcggccccagttagccatggctcattcgaatctccatccttatttctgcatttcccataccttccctttcttctggagctcatctacattctacctgtttctcagatccctgaagcctgaactgagttctccccctcaccagtctttcttctgttgttacatcatcagtgccattgggcagaaaacttcagcgttctcacctggttctcataggagtcgattctgccccgcacgtgaggagtgggtaggtgctagagccaggactgaaaccggggctgtttgactcagagccttgtcct

SEQ ID NO: 20473 - DNA, 1887 bp, Homo sapiens
ttcctatttcatggaggagagaaataagaacaaggggcaggagttttaagaaagagagagggttacttggaaaggaggcttaaagactcctgaagtattgcatggtgagagcgatgtgtgagtgagtgtatcagcaggagggcagaaggcattgttgaggaagggtttgaaatctggggagagagggcagttgctaagtgaggtaagtcttgtaggatgtaagggaagggggtcagggacaccagagggtgaggttagaaaggagaaggggaacactacagggccgatgtgcttttcactgtactgggctctgttcaaatgttacttaatccaggcagcagcctgtgaggttgacaatattcgctgcatctttcagatcaagaagctgtggcttatggaggtaaagaaacttaggtaaggtcacatagcagagtagtgatagagcagatttaaaccaaatctctactgtcccaggttccccagatggcccaacatgggcaagagacaagctagattacaattaaaggttagtgaaaacagggctgtgaaacagataaaccaagttagctcttgtgtccaaagagtgttgaaaaagcccaggcagacgcggtggcccacacctgtaatcccagcactttgggaggctgaggtgggcggatcacctgaggtcaggagtttgagaccagcctggccaacatggagaaaccccatctctactgaaaatacaaaaaaaaaaaaaaaaaaaatcagcttggcgttgtggcaggcgcctgtagtcccagctactcaggaggctgaggcaggagaatcacttgaacccgggaggcggaggttgcactgacctgaggtcgcaccactgcactccggcctgggcgacaagaaagaaactgtgtctcaaaaagggaaaagaaaaagcccagctaaagtcgaggtgctattctaagccaattctttatattctggcactttgcaaccagttgaaaaactttacagtggctgcttccttctgaaattatttagtggggaggagacttactacataattactctcttggattacttaatggttactctcttggaatatagattggaatacaaataagatgtgtacttgcatacatacatcctacaaagcgcagtgagttcctgttctaaatttatctttggttgatacatatggactcttctctctgcaaccaaaaataaataaatcaccggtctcgagaattttaaataaaagaaacttgaaactgccctcgtttacttgaaacagccctgattttcttgcatctcttatcttgtaggcctttgcccagtttgatgctgagggtgatgggacagttgatgccgagaacatgttggaggccctcaagaattccagtggagctaatcttcagggggagctgagccacatcatcagacaactacaggcctgctctctggttccaggtgaggcttccatctaggtgctgtcttagaaccaaagtgaactttgctatactactgattgaaattaggcaaaattgtggccacatgcagtaaactcccccaacagtgttcattaggctcccgatctgaattagcatttcctttagtcatctctttcatccccagtacggtggtggctaagcagttctaccgttttataacatgaacccttgtcacgtggccgctttccttattggatctcttcatttcactacagaagccctccttggccttcactgttcattctcttagcatcctgcattcttttttgcaacatattaccattgtaattgatcaattcattattcaattattagtaaagtgtttgtcttcactcatgtactatagttccacgagggcagggaccttctgtcttatttctgctctgtcctcacattt

SEQ ID NO: 20474 - DNA, 1044 bp, Homo sapiens
cagacttaggaagccccccgaccacgcggacgctcgctgggctgcactcagcaggctgcttgagtgggagctgactccaacatgccctgccctggctgggactaggcatgcttccagcccttcccgtgctctccctgctgtcaacacttgcgtacaaacctgcctagctgttgtaagttttcatcagtagcttaagtactagtagcaaaaacttaaattcattcagaaagttgccacttctgaatgagtagagcaggaaaagtaaactttactgaaacataatttgctgcaacagtcaacattgttatgctgaatgtgctctcaactgccctttgctcatcgccagatttattatccagtgtattcctaacagtcttttgttgtcgttgtttttaaaacaaaggtacggaccatgtgctatatataaatcgaatggcttaaactaatttgctatgatcctctaacaccgaaatttcccataaacttaagtgcctacacttaggacttttgaactttcagtcatctttttcgtggtgtctcactgaacgatgtgttagaacatgtgttccatttggagttttgggcctgtgcacggtcaaccccaattaccaatttagttgaggctggattcgattgctcagttcacctgccacgttctctccaaggagtggggtctacgtgacctttagtcctctacctcagagccccgagtcatttctgaccaccccgttctgtgtcctcactcttgtccctgaatgggtccctgtgtggatctcagtgtgtgtgtggtttctccactcctccccgctcatgtcccacacctgccatattgaaccgtttctgcactaatcttctccacgggcacggagtggagggaacgtcttgggaaaggggagagcttgacctccatctaggtttcttttatctggagaaaaagaacacttttgaactatgtaatgcttcaccctgaaaggcaagctaacgctaacttcccaggtgacagtagcaggaacaaggaagggtaatgtttccatgacagacact

SEQ ID NO: 20475 - DNA, 1047 bp, Homo sapiens
aaaaccatttccccttccagtagcttggtgtccatcccagagcattcatgaagtcttcccgcctgggctgactgatgaggcagagcctctcagcgtaggaagctggctgcttaatgagctggctttactctagggtaagtggctgtggacttttctgcacagtgttttcataaagataataggatcctcttgccctgaagtctttttttctttttacgctaagctgtatttttagtgagctaccccttttaaaaaggtgaaatctttcttaacagggttcaaagatgagagctgaaaaatcgtggccttaacaactgaaagctttacagtgttcatgctactgaggtgtcaggagtgcagctgggccgcttgacacctcgtagcagccgtctcattctctcgtcttgctgcgtcctgtctgtggagtcctcagtcactctgctgttggagagtgctggaggaaatgcacttttactgtgctgcactttttatagagctgcattgtcggtgattccaatttaaaaatccatattcaaaaataccctcacacatccctgcatcagtgattctaatgatcagctttgactggacctcagctcacacgaatctccaaggaaaaactctacagagcatcttttagagcaagagattcatacaggccaagtgatgagagggggagtcaccaaggcttcagccccaagggcatctccagcctcaggccggcaggtcctatgtccttgacacaaatgcttcttgctgaaatcctccctagtgatgctgcgagtgctgttggtcccagttctgtgtagcttgccctgccccatgaagggccaccagccaagggccctggccacgtgtgcgccaccttactttggaagtctctggcttgtgtgctggatgaggctgccagaacttgttgggcgttcatcgctgttagtacatatattaaccgtgaggtgttaaacttttcttttgaaggtttggccagtttctaaaaaatgcacatttaaagagaagcatctaccacggctttaaaacaaaacaact

SEQ ID NO: 20476 - DNA, 1031 bp, Homo sapiens
atcacagtgtcttctgaccagtctgtgaaccccttcgaagatgtccccgtggtaaatgggacttcatttgatgagaacagctttgcagccagactcatccagcgcggcagccacacagacgcacctgacacggcgacaggtaaagcacgtgcctcccgaaggggcgacgctggggtctgcaggcgccaggaaatggcatgtaaatgccttcaccccaaatttagaaactgaacggcatactatgaggataattattttgtacttaattttatatacagtaaaagcctgggttgtcatttttaaaaatcctgtgcttcaaacaattgagcagacatcaagtccctgaaactgaaacttccatttatttaatgcggcgactcgcagactctttggactcaagaattcctttgaccgtcttaaaaattgtaccccagagagcttttctttaggtgggttataacttcagtatttaccatattagactacactttgagaacactgttttaatgtatttccttgatctgactaaataaaataacagggatattttaaggagagggatttggtgtaattcagtattgagtactggcaatgcataaaacatgggtaggtgtcactcacacaggaagacttgaccaaaaaaaaaaaaaaaaaaaaagatggatattaaaacagccctttccctaaagaagttaataattaaaggttggccaggcgtggtggctcacacctgtaatcccagcattttgggaggccgaggtgggtggatcacctgaggtcaggagtttgagaccagggtggcccctttagagactgaaacctgtcgctactgaaaaaacaaattatcagctgggcatggtggcgggctcctgtcatcccagctactcaggaaaggccggagaatcgcttgaaactgggaggcagaggttgcagtgagccaagatcgtgccatcgcactccagcctgggtgaggagactgaaactccgtctcaaaaaaaaaaaaaaaaaaaaaatatatatatatatatatg

SEQ ID NO: 20477 - DNA, 1032 bp, Homo sapiens
tagttaggtacaagctgtggtcaggaaataagaaagaaagagaaagagagagagaaattgtgtagggagggatcctggaaacccttctgagagatgaccgaaggaggcctttgaagagtagaagcctagtgttcttttttttttttttaagacggagttttgctcttaatccccaggctggagtgcaatgatgtggtctcagctcaccgcaacctccaccccctgggttcaagcgaatctcgtgcctcagcctcccaagtagctgggattacaggcgtgcaccaccacgcccggctagttttgtatttgtagtagagacggggtttttccctgttggtcaggctggtctccaactcccgaccccaggtgatccgcccacctcggcctcccaaagtgttgggacgacaggcatgagccactgcgcctggcccagcctagtattcttaaacagtgaaaggatactgaggtgaggaggcaggacaagtggtaacaggtaaccaaaaattgagcagagccttttgaattcgtctgtaactccatgatctcaatgagtttccacttacagatgccccaagaggttccttcagacacatctagttatcgctctcctttgtctgcagtcattttctgctccctcttgaagaagcactggccagaatactttgccctgacactgtttcttctattatttcttttcaaggagatctctttgctgccactttcctcattaagaatggggcctttgtcaacgctgctacactgggtgcccaggagacaccactgcaccttgtggccttgtacagttcaaagaaacactcagcagatgtgatgtctgagatggcgcagattgcagaggcccttctgcaggctggtgccaaccccaacatgcaggacagcaaggggaggtaagctggggagcagacactgtgcccttagcactgttctcagaagatatcttacagtagcatgtaattggcatacggggagttcatgttctttagtttggcattattcagtcttattttcattaaa

SEQ ID NO: 20478 - DNA, 1062 bp, Homo sapiens
tcactgcccactgcgaaagtttagtcagatgttgcccagactgctgagtcaccttttttttgagacggagtctccctctgtcacccaggctggagtgcagtggctcaatctctgctcactgcaacctccgtctcccgggttcaagcgattctcctgcctcagcccgagtagctgggattacaggtgcacgccaccaggcccggctaattttttttgtatttttagtagacatggggtttcagcatgttggtcaggctggtctcgaactcctgacttcgtgatctgcccgcctcagcctcccaaagtgctgggattacaggcgtgagccactgcacccggccgagtccccatttttaatgactgtgtaatattcctttaagttgggtatactgtcatttactttattagcctcaaattttagggatcccttgagaaagtctaagcatgtcattctatgctttttcagttgttctctctttctttaaccagatgctaatcctgaggtgacgatgacaatgcttcgctggatctatacagatgagctggagttcagagaggatgatgtgttcctgactgaactgatgaaactagcaaatcggtttcagctacagctcctcagggagaggcaagtcacagcagatatattcaagcacctcagatggtggtggctgagctttaattatgccgagctctgggaaaacagcttcttctgctaatgtaaataacttggcaaggtgttcctttaaaggcgatgctggggacagatgttacctcccttgctttgtgttatcttgtagctaaattttgctaaagcttttgctattctcttttctttcactggtctgttacctgaaattacataatcgtataaactgaaaaattaaatatgaaataatataatccaatgtccaaactttcagctttccttccctttctgtttcccttgacattttactctattttctgatatatcaagttgaatgaaatccttagtcatagtctctttgttggaaacaatgagtgcctaaatgaatatgtgaaaatattgtccaaataagtgtc

SEQ ID NO: 20479 - DNA, 1086 bp, Homo sapiens
tggtggtggtgttttgagtgctttattatgtattaactccacacagttagcaaggattggagccgggatttgaaccctaggtagtttggctgcagaattcgtgccattaaccacagtgccgtgctgcctgtcagtttggtttctttttcctccaaattgaggtgtaatggaagtacagtaaactgcccacattaaaagtgtgcaattggataagttttgacatacgaatacacctgtgaagccactgccacaatcaacataaacatttctatccttgctgggtgtggtggctcacgcctgtaattccagcactttgggaggccaagttgggtggatcacttgaggtcaggagtttgagaccagcctagctaacatggcgaaaccccatctctactaaaaatacaaaaaattagccgagcatggtggcacatgcctataatctcagctacttgggaggctgaggtaggagattgcttgaacctgggaggcagaggttgcagtgagccgagatcgcgtcattgcactcccgtctggacgacagagtgagactctgtctcaagaaaaaaaaaaaaaactaacaaaaaacatttccatccttaaagctttcctcatgtctctttgcaatccatcccttttgccatccacttctgcagctaaatgctgatctgctttcagtcattatagattagtttgcagtttctaggcttttatagaagtgcaatcatagagcatagagtcccttttgtctggcttctttcacttcttttagcatatagattttgacattcaccccacaccttagtatgttgctttgtgttttaattattcattccttgttattgaatagtattccattgtatgaaaataccacactttttttttgcatttacctgttgatggacatttgtgttctttctgggttttattagcaagaaaattacctgtattcagttgtgtaaggcctttgtgtagacatgtttttatatctcttgagtaaatatctaggagggactgtttaatgttaagaaactaccaaactgtcttgcaaaatggatgtaccattttacattcccattagccgtggat

SEQ ID NO: 20480 - DNA, 1032 bp, Homo sapiens
attgagtggtaagcgcttttcaaggtgttagggatacaaagtgtacaaaattaaattcttgcttgcataaacttacatcttagaatgtaagaaaaactccacatttttctttttgatgttcttgtctaattgatatttctttctttcttttttttttttttttaaacaggatttcactctgtcacccaggctagagtgccatggtgcaatcacggctcactgcagccttgacctcctggcctcaggtgatcctcccacctcagcctcctgagtatctgggaccacaggtgtgtgctaccatgcctgtctcattttttatagacatgagattttgccatgttgcccaggctggtcttgaactcctggactcaaggaatcctcctgccttggtctcccaaaggcctgttgggattacaggtgtgaggcactgcacacagccttgattatgagaattttagcatatgttgatgaaatacaacaggcattatatacactttaaaggtgtttggatatatgaatcataccttgttcaaaaaagtgaaatgtttgtacctgatatgatccactgatgaaggcacaatcacttctgtaggattctttttttgtttttgagatagggtctcactgtgtcgcccaggctggaatgcagtgacactatcgcggctcactgaagccttgaactcctgggctcaagagatcctcccacctcagcctctcaagtagctgggagtacaggtgttcaccaccatccctggctaattgtttaatagagatgggctcttgctgtgttgccaaggctggtctcaaactcctgggctcagatgatcctcctgccttggctacccaaagtgttggaatttcaggcatgagccactctgcctggctcttgtataggatttttgccattaatgcataacctcaatctactcatgagaaaacatcagacccaaattgagggacatttctcaaaataatcagccagagtgtttctcaaacatgtcaaggttatgaaaaacaagaatggtttaggaa

SEQ ID NO: 20481 - DNA, 1026 bp, Homo sapiens
atttaattcctggattaattaatgactaatcttggtgttctgatactggagctgaaatctggcatcatggtgttaatgggatgcgttctggcttaagaccacaaatcttgagtctgtcttctgctaattgtgtgattttaggcaactcacttaagtgagtttcactgttagtatattactttttcaatatagttagaatctgagatgatgaatgtgaagaacttaactgccataggagacataaaaaatattaattcccactttctgtcttattgcaaaatattacaggaaagtgtacatttccttttactccatagaatgatgttgacactaatctagcaaaaagttactagggcattaaaatcttttactatacagaattttttgtttgtaagtataggtgttttagtttcatgtggctgctgtaacagatttccacaagctagatggcttaaaacaacagaaacgtgttcttatgattctggatgacagaagtctgattgaaatcagtatcactgggctcaaatcaaggtctcagtagggccctattccctctggaggctctaggagaaaatctttttcctgattcttccacctgcaagaggctgctgacattccttggctattggctgcatcattccagtcttcaaggacagcatcttcaaatttctctctgttctgtgttcacaagacctactctgagtgggtcagactccctctgtgccttccttttttttttttttttttttttttttttttgagatggagtctcactctgtggtccaggctggagtgcagtggtgcgatcttggctcattgcaacctccgcctcccaggttcaggcgattctcctgcctcagcctcccgagtagctgggactacaggcgcctgccaccacacctggctaatttttgtatttttagtagagatggggtttcaccgtgttagccgggatggtcttgatctcctgacctcgtgatctgcctaccttggcttctcaaagtgctgggattacaggcgtgagcc

SEQ ID NO: 20482 - DNA, 1046 bp, Homo sapiens
acacactcccctttgcttttatctcttacctgccagaatgttctcaaatgatttagttcaaatactgaaatacttaatgagcaattacttgatttttaatgatgacttcgaaggagtcatcactaggtgctttgtcctttttgtattctagttgcacccacctcttggattggatatagcaataacatttattggccgttgtgagctcttgatcccagtcattacccctgagaactaaaaatagatggttcttaattcaacttactgaaaatttccccaaacaatagcaaatctgacttttccctcttcagttgcctggtattaaggttggataaatgaagcatgcacagctacaggctttctacttaacttctgggtttgctattacaaatcctatttactctcatacccttctccttagtccttcatatttctctgcctctattcttctatactgcagatttttctcacctattgtacaaagaaattgcgatgtatattttcatgtaatttgattttggaattctgtcaccttatgtagtgagttcttccaaaatataattttttttcaataattgtcaagttgttggcttttattgtattgaatgaaggctataatactgagtgccagagaagtggtttaggaaaatctcaggttgattccttatgcaaatgaacttttaatacttgaaaatcacatggccatggcagtatatgtatttggttctatctagattcttctgtgaatctaaaagcattacaggggtaaatgctttgctatttgacgtatagatcccgtcactaacaatagtacacttggatgtgattaatgtttgagcttcaatatatttcatatcatacagttttctaaaacaacttcagcaaatggtaaaatgaacatgtgcagtgttaaaggcaggccttaggctccttcatgtttgttgtgaggttgtgtgtgggaagtagtctttggcttataagggatagaacttgagacagtagcagatgggacatggtgtttgattgtgagaatcagtgagaattcg

SEQ ID NO: 20483 - DNA, 1033 bp, Homo sapiens
acatgcctgtaatcccaacactttgggaggccgaggtggcagcgttgcttgagcctgtagttcaagaccagcctgggtgacgtggtgaggaccctgtttctacaaaaaaaaattaaaaattatctgggcatggtggtgtgtgcctgtggtcccagctgcttgggaggctgaggtgtgaagatcacttgagcccagaggctgcagtgagccatgttcatgccactacactccagcatgagggacagagtgggaccctgtctcaaataaataacaaacaaaaacttcaacctagtgtttttctaactttttgaacaggaaactcagccatttattggctatgtgaacttgtctcagctttagaggggagactccttcataatgatgattgtgagcattcaggaaatgagtttgtaaagcgcttagcatgctgcttggcacatcagaactcgatgaggcggtgctgctttttatgtagatgtgttcttgacttacagtctaactggatgatacgaggccaacagatttgaaacacttagaaactgtggttgggatggagggtcatttgtggcaggctttgtggagaaaatgggtttgaagggagctatagtgagttagatagaatttagcaagttgggaagtgtggcaatcttaagttgtttctctgaacatcctcaaatgtttgtaaatttccaaatcacttggcttttaaatcttctcttatggattctagatttaatataagttgaaagacatttgaagtattgaaaaatctaaattagcgctgtccagtagaacgttctgtgatgataaggatacagctgtgctgttcagcttgccagtcactagccacatgtgactactgagcacgtgaaatgtgcttagcatgactcaggaactaaattgtaaattgtacttaatggcaattaatttacatttaaaattaaatatacccacgtggctgtgagctaccataatagatagaaacaaagtgagctcagaatgaaattaaggatttgttgtcaaataaatctaa

SEQ ID NO: 20484 - DNA, 1044 bp, Homo sapiens
cacctaatttttaaatgtcattgccattacacaatttttttgtattaaggctttataccatggaaacctgtttccttaggccgggcgcggtggcgcatgcatgtaagcccagcactttgggaggccaagatgggtggatcacttgaggtcaggagttcaagaccagcctggccaacatggtgaaaccccgtctccactaaaaatacaaaaagtagctgggcgtagtggtaggcgcctgtaattccagctacttgggaggctgacgcaggagaatcacttgaatcccggaggcagaggctgcaggaggcagaggcagtgagccaagagagtgagactccatctcaaacaaaaaaaaaaaaatgtaaaagatacctgtttccccaaggccggctttgtagactgaatagtcagcagcctcacctgtctcttcttgaaggctggcttttctcacggctttatcaccatgcactttctgagtattttttgtgttttcagtcatgtgataggacatagacgtgaacgaaaactcactataaacacttgaaaaatgtattgtctgtctgggctgaactgaaagtgaaatcaatttaagattatttgaaaatacatatttatctacattcaagtccatgacccacacatattttctcaaaatgcacggattactgtgggtgccacttggcccaggctttatctcacattttgttagtgtttataccttgtcctatatagagattattagtacccttatgttctaattcagctgtggggtaggaagaatagagaggaaaaggaaacaaattctccccttgccacagatgagaaccatggctactttgtgtaccactggacaggaggactccgttctgcaccaaggctagagggactgtattggttctttattgctacgtaacaaattactaaaacttagtggcttgaaacaacatttattatctcatgatttccatggccatgggatctgggtgtggcttggttgactccgggtctctcataaggctgtggtcaaggtgttgactcaactgg

SEQ ID NO: 20485 - DNA, 1050 bp, Homo sapiens
aattgttggagtccagacaccaggtttaattctttgtctttaaaccagctgacagcatatgtcctgggcaactgctgagcactccccaccaatccaaacacaagtctttcaaattccatcagccaaaaaacattaaatattccacccagaacaaaacaacctgtccagtgcaaataaaacagctaaaagtaattgtgccccatcatattccaaatactcggtcttttaaaaagccaccaaagaaacacaaaactacattgggccaagaataccaggcatatagcagcatgaatttcatggtgttcacctgcctgttccgtttatcctgagtctgaagggcagcaggattattatagcaaaaatagctgctgaagccaaggaaacacatcaataacagcatcaaaagtcatagccaggtgactggaggccacagaagggccagcagcacccatgctttctcatccttctcctccattgcgcccgtgggaggctgagaggcaaaaggggtgacaactccaggacctggcagaaaagcagtgcccacggagcacagccaagtcagtgatcacatgactatgtgattctgactatcatagaataatagtgaactgtggcggatagaatgaatggacaagagacagctacaacaggactatagattaatagaacaatgttgagcaaattgcagacggcagcatacagcacattatttacataaaataaatatggcagtatggtaggatttgatccttgtaagatttttataatttaactcaaaaacagtaatggaggcctcatggaaaaaaattgaactaggcctgggtttttaaacactttcaaatgtgaaactgctggttacatatctctctctctcttttttttttgtttgaaaacagagtctgactctgttgctcactgcaacctccgccgcctgggttcaagtgattctcctacctcagcttcctgagtagctgggattatgggcacctgtcaccatgcctggctaatttttgtagtttttagtagagatgggatttcaccatctcggcc

SEQ ID NO: 20486 - DNA, 1035 bp, Homo sapiens
gtgaagatagctttgaatttggagtggcgtatggaaaagtgcctgggagaaacttggcggcagttgatttagaaacaattaggctttggcttgtgttaaaaatctgtggatcatttagattttcgattgttgctgtccccatgtctcctgttgccccatactatagatggtgttaaattgttagacacttccatgaatgtacttcatacatgtaaaacttcgtagatgcatgactcatggctctgggtggtctagctaaactagtcttttacgtcatacgtgtaaaactttgtagatgcaataactcatggctctgggtagtctagctaagctagtctttccactcaaagagcacgatacttaagctttctcctggtgagtcatgaattgtcatcagggaatttctcactgtttggcttaattcgattaggaactgctactggtgatagtttagtccttatttagttttagtctaagagaaccttactgacgttactataaatctaaaaaaaaaaagcatacctttaaaaaagcctaatggcaatggactagtcaggatagtaagaaaaagttatactggaaagagagagatggtttatgaattggttacaaaaaatacatcagtattattttgaagacaaccctgatttcagtcatggttgaaatccttaaccaaccacaaaaatgtcttacattttaaatatattaaagtccttaaattatggaaatagtgtcttctaagaagttgtttaatagtggaaagaagagtctcagtctcttttttttttttgagacagagtctcattcacccaggctggagtgcagtggtgccatctcagctcactgcaacctctacctcctgggatcaagcgatcctcctgcctcagcctccccagtagttgagaccacagacacatgccaccatgcccggctaattttttttttgagacagaatctcgctctgtcacccaggctggagtgcaatggtgcgatctctgctcactgcaacctccgcctcccaggttcaagcagttc

SEQ ID NO: 20487 - DNA, 1081 bp, Homo sapiens
ccgtaagtttttttcttctcttcttttaaaatgatggctgagatacacacattctttacattacttttgatgtgaacgaaggtcatttcagtagacttgcacatttagagtatgccagcaacttactcaatattgcgataggtggaatttacggtctggcgtctgaattgtagcttatcctcaaccatcaaaattcctacccaaatttcttgtgttccaaacttaagaattgttgtgtttcattgccaataacatggctttttcctaaagtgatacatatttttaagtaattcatttcttgggcaaatatttactgccagagactgtcacaggtcctggggctatatcagtaaataaacaaaaacccttgttcttatagagcttgctttgtagttagggtaggggagagaagaattaatagaaagtgtagagtgctgtgtggaaactagaacagggaaagaggataaaataaggagtgtgtaagggggtggggtttcattaaaaatagggtgacagtggaccgaggaactcaggtgaatgagtgaatcatgcagaggttaggtgaggcaagcacaagggccctgaaatggggctgacctgaacgctggagggaggtggcagagcggttagctgaaggttggagagagatgctggttaaagcccctgaacgctggagggaggtggcacagcacttagctgaaggttggagagagatgctggttaaagcccctgcggtggcagagcggttagctgaaggttggagagagatgctggttaattctgaaggaccctataggccatcacacaggccattgctctgagtgagaatgggaagctgttggtatagtgacatgatgtgactcacatttttccaggattacttctgcctgctgggttgagagtagatacaatagggaaggtattttccatagtaccccagcacatgcatttttattaaacatttgtggctgaaatgaaagcttcaccaacaataaccctattttattttttgtttctgttaggaaaaatgagtgctggttatgttccactagatctatttcatgactgtgtgacttacggt

SEQ ID NO: 20488 - DNA, 1028 bp, Homo sapiens
ctgtctcattttgtaagttatatactgtatttcgttatgtctaagataccgttggtggttgtgtgcttcgttattttgtataccattaatacagttaaatgctgtcaaagaaactatgacgtaccattgattgaaatatgcatgctgatttcagatagacaaaaatgtgaaaaaggtacatcttagaatagattaaacatggtagtttgtagttctatgggtattataaagctatagctttaatatatttaaatctattatgtttatcaaatagttttttcaggagtggttgtttgagtgctcttatgttcaaaaatgtctgttagtggctttcacaagcaacgtgatgttttggctggttacagaatttttgggttacgtttccctttctcttaatacccagcagacactattccattatcttctggcatctagggttactctagagaagtctggggccagcctgactgtttttttccctttgtaggtgacctacttctgcctgagtattgctagaattctttctttatccttgaagttcagtaacttcatcaggatataactcggtcttggtgtgattctcttacattttcctgttaaatggtaagccattcaaactgcagattcaggaatattttcttatacaccttttaatatgcattcatttttatttttctttactcaagaaacatcagttttatgattgtttatcttcatttcctgtcttccatttcattacttttctaaatgcttcctttgttcttttctgctgtgctcgatgtgattttcttgagattttgtttgatatcatgtttgttttcatcagtatcaggttgactacttcctatatatgatggggttttcattttgccagtggcttcagtacttcattcaattttatatatttatgtctgtgagttgctctttcaacttgtctcatttatttcctcttttaaaaaaaacttttacttaacagtaaaaacaggtaaaaccacctgtaatcccagcactttgggatgctgaggcgg

SEQ ID NO: 20489 - DNA, 1026 bp, Homo sapiens
tgtatagatgagactgcagtaactcatctactgtgaaggaccatacaaaacaagtgtattagctatctaatacatatttaggattatttcggtataagtctggataaggagcaacaaagggtgtggaggggagtctgtgtggtttttacaggtaaggatttaggcttttagtctgagtgaggcattcatggttattgttggttagtactaacatttgatgtttatttaattagtgtaaaaggctttcagaaggtagaaagtatgagttaaaattggtcttcagattactggttgtaaatcagactgtattttaaggttagtcatttttataaagaggaagttgtttagcaattctgaatcctatattgttgcaatatcaatagcagatgctagaatcctattagtaatcccaaggtaaaatgaattctaaaagtgcaatcttgaattattcaacacttggtatccaaattatatgaaatataatcatccattttatgattttgaatagaactgtaggttgttttcttaaataagagttgttcttcctccgccttctcattttgagtccctggaatctgttctatttttacttggggatctacatactaaagctgtctctgatttcatgctctgaagatcaacaagagaccttcccttgtaagatgagaattgtgtagtaggtgactattagaagagtaaacaagtcttaagtctgtaaacattttttcagtaaatgcaatggagtaccagatatctctcgttactatgactaaagaaagttcaatggtaaattcagtagctgtttatttgccttgataagtaattgctagaagtaatagtaattgtttttatagtgttaccgaaggtttatttactgtatgtgtgatttttaaagttttaaagggatcaatgaaagttatgtatagggaatatttgtaagttactggaaataagccaggaattgaatttttaaaagtgcctttcagagtaaattatattttcattttctttatagaatgaaagtgg

SEQ ID NO: 20490 - DNA, 1049 bp, Homo sapiens
ggaaaactatctggaaaggttgacgtttgtggaagaccttaaaaatgctggggtaggccaggtgcagtgactcacacctgtaatcccagcactttgggaggccaaggcaggagaatctcttgaacccagaaggcagaggttgcagtgagctgagatcacgccactgcattccagcctgggtgactgagtgagactctgtctcaaaaaaaaaaaaaaaaaaaaaaatttgaccgggcacggtggctcacgcctgtattcccagcactttgggaggccgaggcaggtggatcacgaggtcaggagatcgagaccatcctggccaacacagtgaaacccgtctctactaaaaatacaaaaattagccgggtgtggtggcacgtgcctgtagtgccagctactcgggaggctgaggcaagagaatcgcttgaacccaggtgttcaagaacctcttgaaccgaggttgcagtgagccaagatcgccactacactccagcctggtgacagaacaagactctgtctaaaaaaaaaaaaatgctggggtgtgacattatatgtgtgtgtgtgtgtgtgtgtgtatatatatatatatcaacgaaactctatatatatatggggtttcgttgatcgacactagtttatattagttggtaatacaatatagctacttcaccacaatattatacacattcttcccccttcttacatatttttcttttccatttacttgtttaagcaagtgacacttgttgagacaccttcagtgtctcatcaaggtccttatttttctttcaaagtttttgttgttgttgttgttgttttcgagatggagtctcactctgtcgcccaggctggagtgcagtggcgtgatctcggctcaccgcagcctccgcctcctgggttcaagcaattctcctgcctcaacctcctgggtacgtgggactacaggcgcccgccaccacacctggctaattttttgtatttttagtagagacggggtttcactgtgttggccaggatggtctcgatctcctgacctcgtgatccgtccg

SEQ ID NO: 20491 - DNA, 1010 bp, Homo sapiens
agtagtaaatgaattttttttttcttttttttttttgagatggagtttcactcttgttgcccaggctggagtgtagtggcacgatctcagcccaccgcaacctcggcctcccaggttcaagcgattctcccgcctcagcctcagaagtagctgggactacaggcgtgtgccaccacaaccggctaatttttgtatttttagtagaaatgttgtttcaccatgctggccatggctagtcttaaactcctgacctcaggtgatacacccgcctcggcctcccaaagtgctgggattataggcttgagccatcgctcccagccagtaaatgaatttctaaggaaatagtctggcaggccgggcttagtgactcatgcctgtaatcccagagtgactcacgcctgtaatcccagaactttgggaggccgaggcaggtggatcacctgaggtcaggagtttgagataagccatggccaacatggtgaaaccccatttctactaagaatacaaaaattagctggtcgtggttgcacatgcctgtagtcccagttgcttgtgaggcaaatcacatcaaatctttgttttgttttgagacagggtcttgctctgttgtccggactagagtgcagtggcaacatcaaggcccgctgcaccctccacttcctcggctcaagcaatcctcctccctccctccctatagctgggactataggcatgcaccaccacacctggctaatttttccttttgataaagtcttgctctgtcacccaggctggagtgcagggatgtgatgatggcctactgcagcctcaatctcccagacccaagtgaacctcccaccttatctgcctccgtagctgggactacaggcacgcgccaccatgctcagcaaattaaaaaaaatttttttttggtagagacagggttttgccacgttgcccaggctggtcttgaactactgggttcaagcaatcctcccaccttgaaccatgtgtcaaatctttgccccagc

SEQ ID NO: 20492 - DNA, 1029 bp, Homo sapiens
cttatctgcatgggataaatactttccaagacctccaggggatgcctgaaaccactgatagtcctgaaccttgtgctttctcctatatatgcatacctatgataggatttaatttatgttagtctaacaacaataataacacagagcaatgataacaatatgccggcattactactcttgcactctggggccattattaagtaaaataagggttacttgaaaccaggcactgctaagtgataggcaggagggacagtgtgagatttcatcatgctacttagaacaacacaaaatttacaacttaggaattgtttattttttctgttattttccatttaatattttcagactgggcttgaccacaagtaattgaaaatgccgatggggcaggggtggggggactataaagtatatggattgcaccactgtcgatttcttgggtttgatattgtgctagagttatacagggtgttagcatttgggagaaactgggtaaaggttacaggaaacctttctgtacagttcccccttgtcctatgggactgtatttcagaataagaagtttttaaaaaaagtcacctgtaaccatgcattattatcaatcctttttcaaataaagaacttaatatttgtagttataaatacaactacatggttgctctattaacatgttcaaggaacaggaagttgaaatagagaaacctgtagtttaagacagaaattccgtcttaattttatttttttgttattatttttgagacaaagtcttgctgtgttgctcaggctggtcttgaactcctggactcaagcaatcctcttggcttggcctcccagagtgctgggattacaggcatgagccaccacgcacagctaccatcctaattttaaatagcagtcttcatttaaacttgtgtggttgcttggaaaatggaataaaggatcagcataaaagtttatttattgagcccttatatgccgttgtattgagatgctgcgggaacgcaaaggtaattgatgtgatatccctac

SEQ ID NO: 20493 - DNA, 1097 bp, Homo sapiens
aggtgatccacccacctcggcctcccaaagtgctggaattacaagtgtgagccaccaccacctttcacccagactggagcgcagtgacataatctcagttcactgcaacctccgcctcccaggttcaagcgattctgctgccccctgcggcccccagtagctgagattacaggcatgtactaccacgccaggctaatttttgtataaaatttccaaaaacttaaaacaacaatggctacatttattgaacctctagtctgtcaatccttaaggatttaaattaattacttggtagaatatatcgggtatgttttgttgataacataatgaagaatctggttactttcagaattgaacaaaatggttccttgggttgtggagtgtctcagtcttggcgctactgacgttttgggttgagtattgttgtagggcctattctgtgcattatagatagaatgttcagcagcattcgtggccttcacccactagatgccagtagcatactcccttagttgtgacaaccataaatgtctccattgccaaatgtctcctgagggacaaaatcatcccagattgaagattactgagttaaaatgtttcagagaagaccattatggctaattgttaagcaaataaagacacctaacagattcatgaaatcagataggttgtgtatttctctgtggatattattagactatgacttactcctttgcaaattgagcggtggcaattcaagttttgcagtgccttatgttaaacactaaaaaatccctcagcacaggagatacttttaaaacattttatcttttgaaaaggtattataagcattggttaaaaatgcaaagagtacaaaaaaacatagtcttttcaccctggccataagttctttttgtggaagcaacccatcattgacaaatatgtcttttttttttttttttttttttgagacagtcttgctctgtcgcccaggctggattgcagtggcccaggctggaatgcagtggcacgatctccgctaagtgcaacctccgcctcgcgggttcaagcgtttcttgtgcctcagcctcccaagtagctgggattacaggtgtgtg

SEQ ID NO: 20494 - DNA, 1050 bp, Homo sapiens
tcaagcgatcttccccctacccactctaaaaccagtagcctctagccctcagcagaagccaaagactggagtgatgaaatctgtttttgaaatacatttactaagagtttgaggtgttcgttaaatcacctttatggcttcttaaggaaaaggttgtcaggggttcttacagattgtataattgggtttattattagaccatgagcaagcaggtttggacaagtattaaagttctagatgctcagggggagttagcttgcagtaaatggagaagttctaatgatactacaggatactcataaaaattatgtgctggaaaagcactgaggccgggcgcgctggctcacgcctgtaatcccagcacttcgggaggccgaggctggcggatcaccttaggacaggagttcagggccagcctggccaaagtggtgaaacccccgtcactactaaaaatacaaaaaattattcgggcgtggcggagggcgcctgtaatcccagctactcaggaggctgaggcgggagaattgcttgaacgcgggaggcatcgttgcagtgagctgagatcgcgccattgctttccagcctgggcaacagagcgagactctgttcaaaaaaaagaagggccgggcgcggtggctcacacctgtaatcccagcactttgggaggccgaggcgggcggatcacgaggtcaggagatcgagaccatcctggctaacacggggaaaccctttctctactaaaaatccaaaaattagccgggcgtggtggcgggcgcctgtagtcccagctaatcgggaggctgaggcaggagaatggcgtgaacccgggaggcggatgtgcagtgagccgagatggcgccactgcactccagcctgggcgacagagcgagactgtgtctcaaaaaaaaaaaaaaagaactttattgcatttttttttttttttttgaggcagagtctcactctattgcccaggctggagtggagttgcgcgatctcggctcactgcaacctctgcctcctgggttcaagtgattctcctgcctcagcctc

SEQ ID NO: 20495 - DNA, 1019 bp, Homo sapiens
catctgctcccacctgaccccgcgtgccctgcagctaattctggatgtgagttgggacctttgggagtggaatgtgggctggggctcactgagcagcgagctgcaccaggggtgccgcttcagcctccagcctccctgccgggagcctgcggccggtgggaggggtctcaacgaggccttggcctggcctggccgcctctcctaggctccgttttcttctgggaaatggaggtctttggtcaaggctgagtggggcctggagaggagggcgggggctgcaaatgggtcagtggctggcacccctccccaggtgctgaaccccgagaccagtgaggatgagaatgaccgtgtggtggtgacggacgattctgatgagcggcggctgaagggtgcagaggtgttgccagcatgggccgggcgggggcggtggggagtgggacgatcggggaggtgtgtgacgcgcctgcctctaccacacaggacaagagcgaggaaggtgaggacaacagaagctcagagagtgaagaggagagcgagggggaggagagcgaggaggaggagcgcgacggggacgtggatcagggcttccgggaacagctgatgaccgtgctgcaggctgggaaggcgctggtgagtgggggaggtggaggggggggcggccggggagggctcgggtgtccccatgttgtgtgcctgcccgaggcctggctgaccgctgggcctctgtccctcagggtggagaggacagtgagaacgaggaggagctgggggatgaggccatgatggccctggaccagagcctcgccagcctctttgccgagcagaagctgcgtatccaggcccggcgagacgagaagaacaagctgcagaaggagaaggctctgcggcgcgacttccagatccgggtgagcctgggggcgggccgcacccacccccgcctccctgtgcgcccacccccgcctccctgtgcgcccacccccgtgttgctgacctgccctcctggctgcaggtgctggacc

SEQ ID NO: 20496 - DNA, 1048 bp, Homo sapiens
cctcactcgagtctggggttatccccagtcagatgagttcaatgtaattaaattagttaaaactaatgactttcaattctgtctctcatgccaagccaagcatggagggaataatctagaattatgaattgggggctggggcttgctggcttctctgggaccctgaccatccttgtcaggttctgcctttcttgagtgtccaagggggagttggactccttgtccccttcaggcttttggatcctgtaactgcgtattaggtgtgaaaaagccgtcagctagctgggcgcgggggctcacacctgcaatcccagcactttgggaggccaaggggggcaagggggtggatcacgaggtcaggagttcaagaccagcctggccaacatggtgaaaccccgtctctactcaaaatacaaaaattagccgggcatggtggtacacgcctgcaatcccagctacttgggaggctgaggcaggagaatggcttgaacctgggaggcagaagttgtggtgagccgagatcagaccactgtactccagcctgggcaatagagcgagactccatctcaaaagccctcagctcttggggtgtccagctggggtcttctgttctggattgtgggggtgactggccagggcgggccagtggctgggtgttggaggcttcttgatgccactgctgccatttggccagccccttgcctggtttagaagggctggggacagggcctggccccagtgtgtgtcctaccctgcccgcagtcccctgcagagagctgtgacctgctgggtgacatccagacctgcatcaggaaaagtctgggagagaagccccgccggagccgcaccaagaccatcggtgggtccttggtcacgagagggactagagtggtggggtggggccagcggtcccctatccgggctcaacccctccctcttgcagacccccaggaacccccgtgggtagaggtgctggtggagatcttgctggccctgttggcccagcccagccacctcatgcgccaggtggcccggagcgtgtttggcc

SEQ ID NO: 20497 - DNA, 1108 bp, Homo sapiens
ttgacctcccaaagtgcctggattacaggcgtgagctactgcacccagcctgtgcttttttattgacatgttaagtaataagatctagaagcaggtcttacaacgactataattgcaaattagtgatgcatgtgaatgatatttcaggatgtgttacaattataatgtgacatgaaaatgattctattagtgacagtcacaggtactgctgatactactgtggctatttgtctgcatttataagtgaaggaaacactacattttacaaataggctagtgggagtaatttttttccccatccatgatcacaggccccctatgattgtatatccaactaaattgtggttctcaggttaaacactcctgccctagcaccttcacacagcaggcagagaaagtgccgaatgacagattgctactccgagacttgctgccttacttctgctctagcagccttcttttttgaccttgtcctgccctcatacctctggttagtgtcttaacttccagcttggaccctcgtttttgtgtgtgagctggtagagagttggagtgtggagactgttttttagtactatgtccttttggcttgagggaaaaattttgcaaaaactgtcaaggaggaagcccagctgtctctgggacagggccaggcccttttcgctcccaagcaggaagccgaggaccagagctggcgttgaggagtcttttaccatgaaagcatgtccgtgcccggtgttgatgccccatagagggctttgcttcttgtgtctacaggaaaaagagacctgggcttagagtctgctgctgggaacggatgggatgtacatctctggctctcagagctggctcactggcctcttccttttttcctccacatccagggcaagctggcctcattttttctgtctagggtggatgccttgagccctcagctccaacaggtaaagggcagggagggagagggagagcccggggatctgagcctggattgtctcttgctgctcctcctctagcttttctgtcctgccttcatatgcccatctgtgtccttcggcctcattgtcccatctcaggtttccctcagagctctctctgatctccatct

SEQ ID NO: 20498 - DNA, 1029 bp, Homo sapiens
gccaacatggtgaaaccccatctctactaaaaatacaaaaattaactgggcatggtggcatgtgcctgtaatcccagctaggagggaggctgaggcaggagaatcgcttgaaccaggacctgggaggcggaggttgcagtgagccaagatcacaccactgcactccagcctgggctacagaaggaaactccatctcaaaataaataaataaaataaaaaagacaagatttttttaagatgggagagacttgagctgtataaatgtcagtgggaagagtcatgtggtggggactggttagaaattcaagggagataaagcgagtgacagtgtaaggttctgagaggaagggaggaagatagtattgaaagcacagcggagggactgtctttgggtaggaagagggcaggagagggtgggtaggatgaagatgaaatttcgaagtttgggagtgggaagcgaaggctgttttattaggttggtgcaaaagtaattgctgtttttatagttacttgtaattatctctgggcttcagttttttctgtgaagttatgggcaaggttaaacagaggtgacagtggtgggagaagtagcgatttggaaattggaggagaaaactttagtagcagcgttaaccagagaaatgtggtaggattactggacagggatgagggcctgtgtcgttggtaggcctgcctgtttttgcttcataagtattttctttttttgacacatggcctcgtctcgtctagcaggagatatatgctggatgtttttccttagatacatattaattttctaaggaagtccttttaaattcaaattgttttttctccatgggttccagggtgggtttgagccagttagcaacaacctcgaagagatggcacagtcttgttatggttgaggcttatttttcagtctgaaaagtgctcttctccctttctagcagggaacattagtatgatatcatcggaaaatctttccagggctgcggtgagccaagattgcgctactgcactccagcctgg

SEQ ID NO: 20499 - DNA, 1072 bp, Homo sapiens
ggaaaggccgagaaacagcctttcccacaggaaaaaaggggaaaagctcaaggcttctagtgggatggccttttggcctcagaggagatgtgacttcagaaaggcttcataggtgctgggacagagaagggcttgaagaatcttctgcatttttaacatcccgtttgtgactcgcttccctgttttctttcctccagaacctttcagctcttggggcattggtgagtctcagtaatgcacgtctcagttccatcaaaactcggtaagtctttggcccttttttttctccaggggcgtgttcccttaggaagtgggcatatgtacatctttgctttcattgtcaccgtccccaggattcaagacctctctctattcccaagagtgtggagagttacattccttttgtgagctcacttgatttgaaccctaccttttccagctcccagatgtcctattccaccctgggattacctctgctcccttctttctttgcttcttccacctcattccaagtatttcaggagttggaaaccacagtggatctggggatgaagtcttgctgtagcctagtgagaataaaagagcagtcactttctctgaagtctagcctccgcccacttaacatgactctcttctttctttgaaggtttgagggcctgtgtctgctgtccctgctggtaggggagagccccacagagctattccagcagcactgtgtgtcttggcttcggagcattcagcaggtgttacaggtgaggtttcagctgctgccctacttcctcctcctcccccatcttattccccatcttggatgtggcatgttcttttcaacttggacatgtagttctggggacagaataattggaaacaattccctgatagcagagaggataagcttcaaatagaaactttttttttgagatggagtctcactttgtcactcaggctggagggcagtggcatgatcttggctcactgcatcctctgcctcttgggttcgaatgattctcctgcctcagcctcctgagtagctgggattacaggcctctgccaccacgcctggctaattttt

SEQ ID NO: 20500 - DNA, 1022 bp, Homo sapiens
ttcccattgcccaccaagccctccctggctgcctccagctttaggcaaacagtaatctactttttttctttagagatttgcctattctggccatttgatagaaatgaattgtataatatgtagcctttgggtttggcttctttcacttagcagtcagttttcaaggttcatccatgtgtcaagactttattactcttttctgttttgctgtgttgggtcttgtgttgcctaggctggattcaaactctcaggattagtcaagtgattcttatgcctcagcctcccaagtagctgggactacaggcgggtgccattgtgcccggctaaaacttcattcctatttatggccttttatgcaatagtcccctcttatctgtgctttccctttccatggttttacttacctgtggtcaaccgtggtctgaaaatattaggtggaaaattccagaaataagtaattcataagttttaaattacgtgccattctgagcagcgtgatggactctcgaggagttctgcttcatcctacctgggacgtgaatcggacatgaatcatccttttgtccagtgtatccatgttgcacatgctccctgcctgagggtcatcttgtaaccatctcggtgatcagatccactgtggcggtattgcagtgctcgtgttcaagtcacctttattttacttcataatggcccaaagcgtaagagtagagatgctggcatattattatagttgctgtactgtattattagtggttgttaatctcttactgtgcctaactgataaaatctttcataggcttgtatgtataggaaaaaaacagtttatgtagggtttggtagtatccgaagtttctgaggtttcaggcacctgcctggggttttggaagcaccccctgcagataagggggcgctgctgcactatatttgatctgttcaccagtgggtggacgtttgggttgttttcccattttggttattatgaatgatgctgctgtgaacgtccatgtacaagttgttgtgag

SEQ ID NO: 20501 - DNA, 1088 bp, Homo sapiens
tgccaaataagcatgtttagagatagggaggtaaatgccaaaataaacatctaaaggtggtgaaagtaggccaggtgtagcctgagcaacgtgaggatactccatctctacaaaaaataaaaaaactggccgggcgcggtggctcacgcctgtcatcccaacactttgggaagccacggtgggtggatcacctgaggtcaggagttcaagaccaacctggccaacatggtgaaaccccgtctctactaaaaatataaaaactagctgggcatggtggtggacacctgtaatcccagctactcgggaggctgaggcaggagaattgcttgaacctagcagacggaggttgcagtgagccgacacagtgccactgcactccagccttggcgacagagtgagactctgtctcaaaaaaacaaattaataaaataatcaaaaaagttaaaaaaactagctgggcatggtggcttgcacctgtagtcccagttacttgggaggctgaggtgggaggatctcttcagcctggggcatcgaggaggctgcagtaagctgtgatcatgccaagggtgacagagcaagaccctgtctcaaaaaaaaggtggtgaaagtagttgcctctgaggaggaggaaattagagtgggaagggtctgctttttattgtaataggtcttgtagtactatctgattctttatatgtatatataactttgaaaacaaaaagtaaagaaagaatgaagagtgagagagggctgggtgcagtagctcatgcctgtaatcccagcactttgggagtccgaggcgggcggatcatgaggtcaagagttcgagaccagcctggccaacatggtgaaaccctgtatctactaaaaatacaaaaattagctgggtatggtggtgggtgcctgtaatccaagctactcaggaggctgaagctggagaatcacttgaacccaggaggcggaggttacagtgagctgagatctcaccattgcactccagcctgggtgacaagagcgaaaatctgtctcaaaaaacaaaacaaaacaaaaccaaagaagagaggaaataaaaaagagacgtaagtgta

SEQ ID NO: 20502 - DNA, 1032 bp, Homo sapiens
aaaaaataccaaaaaaattagctgggcgtggtggcgggcgcctgtagtcccagctacttgggaggctgaggcaggagaatggcatgaacccaggaggcagagcttgcagtgagccgagatcgtgccactgcactccagcctgggcgacagagcaagactccgtctcaaaaaaaaaaaaaaaaaaccatctggatgtggtgccacttcggagataggtttttgtgtttttttgtgtgcttggtttggtgtgatttgagacagggtctcactttgtcacccaggtggaatacagtggtgccatcatggctcactgcagcctcaacctcccaggctcaagcgatcttcccacctcagtctcctgagtagctgggacctcaggcatgtgccactatgcccagctattgttttaaattttttgtagagacagggtctcactatgttacccaggctggtcttgaacttctgggctcaagcagtcctcctctctccacctcccagccactcaaaaggctgaggtaggaggactgtttgagcccgggaggtcgaggctgcagaaagccatgattgcagcactgcactccggcctgggtgacagggtgagaccctgtctcaaaataaaataaataaataaataagttccttccctaatattcttcctgttattgaagccacctttgcaaaattatgactgagacagtgaaagagatctaacctaagcaactccatcttgcttctaagctttaagctgtgcttgttccttcctgagcataggctgaactaactttgagaggaacttagtttattgtttatagttacaggcgtgagccatcacacccggcctagagtttatagtttaaaacaaagacggtaatagccctttcccaaaacaaacctacttcttgcctgagaactagactgcctttgtagtactaacaaactagccaagagattaccaattatggtttaggagtccgggcgcagtggctcacgcctgtaatcccagcactttgggaggccgaggtgggcaggtca

SEQ ID NO: 20503 - DNA, 1052 bp, Homo sapiens
ctatgcccgcctgggcccccacaccgtcctcaccttcatcttcttggagcagatgaacaaggcctacaagcgtctcttcctcagtggctgaagcggccgggggctcccactcgcctgctgcgcctatagccactgcgccctgggggcctgggctctgctgccctggacccctctatttatttcccttccacagtgtggtttcttcctctgcggtaaaggacttggtctgttctaccccctgctccagcttgccctgctcgtcctgatcctgtgatttctctgtccttggctattcttgcagggagctggaaaacttctgaggatttctggcctccccctgggttttagtttcagggcacacaggacagcagaagatcccctttgtcagtggggaaaccaaggcagagctgaggggacagggaggagcagaagccatcaagatggtcaaagggcctgcagagggagatgtggcccttcctccccctcattgaggacttaataaattggattgatgacaccagccccaaatctggagagtctggggggtggctaggagaggggaggagactggacaaagaagctggagaataggaactggagtttttaagaaaaattgttaaagaaaaagcagccgctggttttttgcaaatgctgtataaatctgtcatgccacagcagctgacagggccagaaaaactcaaatcccaggcccggtgtgtttcctccagccactcgcccaagaatgccaccgatgcccagatcatctcacataatccccaggaaaagcccctcggtctgatgactgcttctgcagcctaaagagggaggaaataaagagacttagagaggaagtcagaccactgtgggctggaggcagtgcaggtggaaggccagggcttaagtgggtgggcactggaagcttgaggaaaggggaatgctggccagagacctgatctgggtccttggctggggagagtgagaaccttgtccatttctttagaagatgtgtggttcccaggccagccttcaaggagccttaaaacctcttgggg

SEQ ID NO: 20504 - DNA, 1049 bp, Homo sapiens
ccccaggaaagttgaagggacaagtcagatatgccattatgtgggtcatgaggtggtgagacttctctcccttcagggccggcggctgaaggagcagcaggaggtagcagcagctgtaatccagcgctgttaccggaagtacaagcaggtgagacccttctccctcaaaagtgtaaccagcaacccaccaacccacacccacgcctaaccattccagaatgttgccagagccctaactccccttctctctccacaagctgacctggattgcacttaaggtattaggcatgagctctgagtgtgaggtctgtgatgattcagtctttccttgagtgtgtgggttacagagagtcttgcatcagcctaacttgggtgagcctcagggctttgggtctccgtccctctatttcagcccctgtccctcctccccacccctgcagtttgcactctataagaagatgacccaggcggccatcctgatccagagcaagttccgaagctactatgaacagaagcgatttcagcagagccgccgagcggctgtgctcatccagcagcactaccgctcctaccgccgcaggcccggccctccccaccggacttcggccaccctgcctgcccgcaacaagtagggcccagccccagccctctgtgcccacccactgcatccacgccattcccccttactcatcctcttgatcatcatgcctcactgccattccctgcctagggttcctgggggggccgaaggcatgcgatgccttctgtgaggtccatcttttgtttctttcaccagaggctcctttctcaccaagaagcaggaccaggcagcccggaagatcatgagattcctgcggcgctgccgacacaggtactcatcccttctccccctgggcttttgcgttgccacccgtcgtgatccgccagtctcctctgactcctatctttctctctgcaggatgagggaactgaagcagaaccaggagctggaagggcttccccagccgggactggccacatgacctggccaccgcctttctcaccaccct

SEQ ID NO: 20505 - DNA, 1034 bp, Homo sapiens
tgtgaaaaagccttcaggcggcgttcactccttattcaacgtcggagaattcatagtggtgagaaaccctatgaatgtaaggaatgtgggaaactcttcatgtggcacacagctttcctcaaacatcagagactgcatgctggagagaaacttgaagaacgtgagaaaaccttcagcaaggatgaggagcttaggggagagcagaaaattcaccaagaagagaaagcttattggtgtaatcagtgtggtagggctttccagggcagctcagacctcatcggacatcaggtaactcatacaggagagaaaccatatgaatgtaaagaatgtgggaaaactttcaatcagagctcagaccttctgagacatcatagaattcacagtggagaaaaaccttatgtatgcaacaaatgtgggaaatcttttaggggcagctcagatcttattagacaccatcgtgttcatactggagagaaaccctatgaatgccctgaatgttggaaggccttcagtcagaactcacaccttgtcagtcatcaaagaattcataccagagagaaaccctttgaatgtagcaactgtggtaaggccttcagtgggtggacagcttttcttaagcaccagaaacttcacattggaaaggaatttgaagactgtaagagtctacaaacaggacctattctaataggtagcagaaacctaatgaatgcagtaaaactaggaaaagtctgatggagaccacatcttattgcactacaaatgagttttattagaaaaaaaccatgggaaggtgggaaagcagagaaaatacctactggatttttcaaacgtaagtataatcaagtggaaaagccaaaagctcttggacataatcaccttttttttttctgtctcagaactgacactagaatatggtcccaacgatacaattttttaaattatttattttttaacatacaaagagatgaggtctcactatgttgcccaggctggacttgaactcttgggctcaagcactcctccctcctcagcct

SEQ ID NO: 20506 - DNA, 1053 bp, Homo sapiens
caggcactgaggcagagaggtgtgaggcaggagagctctggctgggctaaggatatggacttgatcctgtaaaataaagggaactacgggagggctttccactagactgggacgcgaacaagtttctaatgtttaaatatcaccttgatttcaatatggagatgatttagggacaaattttggaggcagggaaagttaggctgttacaataagccaggtgagagtgaagtctgaactcaaagagtggcagctagaatggaaaggatgagatgttatttcgagcgctggtaatttctgctggtgcaatatcagtagcaaagtggaggcaggaggcagactgcagcaggtggagggatgcctgggaagtcaggcagtgatgatgatcaagactgtggcaacagagggaggaagaaagagtggtagctcgggagaggagtgcaatccaaagacagactttttccttctgaatatgagacacctgagcctgttcatgcataatggaaaagatcagtcaagaggcagaagttcaaggcccggcactgcgcggggacatctggaaaagtcggagatactcagtcaaagcacctatgcaatgacactgtggtcagaagcaggtcatgatattctctgaagaaaaagaaaagactgggaataaaaggaaaacctgtaattgaggagcccagtagctgaaggtggccctgcctgatgcctgaggagtgaggccagcatctgctgagagtgagggggctgaggtgaggtgactctgaaactgccactgtgaggaatggaagagacgcaacttaggacacatgaaaggctgcatgaggaacactggaggcccatctggcagcttgagcatgcagtgtcaccaagtctcgtggcatcagcagctggggacagcaagactagtccaaggttgggcagtggtcaggtgagggcagcagcaggacaaggagtcaaagaccatagggacaggtgtggtgggagatgaagggaagaggcaggccagtaagatgcaacctaggggaaagaaagcaagccatgaagctgctg

SEQ ID NO: 20507 - DNA, 1035 bp, Homo sapiens
cagcttgggccacagagtgagacttcatctcaaataaataaacaaataaaatttaaataaataatttaaattattaaaataaataaattatttatttattttgagacagagtctggctctgtagcccaagctggagtgcagtggcgtgatctcagctcactgcaacctcctcagcccgggctggagtgcagtggcacaagctcagctcactgcagcctccacctcctgggttccagcgattcttctgcctcagcctcacgggtaacgggttacaggcatgtgccaccacacttgcctaattcttgtatttttagtggagacggggttttaccatgttggccaggctggtctcaaactcctgacctcaggtgatccacctgccttggcctcccaaagtgctaagataggcgtgagccattgcgcccagccagtgtgctataatttagaagatatttttatttcaattctttgatattgattgaatagatgccttgaatgtcctctcagcatgatttcagggaaataaatctgaaggaaagagaatcaaagagtgttaaaatagaaatttcttcagggcctggcgtggtggctcatgcctgtaatcccagcactttgcgaggccgaggtgggcagatcacctgaggtcgggagtttgagaccagcctgaccaacatggagaaaccccctctctactgaaaatacaaagttcgctgggcgaggtggcaggtgcctgtaatcccagctacttgaaagactgaggcaggagaatcacttgaacctgggaggcggaggttgcagtgagccgagattgtgccgttacactccagcctgggcaacaagagagaaactccatctgcaaaaaaaagaagttcctttagaagattttcatccaagttgtacaaaatgttttggaaaattattatctttattttagtaccactccagttgcggagagatttttcaccagttccacctctctgactctaaagcatgctgcatggtatccaagtgaaatcctggatccccacgtagtgc

SEQ ID NO: 20508 - DNA, 1275 bp, Homo sapiens
gctttcctttttatgtatctggatttcttttctaggagacaaagcttttgttgatttcctgagtgatgaaattaaggaggaaagaaaaattcagaagcataaaaccctccctaagatgtctggaggttgggagctggaactgaatgggacagaagcgaaattagtgcggaaagttgccggggaaaagtaagtactggtctggggatcccagggcagcaactcccttaaccttgcaggacccatcctgggtcatccccagaagagccttgagttcaggtgtggatactttgataaatgggtttcaagagagtgaaggattcatttggacaacttcgtaagccccaggcagtccattcaccgaacacaaatttgctgtgggctggttactaaggagacaaaaatgtagtgcaaaaaagtactggcagaatcagtttgatctctgatttacagccctgataaaataggacactgctctctaatgtttagtatgggtgaaaatgaaaaatatgtaacttctatgtaacaggatggggttacactgtagtaagggctgccatcagaggtggggagtttgtgacctaagtcagctcccccatcatctcctaaactgttaaagtgtttacacttttctgcattatagtcatccataatctcattacacagataaacatttggcatcttccaggtttttaaattgagcctgggcgcggtggctcacacccataatcccagcactttgggacgggcagatcatgaggtcaggagaaaatcctggctaacactaaaaccctggctctagtaaaaattaaccgggtatggtggcacgtgcctgtagtcccagctactcgggaggctgaggcaggggaatcgcttgaacctgggaggtggaggttgcagtgagtcgagatcgcgccaccgcgctccagcctgggcaacagagcaagacgccatctcaataataaataaataaattgaatttccttcataattgaccttatgatgtgtatgtaatttttttaaatcacagcttttatgagatttaattgagatggcatacgatttacccatttattgaagtttattaaattaagtggttcttagtcctcgcagaattatgcatcagttatcactacctaattctagaacactgttgtcatccccaaacaatacctattagcagtcactcattattcctccctgtagccaccccaggtaatcactaagctactttctctatgggattgcctcttttggacatttcatataaatggagtc

SEQ ID NO: 20509 - DNA, 1107 bp, Homo sapiens
aaagaagagtggtgaggccgggcgcggtggctcacgcctgtaatcccagcactttgggaggccaaggcgggcagatcacttgaggtcaggagttcaagaccagcctgaccaaaatggtgaaaccccgtttctactaaaaatacaaaaattagccaggcgtggtggcaggcgcctgtaatcccagctacttgggaggctagggcaggagaatagcttgaacctgggaggtggaggttgcaatgagctgagattgcgccattgcactccagcctgggtgacagagggagactcagcctcaaaaaaaaaaaaagaaagaaagaaaaagagcggtgagaggaaagacaggcgagcagctcagggtggctccttcgtggcttcaccacgggaagtttgcattgttttgcaaggagcagtagagacattgttgaaggtatttgagtggatgaagagtgattcgagttgtgctttaggtagattagcttggcagcagcaggtgggtgaatcggagtgaggagatggtgagatggtcaaagcgagagggaagggcctttcctttccgggccgtcctgatggaatttaggtgaggggtgggtcacccaacctgcctgtggtctggtggctaatgtgagcacctccctcccagccctaccttcacaggcggtagtttccctgtttctggtccgtgctcctccagctgggccttcttcccctgaccttgctgatccttggtgaccacctccgaatgtcagaatccacatcgttaggctcacaatgtgggctgcttttgccccagtgggtccagttgccccaacacgctgtgtagtgctgaccagtgtttacgtgtggggtcggctccattcctcgctttctcccgaaacagatgtcaatgccaatcgcatcatcccgaggagacgtggagagtgtccgccgctgcctggctcacagcctcttcatgagcaccgccgagcttcagccagatggcacctatgccaccacggacacccaccagccagtggccatccacccgtcgtctgtcctcttccactgcaagccggcctgcgtcgtgtacactgagctgctctacaccaacaagtgctacatgcggga

SEQ ID NO: 20510 - DNA, 1009 bp, Homo sapiens
gcccaggctggagtggagtggcaagcagctggaactataggcatgtgtcaccacccctgaccaatttaaaaaaaagtgttttgtagagatgggatcttgctgcgttgcccaggctggtcacaaactcctggctgcaaacgatcctcccgcctcagcctcccaaagtgctgggtttacaggcgtgagccatcacacccagcctgttaccatttacacactgctggtaagggttctctccaagctagacatcaacttttaggctcatttacatttctatagttaagagaaataactctgggaaacatcatcaatcaccattgtctttttctgtgcaagctgcaattctatcaatgcctagtaaacccactctactttttttacaggaagccccttcttcacaggacatcctggtgttcctcactgggcaggaggagatcgaagccatgagcaagacgtgccgagacattgcaaagcacctcccagacggctgccctgcgatgctggtccttcctctgtacgcctccctgccctatgcacagcagctccgagtcttccaaggggccccaaaggtgagtgcaccacctcttctgtccagccctattctgggcacccagacggatccaccagcgaggtctgtacctgttaccaggctccagataaggtgtatgggatgggatacccaggtgccagatcagcgcactgaggaggtgcaggaataaaatgcgcggtgacacacgcagcgctcctgtgacaggagcagggagacagttgttgggatgagggagagtataaaccaaagctgcaaggtaaacgagtgacttctaaggaccagcataaattgcatttgtccatagtgccatttcttgtgtgcctttgccgtgccaggcactgtgctagcatttatatccactgtctgtcatcctcgtgggaaccggcaaggcaggttatgatcccatggggatcctgaggccccaagaagggaagtaacaattgctcaagggggcgcata

SEQ ID NO: 20511 - DNA, 1069 bp, Homo sapiens
agttttactcttgtcgcccaggctggagtgcaatggtgcagtcttggttcactgcaacctctgcctcctgggttcaagcaattctcctgcctcaacctcctcagtagcttggattacaggtgcctaccatccatgccctgctaatttttttaatttttttttttattgttagtagaggtggagtttcaccatgttggctaggctggtcttgaactcctgacctcaggtgattcgcccgctgcctcagcctcccagagtgctgggattacaggcacgagccaccatgctcggcctcaagactcttggtttctaaaactagtgctcacttttcctgctctgggcttggggtttaccatccttcaaatgaagggaccagcagaacagcctctcgagagggcagtttggcgatgagttatttagggaggcggaatgtggaattccctatggcccgacaattccaacgctgtgtgagagccccagagaggttctcacatgggaacacaagaagtgcacgggctgtttgctgcagcaccgtttgtaacagcgaggaactatgagacctaattggtcctttagaggagattagaaaaataaaatgaggtatatcacacaaccaaatagtatgcagcagtcaaaaggaacaagccaaatctacaaatactaatgtggattcatctcaaaaaacaatactaaaggggaaagtaagaagcagaatatgctgtccccatggtgacattccgtaatgtttgaaatacatacatacgagtatgtaacactcatgcatacatacagatggggaaaagctttagaaagcagattgggaggccaggtgtggtggctcacgcctgtaatcccaaaactgtgggaggccaaggcgggcagatcacctgaggtcaggagttcgagaccggcctggtcaacatggtgaaacacatctctactaaaaatagaaaaattagctgggcgtggtggccagcgcctataatcccaggtactcgggaggctgaagcaggagaatcacttgaacctgggaggcggaggttacagtgagccgagatctcgctactgt

SEQ ID NO: 20512 - DNA, 1075 bp, Homo sapiens
tccttcttttgtgggggtgaggaagggattgtcacttagctgcgaataggggtggagtgtgtcagtccaacagcttgttctgcaaattttcagccagtctcctcattttctaccccatactgcactctgccttcatgattctcagcactcttaacttcctgagccttcacgatgttttataggacaaatcagcttgtttttgcctggcatccctcccacccccacttacagactcttaggtttcagctccctctatgctgctaaatcagttatgattcttctgtgtgcgtttatcttctgaaaatcttgggcatttctcactcacgtgtgtctctttttgtagatttatgtatttatttatttccttgtattcaagtgggattttgggtgggatcagggataatcacttgtgtttaggccctcaggttgaccctgaagtcctgagacttttctttggtatatatgatagtacccttcaaagtatataagatgctttgttctggtagagacacaaatttgtcttcacatgtattctgaaggattatctgggagaagagaagaagtaaacgcgacttgcttccttttgttaacacgcgctcctgtagcatatgtactcattttcttgtaacctgtctggcttgcttaggctaaccaggatattgggaaacccaaaagcaagccaaggaagatagactgttccttgtgtgttcttaccacctgatcaaatgacacattttgttcacagttgttaggtggatgtagggaaaatctctcagcctataaagaataacaggttaaaatgtagaggacagagctattaaaatatgcctggatttttacaatattttcctctgctgttctttgaccccaagtgacagtgcatatgaacagtctagctctgtttcatttttatctcttctttttttattattttattttattttattttagatggagtctcactctgtcacctaggctggagtgcagtggtacaatctcggctcactgcaacctccgcctcctgggttcaagtgattctcctgcctcagcctcctgagtagctaggattacaggt

SEQ ID NO: 20513 - DNA, 1071 bp, Homo sapiens
cctatttatccctctatccatccatcagttcatcttatgttcgcatttcaaagttgcacatatcagcacactttacccctaaatattcagcatgcttattatcaactagagtttaatatttacttatggctctttttttcaagataaaatttacagataataaaatgcacagatcctaactgtgctatttggtggtttttgacaactggatacatgtctgttatgcaaacccctatcaagacatagaacatatcacctcagaaagttccctcatgccccgccacgtaggcaaccactgtgctttctgagttagctttgattgtctagagtttcatataaatgcagtcatacggtgtgtactcttttgcctagacttctttcattcaccatagtgttttataaatactatatttatgtcataaatacattaaatctgtgttgcttatttcctcttgctgttattaacaaatttaagtttgtaacaagtttaagccacatatttggtggcttaaagcacaaatttattctcctatagttctgggggggggggtcagaatctgaagtgagtggtaaaggactgaaatcagggtgttggcaagttcattctggaggctccagggaaggatctattccttgtttctttcagctcctaaattttgggctattaggaataaatctgctatgaatatattcatgtgtataatctgtgtgtatatcttaagtttttctcttggataaatacctaatagcaaacttgccagatcattagattagtttgtgtttaacttcataaaaaattgacaaatctttatcaaagcggccttgctcctatttcctacatccttgccaacatttggtgtcatcagtcttttttgtggtaaccatcctggtgaaggtgaataatgatatttagaaccttttcaagtgattttttttattttttgagtcacagtttcactctgttccccaggctggagtgcagtggtgcagtctcggctcaccacaacctctacctcccgagttcaagcgattcttgttgcctcagcctcccaagtagctgggactacaggt

SEQ ID NO: 20514 - DNA, 1003 bp, Homo sapiens
ttttttgtctgtgcctattggtgtttctgggttgccggcttctccagtacctactctgggaaatataaggcaaagagaaatcccaaagaactcactgctctgtcattcttttggtcccagtgtccctaggtgatgtgccttctctacttctctccgagtcctcttatgtttgcatatatttaatgtccaggattcttagttgtaattaacaggaagaagagtggaaagtacatttttcagcctcttcagaagcaaaaatctgagcatttctgctcattggcttgtttccaatgagaaatcagaattgctttttatccttctctagaggctcacagactctgctttctccccagggtatctcagattcataatgataggacttattgtgggtgtgttttcattcatcagtagaccttttaagcctggcaatttatttcctttaattctgagaagttttcgtgctttattttgtactttttttttcttgtctctgttttctctattctctgtttctgaaactcctgttctttgatgttggacttccttgattggtcctctgattttcttatctgttttttcctattttcttttttccctcttctacctctacccctaccctcccccagtaggagatttcctccaactttaacatttaacctattgagtttgtcatttctgccagtgtttaaattttaaaatttaaaaatgttgagagctctattatattctccaaatatctcttacttagtggtcgcctgtccttctttcatggattcagtgctgttttctttctgaatatattaacacatttcctctgccttttgacctacataatcttttttttccttcctcagatacctagtaatcttggctatcttctcatgtttaaacgtagggggagtgattgccgatcaaaaactcagagtatgtgggttggaattagtattttagttttctaaataattgtttctatcgtggtataatttacatatagtaaaatgca

SEQ ID NO: 20515 - DNA, 1022 bp, Homo sapiens
ctttaggggtacggagagattatgttacctactgagtagcttaatagagcctggattggtgctctgctctgcagtggtcctgatttctggtctgtttctgtgatgatgacaccctgcagtgtcgaggcagaattggtttgactcttttgactgtctgctaggctcgcttggcttgatgctgaaacttccaaaagattgaaggaactagaagagttaaaagccaaggaaattgacagcatgcaaaaacagaggtaaatatttgcttctgagttaggaaaaggtaagcaggcctattctacatctctatacattaatgataaatagagattatttaggtctagctacacttctgcctccttaaaagactgaagtcacttaagaagccaaggggggagccaagactggagctcaagggagccctgactctgccttgaggagagttggggtgactcttgatactgttctctaggcttgattggcttgatgctgaaacttctagaagaacaaaggaactgaatgagctcaaagctgaagaaatgtatagactccaacaattgaggtatgtgtttgcttcttaggaagaatagtggatgtttgcctgttctaattgatctagatagttctagcaaccaacctggactgttaaggcctaacttcattacatgaatgaatgaatagctgcatgtctacctgtatattataccatatttttttgctaggaaatgcttcttttgtgtggagtttgaaggagaactgaaaaaaatctgtaattgtagagaagttctgtctgaaagatcagagtcttatgtgtatttgtttggactaccctcaaaggtacttttctctagccagatgtcagtccttctaagggcagaagatgagtatgatgcacatacatgttctgctcatgtgaatcaacatatagctactttagtttcgtatgttagcttgagtgcaggctatggttttcaaatgcggttccctttttctattcactccataagtgttttttaaactatagg

SEQ ID NO: 20516 - DNA, 1114 bp, Homo sapiens
ggcatgaaaagaccattcattggattttggaaaatgcaacaatgataaataaaagctgtagggatatagaaacatgtttatgtttaagtgcaaaacgaaacaaaacttgtatttattatgaggaaaactgacaaaaacttgagcctgtgtaagaaagcataagcggactgtttcaagtgagatacacttaggggcagggtaaaagatggatccagccaccaaatgaagtctcaggaagacctgaagaagtactatcagatggcttggatctatccgtggagcaaattttaagaaagcttcaatgggttatattggtcacttgctggggcctgacattttgaaataggacagaagtccataactgggaaattgaaggacttagtggttgctgcttgaagctttctgggtttacttttagagatggttcccagtatgacattagtaaacagaaggataatagtatgggactggatgattataggatagaaccaggggtatgtgatgaacccaagggtgtaggagcgtggctgtgtctatcagtaaaacagaaaaatgcctcttagcactaatgatctggtggcaaaattttagaaatttgattatagacatataccaactgtgcaatatgaaatttttctgatgtctgcttacttttatttgctttttaaagaaccagctgcagtttaataggaatgttcctacacattcaagcaacttggcgatccgatattcttgcccacatgccattagaattgaaaaactgaagcactcatacaatgaatcataccattgtaaagatgcagattgtagagttggtcctgacctgggcagttctgtttcattttccgtcatatcccaagagagacttagctatgctgtccacctagccagaagagatgtgaaacgaagacaatttgaaaaacatataaaagaacatcatctcagaagtcagcctcaaagctctcagaagtgtggacatactaagtataaaatacccgaccacagggtggaaaggaaggaatcaaagagtcaagcagcctgtcagtgtagccaccagccatccaaagtagaaatctccagctctggtgccaaagtatacctttactcatctcat

SEQ ID NO: 20517 - DNA, 1013 bp, Homo sapiens
ctgttatagaaatggtaggctacaagatcgtttttaagagaataactgaattataccttggcattatttacctaaattatgttgttcattcacttacaaacttaaacccaggtaccctcagtgtttacacatgttagagctgctccaatatgaacacttccgaaaggagctggtgaatgctcagtgtgcgaaatttattgatgaacagcagattctacattggcagcactattcccggaagcggatgcgccttcagcaagccttggcagagcagcaacagcaaaataacacatcgggaaaatgaaaaactggatacaaacgaggcacttaatacatgtatataatgtatttcttttgtacagtgaagacaaaaaaaatgaaaactcttcctatctacctttattatggtagcccctagaacctttagtgtgctttttcatccaactttttattgttaatagactatttctgttaaacctgaattgttctttgatttccctgtggatttgtaaggtgtttttcttttttacgcatttagcataatcagctgattaagaatggaaaagttaggtgctttagaccaaataaggcactggggcatggggtaggggtgggccaccaagtatactgaattctaaggctagctgttcctgacatatagtagggcaagaccatctcctggaaccttactgtctcagatcaactactctaccactctactctaagatgtagtgagagtagcggagtcactgacctctttaaatcataggacaggaactgcataaaggttcttgaattctgcaggacaggaaataactgtattacctgctttgcaaggtggctttaagaatcactgaatcactgtggcctcacttgacctagtcatggcaggacaactagtggttagttactaactggactcttgactttagaacaaacatgaggagcctcaaatacttgtgttcatttgggaaagctaccattgatttgggaggtaccacaaaccaggtgct

SEQ ID NO: 20518 - DNA, 1050 bp, Homo sapiens
cttaggggcatcttctctagagctttaagatctttactaattattcaaacttcttataggacctagagatgcctccctagggtttgagagtaccaaaattaatgaagacctacagttaaatctcaaaacacctaggggctatcacagatggagaaatcagagaaaagctttcagattctatttccacagccttctcaactaaaatcaactcatcaaagacttaagagtaccgacaacaaagagatgaattagtctctgtctatgaataccacttagaaaacaactggaaagattacccaggtttaactctaaacggcatctgctttagttaccagttttgttaatgagctccatactaaactcagagagtttactcatactaattaacatcgtattaattatatgctcctctccacctgtcctaattcaagttatacctatttgtggacctagaaggtaagagtaaagcagagggctgatctgctttttacacaatttccctttgtctctttgaatttcatgctttcatacatcatctgtgaaggaagccaagagagaatgaaattccacttaagtaactggccaaaggtaccactgccaaaatgcccctctctttaagatccatgttttagcagaaacccaaaagatgtacaggcatctaaataatctgaaaaatgcaaactcatggatctccaactgaaacaactcatggggaatcaccccaaggccttgaagtcacctcgacatccctacgatcatgagtagtctggagcacctgtaattatctcaaggtccaaaaagaaaaacgtcagcatcccagtgactcccctttgaggaatctgctcttgtgcaccccctgatacccttgaacacacagggagaaataataatcccagtcagtgagcaccctatgacctttctaatagatactagaaccacctactctacccttaaccctcacaattccttaccataatgcctcagtagtgggggtggatgatttgcctctttctaagccccttttggtgtctcttggactccatcatgccc

SEQ ID NO: 20519 - DNA, 1033 bp, Homo sapiens
aaccatcaggagagaatatgagcccagcagggactgtgcagacccctcccagctgtggatatggcctggggggccccaggatatggcagttcaggggcatctgtgactggggtgtagtgggactaggggttgatggccagggtctctgaggaggacagtccttgggtctctagaattgtcctgagtcggaggaggtgggaatgggatacacatgctttcccgtgtggagggaggaagggaggcgtgatgagaggctggggtcctgtccccagaagggcagggctgggaaggcgccctggcagagtctcccaggagcttcttctgtctctagaatggatcttacctcggtcctgggcctggcacagccccacctccgtgatctcccgacaccaggcctgcagctcagggtcccccttcactatgtcatccctttggtagaagaggtggacgatcccctccacatacctgcccagggggaaaaggcacttgagggcagaaagcccccgcctctgacctctattcctctttctgtggcatctgcccaatgcttccacagtatctgggaagacacctcgcctttgggacatcctcagccctctaaacacactagcatctcatggaagatgtgggtccttagttctaggaattcgcatggttgctgtcatacatcgtcagaaaatcctgatttttccagacacctcccccagtctccccccacagctcccctcacctcctctctctgcctcatcccagtctcctcattttcagagccacccactgtgtcctcacttttcctcatctctccccaggattgagttctctgcttctcctttctggaccttcttgcttttgccccatgctggcctcaggccagagccccccccccccccggccccaccatttctcagctcctccttactcacctggcaatgatctcccagagccgtaaagcatcatgggcatagagagcacctgggagtcccagcaggccccggtcagccaggtcgtcaggaggacagagggagcagtaggt

SEQ ID NO: 20520 - DNA, 1063 bp, Homo sapiens
cgagaccagccaggtcaacatggcgaaaccctgtctctactaaaaattacaaaaattagctggatgtggtggcatgagcttgtgatcccagccactcgggatggtgaggcgggataatcccttgaacccgggaggcgaaggttgcagtgagctgagatggcgccactgcattcccgcctgggcgatagagactacttctaaaaaaaaaaaaaaaaagaaaagaaaagaagtagggatgtttgaagaacacagttttgcagtgagcaagttgtacccactctagtgaggacagtgacctcagaataattgagagggatcatttgaccttgagaccccaggacctaacaaataaacactatcattggctagaataactttgtagttcttgtccatttattttgtgcatgttgttcttaaaaggcttgtgaaagataacttggaatgtgggaaacacatagatcccagagtattaaaggggctggaaaagtagccttaagacatgaattatgtgcctttcatctgggactgtttggagaaagaagccattttggggcagtggtttgtattctgccccaaaaacatgattcttattcagggacttttggggtacatgggtgaataggagaaatatgggtggaaggaatttgccaaagaactgagtcaggaatttgtacattggccaccaggcatgaaggttagttcctgggaatggagagttagctgaggtaagctgatttttctaagaaatccccctgctccatgatcttggatgttttggaagtagggtcagggcctcaggctagtgcagggttcaagggccaaatccagtctgtagcctggctgtgcatgtctcaaacaaagcacatttgtttgtggattttttttgcattttaaatggttgaataaaccaaaagaagactactttgtgatgtaacattcatatctcagtgtccataaagttttattggaacatagtcacactcatttccatgttgtctgtggctgccttcatgctgcagcaggagagctgagtagttgagacagtgactatgcggtctgcaaa

SEQ ID NO: 20521 - DNA, 1050 bp, Homo sapiens
cagggggacctctcccatcctcctcgaaagaaggaccgaaagaaccgaaagttggggccaggagctggggctggctttggggtgcttcggaggcctcggccaactcctggggatggggaaaagagatctcgaatcaagaagagcaagaagcggaagttaaaaaaggcagaacggggggatagactcccacctcctgggcctccccaggcaccccccagtgatacagactctgaagaggaggaggaagaggaggaagaggaagaagaagaagagatggcaacagtggtagggggtgaagccccagtccctgtgctgccaacaccccctgaggctcctaggccccctgccacagtgcaccctgaaggagtccctcctgctgacagtgaaagcaaggaggtgggcagcactgaaacaagccaagatggagatgccagctccagtgaaggcgagatgcgggtcatggacgaggacatcatggtagaatcaggtgagaggttcgggctggggcgaggggtttgagggtgttgtggatccaacagctcaggcagaataccaaacaaacctttttttccccaggtgatgactcatgggatctgatcacatgttactgtcgaaagccctttgcagggcggcccatgattgagtgcagcctgtgtgggacgtggatccacctctcctgtgctaagattaagaagaccaacgtccccgacttcttttattgccagaaatgcaaggaactgaggccagaggcccggcggttaggggggcctcccaaatctggagagccctgatggcaccaactttagcctggaacttccaaatgacaacatgatttgggaactgagcctcagggtcctcagcctatcccctggagcttggatactgtctgcacttcaaggcaggaattctcaagggagacttgtttgaaaatgagtgtctcactttcccaccctatccttcctccccactctgtggacttgaaattgaatccattacggttggggatgggaggctgtctgtgtcccgacacataatctctgtctcttggac

SEQ ID NO: 20522 - DNA, 1029 bp, Homo sapiens
gagagaaggaaagagaacagtgagctagagaaactatctgttcgggactcttcccagtccccctccccattccaaagcagcagaaaacagtttgaggcctttttgcccaggactgcagagattatactgctcgtgtggtaggccttggagtcagtgaaggagtcaggcaatggtttgtggttctagaagaacgtgtctgggtcgtggttggtttaagttactggagcccagttgctgaacagttttctgctttcatcccaggaacaccatgaagaagacttctttctctacattgcctacagtgacgaaagtgtctacggtctgtgaagctgctgcccctgagctggaggggggtctcattctacaaagagagaggtggcccccctttcttgacctcctcctccttcaagctcaaacaccacctcccttattcaggaccggcacttcttaatgtttgtggctttctctccagcctctcttaggaggggtaatggtggagttggcatcttgtaactctcctttctcctttcttcccctttctctgcccgcctttcccatcctgctgtagacttcttgattgtcagtctgtgtcacatccagtgattgttttggtttctgttccctttctgactgcccaaggggctcagaaccccagcaatcccttcctttcactaccttcttttttgggggtagttggaagggactgaaattgtggggggaaggtaggaggcacatcaataaagaggaaaccaccaagctgaactgaattttgccttgtgttgctcccctcgtcccgctgattttaagtctttccaaggtgtcagtgggtttcagtggtggggaaagaagagtactgggtacaagctggagggatagaagtatattttggtttattctgttcatgttgggcttttccctgtctgcaaaaagagggtgcttttgttgtgatggaatggaatactgaggattatttcttgaaactttagttttataacacgcatgtgaaactaaatgttaaaaatgctcatg

SEQ ID NO: 20523 - DNA, 1132 bp, Homo sapiens
atacagccatgatctagacaaaatcatattctcatggagttttcattttaattagggagagaaacaacttaagataattcctagctgtgtggcctcagtttctttaaccttaaaacaggtataacagtaatattatggttgttttgaggattaaatgaaaaaggccagcgtagtggctcattcctgtaatcccagcactttgggaggcaaaggcaggaggatcacaaggtcaggagtttgagaccagccaggccaatatagttaaaccccgcctctactagaaatacaaaaatgagccgagcgtggtggtgcacgcctgtagtcccagctattagggaggctgaggcaggagaattgcttgaacctgggaggcggaggttgcagtgagccgagatcatgccgctgcactccagcctgggcaacagagcgagactccatctcaaaaaaaaaaaaaaaagaagaagaaataagcctaaattacatacatagtacctgtggtaaatgttcattatgtgctccctgttactgttactggggaaggcttccttatcaagggtttcaatcctcttttgtgctatttgtaggtaattcagtaccaaactgttcgatatgatatcctccccttatctcctgtgtcccggaatcggctaggtaagtatgtggtgggaagcctcctttagggtgaagtaggggctagctctgggtcagaggtcggtcaatattattcctccccactctggttcagcccaggtgaagaggaagatcctggtgctggatctggatgagacacttattcactcccaccatgatggggtcctgaggcccacagtccggcctggtacgcctcctgacttcatcctcaaggtgtgtggtggtggggagtgatgaaatggttccatctgttcctctgcccaaacctggactccctttcccagtcccagagcatctgtctccatccgctggcaccagtgtcagcctggaggagggaagcagatgggtggggcgttttctaggcctgggttgtggtggtcatgacatcccccagcccatcttgttcctctgtaggtggtaatagacaaacatcctgtccggttttttgtacataagaggccccatgtggatttcttcctgg

SEQ ID NO: 20524 - DNA, 1034 bp, Homo sapiens
tgggggttttgatggggctagatgggacaggatttggcaactcttgggggctaaggtggtgggtggggcgctctttaagaaagctggagttgttgctaaagaaaccaagaggcggggaacacctgtttgatgacagccggatctgtggatgtgggcttgggaaagaccctatttggaacctcggtgtgtgtttggtcctataacaaggaagagacagacttgtgtgtcaagggtggaggtgggtgggagggcatacgttacaaacaaggacgggaacttgggaaagccctgggtgtgaaggagaaacgcctgcggttcccattaagagaattcctccaaaaaggctgtgaaaatttatttcatagtgtgagtgtaggtatctggatttattgaagactaaagcagatgcttttacgatgggcctctttaattgtgggagggagttcaaggtgggtgctgtgcccaccattgaagtttgggtgtccctgtcagaggacagcgctgggcagttgtagggcttgaaaatgaggacgtttgcttctccaggagagcctagcattctgagggaaactgtccggatggacccaagcatctctgggtcccctctcccttagcttttctccaaggtcagaggtccttcagctaacagcactttaaatgaatgtgctcttgtggtctcaccaccaccagggagaatcctcggaaggagtctggggagaatttagtaagcggagacacaggttctgggtctgtactgtggtctgtaccccttagcatacctcaatacaatttgaaagaataaacccaggttggggtgacctggggtccagagaatttccagaaagccctcagtggtagtggtggttgatttaactgatttgggagaatgggtctggccttgggttcattctgtcctttaccagtctgcttccacttcctgatttagggcgcgaacagtacaggatggttgtggctgtaggcagcagcgctattcccccgagacaagagctaggagccaagaaaaatttagggtc

SEQ ID NO: 20525 - DNA, 1027 bp, Homo sapiens
agatgatggaacagaagatgaaggaagaacaggagagaaggaagaaaaaggagatggaagagagaatgtcattagaggagaccaaggaacaagtaagcagtcccttgaactttcccagctttgatttcttcgtttgactctccctgccttcatcttcttttcccaccccatcccagattctgaagttggaggagaagcttttggctctacaggaagagaagcaccagcttttcctgcagctcaagaaagttttacatgaggaagaaaaacggaggcgaaaggaacagaggtgggatcagagtgctaaaaactgaaatgggggccaagtggaactgggatcaggtagtaaaagaaccagtgtttaatggcaaaagagaaggcatctgtccttgactttgacctgtcttcctttcactccagtgacctgaccaccctaacatcagctgcataccagcagagcctgactgttcacacaggaactcatctcctcagcatgcagggtgaggactaaagaaaccaccagatggaaccggccttcttggaggtcacagcctcccatttcagcatcatgaagcccttctccctttctagggagccctggaggacacaatcgcccaggcaccctcatggcagctgacagagccaaacaaatgtttggaccccaagtgcttacggtgagagtaggattggatgcctagcccctagtacttccatccatgcatccttgccaccagtattcaagtcacaaacatatcaagcacttaagtttagggggaaacggggcatacagatacacacaagtcactgggtttcagctttcaaggagtttgtaggcgagttctcattctccttccttagacccggcactacgtgggctcagcagctgcttttgcagggacaccagagcatggacaattccaaggcagtcctggtggtgcctatgggactgctcagcccccacctcactatgggcccacacagccagcttatagtcctagtcagcagctcagaggtgagtaataggagg

SEQ ID NO: 20526 - DNA, 1035 bp, Homo sapiens
tgtttgtaggagcctgtctgggctgctgagctgggaggcaaactggtcagaaaacacatgtggggagggaggtggcgtgacaagggcagtgtgggcctcagacccaagaggccagccgcaagcaggctgtgtgtgcgtgcctgccgtctgtgtgcttaagtggcggtggggctgcggaggggatttggtatgaggaaggcgggagataaatgcagggtagcgcatggaggccggcgggaggcatgggtgttgtcagatggcccagctaatctttgcagggtctgtatgtttgcccctcatgagcctgcccagcgtgtcagggtcacccggaggagaggctgggcggccacaagggaagtaagcttagacagagaggctccttggccatgtttatgtaaaggctgggtgtgactcttgtcactaaaatggaaaaaagaaacgtgaagttttcagcctcctcctgcttcaccctctccctctctctgccccccttgtgggtatctctgacgcacactgggccccactcctgcgacggtggaagggcctcagaacagaattcgctcactaggcagattcctcagaacaggttttcctcacctttggggactgggcccttctaggggtgtgtgtgcaagtgcattccaagcctgcacaccactgtctactgtgcccggccccactggaaggatgtgtgtacgtgggggaagggagggtgctgcggacaggccctccggcatggggggctgggaaggggtggctgccgtgggagcctgctcaacaggtgcacagtgacggtctggtgaagagaaaggagccatggtccagggctgaggagctctggcgtctttaccattccctcactggcacttgatctgaaggaagctcagttcctcatctgcagaatggggctgattgtctgccctgcgtatcttccaaaagcacatgggaaacggacccggaaagtggctatagtctgggggctgtgcctatgccagcccctgtcagccctcccccaggactgggaattcccttctt

SEQ ID NO: 20527 - DNA, 1064 bp, Homo sapiens
ggtgggattacaggtgcatgccaccatacctggctattttttttttttttttggagacagtttccctctgtcacccaggctggagtgcaatggcacaatctccgctccctgcaacctctcgctcctgggttcaagcgattcttgtgcctcggcctcccaggtagctgggataataggcacgcgcccccacgtctggataatttttgcttttttagtgtttcaccatgttgcccaggctggttttgaactcccgaccgcaggtgatccacctgccttggcctcccaaagtactgggattacaggcatgagccactatacctggccctaatttcagtatttttagtagagacggagtttcaccatgttggctaggctggtcgcgaacccctggcctcaagggatccacttgccttggcctcccaaagtgctgggattatagacatgacccattgcacccggcctaatttttgttgttgttttttaattttttgagacggagtctcattctgtcgtccaggctggagtgcagtagtgcgatctcagctcactgcagcttgtgtagttagcgcagagtgagcaaagggagaccgatacaaaattcggtcagagagtagatcatgtaagacatgtacggtaggctgaggaggggggattttattgtgcgtatactgagaagccattgagttaacagtgccttctggttttttgttttgttttgttttgttttgtttttgagacggagtctcgctctgtcacccaggctggagtgcattggcgtgatctcggctcactgcaagctccacctcccaagttcacgccattctcctgcctcagcctcacgagaagctgggactacaggcgcctgccaccacgcccggctgatttttttgtatttttttttagtagagatggggtttcaccgtgttagccaggatggtcttgatctcctgacctcgtgatccacccacctcggcctcccaaagtgctgggattacaggcgagagccactgtgcccggccgaaagtgccttctgttttaaactcctgtttcaatgacagatggaa

SEQ ID NO: 20528 - DNA, 1095 bp, Homo sapiens
tcacatcttccccacgatccaagcacatggagaattgtctttcttccacacggtccctttgggaaggccctctgtcccgtaaaagatcctttcatcttcctcagagaggcctctgcctactggctctggaacactcaccccactttcatcttatattccggttcccaagccaaggagaaatggtcagatccatttacgacgtttggcatctttgacctcaggaaccctgggttggatcagtcaagttgcttcccagccagccataaggtggcatctttcgcaagtctctctccccaccacaccttgatctcaagacccactgctctaccattctactcaggaatggatttgaggtctcacttagacctcagataccttcaggtcattcatatagtttcttcgtcttgaggcatgtaagcttcatagtcataatctctaaaaggatctctgaaaggaagcttatgaggttcccttctgtttatcttaagatttccacttcttgaagactcttggccaactatcccagttcgggaatctgacaaccttttttggaagacgggatcatctttcaaagacccttccttatttcacctccccctttgcccaggatttggttccttagaactccttataataccaccttccttatctgctctgaatctattttctaggacatttttttcccatttagattaagccagagagagccctttcttgcctcccaagagtttttctttgtgtgactgttggtattctgaacctcttggatttgatgcctggaattgtcctagagactctcctgatttctgtctcattctttgatttcaccctggggagctggggaagagataccttcccatggcatcacttgttaagagtggatcccccttccccctttccttcagttcccctcaggcctttttcccccactgtagtcctctctagtttctcatgcccttggaaatgtctttctttgactccttctctaagtcatatttttctataactgcagagggtcttgtaatttctcttgggtggtttctgcctgtacttcagttgctaagtgcattgtagtcatttttttttttttttttt

SEQ ID NO: 20529 - DNA, 1050 bp, Homo sapiens
ataaaacatttaaaaaatgcaaatgcccccaagaggtaacacttcatgctactcaagagctgcaggaaacagctttcagagctgagggtcttaaggcttacccagggtctgggcgggtgagtgagcctgaggctaaagcaggttatcactgcatatgtcaatttaaaaagcactgcgggggagcctttgaaccgcggggtatctcgacccaggttgggacacccacacaaccgcaaggaagccgcttcactccaaccttgaactctacccaggagcccagtcacaagatccagctgtcgggggtggggcttgggggggacgcggccgtgcctgttctccaagctgattggctgacagttgtgccccctgctgcgacagaattcgagggggtggggctatgcccggacagaggatcgcctcgctggcctactctctcctcccgtacggcgccggaatcccagctccacttaccaggccgcggctaccccgccgtcccccccgactcccgccaccccgctctctcaggctcttcaggatccaagtccgtaggccctttaaggggtctagttgccgtttgcgaggccctgggactttggtcccagacagcggggatccggatggcttccgtgcggatccgagaggccaaggagggagactgtggagatatcctgaggctgattcgggtgaagactgcaggccggtaacccgggggtcagagtggcgcggccagagcggggtcgtaggaggcgggggcagggggaggggctcgccttgggaacctgctcggggagcagcggggcccttctgctctaatctagcttccgtacccacgccttaggagctagccgaattcgaaaaactctcggatcaggtgaagatcagtgaagaaggtgggggctcagcgcccaggttctggcggaggctggggaggaaatgagggatgggttccccaggcgacagctccaggctgggcatacacccacgtcctctttctctatctctttgtcacaactccaatctcggcagccctgagagcagatggctttggag

SEQ ID NO: 20530 - DNA, 1002 bp, Homo sapiens
attgcttgaaaccagaaggcagaggttgcagtgagcctagactgcaccactgcactccagcctgggcgaaaagagccaaactccatctcaaaaaacaaacaaaaaaacaaaacaaaagaaaacatggcaaagcctttgaaagcttgtctgggagaaggtgcgatgatagttgcataacttcgtgcaagatgctggtccacacaggggctgccccttgctctttctcgctctcttaacctctcatataacaggcttgtgtgttattcacatttattgagcccaagcaggtgcaaggcattgtgatctaatactttggtcagcaagacaacaagatagatcactgccctgcccttaggaagtgtatatgctattagaggaaacagataaaataaacaaggaaaagtatcagacaatgtaagtgctatgagaatgcaaatgaggtgatgtgaattaaaataggatgacttaaagtctgcacgggaaggagcctacccccatgttcctggctagccaaggaaccaccagttgattagcagagaagggcagccagtctagctagagcttttggggaagagggagtggttgttaagagatgagattaaagaagccgagacgggccattcgtgaggggtttgtaatgcagggctgaggagtgtccgaagagaatgggcaggtgagcggtgagacagttgttcttccagaagctttgcagtgaaaggaatcaaagaaatggagccgtgtatcaggtggggaagggtgggggccaagggggtgtccttccccatacagagattgcaggctgagaatgactatatccttgttaacaggaggtgggagcagggcacggtagctcacacctgtaatcttggcactttaggaggctgaggcgggccgatcacctgaagtaaggagttcgagaccagcctggccaacatgcaaagccctgtctctactaaaaatacaaaaattagctgggtgtggtggtactcgcctgtaatccca

SEQ ID NO: 20531 - DNA, 1064 bp, Homo sapiens
gtatctcacaggggccaccttctcctgtgctgggccctggtgtcccctgccagaagacacactaaactcttcctgatttgttttttgcttgctgctgccaggaagttcaactgtctgtcattctcaaatctcccctccttaagttaaaggagaccaaatctagccattacccccaatagtggttctcttttggtcaccaggagagttttctgacttagttagcatctctgtttacattacccctgtcgagctccctcttttggagtcaccgtcttgcaaccctgtcttcctcatcttctccaagtggcaaactgcctcctttttctccctcgccaaagtgtcactaatttgccggccttttccccactctagttttccttcaagttagtaaatacccacctctttgccccaaaaggtcaggagagaaatctggggtatgggattaacaaagaagtagccccaatagctattgcttaactgacacttagccttccttgcctcctcttcgccacaggagaactctgcaaactcccttccagagacaataactgcaaactatacaataggaccacaatttcctattgtgcagggatcctaggacaaagccacatcccaaatacttgctgagagcagtggctacaaatgttaacatgagattagacattgagatggtccctttatattgagagaacatggactttggagttgggcagacttgaatttgcattctggctctagtggttactacctagtgtggctttgagctattaaactttccaaagtttcgaaggacttatctgtaacatagtaatggtaatccaccttatggggtagttgtcttgaagaggctatttgggaggctgaggcaagaggatcacttgaggccaggaggttgaaaccagcctgggcaacacagcgagaccctgtgtctacaaaaaattaaaaaattaggcattgtggcgtgcacctgaagtcccagctactcaaggcagagatgggaggatcacttgtgcccaggagctccaggctgcagtgagccatgattttgccactgcactccagac

SEQ ID NO: 20532 - DNA, 1090 bp, Homo sapiens
aataaataaattttaaaatagaagtaactcaacttctgagctatggaatagttctctgtacctccagtacctaataaagaacccaaatactgcaatatatcttttcgattaaaagattttttgttttttaattgattaaaagattttatctggtctgctcatccttctattgctgccttttagctaaatccatttccttgctctcactgagtaaggaatatcatcttaatcagaaggaggaagatgtaagcctaaaattgttgtaattgttgtctttgccttctgcaagttttttagatctgcttttaaaaatttattttattttattttatttttaagacagagtcttcctctgtcacccaggctggagtgcagtggcatgatctcagctcactgcagtaactgcctcccaggctcaagcaatcctcccacctcagcttctggagtagctggggttacaagcacaggggccaccatgcccagctgtagatcttcttcgattgaccactgtgatggaaactgaataatcctatacaaaatggcaaaaaccaaactttttcccatttgacattgctttttaacaatttcttaatagttttctgttggctggccagctagaagtatcttgcttttcatctgttttcaagccccagttgttccagcagaattgcacacttttcccagctgattaactatcctttaggttataaatttgtcatgggaaatgctaacccacactggcttcctcttaccccttcacttgctcttgggccctttcaccatctagcactccagtctgtaaaggaaaatatttttttttcttttcttttttttggagacggagtcttgctctgtcacccgggctggaatgcagtggtgtgatctcggctcactgcaacctctgcctcccgggttgaagcgattctcctgccttagccttccaagtagctgggattacaggcatccaccaccacacccagctaattttttatatttttagtagagacagggtttcaccatgttggccaggctggtcttgaactcctgacctgaagtgatccacccgcctcggcctccgaaagtgctggga

SEQ ID NO: 20533 - DNA, 1456 bp, Homo sapiens
atttttgtatttttagtagagatggggtttcaccatgttggccaggctggtctcaaactcctgacctcaagtgatccacccaccttggcctcccaaagtgctgggattacaggtgtgagccactgcacctggctaattctttatctctactgttgcctccagattccctcatcttgtgtaagaagcccctatttctttaaggctgcagcagtcttgctgtgtgctccttaccttctcttcctcagtgttttctacttatctcctgacatttccttcattcattgaagactgacatctggcttagtcctgccatcatcttgggtgaccttaggatccacatgaatgatctattcatcacccagactttttggtcccttgatccccttatttccagagacctttctagccatcccacttctggccccatctctggacttccttttgaagtattaaattcaaacccccaacttgggccacaactttctatccttctagccccctcatttacttctactctgttcttggacccaccatgagacaatgtagtcccttagctcctcattttctcctaatcagctataccatcttcacctcttttcctatccagcttaagttccatggtctatcattttaaccatgctcctgccactgtcttggtgccctcttcttattttccttcctgcaaacccctggccttgtatcactttggttgcttgtttacacccaggatgcaaagggctgctgaagaaaacaccatgaccattcagaccagtgtttctgttcaggaatcctttttcctagtcagctttcttttagttctccacagtgacttcctcaaaaccttctccttacactagttcattttaaagaaaaggatacctatgttcattttaatatcataatggatagaaaatcttatctacttccaggagatagattatcatatgagaactcccttgaaattccaatactcaactacatgtttaactctatccatatttgtccttttatcctgtcctcctgtcctgtctgaagctaatgcctatacttgggctcttagtctcacccctgccaccttctcagggactaatggttagcagcgatcctctaactcagtcctttatttccgattccacttgctctttcccagtcacattaaaatgtgctcaaatctccttatctttgaaagaaatactctggacccctttagctgccaccttaccgcactgtgtccattcacagccaagcctcttgaaagcattaactgccctcagtgtctacttccctactcattttccagccctctgcccccaccacagctgctttcaccaaattaccaacaacctcctggttgctgaaaatcagaggatgttcttagttcttcacttgaccaccccctttttgaaaaaaagaatttgcttgacgtctgtagtttcgcattcctggtttttccctt

SEQ ID NO: 20534 - DNA, 1045 bp, Homo sapiens
tggagaaggcatgaaagcaccggtagtactaaaaagtaccctataaatataggcactgttaataagtaacagtaagctgagcttacatgcacacagagtaggtagaggactgccctgctttctcacttagtctatatgaattctgtaaggtcatgtgaatccagatcctttaggttgtcgacctaggcctaagaagtttgtcttcctcctagtctaaaaagctttctcctgattaaagccttctggctccactcacatgccaccttagagacattttataactctttgaaggagacaaagacacaacctctaaccaggtctctttgaaaaagatgataataaaacttctacacacaatgcactgttctttcatttctgcttttttactgcctgttttcctgagtttaactgtttcagcctctatctttgtgtctctccactctttccctctttccctctcttacttctcttttcttggttctttcttcttatctgtctgtcttgatctctattctagcctctttttctgattggccctctcccctctcttctgtctgattggcctgtatccttccatcaccccatctgtctgctggattctccctgtctgcctgcagtaatgtatgtgatagcactttataaattataaagcactatgttgtataaaacaccattatcactttgtcttccttcttaccttattttttcttcctttatctgtcttcccttcttctctctttctctctctctctgtttgcctgtctgcatcccttttggtgattttgcctgccttctctgtcagtcaatctccattccctccctgccagcctatttttctgccatccctcttctctgtctgctcagttcttgcatctctccttctgtgtttccaggtttctctatatttcttttgcctgtgtagtctctctgtcgttaggccttttatctatgcctgtgtgtctcactgtctagctgcttgtctccctgcctgtcactttcattgtggggcatcagtctctgccttcttctgtctttcagtacttca

SEQ ID NO: 20535 - DNA, 1618 bp, Homo sapiens
ttcgagcgttgggagtgcactacgtattggtacatttttgtcttctgcaggtgtggtagcatccaatatttggggatgagggaggaaggttggccctaaacctgaaggtttttcccctacccagccctttcctccatgtgtgagataccagatccactcaacatcctgtaggcttttaaagtttcatcccctaccccccatgccacctgccctacactttcagaggtggggtctctggtttggagatttgggtatttatactgaaagggtttctgaatctaccacttgccttggtagtgcccttccagctgtcactgaaatggctttattcgtcaccgtctttgggctgaaaaagaaacccttctgattaccttcatgacgggaacctaaggacgaagcctacaggggcaagggccgcttcgtattcctggaagaaggaaggcataggcttcggttttcccctcggaaactgcttctgctggaggatatgtgttggaataattacgtcttgagtctgggattatccgcattgtatttagtgctttgtaataaaatatgttttgtagtaacattaagacttatatacagttttaggggacaattgagatggctgaactactgaataaaaaaaaaacaacgctgttttctagtcctgcagaccgtaagatacttggtatcgcttctattttggttactacggtaggtgcctggcggaagggagtgggcggagatatgtaaatagaaagtgcgtacagttagaacgtccggcacgtaactgatcggagcattctgggaagaagtaatttattccttttcggcagccgaatgaaaaaaaaatttaaaaaaatgtgcgagctaatatggcaaaacaactggaaggacgctaaataataggattgctcataccagcgcgttatgaactcaccctagcttgtaacggaatctttttcactgagtgcagaatgtcggctgtttgtctgtatcgtcaggtgggataatccttacctgttcctcctccggagggcagattagaacatgatgattggagatgcatgaaacgtgattaacgtctctgcgtaatcaggacttgcaacaccctgattgctcctgtctgattctttctgacgatcacttacatttgtgttatgctgattagcagatatccacaaacatagctatgaagttctgactgggataaccttgctgtttgtctattttgcagtcttgctattgctgtttgtctattttgcagtcttgctaaatttgtttgttcttgaaaattgtgatttggtttttgttgctttctggaatttaggcagtgaaataatacaaatgggctctttgttttttgtcgtttgataactttaatcctcacttctcaggaaacattgcacatcagtaaatatctgcagtcttgtgcacatggtggttgccctcaggatggtattcaataggaactgtatttctttttccttgaggtagggtcttggtctgtcgccaaggcaggagtgcacggcgcagatgtatatacatggatacatttgtttttggagagttggttgttaaaaatctaccagtacacccccaagaaactcatcatcaccaatgacttcttccc

SEQ ID NO: 20536 - DNA, 1070 bp, Homo sapiens
ttttagtagagacgggggtttcatcatgttggccaagctgatctcgaactcctgacctcaggtgatcccccgaccttggcctcccaaagtgcagggattacaggcgggagcaaccacgcctggcctaaaatagtattcttaattcagtgcccacccaatcaaaaaagttgtaacttccccatctcagtcaatagcactatcatttagcacccagttacttgggtcaaaaacctagaaatcattcctggtttctctcttttttcttcctcacctccccagatcttccaactcttcctattgccaaccaaatccatggagaggcccacctttattacacacacaccccatcactctcatgctggttcaagtcaccatcctttctggcttgggtgataacaacctcctaactattctctctgcttcttctgttcctgcctcctagagtccattcccccaacagtcaaagtcagagcatatcattcctctgttcaaaaccctcctttggtttttcggtgtatttacaataaaatcaaaactccttatcatggctggcaaggtcctatcttcaggggttatcaacaatggctgcacattagaaacatctgaaggacttaaaaagaaaataggagaccgggcgcggtggcttacgcctgtaatcccagcactttgggaggctgaggcgggcggatcacgaggtcaggagatcaagaccatcctggctaacacggtgaaaccctgtctctaccaaaaatacaaaaaaaaattacctgggcgtggtggtgggtgcctgtagtcccagctactcaggaggctggggcaggagagtggcatgaacccaggaggcggagcttgcagtgagctgagatcgtgccactgcactctagcctgggcgacagagcgagattccgtctcaaaaaaaaaaaaaccaaaaaacaaaaaactcccaggccttgccctaacaaattcagatttcattgatctgggttgaggctggagcatccatgtcgcttttaactccccaggtggttctgaggggttcagaagcccttccctaagagttctggtccttc

SEQ ID NO: 20537 - DNA, 2584 bp, Homo sapiens
gtctagctctgttgcccaggctggagtgcaatggtacgatctcggctcactgcaacctgtgcctcccaggttcaagcgattctcctgcctcagcctcctgagtagctgggattacaggagcgtgccaccacggccagctaatttttgtatttttagtagagatggggtttcactgtgttggccaggctggtctcaaactcctgaccttgtgatccgcctgcctcggccttccaaagtgctgggattacaagcatgagccaccacgcccagccgcacccagctaattttttatatttttagtagagatggcgtttcaccatgttggccaggctggtcttgaactcctgactgcgggagccactgcgcccagccctaggttgtttattaataacccattttaatatgggactatgagcagaggctgggaagcaaaactgtcacatcagtgtttctctttgaattgggggtaggtgggtgggtggctctttagcaaggggctgaaatactgcttgcagcacattccaccccggtcatcagacaaaggcaccctcagagctaccccctgctccttctcaggctccatctggcctgagcaccctgccccagcgagtcctccggaaagagcctgtcaccccatctgcacttgtcctcatgagccgctccaatgtccagcccacaggtaactggcgcaagggggagaggactgagctggggagatgaccgtctgtgggagggtttagggatgagaaggtcatccctgttcgcattcaacctacctgttctctccttagctgcccctggccagaaggtgatggagaatagcagtgggacacccgacatcttaacgtaagtgccccaagcctgggggtggacgggggtgaggggacaatgaacaggcaggaagtcggggagataaaacctaagcacgggaggagtagggatgaagacaagtggggcggaggacaggatgggatgaggaagcagagagaaagcaaacctcttaataaccaaaaccggttctgagttgccttcctccactttctaagcaggcggcacttcacaattgatgactttgagattgggcgtcctctgggcaaaggcaagtttggaaacgtgtacttggctcgggagaagaaaagccatttcatcgtggcgctcaaggtcctcttcaagtcccagatagagaaggagggcgtggagcatcagctgcgcagagagatcgaaatccaggcccacctgcagtatgggttgatgccccctgagccgaagcccctctgctccctcacccccagctcctcattcagccccacttcatccagattgctttctctgtagctatggctagtgagccccatttagctcttagtcctggcaagccttgaatccagaaatctgcctccagtttccccttaccactcccagccctggtgtccccggcctgggccacgtctgaccccagtttgctcctatcatcttttccagctcttttatgcctttggcctgaggcctcctctgtctcttcccccagccatcccaacatcctgcgtctctacaactatttttatgaccggaggaggatctacttgattctagagtatgccccccgcggggagctctacaaggagctgcagaagagctgcacatttgacgagcagcgaacagccacggtccgggcgggtgggcacctggggcgccagtagggggctcgaggctgagggtgtgctgcttgtagctggaggtccatccttgtctgattgcctgtcgttgcccctcccagatcatggaggagttggcagatgctctaatgtactgccatgggaagaaggtgattcacagagacataaagccagaaaatctgctcttagggctcaagggagagctgaagattgctgacttcggctggtctgtgcatgcgccctccctgaggtatggtggcctgggaggccagacctgggtgtgaggctgggccattaaaacctctccaggggccgtgcaccgtggctcacacctgtaatcccagcactttgggaggccgaggagggcggatcacctgaggtcaggagttcgagactagatttgccaacatgatgaaaccttgtctctactaaatatacaaaaattagccggccatggtggcggacgccagtaatcccagctactggggaggctgaggcaggagaattgtttgaacctgggaggcggaggttgcagtgagccgagattacgccattgcactccagcctgtgtgacagatcgagactctgtctcaaaaaaaaaaaaaaaaaatggttagagtgtggtgctaataaccccaaggtcgcaggtttgatccctgtaggggccaatggtaaaactttggccaggcgcggtggctcacgcctaccagtcccagcactttgggaggccaaggcgggtggatcacttgaggccaggagttcaagaccagcggaccagcctggccaacatgatgaaaccccatctttactaaaaacacaaaatttattaagcagacatggtggtgcacacttgtaatcccagctgttcgggaggctgagacatgagaatcacttgaacccgggaggca

SEQ ID NO: 20538 - DNA, 1013 bp, Homo sapiens
tttaaacactggagagttcatataaaaatctggatgtctagcacctcttgagaactcggcatatgtggccacagtgggtccacaatttctgcacagcagcaaatgaggagacgcagtgcatgtggcactctccaggtggccaccctcagccactcacatgcatattcgtttctgtggcccactgctgaagaaaggccactgcggggcatggtgccatgtacctgtaatcccagctacttgggaggctgaagtgggaggatcacttgaacctgggaggccaaagttaaagtgagccatgatcgtatcaccacactgcagcctgggtgacagagaccctgtttccagaaaaaaagaaaaaagaaaaagaaaaatggccagcaacagacctgtgtatctctaggaacttatgatagaagtggcatttcaatcagtgggaagggttgtattattcagttaatggggctggatcaattggctgtccatttgacaaaaatgaagtctgacccctaaacattaaacatttaaaaataatgataaaaatattggggggctgggtgcggtggctcacgcctgtaatccaagcactttggaaggccaaggtgggtggatcacctgaggtcaggagttcgagaccagcctggccaacctggcaaaaccctgtctctactaaaaatacaaaaattagctgggtgtggtggcaggcgcctgtaatcccagctactcaggaggctgaggcaggagaatcacttgaactcgggaggcagaggttgcagtgaaccaagatcgcactactgcactccagcctgggcaacagagcaagaatctgtctaaaaaataaataaataaataaataaatatatatatatatatatatatatatatatatgtatgatatatatatgtatgatatatatatgtatgatatatatgtatgacatatatatgtatgatatatatatgtatgtatgaaaaaagatgtttgtgatcttggagaaaaatattaatacatctgg

SEQ ID NO: 20539 - DNA, 1114 bp, Homo sapiens
gacatctttttccattctatatgttctagtctgctcgcctcctagcaacttggtagaattataaattctaagagcccaggcctactgaggcaaaattagggcttatgacccaggtgtatgttttaataagccctccagttgattcttactcaagtttgagaaacacatctatgaaacttgataatctcctgcctttgaacctttcaacttgctgttctcttccagatacctgtgcatagatagattgctcaccactttaggtctctgttcaaatgtagggctttgcttgatcactctagaaagcccctcggcctcctcacacttgccttcttactctatcaaagtgatgtagattcacttgtaaatgttttcgggctccctatactagaatatgagttcagtgactgtggagatttttgtttggtctgcatgctgtatttccagcacctcttttcaccctttcctcgcattcataagactaaaatttatcataatttggatgtcttttaggattggaactgttggagtaagatcgtattgtcatcttctcactaaagattttgcaggtggaattatgtgtggatgctacctttaatttctagcattaaaattctgaagttactttattatttttctgtttgggggtggggttttttttgttttggacagagttttgctcttgtcgcccagcctggaagtgcaatggtgcgatctcagctcactgcaacctctgcttcctgggttcaagcgattctcccgcagtagcctcctgagtaggcattcaccacaccctgctgttttgttacttgtttgttttttgagatggagtctcgattgatcgcccaggctggagtgcaataatagcaccatctcagctcactgcagcctccgcccccccagggttccagagattctcctgcctcagcctcccaggtagctgggattacaggcatgtgccaccatacccagctaatttttgtatttttagtagagaaggggtttcaccgtgttggccagactggtctcaaactcctgacctcaggtgatccgcctgcctctgcctcccaaagtgctgggattgggggcatgaaccaccgcacccagcctgaagtta

SEQ ID NO: 20540 - DNA, 1013 bp, Homo sapiens
tttcagtttttaattgtattatttggtgaaaatcttttttttttttttttttgagatgaagtctcgctcttgtcccccccaggctggagtgcagtggtgccatctcagctcactgcaaccttcgcctcccgggttcaggcgattctcctgcctcagcctcccgagtagctgggattacaagcgcccgccaccacggctcggctaatttttgtgtttttagtagaggcggggtttcaccatgttgggcagggtggtctcgaactcatggcgtcaggtgatcagcccgcctcagcctcccaaagtgctgggattacaggcgtgagccaccgcgcccggctgagatggggtctcactcttacccagactggagtgcagttgcgtggtcatggctcttgtgggctcaagtgatgctcccatgtaggaccttttttttgtttctgtagagaggggtctcactttactgcccagattggtctccaactcctggggatcctgcccgaaaatcagtttcctcaaacgtcagatgatgtgaccataattaggtgacataatcagaacattgctttgggattaatccttttatcaatatattgtgactacccaacaggctcattttgcctgctgtccagatagagccgatttatctagacaggaattgcaatagagaaagagtttaattcatgcagagccagaacgagagaccagagttaactactcaaatcattctcccggaaaatttagggatgggagtttttttaaggataatttggcaggtagggggccagggagtggggcgtgttgacaggtcgtatcagagatgaaggcatagggagttgaagctgtcttcttgctctgagttggttcctggatgggggccacaagatcagatgagccagtttattgatctgggtggcaccagcggatccatcagtgcagggtctgaaaaaaaaaaatcacacaaatcttaggctttacagtgtgttatccctaggagcaattggggaagcctctag

SEQ ID NO: 20541 - DNA, 1114 bp, Homo sapiens
gccactgtgcccggccgggtttttatatactaatatttagatactatataaataataaagagaacctgttgatagcagagactctcctcactgtatccactgaactgcagaatgcctaacatagcataaggagtgagcaatggcaggtgccaggctaacttcatagagttagcaaaaaacttgacatctgccagaaacatgctacaactatcgaaagtgcaggaaacgaagtatatagatatactttgtgcagctttttcattgatctaaaccttgcttgcaaaattttcaagatagaaagttaaaaacaaagatatttcacttgcattatttcatcttaaggacttaaagctaacaaatccatgtaatcttatatgtaagccagcatgcctttgcctttgcagcccctgcccctcaatattttattcacactatgcatatggtaggctggaacttaaaatcaggatacatcaaaaaaagaagataacctattcaaaagaaccagattgtactgtggaaaaaggcagaatagtgcttacaatagtcaaaataataggtatctttacagaaatccatgaacttgagcttgaagcaccctggaggacattgggataaggataaaaagggggaaggagctaaagtgattttgaacacttttgaagtccactttccaaacactcggagataggttgatgtcacagctccctcatgaaaacctggaggacagtgcctgacacacaggtgtaatagaaatcagccgaccactgcggagaaggaaaccagctgcctcattccactaaacaaagtgcccggcatgtttctgactcatcatttgacagttttatctcccagagggccaaagaagcaactagggcagtagtttttaataagaagattgggtgaatttgtacagcattcctgaaggagattgcaagaattggaaggtggatgcttaatagattcaaaagtcatttttgaaacttttgtttttgtagtagaaactcttggaattaagacttggccaatcccggccaggcacggtggctcacacctgtaattccagcacttgtggaggccgaggcggggggatcacttgaggtcaggagttcaagac

SEQ ID NO: 20542 - DNA, 1162 bp, Homo sapiens
tcctcacttcccagacggggtggcggccgggcagaggctgcaatctcggcactttgggaggccaaggcaggcggctgggaggtggaggttgtagcgagccgagatcacgccactgcactccagcctgggcaccattgagcactgagtgaacgagactccgtctgcaatcccggcacctcgggaggccgaggctggcggatcacttgcggttaggggctggagaccggcctggccaacacagcgaaaccccgtctccaccaaaaccagtcaggcgtggcggcgcgagctttcaatcgcaggcactgggcaggctgagtcaggagaatcaggcagggaggctgcagcgagccgagatggcagcagcacagtccagcctcggctcagcatgagagggagaccgtggaaagagagggagagggagagggagagcgagtaaattctttaaaatgatcaaagtgttgaaagaaatagaaaaagaaagcagcaggcagtaccctgtagaagttaaatgtgatgtagacaagaataacgggacagggtgacctgcagaaattctctgcaggagagcaagagagccagtcacaaagaaagctgggagcatatttgcatatctgttataacgataaatagccctgctattttgagcactcctgagaaatattctttggctctcaagaatgcatttgtcaaaagagtaagttctctttaattcatgtctcctacggtacagtagtcagtgcgggtacctgttacaatagtctgctgcgccacatcacatcatcattctaaaggcaacttaaccaccaagcaagctggcttggagaaagtgtttcagggcctttgctgggctcgggacgtgcttggtccacatcactgtatctttagcttatgtccatggtagttttcatattcacttcatagtgtttgctgcaaactacttgctaagataggaatatagaatatgagtttaaaagctttccttcaaaaaagagggctaaaatatttaaatctgaaaacaatagagttttgtcatctggacaattgacatcatttcgcagataaccaatttcaaacagaatattgtacaaactgccatccccaaaactcctgttaaggtttttgcgttgttaacatcatcattttcctttgttggtacagataa

SEQ ID NO: 20543 - DNA, 1050 bp, Homo sapiens
acttaccctgttttcttattgggttgtttgtcctactattgaaatataagagttctttgtatattctggcaacaagccttttatcacatgtgtttcccaaatattatctcccagtttgtggcttctcttcattttctttgtggtatcttttgaagaataaaagttttaaattttgatgaaatccattttaccagtttttaattttatggttcatgctttttgcattctgtctaggaaatccttgtctaatttaaggtcatgaagattttctcctgtttgctttgagaagttttatagttttagcccatgtatttaggtatgtgatctgctttgagttaagttttatatgtagtgtaaggtaaaagtctaggttcctttaattttgttttgtttcattttgcatatttttcaagcaccatttattgaaaagactgtccttcctttccctattaaattaccttgacacatttgttgaaatgaattaacttacatacatgatcaattcctggactgtcttctgtttcactaatctgtatctctgtctttacaccaataccacactgtcctagtaaatttatagctttttgaaatcaagtagtgtgattcccccagccctggtcttctttctcagaattgttgtgattagtctaagtccttttcgatttcccaataaacttgagacagcttgtcagtttcctcaaaggaagccctccaatcccttgactgtttatatgatgaataatactggtatgtttactagtgtcagtccttcttagcagtcctagaataaaccattcttgatcattatgtttgttttgcaaaatgtttaacatgtttaatttttttttcttgtttctttttttttcttttttgagacagagtctcactctgtcaccaggctggagtgcagtggtgtgatctcggctcactgcaacctccgcctcccgggttcaagcgattctccttatatatatttttataagtaagatataaccataccatatttgcttttattttgctttgagatggagtctcgctctgtcacccagg

SEQ ID NO: 20544 - DNA, 1034 bp, Homo sapiens
agtgctacatcaatacagtggtaactgttaaattaactgccttaaagttttcaaataaggcagagttaaaataaacaagtattaatatgttcttaattgaagtgtcgtgctaaatttcatttcatgaaagccagtctgttttattttcaaaattctctgcctgatttacgtgccccatgcttaagttgatcttctctgttcagcgtgacatttttttctccttgtgaccactttatagatgctaattttttcctttagtggagtccattatcataaccaggattaagaagccaacaaaagttgctggatggcagacagaatgaaagaactgaggaaaagatgcagtttcttttttagaaatttttcccctgatgacttgagtaaagacattagattaacgtacatctgcttttatttgtgtgtgtgtaatgtcttttagggggaacttgaacggcagcttttgcaagcaaatccaattctggaatcatttggaaatgcgaagactgtgaaaaatgataactcatctcgttttgtaagtttcaaagcaccagaagcttttaattccttagatttctagttaaatgtttactgtgattaagcaaatgaattacttttcttcctagattttaagaagctaatagatgtagttctgtagacataatacaagctcacatgtaattttaaattttctagtagtcacatttgaaaagaaaaaaggtaatgtgtaagtaactttcatcattttatcatacagaaatgtataactctgtcttattttatggatatgtaatttaacctctctgagcttatttatctttgattgggcatgataataacacctgtcagtggaatcggagtagagaataaatggtgtgcacgctgagcacttagcccggcactatgcatagtaaacattcaacgcattagatgtggtaaactgaccttttcctaccttgctattttctgtgggatttggactttggaataatttgtcactactatgacttctctttaatttttttttttttttgaga

SEQ ID NO: 20545 - DNA, 1022 bp, Homo sapiens
gccacactggaagaagaaaaattgtcctgagctatgcataaaatacactaacgatagctgatgagctatttaagaaaaaaaggtttgtgcataattttcatgatatccaccatcacagataagcaaaaaatgtcctcacatttaaagagttggacacccgtggaacctctgattatacattcattcagcaaagcatttgccaagcatcattttgacctgatactgaccgagttaggcacaggggatacaaccaggttacttgaagccaacacaagaagaatagaatcagtggatctctctctctctctctctctctctctcactcacacacacacacacacacacacacacacagagaggaaaagaaaagaaccaatagaaaatttgactcaaataatccttttagccatatctaagtaatattaaagtaagatatgcattactggttttacctccaagttaggaaaactctttaaagatggactatcaaagtctttttcttatgatttggtaggatggtgtgtgattttaaggaatccaaagtctagcagtagatatttagtattaaggtaatgtcccacttactagaatgccagtgtttttccaagtttccacattctcatcacatagattgaattaggtttaaaaaaaaaaaggcttttagagacccaaacagttaatgcaaagtgagtataccaagggctttgcaagatattggtcataggaatgctgatggaactgactgctgaccccgggggggtggaggaaggcagtctatcaccgaataatgactgacatttttaatttttattttttattttttggagatgagtctctcgctctttctcccaggctggagtgcagtggtgcgatctctgctcattgcaacctctgcctcctcggttcaagcgattctcctgcctcaggcacccgccaccacacccggctaatttttctgtatttttagtagagacaggtttcactgtgttagccaggatggtctcgatctcctgacttcatga

SEQ ID NO: 20546 - DNA, 1046 bp, Homo sapiens
tcaaccgcagtattgtttgtctgattctaaaatacacttaaaagaaggcaacattggccaggtacggtggctcatgcctgtgatcccagcactttgggaggccgaggtgggtgaatcacaaggtcgggagatcgagaccatcctggctaacacggtgaaaccccgtctctactaaaaacacaaaaaattagccgggcgtggtggcgggcgcctgtagtcccagctactcaggagactgaggcaggagaatggcgtgaacccgggaggtggagcttgcagtgagccgagattgcgccactgcactccagcctgggcaatagagcaagactccatctcaaaaaaaaaaaaaaaaaggcgacattgagaaacctgagggagagtgtttgggaaggtattcctagaggaggtgaagctggatcgaggccaaagggacatgcaggagatatcccagtggttctgtgtctaggaagagtatgttggaagaaaggatatagtgtgatctctgtgtaagtaaatgaataaaggaggcagacattgactatgtactataaatgttggctgtggcagccagaaggaagaataacaccaggttatgagctattagaatgaaattagggccgggtgccatggctcacacctgtaatcccaacactgtgggaggccgaggcaggtggatcccttaagcctaggagttcaagaccagcctgggcaacatggcaaaaccctgtctctacaaagatacaaaaattagccgggcatggtggcacctgcctgtggtcccagctactcagtaggctgaggtgggaggattacttgagccgaggagacggaggttgcagtgagctgagatcacaccactgcactccagcctgggcaacagagcgagactctgtctgaaaaaaagaaaaagaaaaaagaaattagacttgagcaggacagtactgtgttctttgtaaatctcagtttatacatagagtatatgaatggatttgtttaataatattatgtaaaaaagaatacgacatagtgaacggagcacttatttc

SEQ ID NO: 20547 - DNA, 1056 bp, Homo sapiens
taatactctattttatttttattctagacttattctggactcttctgtgtagttataaacccttacaagaatcttccaatttactctgagaatattattgaaatgtacagagggaagaagcgtcatgagatgcctccacacatctatgctatatctgaatctgcttacagatgcatgcttcaaggtaattggaaatatttgaatactaaatgctcagaatttcttaaatgtaatttactgttttttaatgtctcaatgtattctacaaaagttaaattttatttttttaaaattaataaaaaagtaatgtttattgtagaaaaattgagtttttaagattaaaacagacaacacagccattttctgtaagtatgataagtatgtttgttgctctaaaacaatacctcataaatttgtatgttaaaaagcatctagttttcatatacatttgattcccaccacaaggcggtctaaccaaagctcattatattaggttttaaaaccaataggaagaataataggaaaggtagatgctgcactggggaaagaaaaattgtaaagtattatttgtgatttaaatgcatgtaaaagggtgacaataaaagttaaaaagcatgtgttaagttggttgattttgattgtattcctttggatcagaatgaatataaatttgaggagtcattcatttgaaccctggctttagacacagtgatttatggagggacatttttaaaagaccggaatgtagtggttttgaatgcaattaatattattgctctacaagacttcatttaaacatgggagttcctggtgctacgtgaaaacccaatcttctgtaataactctccctctctctcctttttaatgtattttttgttactaaattctataagttttaataaaaagcataaggttcttataaaatcgttccacaatcttcagaaaacgggctgtgctgcacccacttttcatcaaattgcaggtcatggcaagttctttttggtgatcaggtctgaaggatagtgtgaaggaattaataaagtacaatacccacgt

SEQ ID NO: 20548 - DNA, 1052 bp, Homo sapiens
cagcctggtttgtgcatgaggagtggcctcatctgccagtcacctaaaaattttaatagtgatgggcattgtgcagatccactgtggcactgggagctgcaaaatggtgagtccagtgccattattccttctgcgtttgttagcttagcgaattccttttaattcaatgtgtattcctccacacacacagttttctcaagttttttttttttacagagtgtttttgctattttctctcaaagaagcaatagcaactaatgttagttatccttcctctgccctctatgtattattattactgataagttttgcctttgtaacgtcattttcttttattattttaccattgttctatttttctttaagaaggatgctctcctataataaatgtctgctcttatcacttgatttcctgaggtatccattctgccctttattttctccactgtggattttaattttacgttttcagatgattccttacagtcttttctggccctggtcacctattttttttcttatgcatttctgtcctaatacgtagactctatgttatactatattctgttacagatataaatctgtctcctaaagttttcttttagttattttatagataatttccacaggtaatttatttctgaatcctctgaatgatgatcttattatttaggttttttttcaaaatttgcatgtgaattttaactaggtgcagtgtttgcaggtggtatgggtgaattattctttccttcctccctttccttctcgatggtggtctgatttcttctgagagctacagttgggatgtagggttacatgatattcccagttcaatccctgttcgtagtaggagactattgtatctctgctccattgcgttgacatttgcaccagcctacacttcctgtttctctaatcctttgaacctatgaaacaatgcatatacatagccctgctttcttaaacagaggccgggcacttccaggctgaaaaatttcccaatcggctgggcgcggtggctcatgcctgtaatcccagcactttgggaggcc

SEQ ID NO: 20549 - DNA, 1048 bp, Homo sapiens
gtagctgtttccttgtggtcatattaattctggtaccacttcatgaaccttttattacccatctttgttttctttttttttttcccttcttaactccctgtttaatttgtggtgagggtgaaagaggagataaagaaaaaaaagggtcaacttgtaactttgccttttcttttcttttcttttcttttttttgccctcagtaactgagggcaaacccatcagacaaccagagccataatttgtggtcaccgctgaaatttaccttggaaactcggttagtatggctgtgaagaggtataccccagctccttaacacagagttaatgcttaatctaaggttttaagtttcttagaaaagaaaaacgtgtacattcttttgtttcttaaacatctaattttgccctcctcctcttctcttagaggcaattgcttttggatcgttccatttacaatggcgcagagaactggactcgaggatccagagaggtatctctttgtggacagggctgtcatctacaaccctgccactcaagctgattggacagctaaaaagctagtgtggattccatcagaacgccatggttttgaggcagctagtatcaaagaagaacggggagatgaagttatggtggagttggcagagaatggaaagaaagcaatggtcaacaaagatgatattcagaagatgaacccacctaagttttccaaggtggaggatatggcagaattgacatgcttgaatgaagcttccgttttacataatctgaaggatcgctactattcaggactaatctatgtaagtatttcttccaaataatcatgtgaagtggtagctaggaattaatgtaaattatacatcttgtcataatcaaatgagaatgtggaatacccaaactctctgtttaacatttctatttctctttaagatagaaagatttgttgcttgcttacccatgtcttgcttttctttgaatcttaacacattaagtttaaataatacaggctgcaattacatataataaaatggcatttgaagacttttgtagtg

SEQ ID NO: 20550 - DNA, 1050 bp, Homo sapiens
gctgcctgacgctaggacgaggagtctgcagtcagagcgccagcctcctgccgcggcccacctgccccgcggcccgcacagccaatgtcagcgcagcgcgccggccgccgcggggcccgcacccgcagcctcgcgggatcgccgggcgttcagccagcctcagctgtccatctacgcacgagccagccaatcccgcgccactgccccggccgcacctcccggagcctatgacgggcgtaagagccagcccatgagattggggcctctgtggcctgggctgggagcgggagccaatgagcgtcattccaggtgggtggagggagccggactcgggaaggtagcttcgttcgggttgctaacgtcttcccttggagatgggcgcgcaaaccaaccagtgggtctgggggcggcggtgatgggcgtggagctggcccaatgagggtaggggtgggtggggcagccccgagcagcagtgctaaaggagcccggcggaggcagcggtgggtttgggactgaggcgctggatctgtggtcgcggctggggacgtgcgcccgcgccaccatcttcggctgaaggtgagaggtgcggctacccgggtccgagtgcacggcccagggctgggggacagtttgtggagggaggaatggctcctgggctgaggggtcccgggcggctctggaggacaggaacgggggaccgaagcgggagctggggaagacagaggggcttctgagctgtagggtttgtgctgcggggaccttaggttagtttgagcagggtcctgggctgggggcactgggacctcagtgggtggagatggagagactcccggaggagcggggaatgaagtccttgtgaaacccgcgggggtcagggcctgggtgtgcaggagggcgacccctggggggctgggggatggagatctgggggtggggacgtgaggaccaggttctcggtgggtgggatccctgggggcgcgaggtcgaggggctagtgtcccggcggaggtctcggcgtgccccgcgagccagtgtctgcctcccaggaag

SEQ ID NO: 20551 - DNA, 1024 bp, Homo sapiens
ttcatttatttctttggttgtttgctagtttgtcatttactctttattgattttcctggagagctcccttctacatgctatcttctgctccaatccgcactggctctgcacccctgttttgagaactgcttgtcattctggcatttctattcattgttatcctgtgtgattattctgtttctctgatctcattttttcccttttatcacagttttcacattttgttgaactatattctaaaccttctaaaacaggggggcaagagtggtatgccttatgaattctcacatgtggaaaaatgctttataccatcctcatgcttgatagttttactgggtatagaattctaaataatagtttatcttcggagctttaatgtctgatcatctccagtactgatgagaactctgacacgagtccaatttgtttgtgacctgtttttatttatcttgttactgccgtattgttcgtttttcactctggaagcttttagggcctttcttttgttgctgttctgaaatgtcaaaacatggttagggtgtgggtcatttactttccaagtgctctttcttattctagattattccttctccattggattctgtcattatttttatgggtacaatatttttttctagtttcttcaagaatactaacaagagtcttccacatgttgtattttgttttcaagttctcttctgttatcagaattacttctgtgtcctgggtggggaacatcacacactggggcctgttggtgggtggggggctgggggagggatagcattaggagaaatatctcatgtaaatgatgagttgatgggtgcagcaaaccaacatggcacataaatacctatgtaacatacctgcacgttgtgcacatggaccctagaacttgaagtatttaaaaaaaattatttctgtgtcctctagagtcagtttttctatttgcttattctgtgccttctatagcatgccatagactttgctcaagtgtgtgatgtatcttcagagcgagttcata

SEQ ID NO: 20552 - DNA, 1058 bp, Homo sapiens
gggattacaggcatgcaccatcacgcccggctaattttgtatttttagtagagatgaggtttctctgttggtcaggctggtcttgaactcccgacatcaggtgatctgcccgcctcagcctcccaaactgctgggattacaggcgtgagccaccatgcccagccattagatcttcatttttgaaggctcctgtgtcaagtaaaacactgattaaataaatctgttatgcctctgtcttcttaacccatccttgttataggaatgtcagccatgaccctgctaatgggtgaggaaagatattgtgcctttccacccatgcagtctcccatgtcccttctgtgttggaatgcataagcactagtgtcttatcaccagggacatgtggccgacaagttctgcctcaggacacaggacccattttctgcctctcagccaaaggatgatcagggtcgtaactccaccagagtccaactttatatcagaaaaagctcgtagctatgagcaacagaaaccatctctgaccacataagtgcaaaaggaatttatcgaaagaacactgagtaatttgaaaagcaaatcaccaagaagactagatgaacaggctagaaaacagggaaggaagctgggcacagtggctcacacctgtcatcctggcgctttgggaggctgaggcaagcagatcacttgagcccaggagtttgagaccagcctgggcaacacggtgaaaccctgtctctacaaaaattatccaggtatggtgacaggcacctgtagtcctagctactcggcaggctgaggtgggagaatcacctgagcccaggaggtcaaggctgcaatgagccatgatcgtgccactgcactctagcctggatgacagagtgagaccctgtctcaaaaagaaaaaaaaaaaaaggaaacagggaagaaccaaaggtggctaaaaccaagactgcaacctcatcacagacccatctagtggaggatctcattgacacactgctggatgcctcccgacccccaaccttttcccactagctagcatggctagcgctggacac

SEQ ID NO: 20553 - DNA, 1077 bp, Homo sapiens
agttcataagtcacattagaaggggtttgaaatgctaattcacagctgttgacaggtatgaattcccatcagcctggaatgtttcgcctattcaaagtaatagagcatccttgaatataatctcttttaaaacccagaaatgtgatacctggttgcttcaagctaagaaagagaaaacttccctgagatgcccagagcagttttgtctcaagaaatcaataaacacatagccatataaccccccagaaatgttcctatagagctttatgtatagctttaggtatttatgttcatgtgagtatatttacgtgagtgtgagtgtgtgtgtgtgtgtctacgtgtgtgtgtgtgtgagagagagagagcccaccttgaatgccatggttgtattagtgtaactataatttatttttcgaaattcttgaggtaaagatctagctcatatattatcttttttaaaaaaacttattgaaggttatttctgattttaaaaaataatcaatttactgtagaaaaatggtaccataaagaacaataaacaaaataaaaattcacttcctacaaatcatgactactaacagtttgggtgtatctttccagttttttttctatgaatgcatatagcgtgtctacatgtgctgtggtttgaatgtctctgccaaaactcacattgacatttgattgccattatgatggtcttaagaggtgagacctttaagaggtgattagatcatgagggccgtgccctcatcagtggattagtgctgttatcaccaagtgggttacttatgttagaaataaattttcagtgccgcaaaagaaatagcactcaaacataaatttaattttctcagcaaggcaattttacttctgtagaagagtgtgacttgcagatggagcaatggtgagagcacagctgaacaagagaggggaaggggtttttattcctgacgcaggtaacccctgctgctgtgttgttcccctattggctagggttggatcacacagtctaagctaattccgattggctattttaaagagagcaggggtatgagtcagagtggtggggtgaatagt

SEQ ID NO: 20554 - DNA, 1079 bp, Homo sapiens
tgcaaaattgaagacctttttttcccttctgtttagagacagggtctcgctcagttgcccaggctggagtgcagtggcatggtcatacctctgtgctaagctatcaggaggatcacttgagccctggagttcgtcccctgtagctgaaactacaggtgtgcaccaccatgcccagctaatttttttgtttgtttttttggtagagatgaagtctcgctttcttacctaggcttgtcttgaactcctggtttcaaacgatctaccttggcctcctgaagtgctgggatttacaggtgtgagccactgcacctaaaaattgaagactgaagcagccttctcccaacttggtttcagctccttattaaaagatgtttttgtgttcggtcatcttagcagcatgcaaaccagttttcttatttttgtagcagtcaaactttacagagagggctgttgtgcacttagctacttattctggaaactaatggaaatcctcttgaatttgggacttcacattagagaaactgtcatcttctagagatgtatgactttgtcaataaaacaattgaaatcagtttgtacttttgcaatcataaccatagatgaggcattgcgcccttcactctttctgaaaattaagacttctggagtatttaaaaattttaattttttatattttattttattttatttttttgagacagagtctcactctgttgtccagctggaatgaaatgacatgatcacagctccctgcagcctcaacctcctgggcacaagagatcctctggcttcagccccctaagtagctgggactacaggtgcacaccaccatactcagctactttttgtattttttgtagagatggagttttctacaaaaccacaggctaggctgttctcaaactcctgagctcaggtgatccaccttgccttggcctcccaaagtgctgggattacaggcgtgagccaccgtgcctggccagtctttttttcttcttattttttaaatccctcagagaggttccgtcagttgggagccaatcaggaaaaagaataaccatactaggtatttcactcag

SEQ ID NO: 20555 - DNA, 1024 bp, Homo sapiens
tgagtacctgggactacaggcactcgccgtcatgcctggctaatttttattttattttttatagacaggatttcaccatgttgcccaggctggtctcaaactcctggactcaagcgatctgcctgcctcagcctcccaaagtgctgggattacagatgtatgacactgtgcctgaccaacatgctttttatcatattagctcttttgaaccttataaaacataggtaagaaactgagttctaagtagtcttgtttatttaacagactttagagctacttttgtctctcagagaattatttttaatcttttaccacaagaataagcaattaatctggaacaaagaaggaactatgccagttcctttatttatcatgctgtttatcaagaatatttctatctggctattgtttttacttcttctttcccttatcatggttcattgaggtaagctagttaaatctcttggcccctttttctttacattcttgtgtgtctgtctctgtacccgctgtgtcatccttaattcagtatcaatggagaaatgccttgtccttcatcagtgcctatctgccttcaaaaccatcttgtcctcaagttttcccattcatctgttctcttcttcatccatgccagcacagatagtggatatcatctgtgtgccaggtactgggctaggaactggagctaaaaatgtagataggactgggcacagtggctcacgcctatagtcccagctacttgggaggctgggatgggaggatcccttgaacctaggagttcaacgttgcggtgagctatgattgtgccactgcacttcagcctgggcagtgatgagatcctgtttctttaaaaaaaaaaaaaaagggtaaaaggtagataggacttaagagtataggagagaggggacacatgctgtaaatcactaatgactgcaggtagtacagacgggtctgagtcagccaagggctcagaggtttccaagaggctgcaacacaggagcagaggtctgaagaattagtaaga

SEQ ID NO: 20556 - DNA, 1051 bp, Homo sapiens
attcctcccatagttaatttggcctgtgtccaggactgagcaaaggacagccagcctgagaggctagaagcaggatggagtcagccatgctacatttctctcgatgtcatcatctttgcaaggcagtttcaccctagtccaattaagttgggatctctgagaatgaagcctaggtaaggtatgacttaaaataacccacatgcttttaatgtgcaaccagggctgagaagcaggtgtaaggtaacaggaaaccttcacgtcagcacagctctggagacacttggagatagggaatgagaactcaagggaaatgactgcctggagtggcccaagtggggttcattataaagttgtaaataaatccaggagaactcattactgttacaagcaagagcagccagggcaaagacgtgagaaaactccaaaagaagaagggatgccagcatagaagctggaaatgggttagtatgttattttgggatttgtagatgagagtttcaaaggctgggtgaacagcctatttcaaaagccatgaagaagctggataagatgatacagaagaaaagccattgctttttgttgttgttgttgagacggagtcttgccctgtcagtcaggctggagtgcagtggcgcaatcttggctcactgcaagctccacctaccgggttcacgccattctcttgcctcagcctcctgagtagctgggactacaggcgcctgccaccacgcccggctaattttttgtatttttagtagagatggggtttcactgtgttaaccaggatgctcaatctcctgaccttgtgatcctcccgcctcggcctcccaaagtgctgggattacaggagtgagccaccgcacccgccgaaaagccattgcttttgtaacagtcatgtcccagggtcattgatgggttcactagagtatgtagagtagaagccaggttctaggaccttatttgaggctacagataccaggaacttgttaatgaaagaaaggtgcaaactaacacaggagaaaactagggagggcgtcaacatcaagtgaag

SEQ ID NO: 20557 - DNA, 1075 bp, Homo sapiens
gtaaatgttgggccttctcaagagccaaaaatgcctttcatcttggaagtagtacttatctcccagggcgattaatgaatttagtccactctttggaaacagtccaccatgttttccaaggcatcccacacagccaatacctattaggttttaatgtttcttccatctaatttacaagctttttacctttcctatgaatatcagggcatgagaaagaaggaaagaatactaaaatagctgggcgtgatggctcaagcctgtaatcccagcactttgggaggccaaggcaggcggatcacgaggtcaggagatcgagaccatcctggctaacagggtgaaaccccttctctattaaaaatacaaaaaaattagccgggtgtggtggcgtgcacctgtaatccctgctactcgggaggctgaggcaggagaatcacttgaacccaggaggcagaggttgcagtgagccgagattgcgccagtgcactccagcctgggcaacaagagcgagactccatctgaaaaaaaaaaagaatactaaaatagtatggtggttaaaaacaagggctttggaatcagagatacccacttcctccattttctaggtgtgcaaggaagagcaattcacttaatcttctcaaacctcatcccttgtatgtagaccagaggtgattgtacctaccttacagtttgtgaggattaaactaaatgggatcgcgtatatgcagggctcagtgcagtggctgccctggcttcagtcccggaagtcctccctaaaggcagctattgttgtcgtcgttgttcgagtgatccgataccgcatagcgctgttcagtttttcatactctgtgatgacaggcgtgctgcttgaagaaatgtttgaactcgccttttctcaagttcattttctccaggtgatcctgcacacctgtgatatggctgatctcagggtatacatttctccggcacacaaaatttccttttcaccacgcacaattcatccctgatattagtcactgaacttggaaccgtctggttttgattggctagtcagggttcactgaggcaaattccttcc

SEQ ID NO: 20558 - DNA, 1045 bp, Homo sapiens
attgacatttgagttgaaccttaggggaatgaatagaattttgccagatggacaaagggggtgggggtggggacactccagactcatgcaaaaacatgagagtgtgaaagttttgcctttgtctgagcggtggggagcagtctggagggccgaagtagggtgtggaagcggggatgttgaggagatgatgtcgtagagagatcgtagccatgttgtagcttctggggagtcagggaagtttttgaatagggaagtgatagggtgagatctctgttttaagaacaataattcttgcagcagagtgtaggatgatttgaatgagggtaactggggacaaggagaccgatcagaaggctgtaaccatgttgtacatgagaggtgatgggtgtctgagccaaggcagtaccaatggggagggcagtcagggcttggatgtgagaaccatctctgagggaggccttgtttgttgatgagatgtggttagaagggagaccaaaaaaaaaaaaatggcttggatgacttgggaatacagtgatgctgctcaccaaaatagagagcgtacgagaagaagcagcttatggggtgagagtcatgaatttgattttggatatgttgagtttggggaggaatacccagttggagatttttaaatgaaaagacacaaatgcagataaagaacctgtagggagatattatgggtagagacaaatttgtaagtctgtttagcaccgtgattttcaatcaggtaaggggtgggaggacgtgctttgcctgaatgtttttatatgtggggtttctttttaactatttgtgtgctactccccccaaaccctccagattctggtattgtcctgctaggaaggagagcacgtccctccccacccctagttcagaattcaccaccataatgactcaagggaatgtgtctgatttcatatgtgctgggcatagaatgaatgtctttaagcattgctagcatttattcttttttttttttttttgagacggagtctcgctctgccgcccaggctggagtgcagtggca

SEQ ID NO: 20559 - DNA, 1068 bp, Homo sapiens
ctccttccgtccctggtccttccctctgctggctggtgactcactcagctcttgtgcaacagcccaggctctcgctcagagaagagctgttttcctccatcccataagcccccgtcctaatttatgtcttttcatttgggttaatgctttccacatttaggtctggagattagcgtgtggctcattgatgcaaccaccaaaaccccagtgccagcttgggtctggcacagagaggcagccagccagccagccagacagacagacagacagaggacagcttggagcatgacccccagcctgttggtctgcagctggcccagccctgccagccacagaggcagagcgaggaggcagccctgactcctggcttgccagagaatcattctcatgccagtttcctgtgaaggacacgcatcttggaatggcgtgaagaggagattgccccaagcctgtgacttctcattgaggaaactgtgtgtcgggaagtgagaggcacaagttctagggtgtggaaaaatgcgatctctgtggctttcaaagctgtcacacaacacagtgtgtgtgtgtgtgtgtgtgtgtgtgtgtgtgtgtggtttttctcttctctttagaacaataatattacctttgttgctatggtgttgttatgggggtggctaattggacacagccctgatgctggctggtgtgtggtgtccatagtgattatcagacggcagccatgggacctgctttgattttcttccctggagtgagaagcaggcagaggatcactcggtggctgtgtataccctgcctttggtggtggcaccccagtcagaaacgggaccctgaagctgggatttaggtaaggggaggacctttccaaggcttgtttacagctcagatttgcagaggaccaggtatttgggaactcctcttctgaagaaccagattgcagggcagggcacaacgaggggcctgttgcatcttgggagcacagggctgtgtgctctggtaacctgggcccactcacctggcaggcactggcttccttcccagtgagactgtagcattgacggaaaagtg

SEQ ID NO: 20560 - DNA, 1249 bp, Homo sapiens
gcaacgtttttcagctgcaaatcttgggaaatcaaaagcaaggctgttttttttttcttttcttttttgagacagagtttcactcttgttgcccaggctggagtgcaatggcgcaatctcagctcactgcaacctccacctcccaggttcaagcaattctcctgcctcagcctcccaagtagctgggattacaagcatgtgccaccacacccggctaattttgtatttttagtagagactgggtttctctatgttggtcagactggtctcaaactcccgacctcaggtgatccgccgcctcggcctcccaaagtgctgggattacaggtgtgagccaccacgcccggcctcaaggctgtgtttcagtgaaatatcccttgcaaatctttacctgggtgggttacagtgttttcactagactcttcaatagaattaatattttaagaaatgccacttgtttatttgaaaagtataagaatcctatcaatgcagtaggcatgaatgtattcatgtgtctggctgttcatgaagcagctgatatcttaagtgtaagaggtgagatttactgactaccagtaaaatatgcgagttgggaggctaatgattttaaattgtaaatgcgtctgcataagatcctttaaaatagcttttattgttcttaaatttatgtttaaaagaaattgacattaatattttcaaatcatccataatctcccaaaccttttttggttttctgtttagtaccatttaaatctttgtgtatgtgtatatgagctacctttaaaagagcagtcacccatgcgagcatttgttacccaattagtttgtacttttttttggtttttattttgttgttgttatttgtttctttttgagatggagtctcgctcttctcacgcaggctggaatgcaataatggcataatcttggctcactgcaacctccgcctcccaggttcaagcgattctccagcctgagtctcccgagtagctgggattacaggcgcccaccagcacacccagctaaatttttgtatttttagtagagacgggtttctccatgttggtcaggctggtctcgaactctcaacctcaggtgatccgcccgccttggcctcccaaagtgctgggattacacgcgtgagccactgcgcccggcctagtttgtgctttttacttaccagttaggggttatattactgtgtaacaaaatggacggttatttctattcattaacaagattcaagtaa

SEQ ID NO: 20561 - DNA, 1028 bp, Homo sapiens
agatattcgggaggctgaggcaggagaattcgcgtgaacctggcaggcggaggtagcagtgagctgacatcacgccactgatcttcagcctgggcaacagagctagactctgtcttaaagataaataaaacatttactatgacaaagtaactgttgtttaattgacacataacagttgtacatatttatggggtacagagtccctatcctccccaaccctttccagcctctagtatccacaattcttctctctacttctgtgagatcaacttttttagtttccacgtatgaatatgcagtatttatctttctgtgcctgacttttttcatttaacatattaatagtatcctccaggctcatctccattgccacaaatgacaggatttcattctttaatatggctgggtagtattccatgacgtatgtatactgcattttctttatccattcacctgttgatgagtactgttggatttcatatcttggctattgtgattagtgctgtggtaaacataggaatgcagacgcctcttcaatatactgttttcatctcctttggatatatacccagtagtgagattcctggattgtattgcagttctgtttttacttttctgaggaacctccatactgctatccacaatggttatactaatttacatttccatcaatggtgtgtgtgaggtatctttgttctgaatcattgtcagcatttgttatttttttgtatttttggtgatagtcattcaaattgggatgagatacctaattgtggttttgatttgcatttcccttgtgattggtgatgttgagcattttttcatatacttgttggccatctgtatgccttctattgagaaatgtctatttagatcatttgccctttttaaaaatgttatttgtctttttggtgttgagatgattgagtacattctggatattaactccctagtctgatgaatagtttgcacatattttctcccattctccaggttgtctcttcattctgtttattgtttcctgtgct

SEQ ID NO: 20562 - DNA, 1072 bp, Homo sapiens
tccccagagaaaataagggtaatcatcctaggaaggggagctgctgaacaacccaaacaagaaatggccactgaagtttataattagtgctgtgacctctgtgttgtcctaaaacaaaaaggggcgatggggctgagggagtctgaatgtcttttctgaaagcagactatggcaaaacatacaaaaagatcattttttttttctgtgggctgtgattccgtggttaacaacatcagaacatctatttttaggtaatgttatttggaaaagtatctctgcaatacacatactcttttgtacggtgtgggctgttggcttggcgtcctacctcttgcatcgtacacaacagaacatcttacatgaggaagaaggcaggtgagcggtgacggttaccctgtggagggatagaactgtgggatagaactaaggaatcgtgtttgcaacacctcatctgtgcacaatgataactgaattcccccagtgtaccctgtggaggaggcaaggtattatcttctttataacctgatgaaactgaggaaataatggagccaggattcaaacccagccccatctatcaggcttcattatcactgctagtggcagtcactacatattacattatattactgtcaggccgttggactttggcccccttgtaactagcaacggtatgatacagtaatactcagtccgatctaatatggtgataactctgtcagcctcaaattcagttctggtttaagccagaatcttatctacaagtatgagcagccatctcagaggtcagtccttttttttttttttttgaaacggagtcttgctctgtcacccaggctggagtgcagtggcgcgatctctgctcactacaacttccgtctcccaggttcaagctattcttctgcctcagcctcctgagtagctgggattacaggtgcgtgccaccacggccagctaatttttgtatttttagtagatacagagttttatcacgttggtcagcctggtcttgaactcctgacctcgtgatccgccttccttggcctctcaaagtgctgggattacaggcatgagc

SEQ ID NO: 20563 - DNA, 1078 bp, Homo sapiens
ataatgacagtttttttgtgggggggtggggaacagggctttgaaggtgctccaaccccattttgccccttccagtggtttccaggctactggtttcactgtgattgtggtctgttggttttataggtaacctccaagctaggggttgggttgagatgggaatagacaagttaaaaggccatagactgttcttcctactgagattcagctgttttgcttgagtaaacacttcttggattgctgaaagcctttggttaatttccagaattctaagaaagttgattctgactcagtttttgtgaatgttctcattgttttatggaggagaggattttaggaggtcctgactcttccatttttgccgacatctttctgggataaaacctttgagaacaacagcttttggtgaagaagtattgattttggggaagtttttattattatttacaatgaggtatgaaaaatgggaggttgacaattgaaactgatatcattcccccacttccagtgtcactgactttccttctgagcttcttgcctactttccttttggtacttctctcattttggtggtttggaggattctattaatagctgtggcttgctctaggccaccttatacctaatgcaatccatatatgatctccactgacagaatcttgtgcaaatgttcaggtggagagagggaagtcaacttccttctcaagattcaggctttctaaacattaccctactttactgtcctttctgttggctcttgaattgctttcctagggctggcataataaaatgccacaaacttgatggcttgaaacaacatattatctcacagttctggaggccagaagtcctaagtcaaagtatgggcagagttggtcctcctggaggttctgaagcagaaaccatcccatacctttcctagcttctgatggttgctggtaatccctggaattcctcggcttgtagatacatcactccaattctgcctctgtcttcatagggaattctcttctgtgtctctacatggtcttctttgttttgtttttttgaggtaatttgtttaactgcaagcctatat

SEQ ID NO: 20564 - DNA, 1033 bp, Homo sapiens
ccagctcaacctcatccacccggacatcttccccctgctcaccagtttccgctgtaaggtagtgtctcagaccggccccttgtcggcccagctctcgtcccctctctttctctccatgaatgtgttttgtctctttcagaaggagggccccaccctcagtgtgcccatggttcagggtgaatgcctcctcaagtaccagctccgtcccaggagggagtggcagaggtctgtgccatcttgaactaatggaatcgtctcagtcgagttgggaaacatttctgtaaatagccacatagtaaatgttccaggaggctctccagaccatatggtctctgttgtaactattcaactccgctttgagcacaaaagaaacacggacaataagctaatgaatgggcttggctgtgtgccagcgtgaatttatttagaaaagcagcctactccaggctgggttgaggtgggcggattggggccagtagttctccttttccaaaattgccttgcatgggaatagcagtgatagagctcgtgtgtttcacagtatagaaaataggaaatgtgtgatgaacaaagtcacccataatcctgttgcccagagataatgattgataacattttgtgtttcttgatttgtgtatgtgggtttatattgtcagtcttttcctgtatcactaaacagtcttaagtaacaagatttttattggtattccaaatagggatgtttactcatttgggatgtttccaattttttgttgtttttaatgaatgaaacaataaatgtcttatatataaatctttgatgggaactctgttcccttcaagtcattcctaaatgtgggattactggcccagagtgtgagacttgttaaggtacttgataaatgtaagatgccatcttgaaagcctcttccagtacaatccaaccaggaaagtgaacagccttactgccccacatctttattttaattaattaatttatttattttatttatttatttatttttttgagacggagtttcactcttgttgccca

SEQ ID NO: 20565 - DNA, 1031 bp, Homo sapiens
gacatcactcagctaagtgataaaatggcctcttttatctgtgtttgtcccgcatgtcaacacggctgcattcgagcatttttgtagattgtccatttaggatctagtcaccgtcctccttaaagggtgcatgctttccttggtacttgagctcaggacagtgtctaacaacagaccccatatggatgggcctggggtttatggtccagaggaatgccacagtattctatgtcaagatatttcctctgacttctgaggacattaggaccagtggccacagactgaagaaaaccttaatgccaagcctcctttcctggccagtgtaggcctgaagtgcctcaacctgacagttacctgtttaggtatccacaaagagaccagaagggtgttgatggtgatgtgtaaagttggttttgtgctttgtttacctctcagctcactggataggatatgtcatgttagcagttgccttgaaggcagttcagtttggtggctgagctgtgacccccagtgggcgggcttatttggttttgcagattttggctgaagagctgtgtactcctccagatcctggtgctgcttttgtggtggtagaatgtccagatgaaagcttcattcaacccatctgtgagaatgccacctttcagaggtaatgaggggtctctagggtgggagaagtgagagctgaaacccagcccagcatcgacatgggcatcttgtggcaagagctgtgtttctgggaagaccactatctgggtttacagttcagaggccggcactcctgccttaagtcactgttggtagttggtgggctccggtgtacacagcctcaaagtgaaattagaaaagattgaaaactagaaacaactgaggactagaaattcaactagaactcttacagctcttataccagaagaaattctagaacttttttgaattctaactaatgccccagattatcatttggattattttgaactgaattaattttcttccattacctgcattgaaacaaatgaggtgggtcagag

SEQ ID NO: 20566 - DNA, 1061 bp, Homo sapiens
acaggcgcacgtcaccacacccggctaattttttgtatttttagtagtgacagggattcaccgtcttagccagggtggtcttgatctcctgacctcatgatctacccgcctcggcttcccaaagtgctgggattacaggcatgagccgctgtgcctggctattagagattttttattataatttatctccaagataaaagcagtgacattatattgccacataattgaaaaatacaagagaaataaaaatcatccatgcttttgttagcctatcactgtcattgaaatattatgttacatggcagtttgcttgctggttgctctgttaggcaacgctctggtgacattcctttagctattaattgaggaatgtagaatgacagaacagtgtttctcctcaatgatacttgaaggatatttattaactttcatattgaattacattttattaaatttataatgagttaatgctgggaaataaaacactgatttaagtcattttggcttttagtactaaagcatttgacaataaatgacttcttcagaatatggtataccttctgaaagcaataaacgcattttaatgaattgtaaggaaacaacatcattttattttttatttttttttttgagacagactttcgcttttgttgcctaggctggagtgcaatggcgcgatctcggctcactgcaacatccgcctctgggttcaagcgattctcctgcctcagcttcctgagttgctgggattacaggcacgtgccaccacgcctggccaattttgtatttttagtagagacggggtttctccacgttggtcaggctggtctcaaactcctgacctcaggtgatctgcccgcctcagcctccgaaagtactggaattacaggcgtgagccaccgtgcctggccaacattattatttttttttaatctagaaaaatacacttctaagaaaattgattaaaaccaaccttcttcattagcccctaagatcacatctatgttctctttgttgcagcttcacttaaagagaggaaacttcttggtgctcaaagcaaa

SEQ ID NO: 20567 - DNA, 1031 bp, Homo sapiens
ctcctctttctgtcctgaggtcttgtctagtgactgagaacaggctgacccctatgtgctgtccttgtttggatggcaccgggtaaagactgacaccagcattttctctgcaggcctttgaacttttgtgttatttcatatattatatgtgttataaagcacattacaatatatttttctctgtcttctccagtcctaggtgaaatgtgtcatttaaaaaaaatttcacttgccattctaaagtttttctggtgagagttttgtgtttttcatttacgcaaacacatctccacataagtagggaaaaaaagtcttcttgagtatattagtgtcttcagcctttgtattgggacagtagcgtccattaatttttatgtgaagtgaaattaggtatcgggtcataatcagtctgtgatgtcttcacagctttcacatttaccttgtgataatcaagtgtgtttttcctcaggtgttagccagagaagaggggtcagggactcttccctggtcgtagctttcatctgtaaggtaaggaagactttccggagggctgtacatgactggggtcttggtcagcgacctctggtttgcactttttcattaatttgagggtaggcactcctgttacctgagacaagaagagatagcagatcttcagaaaagctgatggaaggccgggtgcagtggctcacgcctgtaatcccagcactttgggagtccaaggcaggtggatcacgaggtcaggagtttgagaacagcctgaccaacgtggtgaaaccctgtctgtactaaaaatacaaaaattagctgggtgtggtggcgcatgcctgtaatcccagctacttgagaggccaaggcaagagaatcgcttgaacacaggaggcggaggttgcagtgagttgagattgcaccattgcactccagcctgggtgacagagcaagactctctcaaagaaaaaaaaaattcgatagaaatgacactggcaatgagcctgcaacaagtattactactgacctttcataattgtcat

SEQ ID NO: 20568 - DNA, 1078 bp, Homo sapiens
ggacccatcctgagatcgaccgcgaggtggtgcgcaggctgcgcgagttctaccggcctttcaacctcaagttctaccagatgaccgggcacgactttggctgggatggataaccatataatttaaaaagaaaaaaaaaatcaaaatataatatatttttttaccaatcggtagagaagagacagtttaatatttgtgctgaaaatatgtttcagtatttttttcaatgaatgttaagagattgttctcactcccgccccatcttaatgtataaccaacaccaaacacgtggatcaacagaaaaggaaaatttcactcgtctaaacactttcaattttcagtttttattttatgttctatatacccagtcataaagtataagcatcagttgtcattaaaagttttcagaaaatcttgaggttaaacatctctctctctttttttaaaatacaaggccctgataaaattgatatctatccttatatttttctccctttttcccgtgccactttttcttaaattatttcccagttagtattatcatatgtttgtacccgtcacagttttcatagtgctttcaaatacacctttttgatcattaaaataaaaaaataaatcttgctctgttgtataagatcacaataggtaaatattattatccccattttacagaaaggaaaactgagtctttgggaggtgaaataatgtatctaaaggtcaaatgttggatggaccctggacaaaattccatcttccacttgttccctatttcatgtcactttttccagggagaatggaaaagaagacatctgcacctttagaaatggttaggtagttttcagatgatatgaaaagggaaagagagccccttgttttctaaattcccaggctacccctcatggcacccagtctcattacatagttgtgtccaagaaaaccactgagacctggacacaacctctcttaagagccagtcttgcctcttggctatttaaagtacactgagatatggaaatcttgactgatgaatgcttgattgaattggagaggaattattggattcttgcatggaggacaa

SEQ ID NO: 20569 - DNA, 1015 bp, Homo sapiens
tttaagctcatgcaatacatggattctcttgagttcagatgacactgaatcgacctcaggaatagttgcttgacccaatcaaatggaaacactcaatagcatctgattctgtttatcaggatgtgaaagtcactgggttcatttctagccagagaagagggatcaggatcctcactggcccacctcaaagaggtctcaggggaagagaggaagggcttgagtcaatactgtaaaactactgggtggaagaaagaaaatgcctgcctcgtattcatttgtcacactgaaaaaatgaaaagccacatacagaaaactgagcgattgagttgcttatacttgtattgactgtgacttgtgctgactgtggccatggggaggataaagcagagaaaggccatgattcaggactatcagcttttggggtggtggcaggctcccccaagtcttacaaagggaggtaactttgagaagcatcaatctattttgtttcataaccaaacagattgttagattgtctatatatgatttttaaaagttagtgtgacccactgcctttgtaacaggaccgcctttgaaatctgcctgtcttgggttcaagtctctccacacctccttatcatctggctaacttggtacaagttactgaagctctctacacttcagtcatttggagagtgggaataataatgccaccttgcttggcgtttgtcaggattagagatgatgtatgtgaactaccttgttgatattgttgttgtgattgtcatttgacccataacttcttgtcaccatcttttctggatatcctttgtagacatcatttatacctcaaatgattagtgataatgatccttgcaatttcctcttaacttattcaaagctaaaaataagaactatattttaggtgggactgcatatgtctgagcaggagtgtcctttgggaactttgtattgcatctattcaaaggaatgaaaagggggcatttcttcttctgagatcaagcccctggtcttt

SEQ ID NO: 20570 - DNA, 1032 bp, Homo sapiens
tctcctgctttcgtgtcccctgattttaccccaaatcttgattgaaaagaaaagcaaaaccaaaacacctgggacttcctcattggtagatgctgcacagtcttcctttccttccaagcagatgatgtggttgggggatcttgcctgagtctcttaatgttctcacctttcaggagtggtcagaaatgtgggtcagagtattatgctggcattcggttttcatttcccattacagaagaagacatggacaggtggcccacaattactttctaaagaattcaataccccagggagaaggggttagtgataagcatcagaagtgaaaaattagacaattgttgggtaaccggggtaagcggaatgaatttctaagaatttctaagtgctactatgaaaatagcaacagacaaccttgatgacttgcaaaatggtcagatcacttctgtggctaatcgggatggcttggagtcagtcagtaattgagccatttcagtcaattctgaaataaatttgtctgcaaaaaaagtagaataaccatctgtaaacacaaagggtttatcccagtatccaatatcatggtgaatttcattctgcaaaatgcagttgctggatgtttaaccattaagtagtaagacacattatttctgttgtattaaaaaacactatagagatgatgtgtcatttaaaatacacaaatgtagccctgacagaccaaatagatgtttcttaatacaagcatcttttgaaaccctggcacagtaaagcaatcgctaaagaatgtttattgtattagttgaacaagtccgttaaatccaataatgttgtcacctaagaaaacaccaaagctgagtttttaaccttacagaaatattgatggcataaagtggaggctgatgaaataaagatttcttattacttttactaccttggaataaccttctacctgtgaactgtaggaaaatgctttgccagtgccaccacctgccctccagggtagccctaccctcagttgacaagtgttcgtagaaattt

SEQ ID NO: 20571 - DNA, 2040 bp, Homo sapiens
aaaagatttttggaaactgagatgaagagactttgggcaacttgcccaagataatgagctacttagtggtaacccttgatgagagggttttaaaatcctacttttaccacttaaaagtcatcatagagtcctggtagtccaacattctttgtgatgcttcggaatccagatcgatggttatttatgagatgggatcttacccacttttgttatgtagctcattctcattcttcttttgaaaagctttaacagttaaaaattccttttttatcattgagacaaattccttattttttaaaacatttccaaccagttctagatttccttctagattcacagagaacaaatctgattctgcatgtattaggttggtgcaaaagtaatcgcggtttttgtcattgaaagtaatagcaaaaactgcaattacttttgcaccaacctaaaagtagtcactgtcttcagatatttaaaaacagccataatgtcttctggaaacttctcttcttcagactgattccaaatgttgaagttgtggcactgtattagtctgcttgggctatgtcagagaaaaaaaaatattttttctctacttccacacatctctcgatataacacttctgacactacattctccagcacacatcatctgggtgtcttattcaattcagttccgacaccatcaacctgtagacagcatcagatatcataggttaagggctcagtctcacaagactgccccccactttaaatgcttgttgcgattagtatacctctgattgattatctggctataaattggggttttccatgaacgcttcattagatttgtttaatttgctagagtggctcacagaactcggggaaacacttatgttgacccacttattacaaaggatattacaaaggatacagaggagcagccagatagaagagatgcatagggcgaggtatgtaggaaggggtttggagctcccagatccctggttgcaccaacctccaggaactgctgtgtgtgcagctctctggaagctgtcagaacccagtcttgggttcttgtagaggtctcatcacataggcatgattgattaaaccactggccattggtgatgaactcaatcttcagctcctctttccaccccagaggtgtgtgtgtggtggtagtgggggagctgaaagtttcaaccctctaattacaacattcccctggcaaccatcccccatcctgaggctatccaggagcccccagccaccagtcatctcattaacattcacaaagaaatttattgctttagattccaagggttttgggaatgatgagccaggaaacaggaagaccaaatatcaaaatatggtagcctgtgatatttcgaaatatcacaggctaccataacaaagtgccacaggctgggggacctaaacaacagtttattgtctcacaattctggaggctggaagtctgagattgaggatgggtagggttgttctctcccgcgacctctctccttggcttgcacatggccaccttctctctgtgtcttcacacaacctttcctctgtgcagacatactcctggtatctcttcctcttcctttaagaacaccaattctgttggatcagggatctactcttccaacctcacttaaccattttttttttttttttttggaaacagagtctcgctctgttgcccaggctggagggcagtggcgcaatctctgctcactgcaacctccacctctcccgagttcaagtgattctcatgcctcagcctcccaagtagctgggactgcaggtgcacgccaccatgcccagctatttttgtattttttatagggatgcagttttgccatgctggccagactggtctcagactcctaacctcaagtgatccacctgccttggcctcctaaactgctgggattacaggcatgaaccactgtgcccgacccctcatttaactttaataacctcctttaatgccctttaatcttcaaatacagtcacattgagagttgaggcttcaacttaccaattttgagg

SEQ ID NO: 20572 - DNA, 1054 bp, Homo sapiens
aacttgctgcttgaaaaataaatattaattgtacaacctaagcaaaaaataaaataaaataaaataaaataaaaatgtgtatttacacattgcccctcagtctcctcagttgccttagggatagcctgtgcttccatcctgtacctggaatgtgaagaagaaagtgctgttcactgaatttggtaggaacatgttcatttccatttctagagttttctaaggggaaggatactttaaagataatcaattgcctaagaccttaataataaataaattagccaataataaattaaacatataatacaagatcaaacttttataatatataatataaataaaattatatcataaaatataagattatatctaatatgtaattaatgtaatatgttatataattaaattttatatagaacattaaaatatatgtatgtaattgaatatatattcacatgtaataaaaacattatattttcaaaaatatttttacttttaggtgtaagaagagtgtagaagtagagtttggacacataaatgtctgaatttctagatgcttgaagaggtgtgtccattaatacgaaattaccttttccagatttgccttgggtggtagcccccagctgaggtgctaagagactggagtaaaacaaagcatctccacccagtctctttttttgttgtcataataatactaacagttaatattagttgaatactcatatgtgccaggctccaggctgattggtattcattgttttacacaacagtgttccagatttgtattccttgttttacataattgttacaatttccccatgaggtaggtattattattagcctttgtacaagggcatagctgagattcagacaggcattgtaacttactgaaggccacatcactgctaagtggtagagtcagaatctgagcacagagcagtattattcctgagctcaagccttaaaccattgtaatctaccacctggccttttattattacttttcagtagcattgtggtttttttcttcaagggctattttttacactggcatttc

SEQ ID NO: 20573 - DNA, 1453 bp, Homo sapiens
cgcagcagtctccggtggagggctgggactggtgtgtgtatctgccatgtctcgcagcaatgcatgtggagcttggatgcctagcctctgttcacataatatggtgccaataaagcatcataattaaaatctttaattatcacagaaacatttccagcaataagagggactgagctgaagaaagaagtgatctacttctctcttctttccacccaaaataaacacaaaagaacgctgcataaaatgtaacagctaccacaacaaaaacaagtatatccagccaaagttcaaagtaaggaaatcctgccagggcagtaagtgggggctgaggctgctgtagcccacagacaataaacaggagaaaagacctgggttgaaagctgggattcaggaatttggccactgcctgcatttgcccctggagacaaaaccatgcctatacataaagccaagcatcttgacacgctccatgctccttgacctcatagattagaaaaccctgcctcccaggctcagcaaaagtgccaggaagcttgccctctctgtaggcttttggacaaaaaataaaaataaaaaaagtctctcataaggaattaaaaccacaggtctgagctctatgtttgcatgtggcctgagtttatgcttcccgtgaagtgtgagaaccacaagctgagaaatcaacagaagaactggtctcaggaccattgaaaaccttggtatctttggcaaaagaaaaactgaagctgttccgagtgattttttacaacttggttcccaggagactaccccagaatgaacgaccacaattgaggatgggaaacacagttagaaatttcagtcactcgaagaaagaaacctaccgtgtggaagaggcagtagaaccaacaaaccccaaactgacctcaaaatcataacactctgaaagatacttacatgcttgtttcaaattaaagaaacaaaagaaaatattaaaattattatgaaaaatctggacagcataaaaatatttgacaaagagccaaatagaatgtgaaatgaaaaattgtaaatgttgaagttaaaaactcaataggaaggataaactgcagattaaaatagcagaaaaacatagtccaggcatacctcagagatcttgcaggttctgctccagaccactgtaataaagcaaatatcacagtaaagcaaatattacaataaagtgagctgaacaagttatttgatttcccagtgtgtataaaagttatgtttatgctatactatagtctattaagcgtgctatgtaattatgtctaaaaaagtacataccttagtttaaaaatactttattgctaacaaagtactaatgatcagctgagtcttcagtgagttgtaatctttttgctgagaaagagtgttgcctcagtgtcgatggctgctgactaatcaggatagtggttgctgaagactggggtgg

SEQ ID NO: 20574 - DNA, 1093 bp, Homo sapiens
aagtaagtcttacttttgtctttcttttccccttagtcagacctaccaaagacttatctagtccattggtctttacaaggagcagatttcggttttgcagattagtgagaatattttcggggggctgttttctatatcattaattcttgctgctatccttataatttctgccttttactttctttgggttacttttattattttgttcatattttttcacatgggaagtaagacagaggcagaaaagcattatagaaactataatagaagtctatacttagcctgttgagaacacaaaagaacaatagatttattctataaatgggggttgggaaagagtgggtgtcttagtctgtttaggctacttcaacacaattccataaactggatgcttataaacaacagttctggagactagaaagtccaagatcaaggtaccagcaaactcagtgtctagtgatggcccattcttcaaagatggacatcttctcattatagccttacatggtggaaggaatgagaaatctctcttgagcctcttttataagggcactgatctcattcatgaaaactctgcacttatgacctaaacgccttccaaaaggcgtcacttcctgatattataactgtgatggttaggattttaacatatgaattttgtggggacacaatcaatcagaccaaggcagtgggggcttcatgattgaagatacaagtgaaggggataggtgctcagccacttatgcttttaaatggttaaaatatttctggaaacattcacactcatacacacacacacacacacacacacacaacttgttacagcaattgcatatgaggaaggtaagtgaaggtgtttagcatacactcttttaggctgtttttattttaccatgtgcaactactatttattcaataaatatatttcaaatgaagtaaaatcaagctcattctgttgaacacaaaaactccttgaactggaaggactctgagagataaactagtttcaacttcctgcttaatttaaaatatttttaatgctgggaaggagaggagacattagcactctcagaggcgagcaagtgcaggttgg

SEQ ID NO: 20575 - DNA, 1065 bp, Homo sapiens
gtgtgtgtggagggtatgtgtggaaggagaggagagatcgtccttgtgaatttaaactgcaattcctttcaacttccagaagcagctttttcaaggttggccaaacagcttcttgcttaccgttgggttgttagaaaaatgaaaagcagctctttaaataattaatataaaatttcacatgaagttcaactaatctgtgagaccacaatatattaaaagaggctatatattatatgttatgtaatatcataatatgtatactaatatataataatatattctttgcctagcataggaagtttaaagaaaatggaaattatatctgtggctttctataagcagaatctggttgcttaaaggggtaataaaaatactagcaaagggaaagctaattaataatagtgatggttaattttatctgtctacttgactgggttaagggatgcccagatagctggttaaacactatttctggatgtatctgtgcaggtgtttctagaagagattagaatttgaatcagtggcgtgagtaaagaagccccaccctcaccaatgtggggaggcatcatccaatctgttgaggaccccaagtagaacaaacatgctgagggagggcatactcactctctcttcttgaattgggatgtctatcttctcctgccctcagacattgaagctcctggttctccagccttcagagcctaagagttacaccagcagcccccctggttttcaggactttggactcagacttagttacaggactggcttctttattattaggtctttgaattcagattgaatgacaccgctggctttgctgattctccaacaacttacagttaagtatattgtgggaggttttggcttccataatcacatgaaaccagtttccacaacaaatctcttcttgtgtatgtctatatatcctactggttctgaagaaccattaataatataataaaggatgatttttataggaatttcatacttaggaatttatcttaatggaaataagaaaaacatctgtaaaatatatttatcgtaaaaaagatggaaaaaaat

SEQ ID NO: 20576 - DNA, 1049 bp, Homo sapiens
tttttatactttaataaaaggtttcaactttcatttaaatgaacaaagagaagacgaagtaaatctgaagaaattttcactgcactaaacatcagatctcaattttttttttttgaattttaggcaaaaagatttagaaaccataaagagagagaaataggaatagtttattttcttctcccacagtggcttaagagtggcatattattgagttttttacttgctcttatacttgagaatgaacttggctagatatattcttgttttatactttatttccctcgtaacttttaaagtatcactccacagtcaataactcatgctgaattttttgtggtaaaatcttaagccagcctgactttttctcctgcactgaactataatttttttttttttttgtcaggagggataaaaattctgtctttatccttgaagttaaatcatttaatgaggttatgtgttgatgccaataattttctgtcacttattatttcccatatatgttgtatgaatttaatctgtagattctgttttttccatttcatggaaatttttcaatgctgtatctctaaatatttttttcccagtttttggtccttaatgacaggagccccagttagctttcagttggatcttcttggtcttctacatgaatcatccactctgcgattgctttaatttgtctttctcattcattgagaatacctgaagcccttctctgtgtcattaatttaatatttaaaactatctactatatttcttgctctttctaaaatgtcattagggtcaggttctctattctgttccattggtctatgtgtctgttcttgtaccagtaccatgctgttttggttactgtagccctgtagtatagtttgaagttgggtagtgtgatgcttccagctttgttctttttgcttaggattgccttagctattcaggctcttttttggttccatatgaattttaaaatagtttttttctagttctgtgaagaatgttaattatagtttaataagaatagcattgaatctatacattgctttgag

SEQ ID NO: 20577 - DNA, 1019 bp, Homo sapiens
ttatatggcatctagtttctgtcttgacatctatttaacaaaagaagttacacggcatttccgatgcgcccccacaaaacgcagtccttctgctgatcactggagctgctccattgctcctgctccgttgctctgcggggcacatagagaacaatttccaccttcctcaccaccacccctttccaacttgttttgttcatgtacttttttctctgcctttggataaagtcccagaaagttcccaaagcttttctggttatttctttgggggtaataatgataatacaacccagaccagcctaacgtcaaaacgctgggctcttattcagtttaaaagttcttccctccctctgcctgagcctgccttgggcagctctaccccaagtcgtggaaggagacacagcctggcttctccctcatgtcctctggctacctactccttcattcactagctgggaaggtgacgatgagcttggaggagaacacagtctcatgtgggtggtgaggctttacctggcattggtatgctgtgactgtgtcacggtgaacattttgacatcttctcttgtgtatatttttgagttttttatagctccctcccatgcagtctcctccatgctaagctctgctaccccacagttccttgaggaggtgatccctcagttacccagctatttatgatgcctttgtctactggcttctgctgacccacttcttcactagggtcaccttgttcctgcagctttcttaggtggggtccatttcaaaacaactcatggccggggctctttcagaaggtcctcacatgacccaaagcaacacggatgcattgttacctcaacctctgagatttcaggccattctctttgctctcctgccctcctcctcctgccaaaagcccgttccattcatttttttcaggcgtgagacaggtaccagtccctgtgtctccaaattccatgggaaaaagtcaagtgtctgagttatactcctgatgaaaatagatgaaggggagggag

SEQ ID NO: 20578 - DNA, 1049 bp, Homo sapiens
ataacccaaacccttcccaccgggccccacctgcaacattggggatcaaatttcaacatgagatttgttttttcttttgagacagagtcacactgtgtcacccaggctgaagtacagtggcctgatcacagctcattgcagccttgacctcttgggctcaggtgatcctcccacttcagcctctggggtaactgggactacaggtgtgcacccccatgcctgactaactttttgtatgttttgtaaagatgaggttttgccatgttgctcagattggtcttgactttggctcaagtgatccacctgccttagcctcccaaagtgctggatcatacacatgagcctctgtaccgacctcaacatgaaattttgaggggagaatatccaaacgatgtcagtacgggttagagtcctaaaagaaggatccatggtagaagtggtttttagacagaaacttgagaattgagtagcattcagagggggagagatggtgactctctgggaaggcacgtgtggaaggggcgaaacttagtttacacaatcaagtgtgcaataaatgcaattttgtttttctataacctgatttatttcaatatctactacctggctattggaaagataatgcttgtcatttctggaaattttcttcctgtttcttggggttccattgatgttctagggacatcatgcccttgatgtcatcttgctacacagcatttgctgagattgtttctttctttcttttttttttttgagatggagtcttgctctgtcacctgagctggagcgcagtggcacgatcttggctcactgcaacctccgcctcccgggttcaagtgattctcttgccttagcctcctgagtagctggaattacaggtgcccgccactacgcccagctaattttttgtatttttagtagagacggggtttcaccatgttggcaaggctggtctcgaactcctgaccttatgattcgcctgccttggcctcccaaaatgttggcattacaggcgtgagccaccactcccggcctgagattgtttcctg

SEQ ID NO: 20579 - DNA, 1035 bp, Homo sapiens
gaccacaacaattttttttccccaatggggcatcatctgggactaattatccactgatcacacttagcaataatagttatcatcatcatcaaaacacacagtgggggtaaaaagatttatgggttacaaaatgcctccacatacatcatctcactcaattcttggggcagtttctgtagcctccagtctccttggcggagtgcctcttctgagctgtctcctaggactggcccccttggtggcttggcatgccatgagaggaggctaggtgtgcctctcatgatcacaaagtggtttggacgtctttggcggagaacacagctctggcaataatgtactgattttggagttttcttgagattagtccatctgtttatagctaagccatgggtgcctgtgcagaagtcacctaggagccatcccatgtttctctttaaatgccattggtcctttggcctttgacactataattttttcttagttggctattcattgtcactgtttctttatagagggctcctgaagattctgctcagtcctaatgagtttcaggacccttctaaggagttttagtggctcttccccaggaagaagtgaaattcatgcatacatgtatttttcccccattgtgtatttatggtgtccaatgtgtaccattaactatgacaaacattgcaggcgcaatgatgaacagacataatttctggtgccctggatccagggagattagacagatggaccaagtataggagtgtcgacaaggagtgagggtgggtgacacacaacactgcacatgcactccaaacctgtgggcaatgcacacgcacatacaagcacatgtatggtgagatccctgcattcatacagaaggctgcgcaggaagactggcttccttcaaatgcctgctggcagtcacctaatcaacaccttcattctttgattgaggaatgagaccccagatccagttaaccacagagaaaatcctgcagggcaaaagatggtccctgagacaaacatgctttttttttttttttt

SEQ ID NO: 20580 - DNA, 1024 bp, Homo sapiens
tcagacttttgcctcacaaagctgtgaggactctgaaggtcctgcccctgcctcacacagcctcgccaggagtctgctgagcacctttgaaacaagagcagggaaaagatgaaggtctgggaagccactgagctcacaatattcatctacactggtcacctttgtgttagagagtgtgtgtatctgtatgactgagtacatgtgtctatgtgcatagatatatctgcgcgtgcctgtctgtatgtgcacattatacgttgatgtgtacgtatgtcagttctatggctgtgtacctgggtggatatgtgcacactggaatgtgggtccctgtgtgaggttgtaacatttgcttgcatgtgaggatgcatatctatgtgtaaatgctctcatgtcttgcatgtttagtgtgtgtgtatctgggcacacatgagtgcatgtgtagagatacgtgtctgtgtgtatgcttgctctccatgcatctgtgtttttatatgtgtaactgagtatatttctacatgtgggggtgactgcgtgttcttctttgaggatctgcatgaatgtgtcctttttgcgagatttctcttcccattcatcttacatctctctcactagttaaatgttccccatctctgtgcctcctctattcattctctctcaccaaatgagcttctaagcaccagtctccctctgccatcaagattggctgttttcactgcacagttctcttctcaccccgtacttgctttcttcccctgcctttctctgcctgcttttgtcacagtctcattgcttgctgacttggaggctagggctggtcttcacttagcctctcccttcctaatttctagccccagtgggcaaccctgtcttagccctggctgacctccacagtgaatcatcatgttcctgctactttcctgacccctatactcagcctggaattattgtaggagatagcaagagcattcagaagagtcagttggttaccagtgccttggtgtttactcttttatgtcttagttcc

SEQ ID NO: 20581 - DNA, 1040 bp, Homo sapiens
gctgtgtatcattatatactttctctaaacatgtatgcaaccataaaaagctatacataggatttctctcctttttaaaaagtatataatcttataacatttatggggtctttttccagttattttgctattatgaaaaatgttgcaatgaatagtcttgaatatacatccttgtgcatttactctctggtaaacatctagaagccaaatttctgcttggtagattactcatattaacattttttttttagttattccaaaattgctcttcaaagtaattgtaccaatttgcagttctgccagcactgtataagttttccatttctcgctaactccatcaattctttgtatcattgagttcgctgatttttgctaatctgactgatgtgaggtggtatttcattattctcatttgcactcttctttgattgctagagaggtaagagcatcttttcatatgcttgttatctatttatgcttatttttttcttggattttcattttgtctgattttaaacgaattctatgacattctgctgaataaagtgagttacataggttgtaaacaccttcccatggtagctattgaccttctttttgttgtcatcttgatacatggaagtatttagtttaatgtagttacattctcaatactttcttttctcaatatggtttatgcttttagcattataagtaatatggcagtactcagatgtcatcaagatattcttctatatattctttttaaatttagcttttcacatttaggcaactttgagtatgctatgaagtagtacccaattttaccgtctttcatataaatacttgaatctatctttttctatatggtgatgtctcagcatcatttaatgaagactctcattctttgcccagtgatttgtgatgttatctctgtcatattccacatttacatatctaagtggttttattcgtacgctctctattccctgtggcaatatcacattgtttagtatagttttacatgataatgtagtatcaatattcaaaaggataaccac

SEQ ID NO: 20582 - DNA, 1033 bp, Homo sapiens
ttgaaggctgtcacatgcattccttggcttgcagccccttccctcttcaaagccagtaatggctgatcaaatccatctcctgctgcatcaccctgacactgactcatctttcgccttcttcttttacatttaaggacccttctgattacactgggcccagctggataatccaggataatctctctattttaaggtcggatgattagcagtattaattccatctgcaagcttaattcccctttgccatttagcctaacacattcactggttcctgggattaggatgtggacatctttgaggggccgttattctgcctaccacaaagcctatgtcactatgttatttaaatctccctatccctccatctgagctagaaagataagacttaatctttgaaggaacttattccaacactcccagtgtgataaacctagatcctcccccttttccctatgcaggcaagataggcaaacacaaaaaattcaatacttcaaaagaagaggaccaatctgaggaatcgacatattctttatttgtcacagaatttctaccataaatggaaggaaataagtgcagaggtatatcatttctatattcaaaagtgctcttctcatattagcaatagttacttagaactattgaaaaatttccctgtcacaataataactccacatttggaaataaactgaataagcaatttgcaacttttactaagggactactctatggtaacaaataagtccccaaatctcaatgtcttaacacaaacaaaaggtttatttcccactcacttcaagcctgatgcaggctgagtgacttcaagattgccatccttcaagtggaaactcaaagatccaagaggctttcactttgcagcttcaccattcttaatatgtggcctcggtggttaccaaccttggagaatagtgtgagggactcactcttgattccttctgaccataagtggcaaatgccttttatactcacagcccattggttagaactaatcacatagccccagtgtaactgcaat

SEQ ID NO: 20583 - DNA, 1045 bp, Homo sapiens
cagaatgggagaaaatttttgcaatctatccatctgacaaaggtctaatacccagaatctacaaggaacttaaacaaatttacaagagaaaacaagcaaccccattaaaaagtgggtgaaggatgtgaacagacacttctcaaaagaagacatttatgcagccaacaaactttttaatctttgttaacgtattcggtaaaacatttttaccaattttaatttgctgcttcttttcatttctttcacttgttctctctatgtgaattgcctgtttatgtgttttactcattaaaaaaatgagtccttggccttttacttgtggatcacagtcctgttttcatattaaaccctttatatattagtcctttgttcataatttgtctttcaaatatttcccccaccttttcatttgtattttgatatcactttagtatttttggtatatgtgaaattataaatatttatatagtcaaccttatcaatatttttatgtatggcttttgagttttgtcttgattagaaggactttctactctctcaggattatgtgaaaagattaccttatgtttatttctgatgcattgaaacttaaaaaaaattaaatattttttttacctgtaatttattttagtgtaaagacatgaaggaggatttagtgtgactttttttttcctctatgattggccaggttttccaacaatatttattgaatcatccatctttcctgcaatgaggtgaaatttgctttatgcattattttatattttccagtctcttttggggctttctgctttggctcattgatgcatctgtctatttatgcaccagaatcaaatattttcattaatgtagctttgaaatctcttttaatttctggtaagagtaagcacacaaggcctttctgaagtggtttttttttttttctgattgctactgagccttttggtaagaatgaaagcagttttagggggtacagttgccctcttttcttttaggtgcccagcatagtgcatggaatatatgcttcttgatcctattattaaca

SEQ ID NO: 20584 - DNA, 1045 bp, Homo sapiens; identical to SEQ ID NO: 20583

SEQ ID NO: 20585 - DNA, 1028 bp, Homo sapiens
aatattgtgtctgctcatttcttctttgaaatgatggtagtcgttggacttgctgctacatcttgctatttaatgcattagtaaagaaaacccaaagtatacttagcacacatctgtgtttaaaaaagctttgattatttagtttcaacaaaatgggtttgtttttattcttatgtattttattaaaaaaaatttcagaacccctgacataaggtcagttcctctgacttcaacacctatcaaatcttgcttctgttgcgtatctgaagtaaatggtggaaacttctctcccttgacatctaccccaaggagtaaccactgtctacagcttggcatatatcctttcagactcgtctttttcagtacaaatacacatatatatttaatgtatgtatacacataatacacacagttatttttaatgagatcactatacatatcttgcaacttgctttttccgcttaacatctctccctgttaatgtaaaattgcctcgattttttggattgcagagaaatgccagagctcatgtatccatttctctttctgatgggtattcaggctggttccactttttctccactccaaccattgctgaaatgagcttcctgaggcagctcatcccctcgtcttcccatgctgcttccttgagtgtctcagtggctttctggggctcattcctgaggaaattgaagcagtgggatgtatgggcacctcatatttgagcttcttttcctgtaggttctttagaaacctatgtgcatggtggtgggggagtcctggcttctagaatgcacaaacaggacgatcagagatcctggtgcttgagtgatctcaaaatataaatcatgtttcaaattatgaagcaaagcaggggtaatgactgcctcactctttttttcccacatcctccaggtctctgcatgtcttattacaggattccttgtacagttgcacatgctgagcactgcacaatttcagaatgatgggagtggagacacaatttcacatggaccataatgaaaatg

SEQ ID NO: 20586 - DNA, 1028 bp, Homo sapiens; identical to SEQ ID NO: 20585

SEQ ID NO: 20587 - DNA, 1100 bp, Homo sapiens
taaacaaggagcagttatcgagtttatcaacagcaagtgtaagagccactttggaatgagaccagagcagtatgaccagtcccttagtctttttttttttttttttttttaggacagggaaaacaagacgggcaccctgaggtagggattttgatccttgggtcctaaagggggtcttcagaggcagtggaggagtcacatggagcagcgcagctctcggtggtggaatcccaaccagggactgacgatgcatccaggaagatgagaatctaggagtaggaatgccggccctgcagcctcactccatgtggacagcggttgtgaaaagatggttaaagtgctttgcgagctgggtccaagcagatgtacacatctggacaatgtggctcttttcagccttgattgagtcattcattcttggaggctttttggaatccccacacttttagaccaaagggcacattttcagagcccacacattatcagtgccagataagagtagacagattgagaaaccaggggaggtagagccagggaaggggagtaaacacaacctgaggtttattgtgatctgatgttgtcagagcctgggctgaagctaagggctgggcttatgtttgtcaagcaatcaggaaaacctctgtcttcttctttcactacacatccccacatcaccttccctctgtctctcaccaggaacccaaggcttcagccagctactgtggtgcttgcaaaccccacaacagtgtcctagatctgtaaggcatggctaggctgggcctgtccccagctctgagcatgtgtgtgggaacatgggggcatgctgggcagggccagatggagatgaaggaatacctcatgttaggtggggcttgaagccaccccatattctctgccttgagcctgacaattatctgatttctttatggggcaggccagaatatacaggtgcccactcttgttagcacactgctcagggcagcagatggcatggaaaagaccttggacttggtgctgagaccttgtcttttctcccaggccctatattccagggccaatggaaattccaaccccatctatggcctttctaggaagcttct

SEQ ID NO: 20588 - DNA, 1100 bp, Homo sapiens; identical to SEQ ID NO: 20587

SEQ ID NO: 20589 - DNA, 1136 bp, Homo sapiens
ttaacaagctctccaggtggatgcagcctcaagtttgagaaccactacactatggtttccatcagatttcccccctgcatggttgcatagagcattagacttccatgtttcagcctgggcttggggccctggtagctgactcctggccactgcccatctctgctaccttctgtcattccaggctgagaagtgcaggttggatgtcgtgcttgtagtaatgtgaccactcttggactctggtagaggagatagaaaggttttgaaacggggacttttttttttcacttcccctctgtggaccagcctccacacagcccccagcctacccagcctctctcctttaaagttaggagactggaaagcagaacacccagagactatcatgacagtctacagctcttgagcaaggccatgcctgcaggcctttgcggggctcacttggcctgtctccagctccacaaaaaacatgtcctcttctcagggggtggagtcatcttagcctcatgcagtgaccatataggacttagaaccacccccacccagggtggctactaattgctttccagtttgaggaggctctggctaacaagtgtattttcccataggaatctgaacctgtgatgttaagaaatcagtaaatattaaaaagaagatggatgcaagaaggatgaagaaagaaggtagggttgggagtgttaccagtggaagctcctgcactggggccgtctagggttggaggattcgcagtgggaagaggccactgggcggccactcttttttttttttaatatatatttttattatacttaaagttctagggtacatgtgcacaacgtgcaggtttgttacatatgtatacatgtgacatgttggtgtgctgcacccattaactcatcatttacattaggtatatctcctaatgctatccctcccccctctccccaccacaaacaggccccagtgtgtgatgttccccttcctgtgtccaagtgttctcattgttcaattcccacctaggagtgagaacataacggtgtttggttttttgtccttgtgatagtttgctgaggatgatggtttccagcttcatccatgtccctacaaaggacatgaactcatcattttttatggctgca

SEQ ID NO: 20590 - DNA, 1025 bp, Homo sapiens
aaagaatggcaagtacctcttttgtgtcaggcacttttctaggtttgaggacacaacagtgtgcaaggaatacacagacatggatattacagagcttatattccaatagggttagcagagttcctatttcggtcggggaagccagtccaatactgtaaagacgcctgaccccatcatttttagtgagaagtcactaaagggtggagaagcgtggagacagccttgctttgatgttgcttatggggtgatggggctgggctctcagactggcatggggtaattctgattttctccatcaggaagcctccagcctgtgtacctccaaattaggggaagttgtggggtccagtcctgcgtgccctctacccggctgtgggtgtaaatgtcatccttctcatgccgaggcagtatttcctgtcaccattgtcatttccactcatcataaacaggggttgggggtctgccctggtgtgcctctttcttaccaggctttctttggatttcatttcacctagacactcttccaaaaggacacaaaacccagtgacaaggctgatttttagttttcttctttggttgctgtggttcctatactcttgatggtttaacctatttctagggctttctatgcctggaaccagcatagaccatgaatatttctgttcctttatgttcagcagcttctagctccatggctgaagaaaaaaattcagtcattaaatgtagtacagacatatttggaaatgtaatacatgcttcaaacatgggatgtttttgaagttttctagaaaaatctctttagctttcaggctgggtggaggttgattcctcagaagggagtgggctattaggaaaatagaaatgatgtgtgcctgttccaggaaatgcgagttgagagcggcttctcatccgtcattgagcaagtttattcgtggtgagagtggacagccccaggcgtctcaaaggctctgtctgggatgggggtgcagtaaggtgggaaaagactgtggttctagggaagacct

SEQ ID NO: 20591 - DNA, 1097 bp, Homo sapiens
acgtctgtaatcccagcattttgggaggctgaggcgggtggatcacgaggtcaagagatcgagatcaccctggccaacatggtgaaaccctgtctctactaaaaatacaaaaattagccgggcgtggtggcgggcacctgtagtcctagctactcaggaggctgaggcaggagaatggcgtgaacccgggaggcggagcttgcagtgagctgagattgcgcaactacacttcagcctggcgatagagcgagactccatctcaaaaaaaaaaaaaaaaaaaaagaaaaggaaaaagaaagacagttctctgcaaatagataccccaagggttattctttttaagttgatctttagtcttagagctgtgaaggatccctaaaattcttccactttagaattaaggaactagagttttggaagagttaggtgattgccctaaacctttataatgttagtgacattgttaaaactcaaatgtgagcttcctgactctcaatctaaggtgctttccactccccccaacccccacagcagatcgaccctcttcccacagagaaggcagtttttattttccaaacagctcctttgccaaccagtaagttaacagaagatgccagactcaatatgacaccatcatagccaggccaggttaattccagataccgggtcctctgatttaaacacagccttttggctggatgcagtggttcactcctgtaatgtcagtgctttgggagactgaggcaggaggatggcttgaggccaggattttgagaccaacgtgggcagcacagtgagaccccctcctctacaattttttttttctaattagctagagtgagctgtgattgtgccactgcactccagcctgggcaacagaacgagaccctgtctttaaaaaaaatacaaaaaaattagctgggcatggtggcgggcgcctgtagtcccagctacacgggaggctgaggcaggagaatggcgtgaacccaggaggcggagcttgcagtgagccaagattgtgccactgcactccagcctggatgacagagtgagactccgtctcaaaaaaaaataaaaatgaaaataaaaataaaaaa

SEQ ID NO: 20592 - DNA, 1030 bp, Homo sapiens
atgtgagtggggtgtgtgtataattttggggtaagctttaaaggatggctttaaaaatgatgggaattgtgtagttacgccctctcccccttgccaggagaaaaagacttgctttgactatagctatcacttgttgggattaacttgctgctttctgggaacttgcatctgtatggaaatttcaagatagaacttgtctgaaactgcttattttcttctattgaaaaggatccacaggcttctcagaactccagcttcttttaaccacctcctctttccagttcctgccttcaccctggtttctgtaaaggaacttctagtgcttctgaagaccccaacgctcaaatgatctgttccaaggaaacgttctaaattacagatgtttgttctcggtgctctccaaatgtctctgaggccaaagcacttcttgcatagtcattgagcacgtgcttgtatggtagttagaatgaaagccaaggcaaaaatagctgtcctcaggttttggtttttaatcgtctgatgttggtgactccagggtaagtatttacgcacttgagctttgtttgccccatctatagaataaaaatccacattttattttcagcctctacatttctgcacaaatttggtgtgtagggtgggtgggggttggctcccattttcaagccttgtaacttggctttgcaagaaaggaagctttgtttattataatcattatagtattactatcattgctagagactagagtctcaatcctgaggttcagtttcacttaataccagaaagcacagtcttaccaattgagaactcagtcacttcaagaattttctgtgtttctttcttaaatttaagtctagaattcttccacctcccagtgtccttcaggaaaggtatctgagttcggacacccattatctaacagtggggcaggggtggagtggggtagtggtgagagatgtcagtcatagggatgtaataggtctgcactggtacccagtgatgtgtccttatccctgtctggtcttgagtc

SEQ ID NO: 20593 - DNA, 1044 bp, Homo sapiens
cctgttctccagctgggtggcagctccctgaatcaggccagtttgtactttttcacctaactcacatgatttccacttcagtcgcactaccgctggctgccccattgtggacagcttcattaacctccgttgctcctaaaggcagtcttttgatggaaatgagtggcggaaaaggctgagagcaaccaggccaggctcagcccacttacttactatagttagcctctctgttatgcctcacttaccccaaggactctctgaggagtggccattagtcctacagctcctgagtgcatattgtggccagtcccacaaatgtgaagttctcttctttcctccgtgagtcgttgggtcaaatagaactcttgttaatagctcaccaagtcagttaaagattgggaaggtgggcattgtgaatttgggattaaataatgtccaggtggttagaatggacttaaagagaaatagagaggaaaaggatctagtggtcatagtgaatcccaagttgaaatgagtcaacaggaagggacagtgatgaacaggaagggacagtgggaaaaccctgacagaaatgctttagctacatcctgtaccttcccacttttattagaagatgcttgatttttgttctaagaagggaaatatgtattctaggttcaacaagttataaattccttaagggcagacatcttttgcatctctcaccaggtttaaaaattaataattgtggccaggcgcggtgattcccacctgtaatcccagcattttggggggccgaggtgggcagatcatgaggtcaggattccaagaccagcctggccaacatggcgaaaccccgtctactaaaaatacaaaaattagcctggtgtggtggcgcacgcgtgtaatcccagctactcaggaggctgaggcaggagaattgcttgaacctgggaggcggaggttgcagtgagctgagatcacgccattgcactccagctctgggcgacagagcaagactctgtctcagggaaaaaaaaaaaaaagagtttacaagacattttc

SEQ ID NO: 20594 - DNA, 1060 bp, Homo sapiens
ctggtctgaaagtcttgggctcaagagatcctcccgcttccgccttccaaagcgctgggataacaggcgtgagccgctgcccgggccatccctcgaggaagtttcatcaggtagacattaattctttcacgaggatcacggatcgagctctttactggaaacctgcgccccgccttagttctccacctcttcgtgcggctccaggcaactgccaacagatggcgcccgcccgcctatttctctccttgcggctttgggcctggaggggaggtggggagagtcccaatagcagaggaactggtgagcccgggccaaaatttcatctggcatccggaatgcattaaaaacaacccacaaatctgaagctcctcgcaggagagagagagagagagagagaggagagagaggagagaggagagagggagggaagagagtgacggagaaggagagaaagagacgggagagaggagagagaaagagagagagaggagagagagaaagaacgaacgaacagggaacttgtaaaactaaggggaaaagggcagaagagaggcagcagcgtggtccctgcaagcgtccgctttcctggccaagcagcccccagcacgcctgctttgtggggcagggccatgcggccccgaggaaggatgcggtgagccagagggttccagacaaaggaggggatccccaaggctctgggccagccagtccctgttttactggcaccacggtccctcctaggcgaggacgaagagggaaggggtggagacctccaccttctctgcgtgtggctgcgtccctttacagaatgacaggcccttacttccgagggcggggactaatgtgtaaggcttaacagatccaattccagaaattatctgtgtttttttcaatcaccctcttgtgcccccccaccccccattaaatttcatcttttatctttttttgggccttcgtaatgaaaagtggttttaaaggttgaccagttttactacttagtgcctaacaggctgagtgattataccgttgaaggaggtcacagcgggaaggacatggagag

SEQ ID NO: 20595 - DNA, 1047 bp, Homo sapiens
caatgtgacattgtctaagctccttgccatttgagtctgaccgtatattctgaagtctgccttggcttcctaaggactgttcctggccttctggagcccccaatactcccccactcaaatctgatgatggggcaagttcctcgcatagtacaaagagaaggggcccaggagtggcatgcaaaagaacagaaagttactgtgtttatggccgttagaaccaaaagtgcttctgagagaatgaaatctagcatcctagctttctagaagaagaaattaaagcccagggaggagaggggatttgcctaaggtcctacatagcccatatgtgaaatgtcctcagccttcccaagcagggggactccatggggatggatgggtcatctcccttttgatttgacatagtccttaatcagccatctttctttggtccaattaggtttggtcatggtagtaggattgacttgcttgaaatacaatggctgctttaggagttggtaacttaatatttcctgatctgaactatatatctgtaataaagatgtatcaatgatcttctatcggctatttaaaatttacatatatatatatgatgttcgtgaagccagcaatatgcaaagcagagagcatggcttctagtagtttggggattgtggcaacagagattgctttccacttggggactggatttcaccagatgggacaacagactctcctttcttatgaaccttcgaacattgcagggattgtttgagtgttgtcatagttactggtattggtgaattccccctgtagacttgtcccctttgtgtcttcttatggaaggtccttttgggatcccagggtgatatggagagagttagagcctggtcttgccagaaggactttagatctcatgatttcttgctcacgagataaagcctggattaaagaagaaaactctggtaaagattttacaaatgaaacctgtcatcctggcttacagtgtctttcccagtctcttcctaaccccatccacttcaacatcagagcaacccacatcccaagaaa

SEQ ID NO: 20596 - DNA, 1020 bp, Homo sapiens
aattaagacactccataggcatgttggaacttagcaagattctgtgtaaatcatagagcgaccaaacattcttgtctcttggcttacatgtgtgatatttgctccattacccattagatcactctgttccttcttcctcctagattaaaaatttcaatgtttacactcatttagaatttcccttgctttctgaaagcacttaatccagagtaaaaccatgattcatggagcccttcttgaaatcacccaacacaaccccaaatcctttaaaaagcccttcccagcaccctcatactgaggcaccccatggttccccatggtgtgtgatctctcttgtgtaaaagtgtgttgataaacccaactcgattcaaccgcagatctgttcctcatgatctctgacgggtggacgttgacaataattttttgagcttagattataactccattttatatttttgttgtagatctgcagtacttgatttgctaaaaaatgcaattaccagttaagtgagggaaggttgtagtctttgttcagtacgtaaccaagagttttctatcattttaaaaactatcactagtggcaacattgctcatggcatttgagttccaggtcaaaactactgcagtagtctgcatttgtagtgggtacattaatggtaattatatgtacatatgcaagcatctaatgattgtgtcatcaggagttttggccatctccagattgaattacacattaccgtaagttgcttccttttatttctctgttacattacagttagatattaaagatacctttaatcatgatagatgatttaaaaatatgcctcacgtaagttatattgtttgtgttttagaataataaaacatgtttaaaaatatttctgataaaaagtggctgtgggcctgaaggggcgaaaaccattagtctacagtcattgatgaacagtctgtcccttaggccctcttagttggagctggagagtgtatagatacgaacttgaactctggtgttctaatatt

SEQ ID NO: 20597 - DNA, 1050 bp, Homo sapiens
aactatcattgataataacttattttttaaaaattacttttaagttcagttgtttttcatcaattatgggagctttaagtgaatgcccttgcagaatgtatgttgtatgtttttatttttattttttgagacagagttttgctctgtcgcccaggctggagtgcagtggtgcaatctcggctcactgcaacctctgccccccgggttcatgtgattctcctgcctcagccttatgagtagctgggattacaggcgcatgccaccacgcccagctaattttttgtattttcagtagagatgggatttcatcatgttagccaggatggtctccatctcatgaccttgtgatctgcccacctcagcctcccaaagtgctgggattacaggcgtgagccaccgtgcccagcctgtatgttgtatggttttagggagaacagttgaatcacaagaagaccataacatttgtactcagatgtttttttccccctagaacataaggattttactataatacctcaacatcagggttttcagcaggatgagtagtagtcataggtaaataattattggttaaatctcttgggaaaagtgactaggtctttttttttttttttcttgagatggagtcttgctctgtcgcccaggctggagtgcagtggcgtgatctcggcttactgcaagctccgcctcccgggttcacgccattctcctgcatcagcctcccgagtagctgggactacaggcgccgccaccacgcctggcttttttgtatttttagtagagacggggtttcaccgtgttagccaggatggtctcgatctcctgacctcgtgatccgcctgcctccgcctcccaaagtgctgggattacaggcgtgagccacggcgcctggccgtgactaggtctttatatgagtaataccttgcatttggttagtacagtaggttgggcaagtgatattatgtaggacagggattcttaaactcgaacatacatgagaatcacctagagggcacaagattgctgggttccacctccagactccttatt

SEQ ID NO: 20598 - DNA, 1028 bp, Homo sapiens
aaaaaaaaatcgcacacaaaaaaatctcataatgttttaagaaagtttacgaatttctcttgggccgcattcaaagctgtcctgggcagcatgaggcctgtgggcagagggttggataggcttgccctaggtgatgttaatgaagataaagaagaggtagagaagggaaaataatttaaaggtatgcttaaatgctaaagcttatattggtttttattttattcttcactctgacaaattgagtaaaaaaggttaaataatggctttaaaaatttaatggcaactatggctgggcgcggtggctcatgcctataatcccagcactttgggaggctgaggcgggtggatcatgaggtcaggagatcgagaccatcctggctaacatggtgaaaccccatctctgctaaaaaaaaaaaaaaaaaaaaaatgagccgggcatggtggcaggcgcctgtagtcccagctattcaggaggctgaggcaggaggcggagcttggcagtgagccgagatcgcgccactgcactctagcctgggcaacagagcaagactccatctcaaaaaaaaaaaacaataatggcaactattagtaaaatttaaaaccagtcgtgtatcttctgcaacattggagaagatggagcaagtaaaacagttcatagagcaaaagaaggaaaacaaagcaactgtcaaggaagcttaaatcagagagtacatgtataaagtgatgtaagtaatagcaaattcattataataggaaatgtaatttgattaaactacccatttaaagacaagaatactaagattggtcagaaatcaaagtccaaacaaaagatctaaccaaattaatgacattagaaaaaacaaaagaaggcaaagataacatcaggcaaaaataaaagaaggcaaagatcaactcaaacaaaaagaaacttggcattgtattattatcagatgagatatggatcagagtaagaaagcactaagaggaacaaaaaaaggtgattttatgaatcacagtgaagatcattc

SEQ ID NO: 20599 - DNA, 1028 bp, Homo sapiens; identical to SEQ ID NO: 20598

SEQ ID NO: 20600 - DNA, 1028 bp, Homo sapiens; identical to SEQ ID NO: 20598

SEQ ID NO: 20601 - DNA, 1028 bp, Homo sapiens; identical to SEQ ID NO: 20598

SEQ ID NO: 20602 - DNA, 1028 bp, Homo sapiens; identical to SEQ ID NO: 20598

SEQ ID NO: 20603 - DNA, 1034 bp, Homo sapiens
tgtaaggagacagtttgggcctgctatttggcatctttcctggcacctggagagagtgtaccatttaggatgcttccggctgcagcaataaggacacgttatcttacatgatttaaagcctgaaaacaagcagtttagatagtttaacagctcaacagtgtcactggggctctttccatttttctgtttctttatcctcggcttactgacctagtcctcacgttggttctcatggttgccagaaggctgctgctgcctgagaagcagaaatatcagtcaaattagaagggaaggtggaattccagagatattgtaaatatagaactggcagctgtgctcttcatgggcagggcgtgtgtcatattctgtacttattttgtgacctccacaaataagtatctagtgttcagcatctaatggctgcagaataaataatgaatgaatgaagcgatcctgagtggagaggagagtggcacgtgcaaatattttccaagttacctgccaggccaggccagactgggacaaatggacgtatccagagggcacttgggtggttgggaaagagttaaaatgaggaaagatgtttcaggagaaagaagaaatgccagttcctgagggggtattgtgcccttgtcctcctctcttggggaggagaaggctcccgagaagacagagctgacagtcaattaggaactgagggttcacagcccagcttcttcaccaccagcccaagtctaaagaaactcacaaatctgctagtgagtcaccacctccctctcctctgagcaactgtaagatacctagtagtagccctgccctatcctggaattagccagaacgtcctcatgtagcctaccaagaccgcttctggccctgtaatcaccagtgtgcatttgaattctgactccactatatatcagatgtatgggtttgggtcagttacccaatctcattaagttactgttttcttatctgtaaaaccctgtatctcatgtagataatgtattccctgcttagcacagtccctgcacaga

SEQ ID NO: 20604 - DNA, 1123 bp, Homo sapiens
cctaagctaaagctcagtgtgtttgtttggttgtggtaaagtctggggtgggggtttgatttggggctttagatagtaaatgttctgatattttgatctctttttggtaggtaatctggattctttagtttttaaatcatgagtgtctaattttctaacttatatgttaaaattgcctgtatgcttggctgatatgtgtccaatgaagggaaaattaatttatatgttaaattaattcctccaagcaaattatcctgaataatttgcactgttgtgataaactaactagggtgaccccaggcttgatttgaggattgcaggaagagatatttagtgattaaagtagggctttctgtcttttcggaggaggcattaatactttttaggttttctttaagttaagaggcagttgtcacgttatcactcttttcattttgcaagttagtctcctttaggacccagcttaaggtattacctccaccctcacctcttggccactgtaactgaaaataatctcctcctctgaataccagtgctgcttacttactatttatatcactcacatatgcctatgaaacatgacaattttggtttgatactaatatccggccttattctcaatcttaacatcatcagggatcatgattttaacatcattatcatcatgatgagggaaacctatctttgtttagggctttcgttgctgattttacacaaaataatacttgcatacggttaaaaaaatcacgtgaaatagagtttttcaatgaaaagtcattcttctaggaactttgacctgttagatatatatcgtatatttgatgactgctgggtatgttttgccaagagtcatctatgcaaaatacagtggcttgagataaacatctcaggaaaaatcatctcatacttatattttacttaacaagaattcacccatatgcaccaagatatccccccaaaccaaaagataaattagtgtaattaagaatactataaaattatgttttgcacacctatataaaattctatatttatctattcatgagttattatcagagctatacacaaaactaggtgtattttatgggcaaattcaaggatttataaagacaatattggtatt

SEQ ID NO: 20605 - DNA, 1625 bp, Homo sapiens
acatacacatacgtatgtgtatatacacagggcttctctccagtgtggatcctctgatgttgggtaacatgggcgcttctactgaaggctttcccacactcctgacaatcaaatggtttctttccagtatgaaccctctgatgctgggtaagagatgaactctggctgaaggctttcctacagtctttacaggtgtagggtttctctccagtgtagacctttatatgttttgtaagagttgagctctgactgaaggcttcaccacattctttacacttgtagggtttttctccggtatgagttctgtcacataaatgtggcagagctttcgtgtagttcagccctcattagacaccagagacttcacagtggagaatctccctgaatgtctggacaaatccactcagactcttcatttggttaaataccaaagaattatacttttataggttgttacagtggcgatgctttattatattttaagggatgaaaatccctcctctcctaccctggttattttctcttgcaaagctatcagaatatcacaaatccaagtgaagaaacactgaactgaaatctggactagcctaatagactctaaagctcaatttttatatgtatatgtgtgtatttttgtctgtacctgaaatgactgctgtcaccatgcagtgattttaccccccttccctggcctcaggaataagccaagaaattctagttgtgcagaactgagcttgttgccccttcttgtactgatggaaatagtgccatgtccaaacaaaataaagaagctcatagctaattacatatcctaataccaccttcctataaaactttgccttaatctgtagtcattcctgcccccagctcataccctcctgtgggcagcttttgtttgctttacctcatcccactgttttgtgatcaccccccgggagatgagggactcagttaataggccagatgtcaagactgatgacatttcacacactaagagaacttgaaagtttactattcatacacagggtttctggggagagcaggatagatgaaagctggtccaaaatggcaagaacagagaggaggctgggcctttaaagtagctagggaatggggctggagagcattcgatctgtgggcttgagggattcaagcttcctgccagtgctgggagctcaggagatgcccatggatttctttatctaaagcaccaggtgtgcggtggggcagtgtgggggaggggagaatagaaaatggtggaaacttaaatgctgtcaatggccagacatcaaaaatggggccaaactctgttacatctaccttttcagaaatcttttttcacttatctcaaaatagctctttaatgttattgtgtcttttttttttttgagacggagtcttgctctgtcaccaggctggagtgcaatggcatgatctcagctcactgtgacctccgcctcccaggttcaagtgattctcctgcctcagcctcccaagtagctgggactacaggtgcccgtcaccatgcccggctaatttttgtattttttgtagagacagggtttcaccatgttggccaggatggtctcaatctcttgacctcatgatccgcccgtctcagcctc

SEQ ID NO: 20606 - DNA, 1046 bp, Homo sapiens
gtgtttcagggctttatgtcattcaaggatgtggctgtgaacttcactaggaagaatggagagaactggaccttgctcagagagtcttgtacagggatgtaatgctggagaactataggaacctggtctccttgggtgagcttgggtccttccaccccagattgacctttcaggatacctttgccttctaaagattcccttgcttctattagggaatggtaacaaatgaggctttggttattttcccccacagaatccagatcagatccttaaactgtttctcaccctacttgggtagaaattatttaattgcttttgacaattagttatttcgttttctcctctctaaaatgcaacagagtgggactgagaatagagtggtcctttctcttttgaacttaaaattacattctgtttgtatctcttcagtaggatttccattttccaaacctggtatcatctcctagttggaagaagtggtaagcccacgaacacaaatgcaggagggagaggtgccaagaagcagcggtacacgtaagtgagaacaaggcagattgcatctttagaaataagagttaggggttcttcccaaatcctccgggcctgtagaaaatgttgaatccccctgcagtctcatcttcacttgaccacatcagaatcctaatagcttacctctttatttcttcccagactcaaggaagagatacttcctccttaaagttataagcccaacacatgatccagagatcagctttgtgcctcatcctgaggcattttatgaggctattcccatttcctctttagtagctggaatcacttcttcatttactctgtccttatcctacctagttttctgctatataagaaatatgaagagaaggaaagaatttgaataattttaaggatataaaattgacataatttgttgtgtagatttgagaggtgagggagtaacaaagaaaattctcaggtttcggccaggcgcagtggctcacgcctataatcccagcactttgggaggccgaggcgggcggatcacgaggtca

SEQ ID NO: 20607 - DNA, 1142 bp, Homo sapiens
gtatgaccaaacatattgatcatacctttttttcctcgtaaaacaaagtatagaaagaaagcgccataaagtcttggttaatgttgatatgcagaaaatattgagaataataattaactgatgattaaatgacctttcctgagtgcttattctgtaccaggtactggtttgggccgtttatgtgcattaacacacattgtagcaacgtaggtaccattattattctcttttgtaaaattaggaaatgaagcccagaagaaacttggctatggttacacagtgccaggatgtaaaggcagtaggcaggcagactccagagccagagttccaatgacaaaggattacaggaggcatgaattctacaaaattgtgaaaccctgtacttggtaataactgaggcctaaaagaactacttcttcccccaaacaaatccacaaggaggtttaagtactgctttttggagatgggtggagagaggattgaagaaataataaactgtaaaatattaggaaaatatagaatgatatgtagaataagataaatagcatgtaaccctactacctagagataagcgcaaagaaatgctcaaaggtaatagcatcagcagttctctccctacaggcaaaaaaatcaaaatggagaagtaaattatgagcagaaggttgcttgttgggcatagaattcagaccaagggaatttagggctcattcattaattcattcacaatacttagggactgctgtctgccaagtacaccgtgctcagtgcttaggatgcagtggtgaatgatacgacacatacaatttagtggagcgtgtgtggtgttaacaggcctgagatggccacagactcaccgtgggcctggaatactcacgatggggtggctaaaggtgtctgtgaccatgactgctggggtgggcactgctgtcttttgctgctgtgactccctttttcttgttctacaaaattggtcactttctccatttgcgaataaaggagttgagcctggaggtctttaagcacctctccaactgtaacattgcacttcttgttttgttttagggttttttggtcccagggaacctcgttttcagagcagtggctcacgcagatcctgagcccagttaatggtcatacctttc

SEQ ID NO: 20608 - DNA, 1060 bp, Homo sapiens
tggacagggtgtgtgtgttcagcagtggattgtcagacttggggtcccggctgctcccttttgggtctctccccgggcccgctgatctgactgtaattccttctgctggagctagggttcggccaccttgacgcgccccctctgcccctggagcgtgtctttgggttttgtgtgtgtgggagtggggtgtatgtgtgtttcttatccgagacacctctgggtcgtttgcttggaaaccggctgagggcccgcataccctggagcatttggttgcaaagtgaggcaggtagcgcccaaggctcctgtaccagggccaggttaggcaccaacgcgtcccttatgtctctgcagcctgcagtgtggtggaaccgtttcatagactgaagtgtgaacgtaggaggggatggatatcagagatctgtttatccacattttcagagagtggtattgctctgatgtgagcgtaggcaggttactctctgtgtctcgtgttctttacctgtaatttgaggtttgttgtacctactattaagtggtggttgtgaggattaaatggaattttgacatgcaacagttgacacagggccagacaccaagtaagggatcaatcagttgttgcttttattaatagtaggcatccatctgcccatttgcacgtaagaaggaaacacccaagaatgaaaagtagcttgttgtaggtcacccagccaactagcacatagtggaaattagaatccaggcactcccagcagggcactttccaccaccctgcacttttgtattcatcaggcacagtatccttactgttgtctgtaactgtctatgttcccagtgtctgactctgcagggccctagtggtataaaggtactgagacttgcctgtgttcagggcttcctgaagattaaatggctgccgaagttcttgagtttagctttagctcaaaagatactgcgtcagactctgcgttctgagtagagtctcagagaatgaaaaaagaaatacaatgaaaaaggggaaaacttcaatccagaacctcttaccacagtttctggtagaatg

SEQ ID NO: 20609 - DNA, 1081 bp, Homo sapiens
aagttaatgcttccatacactttaaaaagtaggcccagcgcagtggctcactcccgtaatcccagcactttgggaggccgaggcagttggattacctaaggtcaggagttcgagaccagcctggccaacatggtgaaacttcgtctctactaaaaatacaaaaaattagctgggcgtggtggcgggcgcctgtaattccagctactcaggaggctgaggcaggagaatcgcttgaacccgggaggcggaggttgccgtgagccgagatcgcgccattgcactccagcctgggcaacaagagcgaaattccatctcaaaaaaaaaaaaaaaagcattttaagagccacaaaacctaaatgcatatgcaatcgttggagtaaatctgggtattgtgaaagcaccattttttttctgaccagcagagggtactctttggctatgctcaccaaaatcacttgagaagggttgatctcaagatgtgttcagagtatgctaggataagatcaaatcaaatttgatatactcaaaatgcattgactaatgaactactcttaggatgtaaaaatggccaccttataaataacagccatatcaggcccccaaactgccatcgcttattcaacttggatggcttttgttttaaaagtactgtactgcattttgaaagggtttatcttgagttactgtttttaaggaactgagaaaaataagccaactttgtttcctcatctcagtcaaaattaaggagacttaagtatatgtgcttgaaagattagtgcagccaagtattcaaacatacttgtttccaaaaaggatgggaaaaaagccaactgatgttagcttatacaattgttctgggctctcagatttgatggcctgagggtttggaatgctgtcactttaaacaataatcgccagaactgttctgtgtctgaataggttaatccatacactgacagtagtttgggttggtttgttttttttttttagacagagtcttgctctgtctcccaggctggagtgcaatgggcgatctcagctcagtgcaacctccgcttcccaagttcaagtgattctcctg

SEQ ID NO: 20610 - DNA, 1049 bp, Homo sapiens
aaagtaagagaagacagggcagcaaatcagcagaccaaaaacttatggtagaaatgccaggctgaatcaccacacccacagcgcacaggaacaccagcccatatgaatctacagttctacttagaccagcagggacagcaccaagtcacgtgttacaactgaaagcatcacttgacgacatcctgaaaggtcataatcagttgggaatgaaagtcatttttcctttaaaatacaaaaatggcagtgtgtacaacccctccttcactaaggctaaattgaggaaacctgaatatcaaaaacgacagatttaagccattgatcgggtgccacagagacaggaatgatagctattcttccacattactagacattattctccctacacaaaaatggatttagagcttgacagaatttgtcaaaggtctacttttctttgacagctcagccaactcttccctgatgtgttgtacagaaatttcatcttttttcagctttgcttgcttcagtgcttcctggtagatctcttttgcttgtgtatatcgttctaaaataacccagagagaagggacagtaagaagaaagtgtatgttttcaaggtgattctgaagagagagcatgaatgcagatatagggctaatttactgtgtgcttatgaagcgacaagctggtgctgcctcatttcatccccatctgacaggctggaactccactgaatgctgtgggattcctaacggccctttccagtatatcctgaggactttgatgagcccaagatttcatgaatggtggtatgtgtaatacacctgtcatcccaggtttctgaaaatgatcggtatagtgtgctgacactaagaaatgtctgacaaaatgatacttcctgtcataaagcttcaccagcacactgtgagaaacacattgtaactgaacacatttagaaatctgtaaagcactactgacgtaaggtactatcattgcaaggttttctccagcttgatggggttcgacaggctagtgcaggtctgtagaagttacgtgaattgaacacaata

SEQ ID NO: 20611 - DNA, 1061 bp, Homo sapiens
atgctcagcagtactccaccaacaccgattgcatgtgctccctctgcggtgaaccaagcagctcctcaccaacagaacaggatctgggagcgagagcctgccccactgctctcagcacagtacgagaccctgtcggatagtgatgactgaactgcacaaagtgaggggaacagggtgcaggagagggatctctagtttttgtggtttaatttttagtagcaggtcaaaaacctgccctcctgtgacttattccctgagacttttcaggagagccagcccacagatgatgaagaaatgatggaagttcatttggagagtcaaatgggaaaaaaacaaacaaaaaactgcctttgatacaggcaattcagtggactataataatagtggagggttgagatgtagagtttttaaaaagtgaacagttgctgttcttacatctgtaaagaaaaccataatgtctttaaatcactcttctgtaaatagatgacctttttgcagtgtatatccccttgctgtagtatctggtgtacttatgttcaaatcagcgcatcaactttgggggtgatttttaaaaatctttttgtctatctatctttttaaccctagccttctaaacaacctcatacagcccagttacataatgttggctgtcacgggcattgtacttttatctgatattgtttcctctaaattcagctttccagtgatgtttaaaatcttgtgaaaatgtttagatttttaacacagaccctgtcataaaatctgtacattagggtcaaaaggtaaaagtaacaaattctgccatattgtaaatttccagtgcaggctttaatttttttttttcattagtagcactgaaaaaatattactgcatgggtatgttctagttcagtttataaagttttaaaggcttatttgaggcatacctcactgttacgcacactggtaatttaaccatgcccctaagtattccttttctcctgcatttgatgcagcccaacaaagcttttgttttgaaataaatttgactaccctgtccatagctacagtagattatttgt

SEQ ID NO: 20612 - DNA, 1042 bp, Homo sapiens
tttaaacgaaggcctttctaactccaaattgctagtgcctttcttacaaagtgttgctattaatttattgcatttattcttagggagctaaacagatattgctacttttcaatgaaatgaagaaaatccatttttggagagggagtgatgttcaatttaattatacatttacatctttcccctacgtttatgagtgttttgaggacagggaccatgtcttattcctgttcctatcaccttaattgtctttcctggcatagagtacgtgttcttgtgtttgaatgatgactgaatccacatgattggattaggttttcaataacctatagtctctgttctcatctctggctctagctagatccttggtggcctggagtttttagggaaaccttgtttttttttaaatgtgttagtataggaagctgccagtaaaatatgaaactctttatattaaactcagctcatttgttaggttgcttgaaatgattgtaacaaataggcagttttattcctatactgttgtgttccagtccagctgttgattgcttagatatgagttcttgctattttgtagtcaagcgtgctattagttttaattttagtgtacttaaaactaattctagtaaaattgttcccagtttaggtggtaaccattaatatatcagtgtttgtgctgttaaggagagagcatcataagctgtttctgagttttcctattaatattcatttactgcttcttcattccttcctaagaatttctgctctagattatctccattctaattctaattttatgatttcattttgagagctaaatcatttttcctcaaatgatgtactaagtggtttatgattacatactgtttcttagggctgtaaccacaaacacaggatgaggaggcagtagttttctaagtactctctgactgttgttatcattgataggaatgtccccaggattaggagtacgtggttgtaatatacttaactttggccctaacaggaatgatgcccgctcaccagggagtataagctacttgcc

SEQ ID NO: 20613 - DNA, 1046 bp, Homo sapiens
gttaaaatgatatttcacatatactgggttaattaaataaattctacaaaattagctaggcatggtggcacacacctgtaaatccagctacttgggaggctgaggcaggagaatcgcttgaacccaggaggcggaggttgcagtgagccgagatcgcaccattgcactccagcctgggtaacaagagcaaaaccccatctccaaaaaattaaaaattaaaaaaaaagtttaaattatttgaccaatttcttcttacttttttaatgtgaccatcagaaaaattaaaattacagatgtgattacattatatgtctattggatggagccgttctagagtgtcagttcagctgggtaaaaggaaattcacaggaagaggcttctagaaatacaccagaatgtcatcatttataggaatgttttttgtttagttttattgttcgttctttttcaatttcatataaattattttcagacattaaaatcctttatgcttttagtttcagaaggtcaagataatttgatctttcacttttatactctgtaggaaactttagccttctcaatggctgtaaatacttcaatgaggtcatcaaaggagtagaattcatcctaaacaactactttcaaacatggtttctatcaccacctgaaacatgttcattatcagatttttatgctgtatcattatctttaaggtgcagaaaatagttctgatacagaaagtgctccttctccttcaccagttgaagctgtcaagcccagcgaggacagtcctgaaaatgctacttctcgaggaaacacagaacctgcggttgagcttgagcccaccacggaaactgcacccagtacatctccctccttagcagttccaagtacaaaaccagctgaagatgaaagtgtggagacccaggtgaatgacagcatcagtgctgagacagcagagcagatggatgtagatcagcaggagcacagtgctgaagagggttctgtttgtgatcccccacccgctaccaaagctgactctgtggacgttgaagtgagggtgc

SEQ ID NO: 20614 - DNA, 1045 bp, Homo sapiens
ggctaattttgtatttttagtagagacggggtttcactatgtcggtcaggatggtctcaaactcctcacctcaggtgatccatccacctcggcctcccaaagtgctgggattacaggcgtgagccagtgcgcccagcccatagaaggctttttaagcatgtgatgtttgagttgatcaccaaaggaaaagtaggtgaaagagcctttcagtaaaggtgaatggcatgtacaaagtctctgtggtagaagatgcatgaggcattgaacaaactaaataaaggccagtgtgacttgaattcagagagctgtgtgcaagctggagaggctggagggggcccactgggcaaggccttgcagatcataccagcaattttgggactttatcctaatagtaatgggggtccactgaaaagttatgagagtgagagagtgagttattgtggtaaaatctggcttttaaaaagacaactctatctttgttgtaaagaatggtctgaagtggagtgaagagagttggttttggactagagtgctagctgtgaagttgaacaggattggatagattcaagagaaatttttagagagaaaatcagtgagccttgtcaaggctggatatggggtaaatgagaagagggtttaaaagatgacttcttggtctctgttttgtttaattggatagtaaaccctagaaaagaatctgatttgcgagtggttattacaactctagtacaggacatactgaatttgtgctgcctttgatatatctaggtaaagatgtcaaaaagcactgaaagtctatttatagaacaatataaacgattatagaacaatataaacgatatggggaaagatctgttacaacattaaattaaaaatctgtgaaatagtattctacagccttctgtccagtgtggtagccgctagacacttgtggctattgagcacttgaaatttggctagtttaaatttagatatgcaggctgggtgcggtggcctatgtctgtaatcccagcactttgggaggccaaggcaggcggatcacctg

SEQ ID NO: 20615 - DNA, 1748 bp, Homo sapiens
ttccaactattcgggaggctgaggcagagaattgcttgaacccaggaggtggaggttccagtgagctgagatcctgccactgcactccagcctgggtgacagagcaagattctgtctcaaaaaagaaaaataaattgagtggtaaaaagaaattcagtagtaatatcaatgatgagttgttgcttataaaattgcgtgattcttaatgctagtgaaggaagtttcttgcagcattatttataccaaaaattgaaaattaccaaaatgccttaaaataggagaattttaattatatgtcaacataatatatgtcagtattatgtcaacataatgttttcatgggatcattaataacaataattaggaagaatttgtaacagtgatatgttctgctcatggctacattatgttaaaaaagtgaatatgtaattacatagggctttcctggttgtgtttacatgtatacataaatatttatattcatgtatatgcctctgaaagattgaaaggaaatgtaccggtatatttaggatctcttactgttggaataatgagcagtgatttttgtagtgttatgtcttccacatttcaaggtatatattatctttagaaaaaatatatatatattgtttttattagataacattatctggagtgagtaaaaagcatggaggtatgtgatttttggctttttatacatgtatagtggtgagtaattccaaaagtggatcagatgtaacttttgcttagtttgataaaggcgagccatctacacaaaatttggccagttagtgattatggagaggtatttatctgcactttaaccagaactattgtcaaacatgtgacctccttgtctggtgtgtgtgtgtgcttatcaatgttctacattatttcagaaatgaatttttttttctttttagttatttaaatcaaataatactctttcctcctttagacttcacgaaaacctcgtgaagagcgagatgtgtctcaatgtgaaagtgtcgcttccactgtttctgctcaggaggatgaagatattgaagcctccaatgaagaagaaaatccagaagacagcgaaggtatctcaaaattttaaatttagttgtgacatctgctatccagaataaataatttttagtcatttgactgtgtaggagttgcttcattgaggaaacagtgtgccagtgttttcatggtgtggagacttcaaacttgaacataatgtttttattcatttaatcaacaaatatttatgtagcacctaggatggtccagaagatcttggaaatggcagtcctgcttcagacatcaagtgccaacatcaataaaatacctgtgtgtctgtgtcattgccacatttatttgttcagttagtatagttggttacatttctctttattttattggcttaagtttgatttattttcatatttttacagagatttatatgtactgtagtaatgtttttacgtaaaaagaattagtgaccttagaagcaccgatagaaaaaaaaaacacgaaacttaaggaaatttaagaaataatgtatctttgtcatttaaactaatgacaagttcatggaaaggtaaatgttttcttgatttttttggtaagaaaaaagatacctaatttatttcagtttacactctgattaaagtttctgtggattttttttttttttttttggaaattgcttctgatgtggggatttttataatgcttttagtagctcttcatatatt

SEQ ID NO: 20616 - DNA, 1034 bp, Homo sapiens
agcagattgctctgtgattcagaggaaagagcatgaagtttgtaaccaggccagcgaaggtttgagtcctgtctctgccactttcatagctttgtggccttcctcttactctggcactttatggactttgtgcttttctgtcgttgcttgttaatgtactataatttgaaattgaactaaaatttctaataggataaataattggtaatattgagaaagattagctaatttttggtggttaaatatttaccttgcagttgtaaagataaattattgtaaatagcttgacatttgagtgacacatttcatatttttttgtatcaccccttatatatgtatacaaatgcatagatacatattctttgcacgtatgtgtgtgtttatgtgtgtgcatatatatattgattagagaagtgttaaattgcataggtttctgtaatgcattgtattaccataggatttttttaaattggctagtatttttctgatggcattgcttgattgtgaattgactgaggacaaatatggattataagtggagtcatatatatgtctttaaattgtgtttatcatttatatatgattatcttattggcttgatatattgtgtccagagatctagatgtacctaatcatttagtttgcaagtatttgagctattactaatgtgtctaatgttgtcctagccctgtgagagatacataggaaggacaaggtttagcccttctgttaatgagcatgttttaaatttgagggggaaaaatatagaactgtaaatgagttttgtttcaataagtatttttataagtatcaaagtatatatgataagtaattgaaagcacacttctagtgtcaatggttgtgaatacagtgattaagttaatttattatttctcttgtttgcttgatcaggtgactgttcaattaacatttggtctgtttttaaaatgcaggtctagtagaacatggtcgtaactgggcagcaattgctaaaatggtgggaacgaaaagtgaagctcaatgtaaaaacttct

SEQ ID NO: 20617 - DNA, 1083 bp, Homo sapiens
tttacatattccattaagtagactttcgctcaaaagtataaatgcatgaagatgtttcttatagcattatagatagtgatgaaaaaattggaaacatattaagtatctaaaacatgataaattatgtatgggttatcaaattttaaggtagaattggaatgcttgagtgacagattaaatgtggaggttgccaaaaaagggaaccaaccccagatttccgagtagaatcttaacattttcactttctcgtgggtccaaatgctatgagcatttgtgtctgcgtgtaggacccttcaagcagtacatatagaatacattaaaaacctctagactggtttttaacacacgatcaccagttacattgtaaatgactaacaatcatttaaaatttttttagatagacataatttatcacactataaggagctatttctgtttgcctttgaattttacaaatgatggttcattctagcagcaaattgctcgaccctcgcaagaagaaaaagtagaagaaaaagaagaggataaagcagaaaaaacagaaaaaaaagaagaagaaaagaaagatgaagaggaaaaagatgaaaaagaagactccaagtgagttaaataattagttatataataagttaaatgtttatttttattttatttttatttttgtagatatagggagtacagttgtcacatggatatattgcatagtagtgaagtctgtgcttttagtgtaccatcgcccaaatagtgtacattatacccattatacctcacccaccccctcgcaccctctcacctgtttgaatctctagtgtctcttattccactctctatatccatgtgtccacattatttagctcccacttataagtgagaacatgtgatagttgaccttctgtttctgagttatttcacttaagatgatagccgttagtttgatccatgttgctgcaaaagtatagtttttttttttttttttttttgtgatggcgtctcgctctgttgcccaggctggagtgcagtggcatgatctcggctcactgcaagctccacttcccaggttcacgccattctcctgcctcagcc

SEQ ID NO: 20618 - DNA, 1050 bp, Homo sapiens
aatcaaccagaacctccaataatagatcggttaaagcgtgtgtgttttgtttcgcagattggaaggataacaacaaaatgttcatatggttgcctttgggtaattggtcagattatgaactatttacatgtttgtatttttaattttccatttttttgggacaacaatgacataatgttttaagcaaaataaaagtaactggtcagctactactagtagtaggtgtcaagtagtttataaatatgcatagtcttaatgttaactaaaaaatccagccaacctgtgctctatgtgttgatcttagtaggaaacagagctacctttcctctctcctctttgtgcttttcgttcacagttgagtcataagccaaatgtacttctgacttaaccttaagaagtagcatttattttaaagtattaggtttgtcagaatcagagtttagtttaattattattaatttgctacggatatttaataggaacaaaaaatctgccagcgttatgatcagctcatggaggcatgggagaaaaaagtggacagaatagaaaataatcctcggaggaaagctaaagaaagcaaaacaagggaatactatgaaaagcagtttccagaaattcgaaaacaaagagaacagcaagaaagatttcagcggtgagtagtttgatgtttaatgactgtgatatttttcttcaaatatttattgtttcttttttttaaaaatttttttagtatgtattgatcattcttgggtgtttctcggagagggggatttggcagggtcataggacaatagtggagggaaggtcagcagataaacatgtgaacaaaggtctctggttttcctaggcagaggaccctgcggccttctgcagtgtttgtgtccctgggtacttgagattagggagtggtgatgactcttaacgagcatgctgccttcaagcatctgtttaagaaagcacatcttgcactgcccttaatccatttaacccttaatggacccagcacatgtttcagagagcacggggttgggggtaaggttatagattaac

SEQ ID NO: 20619 - DNA, 1044 bp, Homo sapiens
atcttaagagaggaatcataaactctagggcttaaagctgccaaagattgactgtatgccagatgcaaaggatactggagctttaattctattaagtctattagagttgttattgcttttattggtgttttccttacagaattgtacaggttttagggtatagccataatcttattttcccagaaggcctcttagattcagcgcatactattagagaatatgaggcttttcatcagtgtatattagctgaaatatctgtactaaggtgttttgaagcaactgtccagttatctcttgtatgcattcttgactcagaactattgacttttcacagttccttaatcattatttaatacattttagggttctgtaatcctgtgaactaccctcattgtaggtttctcatagtctaagtaaaattagtactctaaaatttatctgttttataatattgcttatgtctttacagcagactggaaattaatagggtgtgtgtggatgtgtgttggagggtagtggattttgggtgaagcggctttcattctgctacagctctgctgatttggaggcacaatgggatgtttttggctaaggaaatgttatgtatgctgtagtgtgggctttatgaaagtaggcctagagatagtagcaactgaagttcctaggtcacttctctgacttgtgtacctcagttttggtttggaaagcctaaaaacttttgataggaacacttggccatgttatagttgttaagttgggtggacacacaggttttacctggaataatactatttcccagccagttgttcagaccatttgaagagccgttgcaaggaaatggctgagaagttggtatcttcctttgtcatgattgcattatttacctataaattctctataatttcagtattgttatactagaggctgatcaacactaactcacctcactttgtatagcttttagggtcttcaaaatagtacatggtatatctaaactataaaagtgaggtgagaatttgcatgtatgtgaatatgaaagttact

SEQ ID NO: 20620 - DNA, 1028 bp, Homo sapiens
aacctggctcagggagtgtgattcccatctggcagttgaggaaagtgagtcagagggctgaagcggtaggctggagccagtgctttccgagccagctggcagcctgtgggtctcatcactgaagccataagctgtggcatatcctttggaagccctaatgtgtagcgtgatgatgcctgcaggtgggggcttatccaggagccggtacaccatctggtctcacccatactgaggatccccctttgtctgtgccactttctcgtaggaattgccccccactgcctggatgagggcactgtgcggagtatggtcactgaggaattcaatggcagcgattgggagaaggccatgaaagagcacaagaccatcaagaacatgtctaaagagtgagcttctgcctctcctgccctgaaaaggaggaatgattggggccagcaactttgctctccctgccgtgcctcggtggtgctcctgaatgtggctgacctgggctgctggttccgttgactagggtcatcttgatctctgcagtttgctccagctaccagtttctttaggcagctctttgtcctccctctgcccagattttgatgtagtctaattgacatccttctcttcccaacttttgtgtgatcttttaggaaaaaaaataaatatttttaacattaaagcagtcactttggtttatcatttcttttgtactgtgatttgcttctgaggccagtcgattaatagcagatatatactcagcactatcaagatgtttgccaccaggcattgtggcttaagcctgtagttccagctactccggagggttgatcgagcccaggaggttgtggctgcagtgagctgtgttcgtgctactgcactccagcctgggtggcagaatgagactgtctcaaaaaaaaaataagaaaaaagaaaaaaatgtgtagctaaattggaaagaagacataagataaacaattattaaaaatggaagattgtggcagggcatggtggctcacacctgtaatcccagcactttg

SEQ ID NO: 20621 - DNA, 1032 bp, Homo sapiens
tatattaacaaagttgtgtaaccatcaccccaaaaagaaacactgttccagtagtagtcactccccactccgtactaccctccagctcctggcaatcactagtctactttgtctcacagatttgcctactctgggcatttcatagaaatggaatcctctctgcagccttttgtctctgccatcttcacctcgcgtcatgcttcaagggaatctgtgctgcagcatgtttcagcacctcatttcttagtttggctgaataacattccattgtatggataacaaattttgtttgcccattcattcgttggtgggaatttgggttatttctatcttttggctgttatgaataatgctgctataaacatttgtgtacaagtgtttgcacagacatgttttcatttctttagtatacacctaggagtgaaattattgggtcatataacactatttaaccatttgagaaactgctagactttttccaaaatggaagtatcattttatattcccaccagcagtgaatgagggttccttttcctccacatccttgccaacatatggcatgatctaactttctgatcatagcccttctagtgggtatggtgtctcattgtggttttgacttgcatttctaatgacttaagatgatgaatgtcttttcatgagcttattggccatttgtatgtcatctttgaagaaatgtctattcaaatcctttgcccatttttttgggttgtctttttattgttgagttttaagagttctttgtatatgttctggatataagaatcccttaacagatacataatttgcaagctggggacagtggccaacgcctgtaatcccaacactttaggaggtcgaggcaggaggaatgcttgacctcaggagttcgagactagcttggacaacatagcaagatcttgtctctaccaaaaataaaaaataaaaaaaataaaaataagattagctgggcatagtggcacactcctgtagtctgagctactcaggaggctgaggtgggaggatcgcttg

SEQ ID NO: 20622 - DNA, 1050 bp, Homo sapiens
agaaaccccgtctcttccagaaatacaaaattagctgggcatggtggtgcatgcctgtaatcccagctacttgggaggctgaggcaggagaaacgcttgaacccatgaggcagaggttgtagtgagccgagatcacaccattgcactccagcctgggcgacagagtgagactccatctcaaaaaaaaaaagaaaggaaaaaatgttgctccttctgccctccagaagcacagatggtgctgagggccttgtttgtctcagctcattgaccagagccagtcacgtgtgccttagccaagtagtgcacccagaaggggaggtggagacaggtggggagcagcgcagatggccactcacgagaatccccctgggtgccttgggtcactcattaggaaggggacaggagaagctcaaccgatttctgttctcggatagctcctgatgtagccggggcagagctatgctgttgggaatgattggactggtggcactttgtgtgctctgcatggagagagtatagtgggactgatcctccaggagtcaggtcctggagttggctgtgaacgagtaggggtccgagctgctggcagctttggcttaaagaggccatcccttccctttgcatttcaggtgtttgaggcagagcagtttggatgcccacagcgtgctcagaggatgaacacagccttcacgccattcctacaccagaggaacggcaacgccgcccgctcgctgacatcgctgacaagtgatgacaacctgtgggcgtgcctgcacacctcctttgcctggtaacgggcgtctctgcttttggcatatctgttaggatagagcagtcacgatacattggttggcttgtccatggatttgggagaacagtccttagccgtgtttgcttgctgcctctgtgaggagcactggcctgtgggcacttgtcagtgagcacagatctgggctgggagtccttgttctgtaggcctcttcccctgagtgtgctgaaaacatattgatgtggaactcacttcttcctgggttcaagtgattctcctgc

SEQ ID NO: 20623 - DNA, 1049 bp, Homo sapiens
tcccaactaacagatttacttttccttttcatggacagggctgccggtcacttgctgcagggcacccgggatatatcagccatgataaagagacctccattaaatacgtcagccaccagcaccccagccacccccagctcttcagcattgtccgccaggcctgtgtccggagcctgagctgtgaggtgagccttgtggccacagagcctgtctctgtgggagcccacatgctcccaggtgctctgggtgggctcggagccagcattgcacagggaggcaggcactggtcctctctcagggcggacccgcagatcagcacagcacagggtacaggacgcctcccttgtccagaattgcgggaggagtcatgttggacttgctgagcattttctgattgagtgctagcttttgcactttaagcaccgaacttttattatttgtcctttctttattattattgttttcttttttccttcttttgtgtcagggtctcgctctgtcgtccagactggagtgcagtggtgccgtcatggttcactgcaacctcaaactcctgggctcaagcgatcctcccgccttagcctcccaggtggctgggaccactggtgtgtgccaccatgctcaactggggtttgttttttgttgttgttaagacagagtctcactcggttgcccaggctggagtgcagtggtgcaatctcggcttactgcaacctccaccctgggtttaagtgattcttctgtctcagctatcctgagtagctgggacaacaggcgtgtgccaccatgcccggctaattttttgtatttttagtagagaagagatttcaccatgttggccgagctggtcttgaactcctgaccttgtgatttgcccgcctcggcctcccgaagtgctgggattacaggtgggagccactgtgccccacctttttaaaatttttttgtagagatgaggtctcagtatgttgcccaggttggtctcgaactcaagcaatcctctggctcatcctcccaaagcactaggattacaggtgtgagccgccatg

SEQ ID NO: 20624 - DNA, 1074 bp, Homo sapiens
caaaaccccgtctctactaaaaaaaataaaaaatcagccgggtgtggtggtgcacgcctgtaatcccagctactctggaggctgaggcaggaaagtctcttagaacctgggaggcagatgttacagtaagctgagattgcgccactgcactccagcctgggcaacagagggagactctgtctcaaaaaaacaaaactctctcagattgtatggctgtaaataaatggtgggttagatatcccagctaactcatcaaaacctcccttaactgtgaaaacacttaaagggcccagtataactttatctattcccagctgccacctacaacatagagccttatgtttttgctgaaatgtctgtggagttccaggttgggaggttaggaaacatctctccctatgtgagaagcagagtcggggtggctggaggagaagagcaaagccctccctgacggtcccctttaggcaacagcctggctacagctgcagcagtcacctctgtgtctcctgagggcatgctgcctctgattctgggggctgaagggggagttttgtgggtggtctgtgtttcttacctctgagcagggaagtgaactgaatattaaatctcagaaaactatgtttttttgtaattaatttaatggcaaaatgtcacctgaaatggtgtctagtcttcatttatctcagcatgaatatactcgtttcactgcaaaagatactatgtgtttgattatgaggtttgcctagatcctgctgggtgggatatttggtattatatgatagatgtattagctttctgagtccaaaatactctggctccaaaacccatgtggccccaggggtttcacatcaagagattgtgaacctatagcacccttgtgaacagtgtaagttagaaaggatgcagctgacctaaacccgccgctgaccaccttctaatgtgcctgtcatgcagatgctgaagtgcattgagctggatgagcggctgaaagccatggaccaggagatcacagtgaaccctcagtttgtacaaaaggtgatgagggttcccttattacaagaagtaggctgggtg

SEQ ID NO: 20625 - DNA, 1042 bp, Homo sapiens
aaccagtgtaacttgtgagccagaaaaaccagcttgacctacaggtttaaaagaccaggatctaagagacttaaataacaagcagcctaattctctccataaaattttctttttggcccaagtgccaacagaaccattctaagtaaatttctgtcttttgccatcaagaggtagccattaaaaaacagctgccattaaaaacacaaactctgtttgtgactagtaattgaagtttagataaaagaacccaaatgctaacaaacataaaagatagtacatgttacaaaagatgttaaattgcaaaatagcaaatgaaaattaaataacggtttcaaaaattagctgggcgtggtggcacatacctgtaatcccagctacttggaaggctgaggcaggagaatcatttgaacccaggagatagaggttgcagtgagccgagattgcaccactgcactccagtctgggggacaaagtgagactccgtctcaaaaaaaatttttttttgatcaaacaggaagagtctcaactcgaaatggtctttccagggctggggtagtgactcacaaagtcatcaaggtcctgggtccttcgtatgttgacacgaagtggtggattgtggtacactgagctcacaagcactgcctgccagagggacctggggagggctaccataaggtatggtgggcaggaaccgtgtctttaaaggacatagctagtcagaaggttacatctgtgatagtggctgctccatttttggcatgatgtcccagtgctaaaatgaaaagaacggggaaacatcaaaggatttttctagccaagtttttcttactagaaaatccaaagaagtctcaacaggtagactgtatcagtaggtgatggcatggctgggatggaaggcagctggggatgggttaaatctgccacctctcccattgaaatattactttgtgttaacattttagtagatgtttttctttttctttttctttttctttttttttttttttgagacggagtcttgctctgtctcccaggctggagt

SEQ ID NO: 20626 - DNA, 1084 bp, Homo sapiens
tcagcctcccaaagtgctgggattacaggcgtgagccactgtgcccggcctgtaactttttttaaaatcccgaatcatttttttaaaattgtggagcctgccaggtgcagtggttcacgcctgtaatcccaacactttgggaggctgaggcgggcggatcacctgaggtccggagttccagaccagcctgaccaacatggagaaatcccatctctactaaaaaaaaattgtggaacctgagacttaacatagctaacttcttacaccttaaaatgttattcatttatcttttttttttttattttttgagatggagtcttgctctgttgcccaggctggagtgcagtggcatgatctaggctcactgcaagctccgcctcccaggttcaagcaattctccttcctcagcctcctgagtagctgggattgtggacgtgcaccactacacccggctaatttttgtatttttagtagagatggggtttcaccattttggtcaggctggtcttgaactcctgacttcaagcgatccgcccacctcagcctcccaaagtgctgggattacaggtgtgaaccaccgtgcctggcctcatttatttatcttattttgcgatgttcaaagtccagaaggcaaaagggcaggtatataatgaagtctccttcccattctgtttgctagccatctatttcttctctacaaaggaaactatgttagttatttctcgtgtatccttccaaaaactttttatggacataaaagcaaatacgaatatatattttctcattttttacacaaattgtaataatctatgcatactcttatgtagcttgctttttgtatttaacatatcttggagatgattctgtagcagtactctacaggtacggagtattctataatatgagtatgcgatggttttagaagtctgcatgggatatttacattgtttccttcaagaataacatggtatgtggattatttcaaacacatgttctagtttcatatgaagatgtgctttttaatgttttaaaaaaattgtgattgaggtacaacatatagacagtaaaatactaaagtgtatag

SEQ ID NO: 20627 - DNA, 1027 bp, Homo sapiens
tgtagtcccagctactcgggaggctgaggcaggagaatggcttgaacctgggaggcggaggttgcagtgagctgagacaacgccactgcactccagtctgggtgacagagtgtgagactctgtctcaaaaaaaaaaaaaagaaaagctaatcataatttctactacatcttttggtttatctgcttccatctatactgtattatttgacttaacaatgtcaccatacatctgtatttacactttgtaattatcaagacatgtcagaaacaatttcatctggggttcacaataggtcagtgaggcattgcgactgccagtttataaataaaaatatgaagctcagggccccacaactcaaaattggaagaatatgtagattcaaaaccagggtcctcagccagaagctcagggttctttccataccttatctaacatatacaacggtaaacaccttataccttcaaaatgcattcatgtccattactcacctgatatatatgtttatgtgagtttatgtgtgtataaaacatgcatgctctctgttctttcttgagatagggtcttgatgtcactcaggctgaagtgcagtggtgcaagcatagctcactgtagcctcgacctcccaggctcaagcagtcctcccactttagcctcctgggtagctgggaccacaggcatgtgccaccacactcagctaactttttttcttttggggggacaaggtcttgttctgtcacccagtcaggagtgcagtggcatgagcacagctcactgcagcttcaatctcatggactcaagtgatcttccaacctcagcctcctgagtagccaggaccacaggtgtacaccaccacgcccgcctaatttttgtgtttttttgtaaagacagggtttcatcacgtttcccaggctggtcttgaactcctgagctcaagcaatctgcccatctcagcctcccaaagtcctgggattacaggcataagccaccatacctggccactttttttttctgtagagatggggtctt

SEQ ID NO: 20628 - DNA, 1035 bp, Homo sapiens
ccatcttaaaaaaaaaaaaaagatgtagtccagacaaaaaatgatgaggatctgaattagggcagagaggggagagagaaagaaatggagctgagagactttggaagtaaaactaaatcatttggatgcagagagctgttaatagtaacgtgcatttctggcttgggagactagaaaacagaatagagaaaaaggtgaaacattcagggtcagagagaagtgggaggtccagtgtaatctctaattcgttttgagaccacggacaggttgtttcactcctctggtccttctggatcctcatccgaagtgaaggagattaagaatcaattttgggaacttcaggctctgaagtacaaagttgtggttagagttccatcagtttggttagtgctgtagctgaaatgcaatagtgttgttcctgttttccagggcaaatgacacagctttgtgaactgatcaacaagagtggggaactccttgcgaagaacttatcccatctggacactgtgctcggggctctggatgtacaagaacactccttgggcgtccttgctgttttgtaaggagcatcttcttttatagttctgtgcttgttaaaatggaacactgtgcacttcctggctttatttttatttatttatttatattttttgagatggagtttcgctctgtcacccaggctggagtgcagtggcacattcttggcacactgcaagctccgcctcccgggttcactccattctcttgcctcagcctcttgagtagctgggactacaggcactcgccacccgccccagctaatttttgtatttttagtagagacagggtttcaccatgttagccaggatgatctcgatctcctgacctcttggtccgcccaccttggcctcccaaaatgctgggattacaggcgtgagccaccacgcccagccctggctttatttttatttatttatttattttttggtgtagaaagtaaaccattgtaaataacattgagctcttttgcaaaactaaagttatggcagttacagt

SEQ ID NO: 20629 - DNA, 1017 bp, Homo sapiens
ggccccttccaccgggcgctttgcttgacagtttgggggcgtgacttccgccaggagccatctcgggcgactattggttccttctgtctctcttgccttcggtgattggcgcaccgccatgtcatctttgccgccgatccgcagcttgctgactaggccgccgggagcgggcgggaggcgagtccgttctgggtgtcttggctctatggctcgcctctgccagctcctccgctgccaggcggcgcacgctcgggaacctgtgcgcctattttggtcctacagaatgctgcggaagctctcgctcgtaggactccatttcttcttctttgtttttttttagccgaggctggagtgcagtggcgcgatctcggctcactgcaacctcagcctcccggcttcaagcgattctcctgtctcagcctcccgagtagctgagattacaggcgcccgccagctcacacggctttttttttttttgagacggagtctcactgtctcccaggctggagtgcagtggcgcggtctcggctcacctcaaccttcgccttcgaggttcaagcgattctcctgtctcagcctcccgagtagctgggattacaggcgcctgcccggctaatttttgtatttttagtagagacagggtttcaccatgttggcctggctggtctcgaaccttgatctcaggtgatccactggcctcggcctcccaaagtgctgggattacaggcatgagccaccgcggccagcccacgcggctaattttttcgtatttttaatagagatggggtttttaccatgttggccaagctggtttcgaactcctcacctgaagtgatccgcccacctcggcctcccaaagtgctaggattacaggcgtgagccactgcgcccggccaggactccatttctaggggtagaattgtgatgattttactcgcactttccaggttgtttggttcattcattgcgtatgaatgtaccgaattctggacctgaaattcgaatgattagatgctg

SEQ ID NO: 20630 - DNA, 1047 bp, Homo sapiens
ctgcggatgcggttattggaagggctgaggggtcagaggccaggtttggccccaccaatggctggcaccaataacaacacccatgtagaccaggtgtctgcccagaagccccatgtacctgaggtcaggaagcctccctgggaggtggaggtgctgttaaggagcagctggtgggaacccccaacgtgcttctctccgagggcctcaggggctcttagtctgccggctcctcaggctggggcttcctgcacccctagcgcccaccctccaactctcccctgctgctgagacagatcttggagcctcggccaggctgtcctagtcacaaggtaagtgtccaaggcaggcgtcagagtcaccagcagccacttgaggcctccttccctttgaattgagaggcatggaaaagggagcgtctgcgaggaaaggatggctgcatgcaggttccttgtcaggtgggtggggacgtgggacatgcctgacatcagagaagccacatggggcagggggatggggaaatggcctcctctgggcaagggtctggtgggacctgggggcatttctctctctttttttttcttgagacagactcttgctctgtcacccaggctggagtgcagtggtgcgatctccactcactgcaagctctgcctcccaggttcaagaaattctcccacctcagcctcccaagtagctgggactaccagtgtgtgccaccatgcccggctaatttttgcaattttagtagagacaaggtttcaccatgttggccaggctggtctcaaactcctgacctcaagtgatctgcctgtctcagcctctcaaagtgctgggattacaggtgagccaccgtgcccggccaggggcaattgtctgctcgaaggcacatgttccccaacagcctttgagcgtgggatcaagggagtgcagctgtcttgaggggcgggacagcccgtggcgagggacagtgccctccccatcaggagctcagtgctaaccgtgcctccactgtgactgtcacggtggtcagcctcatagtcatcatca

SEQ ID NO: 20631 - DNA, 1064 bp, Homo sapiens
cggggtttcaccatgttggccaagctggtctcaaacctgacctcaagtgatctgcctgccttggcctcccaaagtgctgtgattacaggtgtgagccaccacacctggccaagggggcacattttttgattgcacagaagctccatatgggctagcagcagctctggggggctattgccctccccagctgtacttgacactctctccaaggtagggactagggcgtatttatcttggtatcaagattatccagtacagcaagtctcagtgaaaggttgataaacagaatttagtacacttggtctttcaaaatgaaactatttgactaaggaacttaatgaaagacaaacattgtatcatgatacagtcatttaatgtctctgagccttagtttcctcaattatgactaatatatatctcttagaattgtttaatgttcaaattggataatgcatgtaaagcacttgactcattaattttcttttcctccatcaaaagtatttctgaaatgagtggattctgaatttggactgtaaccaggtatattctggaaagagtatatatttaaaaaaaaatagaacaaagatttttctttattttaacagtgtgacccctcatgctaccaaaagaaattaaaaatgaatacaacttgttgtactttctggaaagaacaaaatcttcaaaatcagacttcactttgagtcccagctccagtaacctctttgagcctgagcttcctcatctgtaaaatgaggatagaagtcctatttttaaaagtatgtgtcggggcattaaatgagacgtttgctagggctaccataacaaaataccacagactggaaggcttaaccgaacttattttctcatagttctggaggctgaaaatccaagatcaagctgcaggtttggcttcttcagaagcctctttccgtggcttgccaacagctactgtcttgctgtgtcctcacatggtcattcctctgtgcatgcatgattggattagggccccattttaacttaatcacttctttaaagaccctgtctccaaattcaatcagtcatat

SEQ ID NO: 20632 - DNA, 1050 bp, Homo sapiens
ttctcgggccaggagcaaggggctgttcccaggcacccatgcaaccgtatctcccctgctgcccccacaggtctacatgtgggtggggacccagactagccaggtggagatcaagctgagcctgaaggcctgccaggtaatctgggtggagggagggccgaggtgggcctgtgggcagggcagggtcatcacccaaggctcgctgtccccttgccaggtatatatccagcacatgcggtccaaggaacatgagcggccgcgccggctgcgcctggtccgcaagggcaatgagcagcacgcctttacccgctgcttccacgcctggagcgccttctgcaaggccctggcctaagacaggctggcacagccccaggcttggtgaggaagaggaaggggcctcatccactgtctgctagcaaagaatgtactcaggtgacaccacctgctccagccacgtccagtgccacagtccccagtagcctcaagcagcaccaatggggatgaccctgacaggtgccctcaggggtctgggaaatccaactctctccacagtgtgagtgcacgtgtgaagccccctcactcttccgctagggataaagcagatgtggatgccctttaagagatattaaatgcttttattttcaatattaaaaatcagtatttttaatattaaaatggcgctaattttaacaaaacgacagaaaaaaaccccaaggtacaatctacagggaaactcatcttgacccccccccctgccccccccccccgccggacacacacacctgactaggccccagatgtgggtgcccagcagagctcccagtcacatccatgcccgcacacacacactcatgacaggctggggactggcccagaagcaggtaccaaaatagtttagttttagaaacaactgtccagcccaggcgctagaaaaatactctttgcagggctgggcatggtggctcacgcctgtaatcccagcactttgggaggctgaggtgggtggatcacgaggtcaggagatcgagaccatcctggctaacatggtga

SEQ ID NO: 20633 - DNA, 1025 bp, Homo sapiens
ctgcctcagcctcccgagtagctgggactacaggcgcgtgccaccatgcccagctaatttttgtatttttggtagagatggggtttcaccatgttggtcaggatggtctcaatctcttgattttgtgatccgcccgcctcagcctcccaaagtgctgggattacaggtttgagccaccacacctggcctataaaagagttttgcactctccttgaaagggctcaggcaccctggaaccacacttggagaactgctgatacagagacatgggacttctcagaggtgtttttattttagtgaattactgggatcttagatttcatctgcactgtttcccactgtccactcctgtgatgactggtgggggcttgtggtgggctgatagagggcctcacaggggacttgtgtgggcttcctgatgcataaggaatggtggagagaggcctagggctaaagcagccctcactggactaaggagaagctggcatctggttgttaatgttttttctcatcttctggcctcactaggttaaagttaaagtttaagcgcggtagccttcccccgaccatgcctctggagtttgtttgctgcatcggcggatgcgacgacaccctgagggagatcctggacctgagattttcagggggcccccccagggctagccagccctctggccgcctgcaggctaaccagtccctgaacaggatggacaacagccagcacccccagcctgctgacagcagacagactgggtcctcaaaggctctggcccagaccctcccaccacccacggctgctggtgaaagcaattctgtgacctgcaactgtggccaggaggctgtgctgctcactgtccgtaaggagggccccaaccggggccggcagttctttaagtgcaacggaggtagctgcaacttcttcctgtgggcagacagccccaatccgggagcaggagggcctcctgccttggcatatagacccctgggcgcctccctgggatgcccaccaggcccagggatccacc

SEQ ID NO: 20634 - DNA, 1033 bp, Homo sapiens
gtctgaacccacactgctcactcaggctgctcacgctggcctcatgtatgtgccaggaccctgctgataagtcccatggctcaagctttgcaggtagggccttgtaactaatctgctgtcccctccattcgtttttgtcaaggctctcaagggctttctctggcaaacctagtccaggaatacctgcagcacagtggaggggaagcagagctccctgggcatgtgttacataagcagctgcgtcatccacaaagggagtttcttaggcctatgacttgggaagcagtgcttcaacgtgaagtccttgaccatcactaggacatccagaaaccctgcaggtttaggtaaaattagtagaggttcacccgtcatgatttatttgataaaaatgtatgaaggctgggtgtggtggctcacacctgtaatcccagcattttgggaggccaagatgggtgaatcacttgagcccaggaattcaagaccagcttgggcaacacggtaaaaccccatcttgctgggcgcagtggctcacgcctgtaatcccaacacttcaggaggctgagctgggtggatcacctgaggtagggagtttaagaccaccaacctgaccaacatggtgaaactctgtctctactaaaaatacaaaaattagccaggcatggcggtgggcacctgtagctgagattgtgccattgtactccagcctgggcaacaacagcaaaactctgtcttaaaacaaacaaacaaacaacaacaacaacaacaaaacagatctggctgggcacggtgactcatgcctgtaatcttagtactttgggaggccaaggcgggtggatcacctaaggtcaggagttcgagaccagcctggccaacatggcaaaaccccatcactactaaaaaaatacaaaaattagctaggcgtggtggcacatgcctgtaatcccagctacttgggaggctgaggcaggagaattgcatgaacccgggaggtggaggatgcagtgagccaggatcgcagcactgcactccagcc

SEQ ID NO: 20635 - DNA, 1031 bp, Homo sapiens
aaggttaaggagggggactgtgagcattaatagcactaataaagatgtgatttattttagtcttgctgtcatcctccctggcccattacaatccacttaaagttccctttgttatccagaaactcctccctatttgatattcgtttgactttcaccacaataaacctttttctatctgtcatatcatgacatgtctctgagacacagcctttctgtttgtctctccttaatatagtaactcatgaccacaaagatggtatcgtagaattcaactggaaaaggcatcgactctttaaccacacggcttgcctagttctctatcagttgtgtgtggaggtaagaacccctaatgatctaggaaacattctgcacacctcccaaaccactcccactgtcggcagaggtgatctgtctcattctcccattggactttagctttaagtttgcatctcaggggatcactttttgggaaccaataagacgaaccccatgagaacagcactaaaaggaaaagggaagtatctacattatttttagataaaatcagaaattttgggaaacgtatagttgaaatcccctcttggggcatatactatcaccagaaattagcaaggattatctagaccagtccaggtcattgacttatagagctaggagagaatgaacagcatttggctcagccccctctttattggtcacatgaggacatctagagaagtgaaagtcacaaattagtgggctaattttatatagtgataaaagctaggaagaaaataaagcaaggtaaagggatagagaaaggccggagggacagtgaggggaggggtaacacttgagcagaggctggagagattagggaaagggctggcggggtgggtgggacacgcatgtgtcatagaagggagcaagactggcccgggtcataggccagttggtggcagagttgggacccaccctaatgtttcctggcccttgggctgattgtttactttctgatgccacttcctattagcacataacagcctggttta

SEQ ID NO: 20636 - DNA, 1048 bp, Homo sapiens
gttgtaatttggatcagagcaaaattttaaactaaaatttccaaatatcaagcatctgttttcttctcataaggtttacaacatcattaagaaggagagtaaccggcagagggttggattggagctgattgcctcggagaatttcgccagccgagcagttttggaggccctaggctcttgcttaaataacaaatactctgaggggtacccgggccagaggtatgtgaatatcttcaaaggcctggttctgacacagtcatagggagtactcagtcagcctaggacctaaacaatttggaaatttcagaaaacaataagcttcccagctgtaggatttctgttccacgcctgctctctgacagaactcttttattcccagcatgtgataacactgaagagctcagcgcaggtgtactcaggggcacatttcacagttctttgggggctttctagaaaaacaggccagtttgtaaggagtattgagccactggactggtgtgtggcctctgtctagaaaaggtcagtgtcatctgagggatgctgcagaaggtggccgttgccatgtgagtcatcgagtctgtattgggaatggtgtggaagtggaggctgaatctggattactgaaaaccgtttctgcattataaatgttggatttacacatgcagtggctttcagttgactctttcaccctcagaattacagtgttatattcgtttttgttttttacagtcatcatcaggcaaagaaaataaattacagaattagacatggcttttgcaaatgtgtgcatttttgtcccaaaggaaacagaaaggtcacccttggagaaggaattgccattctgtcctgagatgcccctgaagctctatgtagaagactgagaatcaagttgaaggcattgtctttctcctattgtgaataactaacttttgcattgtgccttaaagaattcaccaggtgttttctttatttctctctctcctttctttttctttttccttcctttctttcttctttcaggctaaggtattttgttaacaccaggtgt

SEQ ID NO: 20637 - DNA, 1059 bp, Homo sapiens
gccatcacgcccaactcattgttgattcccgcccccccgcccccccccccttggtagagacgggattccgctatattgcctgggctggtgtcgaactcatagaacaaaggatcctccctcctgggcctgggcgtgggctcgcaaaacgctgggattcccggattacaggcgggcgcaccacaccaggagcaaacacttccggttttaaaaattcagtttgtgattggctgtcattcagtattatgctaattaagcatgcccggttttaaacctcttaaaacaatttttaaaattacctttccacctaaaacgttaaaatttgtcaagtgataatattcgacaagctgttattgccaaactattttcctatttgtttcctaatggcatcggaactagcgaaagtttctcgccatcagttaaaagtttgcggcagatgtagacctagcagaggtgtgcgaggaggccattaagactatactttcagggatcatttctatagtgtgttactagagaagtttctctgaacgtgtagagcaccgaaaaccccgaggaagagaggtagcgttttctcctgagcgtgaagccggctttctggcgttgcttggctgcaactgccgtcagccattgatgatcgttcttctctccgtattggggagtgagagggagagaacgcggtctgagtggtttttccttcttgatggctcaatgacagagactagctcgtaaactccggggcgtttctgggctgttcgctcctgcttggcagtgtagcgagaaaggttttcgcctcctgtttcagcggtgacggctcttgggttttctcggggtggctttttaattttagtcttggcgcgaggcgggggatgctgtgtggcacctcctattgtctctttttgcgttttctcccattctcgctccctcttttgtcgccgtttcccgcccgccactcccacccccagacggggtctccgggtctcttgttctgtctgccgccccggctggagtgcagtggcgcgatctcggctcctagcaacatctgcctcccgggctcaagcgagt

SEQ ID NO: 20638 - DNA, 1049 bp, Homo sapiens
acggtgccatcacgcccagctcattgttgattcccgcccccttggtagagacgggattccgctatattgcctgggctggtgtcgaactcatagaacaaaggatcctccctcctgggcctgggcgtgggctcgcaaaacgctgggattcccggattacaggcgggcgcaccacaccaggagcaaacacttccggttttaaaaattcagtttgtgattggctgtcattcagtattatgctaattaagcatgcccggttttaaacctcttaaaacaacttttaaaattacctttccacctaaaacgttaaaatttgtcaagtgataatattcgacaagctgttattgccaaactattttcctatttgtttcctaatggcatcggaactagcgaaagtttctcgccatcagttaaaagtttgcggcagatgtagacctagcagaggtgtgcaaggaggccgttaagactatactttcagggatcatttctatagtgtgttactagagaagtttctctgaacgtgtagagcaccgaaaaccacgaggaagagaggtagcgttttctcctgaacgtgaagccggctttctggcgttgcttggctgcaactgccgtcagccattgatgatcgttcttctctccgtattggggagtgagagggagagaacgcggtctgagtggtttttccttcttgatggctcaatgacagagactagctcgtaaactccggggcgtttctgggctgttcgctcctgcttggcatgtcgcgagaaaggttttcgcctcctgtttcagcggtgacggctcttgggttttctcggggtggctttttaattttagtcttggcgcgaggcgggggatgctgtgtggcacctcctattgtctctttttgcgttttctcccattctcgctccctcttttgtcgccgtttcccgcccgccactcccacccccagacggggtctccgggtctcttgttctgtctgccggccccggctggattgcagtggcgcgatctcggctcctagcaacatctgcctcccgggctcaagcgag

SEQ ID NO: 20639 - DNA, 1022 bp, Homo sapiens
gcagaccctcagcctgcccactcccctctctgcccccctacccacagtccaaggatgggggctggaaacctctcagaggtgggaggccgctggctggggtccagctttctggcagccccttggcaggagaggaaggtgagccccctggctcaacaccctgacctctgaggttgtccaggcccttctggaagcagagccccttcagcattactttgggaggccctgaccctgggcctccccaccttcacaagaacccctcgcacctcacgaggcagccccaggccctctctgccctgccactgagctttcggcagacatggtgccccagcctagatactgccctcagcgggatccaagagaaaccacaggctcctggcaaacccccacctcccagcctcgcccatgttgccctggactgtcgtcatggcacttgccctgagaccatctgggccgaccctcttctgccttttatctcacgagcactcccgtgccctccccccaactcactgtgcgttctgaaactcatcgtctgttgtcagcaaaattcctgtgattccatcttctcggaataggaagttccctctgccttctggccttactgaagcccactcagtaccctgcagccctcttaagtggaatctttttcctcccactccccatgtgcggtgagcctagagcaggggtgtgtccttgcctcttcctcaacctcctcacttggaacagtctgtcttcacctctacccctcacagccaggcaggcatatctcttgttactggtgaaggcactgcctccaaagtctggattgaggcatccctccctcaggccaggccctccctcatgtggcgcttccctgtgctcttcaaaccaccaggccctccaagctcctggcccagccccttttcgccaaccatcagcccctctttccttgctttcctcccagcccagtttagaactcttggtcatctgcatgcacttcccatagtgccctccatccttcgtttatgctcacctggcaaggtctc

SEQ ID NO: 20640 - DNA, 2002 bp, Homo sapiens
gtgttcgtatatgtaggaggactttagttttattattaaatgtaactgttttaagcctcatgggcttagtgactaaagagtcctgtgaaacttctgtgtactgcagacttggtatagatagcagactggagattgatgggataccaggatgttattacttatcacatacaagcccaataatctggttttttaggcagaggtggtggactggttggagtgtatgtggtcctgctacattttgagtagccacaggaggatggcagttctaagagtatttgcagttatgagcaagctagttatgtagcaagctagctgatgtgcttacctaaattttaccactttgcagcactaagctagaagtcatatctaaactattaccaagcagaaagaagaaaacatattcagaactgttaactttggggcaaagatagaatagagatgacaatatagtgatttttttcattagttcttcatttttgttattttatttctagataaatgtagtattgagagaagactgtcggcgctctgccatagcaccgcaaccgtgtgagcagcaggctcatcccgtggaccggtggtgggaacgtgaggtgatgcctttgggattacagcttgagttctgtcaccccatccccaggaaactgtagcttcttaactggtgactaccaaagaacaagcagtgatttgaaaaaggaaaaacaatccaaaaactacatatttgtaggaaatctgccttattggagaaaatcaccctttccctttttctttgtagaagcaggagcaagagtgtttggctcccagtttggacttggtgaataaatgtaccttagaactaggataatcggtacagttattcttaaagataattaaaaatgaaacaaagtgagtgctcgtcactgggttcatcagagcagtgtgtgaaattccatgtgtttgctgaggtgtaaaggtaaatgtattcacccctcatccaggcagtttgatatttggagtaagtttgtttaaatctgagcatgcatctttaaacagctcaggaagaaatagcttaagaagaagtgaaacatggatcttggaagaaattttgaaatcttcaatttgatcctaatatggatacatgttaatcttccaaaatctttcatattgcactaatttattaaaacaactgtgtattggattttgtaatttaactaaggcacaatggacttgtttaaaatattttacttgattgtatacatagaccctttccagaattcacatgtaatctccagtgaacttttaagtggttaaaacttgtattcatgtgaacctttgcacattttttttttttacttctttatctacacctacagattttctcagtaatgtttttgttagcttttggttccattttttattgtgcatgcagaatgtacattgatgcctgtgaccttaggtttattaaaggctaggtttatttgggcagtattagaaacaaaatcatggatcaagagatactcttgataatttgaatagggccaaaacaaagttggtgacctaaaggcttgttagtgatgtggagttcctacatgcagtgagtggaaaatgaagttcgttttctcttaggaaaatgggcagctgtcttctgcctaatgtgtatttttcatgttaattctgacagttcaccaaatagctagtcatggagaatgcaggcagttaacttaatatccctccaggaatggttcctacgttgtgtattacttggtttcttttacttacctgcttgaatacttgaataaaccattcaccaattttaatccttttattttaatccttttacataaaataatctgaactctttgacaaattgcacagagctctttggcattaatctaattttaatgtactgataaaaacaaacatggttttcctttactttgacaaagtaatgtaatttttaccttatttatctgtatgaaattccagtagttaatttgaacatttatttatatgacgtttgtat

SEQ ID NO: 20641 - DNA, 1046 bp, Homo sapiens
cagatttaatgacaaaggccttgagtcaacatacttgtaagtaattgtgcatggatgattaaaggccaggttccaaggcctaagtaaactaacttatctagatcagtttttttacatccccttgttatctaacctaagctttcaggaaccagataagagaatctggttgccttcagccaaatcctaacttttgtaaaacctcccggccttccaagaaggtttgcatctttctacaatttttcccaccacccgacctatctcctacatgctcctgactactgggtcacacaaacctgccagtactgaatagttcatgcatcgtattaactagtttacatatatatatatatatatgtctctttagaccacagctcctttcaaaatccctaaaactcaagcatcttccaacctgttagccttggttactcgtcatgggcctgctgaagaacagtcgaaagatgggaatgagccacgggaatgtgcccattgcctcttagtgcaaggaagtgagaggcagcgggccgagcagcagagcaaggcagtgtttggcaggtaaaagactgtttccattctagcattaaacatgaaaactgtaatagtaaaacatagatttctgttataaaagcagcaagactacattagtgtagcgggtgatttatgccatatggttattgatatgtaccacgtacatttagaatctctgaaaaccacagatgcttcctgtaactatgtaagtacatagttcttcctgaactttttgaatattctatttctgtcctttatttgtattattgaagtttatctctaccctgaattgtttggtatctatttcttgtttcctcattctctaacttcctattaacccttctagttttaaaaagtatacttttcctttattaaaaacatcactattctttttagatctgtcagtaccgggaagttatcagatcaacaaggaaagactcctatatgtcgacatcagggcagcacagacagtttaaatacagaacgaccaatggatataggtaagaaaaatgtagtttctt

SEQ ID NO: 20642 - DNA, 1029 bp, Homo sapiens
gtgcttactggcagcaaattaataactctgattctttttttgtttgtttgtctgagatggagtctcgctctgtcacccaggctggagtgctgtggcacgatctcggctcactacaacctctgcctcccaggttcaagagattctcctgcctcagcctcccaagtagctgggatgcgcaagtagctggcatgtgccaccacacccagctaattttttttgtattttttttttcagtagagacagggtttcaccgtgttggccaggctggtctcgagctcctgactttaggtgatctgcccacctcagcctcccaaagtgctgggattataggtgtgggccaccacgcctggccataaccctgattctttacagttcctaggcttttgacgtagggatctcagagaccatctagtttagcccttggcagtttttttttagtagtacctcaaaattatttgaaacaataaaagcataattgttcacattctacatctggtattgatatttaatgaaaactgtattaatgagctacttattataattagcattttcacttgcaaagtttcgtacaccttggttacaaatctggcagagcagtgacttgtacagttgacgattactactatttttagcttgctgaaatcaaggtagctactttttttttggtggacagtctaattcaataagctgtttatttttcacagtcctttgtgccttcttgtgtctcgaagaatcatatgatatatgttaggtatgagcgaagacgtaatttgcttttctactttctgttttgtgaaatagcggattttggttttgctcgttacctacatagtaacatgatggctgcaacactgtgtggatccccgatgtacatggtgagtgagtgtttgcatccttgtgtgtttaaagcatggctccataatcattggaatttaaatataatgcgtgcttccaaataagatgtgattttacatatagtccaagttgttattactaatgttaattatattactgataatgctataatac

SEQ ID NO: 20643 - DNA, 1073 bp, Homo sapiens
ttttttttttgagatggagtttcgctctgtcacccaggctggagtgcagtggcgcgatctcggctcactgcaagctctgcctcccgggttcacgccattctcctgcctcagcctcccgcgtagctgggactacaggcgcccgccaccatgcctggctaattttttgtatttttagtagagacggggtttcacagtgttagccaggatggtctcgatctcctgaccttgtgatccacccgcctcggcctcccaaagtgctgggattacaggcgtgagccaccacgcctggcctagcctcttttttttttttttttgagatggaatcttgttcttttgccaagtctggagtacagtggcgcactctcagctcactgcaacctctgcttcctgggttcaagcaattctactgcctcagcctcctgagtagctggggttataggcacctgccaccaagcccagctaattttttgtatttttagtagagaaggggtttcaccatcttggccaggctggtcttgaactcctgacctcgtgatccactcgcctctgcctcccaaagtgctgggattacagtcttaagccaccatgcccccgccgtgtctttaatatatggaagttcctacatggtagaatttatccaacctgttatttaatgacccctaggtttcatattatagaagatttctttaccctgagcttatgaaaatgattccccatgttttcatctagtacttagggtttcattttttcatatttatatttttgatctctggaacttagttatgtacaaagggataatgtagggactcaacttattttccagaaagcccaaccagctatcccagactcttacctgtttttgaggatatctacagaagaagtcttctgtaagactgttaaaaagagttaggacttagggaatttgaagaattacagcaaatcagggtcagattaggtgagaatcaatttataaatttattaatcagtattatatattctgaatatttttgcaacctttggtataattagtattaatgagatacacattgaaggagagtttttccacaaaccta

SEQ ID NO: 20644 - DNA, 1083 bp, Homo sapiens
ccctcatttaacacccgatttcctcaaaactgcttcctgtggagagctcttttttaagaattgtagctctttgagctaaaaatcatattttctttcagtgagataatgtgctttttgtttgatcaggcacatttcttattctttaattgaatttttatagtcttaatataagtataatactagaagtgtatgtgtatactttaattttatttacatattaaaatatagtaaagtcattagaatacttacatatttttcattctcaattttcttaataggaacttcagcatgaaaatattgtagcactctatgatgttcaggtaccttattttgaaaatttttaaaaattaaaataaattttttttaatttcatacagatttaagtgactcttaatagaaataaaaatgaccttaattcttgttgaaaagatgcatagcttgagttacatgtttctgaattaagaaattgtttaaaacagaacagagtaataggctgaaagaatttgctgcatgagtaagtttattaacaattgataatacactataggtgtagcattgttttaggtgaagtagaggactgttgataccagatctagcattctctgatgaatgttgaaaggacaattaaaaatagagctttttttttttttgatggagtctcactctgtctcttgggctgcagtgcagtggcttgatctcggctcactgcaactgctacctcccgggtttaagcgattctcctgcctcagcctcccgagtagctaggactataggtgtgcaccaccatgcccagctaattttgtgtgtgtgtgtttttcatagagatggagtttcaccatgttggccaggcttgtctcgaactcctgacctcaagtcatcctcccaccttggcctcccaaagtactgggattacaggcgtgagccactgcgccccgcctaaatagaagttctttttttaaaaaaacattttttttattttgtagagatagggtccctctgtgttgctcaggctagtcttgaactcctgggctcaagggatccttctgcctcagcctctcaaagtgctgggattacagatgtgag

SEQ ID NO: 20645 - DNA, 1089 bp, Homo sapiens
gagttaagaccagcctggccaacatggtaaagccttgcctctattaaaaatacaacaattagggccgggcgtggtggctcacgcctataatcccagcacgttgggaggccaaggcaggcagatcacgaggtcaggagttcgagaccatcctggctaacacagtgaaaccccatctctactaaaaatacaaaaaattagccaggcatggtggcacgcgcttgtagtcccagctatcgggaggctgaggcaggtgaatcccttgaacccgggaggcggaggttgcaatgagctgagattgcaccgctgaactccagcctggtcaacagagggagactctgtctcaaaaaaaaaaaaaaaaaacaattagccaggcgtggtggcgggtacgagtacctgtaatcccagctactagggaggctgagggaggagaatcacttaaacccaggaggtggagtttgcagcgggctgataatgcaccactacattccagcctgggcaacagagtgagactctgtcttaaaaaaaaaaaaaagaaagaaagaaattgaggaatgtggagattgtggtctgtgatttgttaggaatcacacagcaggttagtagcaactacagggctttggttcagaataccaccttgacaatggtttgtttacagttcggctccccttcctctgcctttctctccttccttattgagggcagctggaaagaattttcatcatttactagcctatagctttaatttgagttttgaaaccttgataatagagcacagaggaaaagactgagttttctttttttgagacagtcttgctctatggcccaggctggagtgcagtgacaccatctcagctggttgcaacctctgcctcccaggttcaagcaattctgcctcagcctctcgagtagctgagattacaggcacgtgtcaccacgcccagctaattttctgtttttgtttcgttttgtttttttctgagatggagtcttgctctgtcacccaggctggagtgcagtggtgcgatgttggctcactcaaacctctgtctcctgggttcaagcaattcttctgcctcagcctccccagta

SEQ ID NO: 20646 - DNA, 1031 bp, Homo sapiens
gctttttaactttgttttatagtactatagttttagtataaacagatgtatgtatacacacaactatggctttataatatgtttcagtcattgttagagcaaggcctaccttttgggtgcttcttttacaaaattgtcttggctattcttgtgccttttttcttatttgtgaattttagaattgtgaattacctgttgactcaccatgttttgtaaactgaggattttgaatggaattgcactcaattaaagattatcttgctttctgtgcagcaatgttttatttcaaataatccctactttaaattacttaggatagctataaattgtgtttctggctttctagatttagatgaaacgctttaaattgattgttttctcctaaatttaaaactgattgttagaagttaaagtcttctgttcattcttatttaggaagatgacatttggaagagtcagtgacttggggcaattcatccgagaatctgagcctgaacctgatgtaaggaaatcaaaaggtttgtggtgtttttatacttcatattaagcctttactcacattagtgattgactgtaagtcaaagaccacttaaggtttaaactgtttattttgtaaagtaaccactgtatctttcaccttgtgtttatagtcagaagtaagtacaagggcttcctgtagtcacatctttatgcaatctcctctgaatcaaaagttagtgaacttgctttgccactccagaaggcacatgaatatgaaaaagcattgtctattttcttatttaatggcaaaatacccgacctaagttggacttaatgtttgagaccgtttattttattaaattatattttttctcttttcttttttttttttgagacagttcttgctctgtcacccagaccggagtgcagtggtctgaccgcacctcactgcaacctctgcttcctaggttcaagcgattttcctgcctcatcctcctgagtagctgggactacaagtgcgcaccaccacacctggctaatttttgtatttt

SEQ ID NO: 20647 - DNA, 1021 bp, Homo sapiens
gttgagtgaaagttacttctatttcaaacactgaagaaaattttgtacaaatctgtcacattccaagcccaggactgattgtttcatatacttctaattttacaatttctattgtagtccagtgtgaaaaaagccagtattaaaatactgaaaaattttgatgaagcgataattgtggatgcggcaagtctggatccagaatctttatatcaacggacatatgccgggtaagcttagctcatgcctagaatttttacaagtgtaaataactttgcatcttttaaattttttaattaaattttacatttttttctaatctattattatatgcccagaactttcacttagagtgtgcagtataatgtggtggttaagtataaaggctctggagtgacttcctgggttttaatcttggctctgccatttattggcagccgctaacctcttggtatctcagtttcttcatctgtaaaatgagaataataaagtgaaaagatgccaacatcatttactctgggctgcataactgatacttggaaaaagtattcctttgagtttaagaattaagttggttattcattttagcttgtaataaaaagatagtgattcataggatatgccacttactgaaatttaccacagatccaatcataaaatcactttctcttccctaaagatagcttgattaacatgtaaaggtgtgtaaaggcttgattacactaccctgatccgtaccccagttcccagcagcaccatgaaaaagggatttcaacatatttaattactttcagtagaaagtaacagtggtaggccaggcgcagtggctcacacctgtaatcccagcactttgggaggccgaggtgggcggatcacgaggtcaggagattgagaccatcctggctaacacgatgaaaccccgtctctactaaaaatacaaaaaattagccgggcatggtggcaggcacctgtagtcccagctacttgggaggctgagacaggagaatggcgtgagcccgggagg

SEQ ID NO: 20648 - DNA, 1273 bp, Homo sapiens
gactcacatctgtaatcccagcactttgggaggccgaggtgggtggatcacctgaggtcaggagtttgagaccagcctgaccaacatggagaaaccccatctctactaaaaatacaaaattagccgggcgtggtggtgcatgcctgtaatcccagctacttaggaggctgaggcaggaaaatctcttgaacccgggaggcagaggttgcagtgagctgagatcgcaccattgcactccagcctgggcaacaagagcaaaactccgtctcaaaaatataattataataaataaataaaagtaaagtattgatgtttgtgaatgatttattcttctaatgaactagaggagatttttccaggaatttcagagccagtgaggttatgttgcttgtatgtgtcatgtgtatccaggtgaaaaaacttaattaaacgctattatataataccatacataaaaactgaattttaggaatactgaagaatgacatatagaagtcaaatcattaaatagctagtagtaaacagaatagagtgtcagctgttacccaatgatgataatattttcacgattaaaattaaaccttttctgattttaaaggaaaagttcagatctgtatcatataaagaatgtaaattttcagggtaataaaattaaaatgcagagagaaaaatgcaaaaatagttcttactagatgtgtgtatgtaaggaacttagactaattttaagaacactgtcaagaccctggtagttaggtaggaaaaaagacatgaatgattcattcaacaaaaactttgagtatttctgtgctagatggtagtgttacagtggtaaacaaaataaatgtgtttctgctatcctggagcttagtctacaaaaaaggtacatattggccgggcacggtggctcacgcctgtaatcctagcactttggaagatcgaggcgggtggatcacctgaggtcaggagttcaagaccagcttggccaacatggcgaaaccccgtctctactaaaaatacaaaaattaactgggtgtggtggcggacacctgtaatcccagctactcgggaggctgaggcaggagaatcacttgaacctgggagacagaggttccagtgagtcgagatcatgccactgcattccagcccgggggacaaaagcgaaaatacgtctcaaaaaaacaaaaacaaacaacaaaggcacgtattaaatacgaacataaatatttacaaattatactgaataagttctcatgtttattatttgcttgtccag

SEQ ID NO: 20649 - DNA, 1123 bp, Homo sapiens
tacatattagtgtgtgtatatatatatatactagaataaaaaaatcaaagtatctcagagtagtaaggacaaacatttcagaaaaatgttttcattatatatacatgtatgtatgtgtatgctgattcaacaaatatatttcttataggttatagcaaaatagtttgaaagcttttactgtgttttatcaggaagaccttaggtgaacgtatattcacagataaaagaggttatttattcattcaataaatattacattctcataagtcctaatattatgtatttttattcttcaaaaaagttagtatttgtgatttatgaaataagacatgttcttgcacttttagcagatctgtcccgatgttgggcttctttaatccttagtgtgggtgctttgcactcactcactgctggggacagcaagacccctgttagtctcagctgtgtttcttaaattggcccactgtaccttccagttagctattctggggtccatgtcatgttggctccattttccttttctttctcccacacagatacctataacggctataacataggcctggtggctgttggtggcttatccctatctgcttgtatttaaggggtactgtttcactgagttttgctgacagatgttgtcatgagatttgaggttttctgtgttgttgctctatttttatgtgggaatttgctactatcatcatccctagaccagcttttcctagtaatacaacagggatgttctgactgattagagtttgcctgtttgaagaattggttggctagtgatttttttttgaggggagtctgtaccagttaatagcctgactggcgtgtggataaaaaggaagcagtttcaagtcaaataaaacacttaaaatgaaaccacactgcaactctctttcttttacttaagcttaatcaaattaatgatgatgtaatcccatgaaggaaaagtcttctgaaggatcaagttgataacattttgtgatcaaagaatttgagaaaacctctatcccagtgtctatcattatatattttaggatgttaattacctgtgtggctttaggcaagtcatttttcctccttgagccccattcttaatcctgtccaaattatt

SEQ ID NO: 20650 - DNA, 1049 bp, Homo sapiens
cggctttcacaactttggtggcatcagagggagaccggggagagggagagggagacgagggagagccccttttttgctttcttttggattatttgaatttttccttaaatttatttatcttacttatttatttatttttttgagtgattctcctgccacagctcccaagtagctgggactgcaggcatgtgccactacacccagctaatttttttgtatttttagtagagacagggtttcaccatattggccaggctggtcttgaactcttgacctcaagtgatccacctgcctcggcctcccaaagtgctgggattacaggcgtgagccaccatgccctgcctttttctagaatttatatattgagttcttgattgtatctttttatgtaggctttttagtggcttctctaggaattacaatatacatacttttcacagtgtactcacatttaatattttgtaacttcaagtggaatgtagaaaacttaaccaccataaaaatagaactagggatgaggttaaaaaagagagagaaaagaaatgtaataaagatttaataacaccgtttttttttttttttctcttttttttttgagacagagtctctctttctgttaccaggctggagtgcagtggcgtgatcttggctcactgcaacctccgcctcctgggttcaagtgtttctcctgcctcagcctactgagtagctgggattacaggtgcgcgccaccatgcccagctaatttttgtatttttagtagagacggtttcactgtgttggccaggatggtctcgatttcttgaccttgtgattcgctctcctcagcctcccaaagtgctgggattacaggcgtgagccaccgcgcccggctaagtctttaaatatttttttgacattgcactttttctcttttccttctaggattttagtaacccaaatgttagttttgttattgtttggcaggttcctgaggctttccttacttctttaaatttttttttcctgttgttcagcttcgaaaatttctattcatctgtcttcaaatt

SEQ ID NO: 20651 - DNA, 1027 bp, Homo sapiens
cccaaagtcctgggattacaggcgtgagccaccatgcctggccataagtaggcttttactgagccttgtgtgtattggctatcctagtgattacagtgaaccagtgcccttcttattaatcacacatttaattgttccctaaaagtgattagttcactttatttatttagtaagacaaaaaatgaagaatactcttaactgagcagtctgttaactgtaggaaagcactgacacttataaggcttagttttctgtcatttatccagaagtatggttgattacagtttttacttttttatttgaatgaacaaccttaatttaaaatatattttgtttattttttgttgggatcgatacattgtccttgtttatagattagagcatgctttttaaagatgctgtattactcactgattttatttgtccagtgtacagagattgaagtgggaaaattataatggaaattgtttccatagtcattacatattaatttcatcaatttatttccataaaatctgtagattgctacttatttagatttttccttcaaatgtttttatgttgtattgcttgcactgagtatttattctatatgctcaatttgctggagaagaagactaattataacttaggcaagttgtaaaattagggaaaaaagtaaggtaccttacagcctagtttacttatttcttatgtaaagccagttagattccacattagttcaaactgccttctttgagcaaaacttgattggcagtgataaaggcttaaagcccttctcaagcagagacctgtaaagactagatctgactgtagtagaaggaaggaacttagatgtttcaggcagtgagaacaccagtcttccactctaaactttgccactaacagtatgaccttgggaagttgtaactttcttcagattcttcatttgttgaatggggggattggcctagctaatttctaaatctctactgggctaaaaaattctgtgcttatactctgattatgaagtacataatctgtgctt

SEQ ID NO: 20652 - DNA, 1045 bp, Homo sapiens
gtacccgccaccacaccctgctaattcttgtgttttcagtagagacagggtttcaccatgttggcaaggctggtctcgaactcctgaccttaagtgagccacccgccttggcctcccaaagtcctgggattacaggtgtgagccactgcgcttggccaggaaatatctaatttagtaagtatttatatctgggaaaggaagggtcaggtggtgattcataggaactctaaagtctatgtataatacttagggggacagaaggaaataaagcaaaatgctgatatttgattgttgagttgtgtatatgttagaagtataacataggagatctgattgatagtaggagaatgtttttaggtggtaaaagtggaaccgtggtggtttgttttggcagtagaatcagttggtcatagtttgtatgtggaaggtaataaacagaccatgttaaggatgacttccggaattttggtctgagtagtgggtggatgacagtgtcattcatgagggaagatgaagactgaggtaggaacaggtttgggagaagatgacatgttcccttttagacaagtggaattatggaagatggcaggtaggtggttagctatatgaatttgagataaaagatttaggatggagatataaatttaggagtaacagcgtatctatggtattgtaagccttaagaatgggtaggatcagccaggaaatacagatgtatatgcagaagagaggagtcaaggaagccaagacaagttaatgtttaaagtgagtgatgtagtccatgggcagatgctgctgagagggctgcaaacaccagtgaccctacaacatttttaaatgtcgtcttcctgacagcagtgatcagtacctgcaacgatcttatttatttttttcatgttagtctccacacacttgaatgtagactttttgaaggcaaaatcattgccttttctgagctgggagcatgtctggcacataccaagcactcaacagttgatgtattgacttcatccagatactctgagggcgagttatttcctgctac

SEQ ID NO: 20653 - DNA, 1710 bp, Homo sapiens
caagcagttctcgtgccgcagcctcccaagtagctgggactacaggcatgcaccaccacgccaggctaatttttgtatttttagtagagatggggtttcaccatgtctcaaactcctgacctcaggcgatccacccacctcagcgtcccaaagtgctgggattataggcgtgagccaccgcacctggcctatgagtggtcttttaattaggaacaaatctaatggaaaggagagttgactgaagttggcccacaggattgtgagctgggcagtgccttcatgaaggcttgccaccttgggacgccccagtttactggggtgtcttgcggagtgcagaaggctttctggcagctgcctgggtttggccagaccctgcctcccctcccgccggccaacccctagtccccttcctgtctccacttgcattcaggggtggctgctgttctgagaacattagaactgggaagagagatggagtcacatggatttttggtgggcattattctaaactttcgtatccaagttagtcccccttattccactgtggcattgccgttctaagcagttacctgatgcctgctgctgaagagctgctcacaggaggcggcggcggccctggcactgccccttgcattaggtcttgtgtttgatgtgttcttgtgaatttactttgtcagaacaaaatatttacgcgttgggttcaggaatttcttttagctccccatctggctgtgaaattcaggaaacctcccgttgcctagtaatcaccccatgtaggtgtacattgtgacaaagtgcatctgaccactaaggggcccccttggtgaccccagcacattcacagcagtgttaaaatggcctgcattttggagatgctggctggcctttcagtgcctcccaggaagacacatggcctttccctcttcagatgcctgaagggagtgctttgaggcaggtgatgtgctgggagtgtgggcggcctccctctggccccggggccctctgtggaccttggctccctccgtggacctgggcttcgtggtgagcactgcagcctccctgggcattccctccagcgccagcaccactgcaacatatagacctgagtgctattgtattttggcttggtgtgtatgctcttcattgtgtaaaattgctgttcttttgacaatttaagtgattgttttgtttactgtaagtttgaaaataaaaatgaagaaaaaaattccaatgactgtgctgtggttggagactttatttaccaagatgtttactcttcctttccccttccattttgaggagctgtgtcactcctcctcccccccagtgctttgtagtctctcctatgtcataataaagctacattttctctgagaactggccagttttccttttattgacacaagcagccgaagagagggtggcaggagggagaagagcggccaggggacaccggcctgcatgggggcgtccctggtctgagtcagtggccagagctgcagcctggctttgggcccaaagtcttgtctgggtgtcagggaggccacgcactcaacgtttcgtccctttctgtgagtggcctgctgcggtttgagcctcgtccctccttttttgggcaagaaggtgatatccaggattcaggacagccatggaccttcagacctgaagcccttgacatgctgaatccttgccaggcttggattgcaagac

SEQ ID NO: 20654 - DNA, 1029 bp, Homo sapiens
gcctggctaccgctgcctggcagccaagggtgttggtcgcgaagctggagtggcctctggtggagcctgcatcttgtctcgtctgcctctgctttacatttggtgtactttcgggcgtggtggcagtaaaatgacaccgtgattgagcttgtcagcagagctgaaagagaaagtagaaggatgtgcattgtttcttgtaagatatcttgcatgtatctgtgtattcaaattcaaacagagatggtttgtccatttgtccactgagaaattagaaactagggacaagggggaggaaaagtactgaaatacagtttatgaagcaagtgtgtctcgggctgtgcttgtcccaggagccccagcagcatctgaactgaggcttcttcagtcctgcaggaacaggatcatctgtctcagcggtgggcagatgttttcatagacagccagggagtaaacactgttggctctgtgggctgtatggtctctgccataaatagtacagagatgtggctgtgtctagtacaacttttagacacagaaatctgaatgacatatattgttctgtgtcaagaaacttagattttttttttaactatttaaaaacgtgaaacctattcttagctcacaggccatggagaagctggtggggaccagacccagctccttagctggctgggctggggagggggtagtgacagtggcagctgctactcactgctcagtgtggaaaacacaggacttggcaatcacagcccgcagaaccatcatgtgtggcagaagcctgagggatgcggtttcttgcccacgtgctctgttcattttctgttgtttttctgcacttaaagaattcacatggaagcatgttttataaaatgaattaccagagaaacagagatgggccgagattttcagaaatggtcccatgtgaccaagttctgctgtttgggtgacagtgctttgaagatctcctttgaggatgtgcagtctttttttttttttttttgagatggagtttgttgcccaggctggagt

SEQ ID NO: 20655 - DNA, 1031 bp, Homo sapiens
ttcctatttctgcagcgatttgaacactcagccaagctgcggcggaagatcaccacgtatgtgtccttccccctggagctggacatgacccctttcatggcctccaggtatgtggggttgtaggcccgttctgtgtcctgaggggctgtgatcctatcaggacaggaatccagctcggagctcctattaagatgactgttggccgggtgcagtggctcccgcctgtaatcccagcacttcaggaggtcgaagcgggcagatcatgaggtcaacagattgagaccatcatggccaacatggtgaaaccccgtctctactaaaaatacaaaaattagctgggtgtggtggcaggcacctgtagtcccagctatttgggaggctgaggcaggagaatcgcttgaacccaggaggtggaggttgcagtgagccaagatcgcgccactgcactccagcctggtgacagaacgagactacgtctaaaaaaaaaaaaaaaaatgactgtcgatactaatataaaccccaccttccccaaatctgtttatcctgatcttaagatacagcacatgttaatgagttgtttttcatcagataccctgtttttgttttgaatttctcaacaattatcaatccactttcaaaccggcaaagtcctcaaggtgggatcacagcgagaaggcaacattttagttcgtggaacagatgttgaagtacaggcagacatagttggttttgcagttgtagattgcattttccttttcaaatctgcctattctggggtacttggaattcagctgcttactaatgcatgagacacataggagtttcctgtggttctgtgacaaatgaccaaaaacctggcggcttaaaattaatttcctcacagttctagaggttggaaatctgaaatcaaggtgttggcagggctccatgtcctacaagggtcttggggattccattcctcaccgcctccagctgctggtggttccacgtgttccttctgtggctgtcactcccctggcttccgggtcaca

SEQ ID NO: 20656 - DNA, 2259 bp, Homo sapiens
taatcacccaactgtctccttcccattggggactctccaaaaggactgatggttgctctgaaatagccagagagctgggacacaggacgagcaaagcttctcttggggtctcattggacctgggccatctcccccaacatagtcccacagcctggccccagggtggtaccctgatgatttttcagagttgtgtggtgttggtagttggcaggggcagctcttagcgctggaggtgggaggctgggaatgaatgacttgagccaagatcggctcctccccactcctcatggtggagatcccagtgtgagggacctgcagctgaagtctatccatacaggcagagagactgagaggtgattctcagatgagtgtgggctggtcacttgcaggtcttcctaaagcccgtgctggcgtttctgattcagcagatctgtggggggcaggggcttcttcactcttaatcagttcccagctgatgttgatgccgctggttcagatgccatactctgagaacccatgcgctcaggtcacagggcacctggctgcttgtgagtttcctgtggtctctgggctggcacagctagttgtagccgatatcctatcagttaattttaacttggagtcttttagagaacagagtcctgttctgacggttcaccgagttgaacagcttggtgggctggccttcccatcgcttctcatccgtctcaaggctgtgcacccgggccctaggcgcttacgtacaacctatgggttctgagatcacagcccagaaacaacccacagttgagctaaaatggctggttttggtcaaatgtgactttgggttctgttttcttttggtacttactttttttcctctgaaaaactacgtgatccttttaattcttacctagaaatcaaaggaaagttacttagtagcttaggtagaatttcatgtcctagtatgatttataagagaggaaagagccactgtggaagtgactatgctgttaccccaagcacctagtgagaataacgaagagccttctgtaagcagcagaaagatgttctaaaaatcacttgttcaaaaatgcattgctgttaaatgttcacatgacaaaatgtgacctctgacgtgcttctgacagaattcccttggaaatgtctgaaaagaaatgtaaggttcttctgtttagaaacctggttgccagagctgttcagcgaggtggcctggccacatggccttggttacgtgcattttgtccttgtggccttcacggcatctttctgttcatcttttgttttgttttgttttgtttttgagtcagagtctcgctctgtcgccaggctggagtgcagtggtgcgatctcagctcactgcaacctccgcctcccaggttcaagtgattcttctgcctcagcctcctgagtagctgggactacaggcgcccgccaccatgcccagctaattttttgtatttttagtagagacggggtttcaccgtgttagccaggatggtctcggtctcctaacctcgtgatccgcccgccttggcctcccaaagtgctgggattacaggcgtgagccaccgcgcctggccattctgttcatcattctttgcgccttcctgtatggatattcttgtcctctgaattttgtcccatgaatttgagatccctctgggaagcatttttctctctaatcttaaaccttctgctctcagaagacttagtggcccttctctattcctctgtcatgattcaacgtctttgaactgtgatgtatatacaggtgtcctcgtgccctgtccccactgtctagtgaagttatgtagaatatgtattccacacacgaattaagttctgctacttaagtttctttttcacagatctgcacacatggatatgaatgaagtgtgtattgaatagagagggtgggagtggcacttccagatgcaactgactggaagacacgctgtcccctgggggctctagctgatgaggacagcctgtgtcctgcggtgtcactttctgaacttggggcaccatgatacctactcagggagggaggttgctggggcttccccgggtgtacctggcccaccatatgttcagctgtctcactggaacaatattgattcagtcattctttatatgataatgggaatcgattattctgctcagtcactgggcattaggtgggttttcttggcaagactgaagctgtggggctcttgttagggaatgagaaaaaggagcattgaaaatccaagtgct

SEQ ID NO: 20657 - DNA, 1033 bp, Homo sapiens
gattgccagcctctggtcgagcctaaccgatttcctcaaagtacctgcaatgtgccataactgctggggacacggcccaaataggagaaaggagggtgcagctgggaagttggtgggtggttgtatcactgactttagtgataagctcacttgtgttagattgtttttagactccggcttgttaaggtgtaaattacagtcacacccaccttctagcctatagatagatgagtttcgacgaatgcatagttgtgtaactgctgctactcaagatgaagaactgttacctctccgaactccctcgtgcccctccgaagtcaacccccagtccccagaccctggtagctgccgatctgtcttcggtcccttgagtgtcctttaccagcgcatcatacggatggatgcatgcaggaagtagcctttctgaatctggctgtccctacttaatgtaatactgggtggattcacccgtgtcttgcgtgcatccatgatgtgtgctttcgatgtctgagttgggttccattatgtagatgggttatggtttagttgtctgtttcccagttcagacacatttgggtggtctgtggttttgggttttttgatgagaaataaaactgccctgaattctgtatttgcacaggcaagacccctctgtgggttctgacctggggaggaagccgtgggatggaaggtgtgctgctgggtctgcggctggagttgagctgttggagaggactggctggcaagccctcagctaattgccattagcctcagaggcagagaatcctgtggctgatgctggtgaattctgcataatcacagtgatgtgcttccctttgcggaggtgctggtgtccatgggcctgagtggtttggctagtgctttgaggaaactagtattgggcaaatcgagtcacttttatttgcatgtgatctcatagtagcaagtcataattcattttttaggcttatatgtggaaaactagatggtagaaaggaaaaaattcatatgaggactcgaaaagtccagtgag

SEQ ID NO: 20658 - DNA, 1038 bp, Homo sapiens
tgtaaaagtggcataaaaactagcagaatgcgatatctcatcgtgttctggcttgaatgaatgaataaaagaaaatgagtatgtagaggtagaggaagccgctgggatccagcgacacctgtggttcagcacacaggtaactcctgctctctggtgatttgtgtccaggtctgcgtgggctgatcaaccttgggaacacatgcttcatgaactgcatcgtgcaggccctgacccacacgccacttctgcgggacttcttcctgtctgacaggcaccgctgtgagatgcagagccccagctcctgtctggtctgtgagatgtcctcactgtttcaggaggtgagcgccattgacttctgcaggggaacatttctgttactttgttttcaccttcaaaaaaaaaatttaaggtggaccatgataaaggaagatacatttagaaccttttgtagtaagttaatgtttaatatacatgtctattatggaaaacacagttttccaaaaagggaagacctggcgtgatttttggggacgcactgctgactcagaacaaggagaagccctttgagaggcttgtggcagagacttccctggtgggtgacatttgtctctaaagacgggtgattctcccccttcctcttcctccatggtctaccttcctggctcagaaaggcacgcatgtgtcaccctcctgtgtcctcctggtatgcgagtctcctccaccgccaggtctctctaagcatgccccatcagagcctctgtcctcatgagctacgcgctgcacgttggctgttcctgtgggctgcacgtgtggcgttcctgtccacttctgtccccggcatcagagcatggcagcgttcagagcaaggcgttcacggctgccgcctcagccctcaccggctccgtgacctagacatgcttctcagagctgaagcagctcagttacctcaactaataagcaggctggtgcctgttcttcaggtgccttgcacaggagccagccaacagccctggcctgttcccattcgtaacctctgcg

SEQ ID NO: 20659 - DNA, 1559 bp, Homo sapiens
tttttggtttttgattctgacagatgctcatagtggttgacagtgatagtgacatagtgacaggtgtggtttaccccagttgacaggtgagcatctgatctccctggtagcaaagccatcactgtttgcaaaggaaacatatgaacctgacacctgttttacattcttgccttgattactctccattgaaaacaccccagtgttttgagaagggaagaatagcaacaggggctctttcagtgagcagaattatttgtgtttaacaagtcttctctggagagcaatctctgacttgtgttcgctgttcttttccctctcagaaatttaataacattgtgactaagtgtgggtgtattattctgtgcagagcacttaaagcacgggcctaagaaatgtatgtccaggattaaaatggaattcttctagaatcattttataattctgtctatccaacatgctgtgtcttttaaagtattttgaagtattcagaaatgttggttggcatggaacaagtacttctgagcgcatagggtgtgcgttgaatggaatactatgccaattagcatttaccaccactctctgaatattttgtggcacacacgtttttaactgttggatctatcttagtttggtaactcgacgctgagtttatgctatttcagtttgctgaaaagtgcaagctctctccttcaatttcacttgtttgcgggagaatccttcatgtaagttcccattggtgctgatgctgccatctctgtgctgaaggatggaagacatttgaaaaacaactgttttggcattggcgttggggtagttttgactggaggtgctgcttttcttgcaggaaacgtagctcacatcctcataccctctgtgagaagctcctttaagtgttgtgtgtagcccctctcagcacagtagagtttgagaaagccctggtgctgtggatgttgctcactgaaatgcaccctgacagacagcatagcgccacagcttttatgtgtaaacacacttgatgtgaaaatctagctaatagcgcttggaactgtccttcatctgcttaggcgttggagagaagttttcaacttgggaaccaaccaaacgggagcttgaactgctgaagcacaacccgaaaaggagaaagatcacctcgaactgcaccataggtgggtggagcgtgtcgtcactctcagctaggcttctttccagggtttaaaagtaaatacagaattgtgggtttcttaagtccacatgattctgttgaagccctgcataactgtcactcatcaatgtgctcagcaaccagctcttgagcacctgttctctgcagggacctgcagtgggcttggggcgcagagtgatgcgtagcaacagccctgccctcacagccttcagcgtctgtgtgggtaaagggactcaagttgattttggccagggtgaggctgggcacagtaatcttcagggagagaaatgatgtgtgtgagtgtaagtgttcgctgaattttctacaaattgagggaataccctttaaaactttttctttttcttttttgagacag

SEQ ID NO: 20660 - DNA, 1107 bp, Homo sapiens
gacggagtctcgctctgttgcccaggctggagtgcagtggtgagatctcagctcatagcaagctccgcctcccaggttcacgccattctcctgcctcagcctcctgagtagctgggactataggtgcctgccaccatgcctggctaattttttgtacttttagtagagacggggtttcaccatgttagccaggatggtctcaatctcctgacctcgtgatctgcctgcctcggcctcccaaagtgctgggattacaggcgtgaaccaccacacccggttaaccccagttgtttataaattgttgaatggagagagtaccttttttcaggcactcagaggactttatcttacttacttttatgataaaataattaagagcccaaactattagtcctattttattttattttatttttttgactttttacaaattattacttttaacaaagaaagcaaaagtggatcttatttccataaaataaaggtttatgttgacaattaaaaactggacatgcacacgattagaaagttcaaacgacacgaaaatgtatacttctccccaaaggaaacgactgtgaacagtttcttgtgactgttttagaaaattgaaatttatacatacatatgtatctcttcttatttgtgaaaagaatatactagtattactataatttttttatttttatttttattttttgagacagagtctcactctgttgcccaggctggagtgcagtggcaagatcttggcacactgcaacctccccttcccaggtttcagctgttctcacgcctcagctccccgaatagctggggttacaggcgtgtgccaccatgcctggctaattttttgtactttagtagagatggggtttcaccatgttgaccaggctggtcttgaactcctggcctcaaatgatctgcctacatcggcttcccaaagtgctggggtaacaggcataagtcacagctcctggcctattagtcccattttttagaagatgcagttgagaaattgtggtagaagacccaccttcaggcagctctgggtcaagatgtcaatcaaagtcatccgatgagaaactattttccccctgtacttaaggt

SEQ ID NO: 20661 - DNA, 1034 bp, Homo sapiens
atgtgcttgttgggccatttgtatatgtttggagaaatatcagttcatgtccattgctttttttaaattgggttgtttggtttttgttgttgttctttatatatacacatgcacagtatacagtgtgtgcgtgtgttggggtgtgtgtgtatattctggatactggactctgagcagatgtatgatttgcaaatgttttctcccattttgtaggttctttttagtttcttgatagtgtcctttgaagcacaggatcagacgtttttaattctgatgaagtccagtttcttttttcttttcaagacactatctccctctgtcacccaggctggagtgcagtggcacaatcacagctcactgcagcctcaacctcccaagctgaagtgatcctcccaacctcagcctcctgagtggctgggaccacaggtacgcgccaccacgcttggctgattttttgtactttgtgtagagatggggttttaccatgtttccaaggcttatcttgaactctgggctcaagtgatcctcccatctctgcctcccaaagtgctgggattccaggtgtgagctgctgctgcccagcctggttttattttttcttttgttgctgatggttttgtgtcagatctaagaatcccttaccaaatccgaggtcatgaagacttgcccttaagttttcttctacgagttttatatttctggttctcatatttaggtctctgatccattcgagttaattttttgtatacagtatgaggtaaggatttgtaggtgaatattcagttgtcccagcagcatttgttacagagataccctatcccctcaaatggtcctgatgccttgtggatgtcggttggttttatgcagtgggagcgttgcagtgtgaaggcgtcttaaagaaggcctaaatctagaaggatttacataggcactggaatggtgatccgtcttcccaggctagagtttttgttgtcagctacatgtgtgggctgtttttcacgggatatcttggccttactgtaaattctcatcac

SEQ ID NO: 20662 - DNA, 1034 bp, Homo sapiens
gtcattcactgaaacattgctatgtggtgtgtgactataccagacataagattgaggttttatcagtatgtcagagacagctgttttctgtatttagcgccagttgtcttgttggttggctgcttgaataatgttggagaagctgtctcttagctgtgttggctccataaggcctgtaaaatgtgtcttccctggtgattggtaaacccgtgcaggggagcatcctaggttgtgtagtagagatagaccataatggagtgtgtagcacagtcctaggttgtgtagtagagatagactataatggagtgtgtagcacagtcctaggttgtgtagtagagagagactataatggagtgtgtagcacagtcctaggttgtgtagtagagagagactataatggagtgtgtagcacagtcctaggttgtgtagtagagagagactataatggagtgtgtagcacagtcctaggttgtgtagtagagatagactataatggagtgtgtagcatagtcctaggttgtgtagtagagagagactataatggagtgtgtagcacagtcctaggttgtgtagtagagatagactataatggagtgtgtagcacagcaggagcttgttgtgtttagttgttttgttcagtgttaggtttctgagattcatccacgctgctgagtatatcataagttccttttcattgctgtgtactttactcaattaactgtagtatagtttattctttttacaagtcatgaacatttgtattttcagctctgcggtgttgcaagtaataatgctacaaaagtccttgtacgtgtctttggttgcgtataaacctatgaattgaagcgttaggctgtagggtacatgtgttcaatttaatagttgtcttctatccatttatttggaaaataagaaacctacaacaaatagcaagaatgctaaaatgaatattgtatacatttatatggattcatcaattgttagcttcttgctaactggttttatgtctgtacctttttctgaatcatctgagg

SEQ ID NO: 20663 - DNA, 1056 bp, Homo sapiens
aactcattggtttttatgtaatgtccttattctgtctcagaatcccacattactttgagtcttcacgtcctcttgggctcttctagacagtgacagtttctcaggctgtcctgtttggtgaccttgagagttttgaggagtcccggtcatgtagtttgtagaatgtccctcagttttggttttctgatgtttttctcatgattcagctgtggttatgagttttgggaaggaagaccagggagatgaagtgcccttctcattcccgtaaattaaggatgatgctgtcaagatgtcttgggttgctgggcttgactgaatggccgaagtcatgtttgccaggtttctccactgtggagtgactctttccctcctttatgtactgtttataatagaagggagtcactctgcataggtactctaccggggtggggagttctgttcctcctccttgaggatggagtagctacttaaattatttggaacgtttatgtatggaagatttgctgatcctcactcgtgtgtttattcatttgtgtatatcaacatggacttgtggatattgaatgtatgctttgggttatcatccagtgctgtgtggtttgttgtgttgctcccatcatctggctgtatccactgggagctctttcagctggctccggtgtccctttcacatagccacattattttttgttcgttgtttttgagcacttccttactttctggaactacacgatgttctgggatcatcttatgtgttttctgccccagccttagactccagcattttccaaggatccctagtttcttttttgggagaatggaattagatctcaagatctgggcactggtgtgttcatcattactgggatatcctggcttcttggccccctcaagggacagagctgggaaacaggtgtgtatatacaaatgcgtgcatatacacgtctgtaatttgatatatattcatcagcatccctattaagctctacatgagttcatgtttatatctccaactctaatccatttctatagggattattctagccttcccctcca

SEQ ID NO: 20664 - DNA, 1051 bp, Homo sapiens
atgcctggctaatttttgtatttttagtagagacagcgtttcaccatgttggccaggctggtcttgaactcctgaccttaggtgatccacccaccttggcctctcagagtgctgggattacaggcgtgagtcaccatgcccagcctggaaaatccttctgcaatgcaaatattcaccatttaaacttgggtgaatcagtaaacctgggttttcataaatctagattccttaaactaaggtagtccagcatgacaaatgaaatgcttgttagttttatagttactgcatgttggagcaacttatttggagtaaaaatgttgccaccatttacttcctctgtttgatttgggaacttatcccctttgggccccagttttctcacctccagaatgagtagattctcattctacctgcatctctaggcacttataagataagacgtaaagaggtaacagttcctcattcactataaagcattacatgttgaatggagtctgctggaatgatctgtcctcagacctgtcctcagctgctacaagcatcctctactgctgcatgtctacatcaggtgagtgtttctcaacctgatagtaagaaattagatcatgagaaagcccagaattgtctggagcctcctgccatagctcttagaacccttggttgcacttgacctgtccacaggtggtctctctctggtggcctaagaaaggccacttgattcatctctctgtttcctgtgccatgcacaagcttgatgctgaataaacatctgaaatgataagcaaatgaaaagcagatgtgaaaaagagcaaacacttttaacatgttaggctccctcgctgtaatcttctcgttttcagtaactgggatttcagcaccccaattgctaccccgaagagtcagcagtcagcaataactacaactcttttgtgcaagctgccagattggatcctcagaaggggcacacacaggtatatgagaaccactattttactatcataatttgtaaatctcgtgggttaaaatgagaggaaaaaaactgaccctctgt

SEQ ID NO: 20665 - DNA, 1047 bp, Homo sapiens
cgcccagctaatttttgtatttttagtagggacacagtttcaccacattggccagcctggtcttgaagtcctgacctcaggtgatctgcccacctcagcctcccaaagtgctgggattacaggcgtgagccaccatgcccagccttatcttagattttttaaagttatatgttaaacacatcaaaagttatgtttacaatatgtgaaaagtaataaacatgccacagcatgatggcccttaaaaacataatgcaaaatgaaagaagccagttgttgaagaccacgttacaggattccatttaaatgaaatacccagaattggcatatccagagagttgggaagccgactggtggttgtggagggctggggagatgtgaagggaccactaattggtacagggtttctttctgagatgatgaaaatgcaccaggatcagttgtgctattggttgcacaactttgggaaagccacttcatcgttcacctccgatgggggagttgctctgtgaattctatctcagtaaagctgtgaattctatctcagtaaagctgccattaaaaaatacaaatcaggccaggcatggtggctcatgcctgtaattccagcattttgggatcacctgagatcaggagttcgagactagcctggccaacatagagaaactctgtctctactaaaaatacaaagttagctgggcgttgtggcacgtgcctgtaatcccagctgcttgggaggctgaggcaagagaattgcttgaacccaggaggtggaggttgcagtgctccgagattgtgccactgcactgcagtctgggtgacaagagtgaaactccgtctccacaaaataaataaacaaataaaaataaagaaaatgagaccaggtacaatggctcttacttgtaatcccagtgctttgggaagctgaggctggcagatcacttaggagttcgagaccagcctggccaccatggtgaaaaccctgtctctactaaaaatacaaaaattagctgggcgtggcagcacatgtctgtagtcctagctatttgg

SEQ ID NO: 20666 - DNA, 1032 bp, Homo sapiens
taagcttttattgatctaagaaaatagatgctgagaattgtttttgttttggcttgagacaactgtttattcaaaatggatctgcaaattagcagtgcataggctggatccagtccttgactgttgaacctcaacagtttttaagagaatttaaattagttgccagcagatttcatataaaacgctccctgaaaagctgggtagtggctgactctttttggtcgggacaagtgcttggttccagttcttggttcctcacctgacagcttgactcaaatcacctgacagcttgactcaaatcacctgtcagcttgactcaatgcatttgcctgcttggtctctgtaggtgttcaggttgcacctttggcctggaactgaaggctctactcacacacgcagatgttgtgtgtcagcaggaatgtggcatttggttttgtagtttggatgtcaccatctactctcctagataacgtggtatgggtggagactacctgtctgtttgctcttgctgtaaacccctagccaggttctgttggaagagtcatttccccgagcccagcttccctaagctcttcccatgctgagcaggggatggaaacataacccgctgtggggctagcgagctgacttctgggcatccctccattcctgctcagttggtgatgactgttcaggtggggcagggcggattagctgatggcccagcactctagattatgagatctgagtgtattattggctcttatgactgaagtaggctgtttatggctctctaaaatgactttgttccatgtcacattcgtgctgactcaaatctcagctccatgttatacgagtgctctctcccgttgctgctcacacctggttagcatctgcttttgctgaagctgagggaaacattatctggtttggggaaggggctagaacagagtgacactttgggcacacttgccagatttgccagcggctaccaactctgaagcatgcattgtacttaaaggtcccacccagtgccagactgcctgcagtatt

SEQ ID NO: 20667 - DNA, 1062 bp, Homo sapiens
ggttccacaccaccactgtggaccagtgtgcctatggacttaggagagttcccagatcgcacaagggggctgccccagagggtgttcagcttgttgccaacagttgctgaagccaaagtctgcaaccttgatgttcaggtcaagtagccagaaacaggtgttctggctttaggtccctgtggacaatgccattctctccttcccaggctactgatgtcctgggttgctcctcttatggtagaagctcaagatggaatggctggagcttggctgcctccggttagagcctgggctctgtattgcagacatcacctggcagaattcctcatgggccccttttgtcgtgggtgcgactgctgggccagggttgtcgtgggtagtaaaggtatttaccaagacaaccgtgagtaaagaaaggcaaatttattacagaaactatgaaaatacattgcaagaatgcaacatgcagcacagcagagaaggggctgtctgcaaagataaagggctggagggaagttttctaaggttgtgctggacggcgctatgtgcaggtgagcttgtgctatatgctaagaatatgttggaataattttaactgccagacctttcctcttctggtgcccgagggaaacgccctgctgcttttagctgtcttgtaacccacacgccttttcacttctgaagttgcaagaataacggctgtggtttttcacacaaaagggttgcagactgggttaggtccctgttccgccaacctggctgtttcccagtttcagttaacttagtggtttactagagccccacacctttctctttcatatggccatgatccaggaggtaatccgtcacctcccctccactagagtgctccatggccagggataatccgtcacctcccctccaccagagtgctccatggccaggggtaatcctcacctctcctccgctagagtgttccatggccaggcagtgtttcctgggtccagagcacctcaaacaatttcagtgttgtggtgactcagggccttcaccatacagacttgacagcatagtctagaggct

SEQ ID NO: 20668 - DNA, 1058 bp, Homo sapiens
tccttcatttctatggccaattggtcatttggttgacagacacacatcaggcactgagtatgcctcagccttgtgtcagacactggaatacaaagatttttaattgtcatttgccaattttattgccaacgtatacaattttaatcatccaaagagaggttgtatagcattgtggccttcccaggttcaaatcctagctgtgccccttacgagctgagtaaccctgggcaagttactttgtctctctatgccttgattttcttaccgaaaatggtgataataatagtacccaccttgcaggaggagggtagttggcgggagtttataaagatgaaaggagttaaagaatatagagctaggaacaatgcctgggccacagtaagcacgacataagtattagccattttcatgtttttagaacactgcgttgtccaaataaaatatgtggctatgtaatttaggcccctttaaaacttttaaaacaaaaatgcatgaagagattgtaagaaagaatgtctgaaagaaatggattgttttctttttgtttgtttgtttgtttttatttttgttttttgagatggagttttgctcttgttgcccaggctggagtgcagtggcacgatcttggctcacttcaacctctgcctcccgggtttaagcgattctcctgcctcggcctcctgagtagctgggactataggtgtgtgccactacacctggctaattttttttttttatttttagttgagatggggtttcatcatgttggccaggctgatctcaatcccctgaccttgtgatccacccacctcagcctcccaaagtgctgggattacaggcgtgagccaccgagcccggcccagaaatggattgttttctaggctggaaggggagtgttgctattaggggagagcctcacacagcactgcaccacacaaagtgagccacagacatgtacctgggactccctggcggaaagagtggcttctggtggtaccacctccacttttctttgtcttttttttttttttttttttttttttgagactcggtcttgc

SEQ ID NO: 20669 - DNA, 1053 bp, Homo sapiens
atagcaagggacagtaatgggagacaggaggaggacaggggctcagggcagcaaggatagggggcagggctggtgaggagggcagtgaaaaaggtaagagccctgtaactgatttctgttggcatccagctctgttggtgatcttgaagggatgaggagtggggaggccaggagtggatacagggatgttgcctccctgtgggtgtgtaggccatggttcagctatcacccttatcccacagatactctcagcttggtctgtctgcaaccttcctggaatacatcaactgcactggagagatgttgattggaacacacttggtcttgccctgtgggacttaaattctttttgttttctccctaggaagcccagaattcccacgtgtactgggtgagtgtcactgtctgggagaaggggagcttgtggggtgtgcctgggggtcagggtggaggtgggggagcccaccttctgacgagagcggaacctgtgcagtgcatgtgtcagctttgttgacttttgctttgcacagaattctgaggagggttacccaaattttattttttttaaactctctctcccacacccacctcagtggcgctactgtatccgtttggagaaccttgacagtgatgtggtacagctccgggagcggcactggaggatattcagtctctctggcaccttggagacagtgcgaggccgaggggtagtgggcagggtgagcatccttggtctagtaattctggtcctgtgtggcaagcctgggggcttagcgcatggcttccttctcctttgttgttatagacagaggctcactttgtgaatacattgtgttgttttgggttagaaatcttaaaacaactacatgagatatgtttcttgaaacccatttcatagatgaaaagagtgagactgagaagttaaataaccagcccatggtcccatagctagtagtggcagggcctcaatttaaacccaagtgagtctgaagtcaaaacttgtgtagtttttaaaactggtatagtgtcttttaaaaactaaaatttgaatgt

SEQ ID NO: 20670 - DNA, 1044 bp, Homo sapiens
acaatgggcagaggatcatgccaccttggattttcaaaccgcagagttgggatttgcagtcagcagagcacaattatgttctttctagataaccagagcagaggatttactctctgcagacctcagcttttccgtctgtaagatgggtgtggtgatgccagagttccctgtttctctggggtcagcgtgtacaagcccagaagtgaacaaccttgtgacatgggtttcattttccacagttgacagataaagaaacagagacccagggggttacattggctcacccaaggttactcagtaaatggtggagctaggatgcaaacctacgtctgtgtttaaaagcagctggtctcaggatctgggttttagtccgagccctgccacaggcctgtttcttcatctgtgatgtgggtggtttgcttttgatgacatcacagacccctctagatgtgacagaatttaatctcaacttctgttgggttgttgcacattttgtaaactgtgggttctcctggtatatctataaagaacagcttctccagcctctgggtctttatgccccagtctggaaacattcatctttttccatctgtcctggaatgaggatctgatgatgacagagactctggtgccatacagagcccactgtgggttctggtgtccccagaatccatgtgtcttcattcattcacctaaactttttttcccagcactttctctgtgcccagagatgtcaagagaaacaggagaaaagaacagcccttactaactagctacttccaggggaccaggcccagtgatgggtgatttccatgtgaacttaatgttgctcacaatctaggaaataggtattatccttatttagcagaaggaggaacaggaacccaaaggataagaagctattcagtggtgacaccgctatgaatattggaactgatcagaccagcagttaatcccaaacaggagatgattccaaagaggataaaccagaaaaaagccatttccatcaagctttcatcagacaatatcacatgtacttttttt

SEQ ID NO: 20671 - DNA, 1070 bp, Homo sapiens
cactccaagatgggttcatcttttcttcctttcccattcacctggctcaatcctcctccaccaccaggggcctcaaaaggcacatcatccgggtctccttatcttgtttgataaggctgctgcctgtctccctctgtggcaaggactgtttgttcttttgccccatttctcaacatagcacacttgtgcactgagaggagggagcattatgggaaagtccctgccttccacacctctctctagtccctgtgggacagccctagcccctgctgtcatgaaggggccaggcattggtcacctgtgggaccttctccctcactcccctccctcctagttggctttgtctgtcaggtgcagtctggcgggagtccaggaggcagcagctcaggacatggtgctgtgtgtgtgtgtgtgtgtgtgtgtgtgtgtgtgtgtcagaggttccagaaagttccagatttggaatcaaacagtcctgaattcaaatccttgtttttgcacttattgtctggagagctttggataaggtattgaatctctctgagcctcagtttttcatttgttcaaatggcactgatgatgtctcccttacaagatggttgtgaggagtaaatgtgatcagcatgtaaagtgtctggcgtgtagtaggctcttaataaacactggctgaatatgaattggaatgatacaaagtctgagctctactctttctgcattcacgcgtaagtaacagtttcctggtgtttgtcctcctgtgcccacaggtccactttgcttccacgtggccatgtgcccttcctagctggattgcccaaggctgttagcatctgctttttacctgagatactaattcatcaggtcaaaaaaaaaaaaaaaaaaaaaaaaaaagtcttgagcaccagctgcagggagccttctgctaggtacaggggtcctacagagaacaaagtaggcaggaccagtgctttcacagagctgagctttcagggggaagagtcagcggacaaataaaaataatttcacataatgcattagaaagacaaaaacaggctggtcagatggtgactgag

SEQ ID NO: 20672 - DNA, 1119 bp, Homo sapiens
ctcagttgcagattctggccaacatggacagccagctaaaagagctacagagtcagcatacccattgtgcccaggacctggctatgaaggatgagttactctgccagcttacccagagcaatgaggagcaggctgctcagtgagttcctaacggggtactgtggcagtaggcatccaggatttaggaccaaatgggatctaatatgttgtctctggcagatggcaaaaggaagagatggcactaaaacacatgcaggcagaactgcagcagcaacaagctgtcctggccaaagaggtgcgggacctgaaagagaccttggaggtaaggaatatggcttgggccaagggagctggtaagcctcaggagtgtgattcttgcctgatagtgttgaggtaaggtttgagactgtgaactagaaaaagcctctgtacccagggcactaaaattctccctccctgtcttgctccttctcttgtcttcccagtttgcagaccaggagaatcaggttgctcacctggagctgggtcaggttgagtgtcaattgaaaaccacactggaagtgctccgggagcgcagcttgcagtgtgagaacctcaaggacactgtagagaacctaacgtaagttctctaactttctgtacttccccctaagtgcttatttttttctcaggaacacttctagaagccaaaatctccaagaagagaactgtgagtgttgagcctcttgtttctctcctttaatgcagctctgtggggatttgggataggcgttcagagaaggtaatttggtctttggtcatcttccctgttccttatttcagggctaaactggccagcaccatagcagataaccaggagcaagatctggagaaaacacggcagtactctcaaaagctagggctgctgactgagcaactacagagcctgactctctttctacagacaaaactaaaggagaaggtaggatcctggggttccttctcttctcttccaattgtatctttattttacagatagtcttcctaaaacattactctttttctaactgtgaccttttatgatttcagttacctacaggacctcattagcctgttgctcaaacctttcttcccctgtct

SEQ ID NO: 20673 - DNA, 1022 bp, Homo sapiens
cattttattggcctctgcagaattgctttttctggattggactttggtaatccatatgaaaatctctatgaaatttaattgctcgccaggtgtggtggctcacacttgtaatcccagcactttgggaggctgaggtgggcggatcaccagaggtcaggagttcgagaccagcctggccaacatggtgaaaccccgtttctccccaaaaaatacaaaaattagctggtcatgagggcacacactgtagtcccagctactcaggaggctgagggggaagaattgcttgaacccaggagatggaggttgcaatgagtgaagatcgtgccactgcatccagcctgagcaacagagtgagatcttgtctcaggaaaaaaataaatttaattgctgtggatactgtaaagggtgtttatcgtaacagttcataatattctatttaagaatgcgtgggagaaattttctctggacccagttatgcttttcctgaattgctgtttggtttttaccttaaggacactaaatattcagctgattgtatttttctgtttgtactgatactagaccatttagagcccaatttgtggtctaccttcagcaagtgtttatgtattttgtatgctagtcatgttcttggttctgtcttccttttctacttttattttccttattctcatttttctaagttttaatcgttttatattactataatatctgcatcttgtaagcctttttgtaataaggttgggatataaataaataaggcaatgtatcctttatccttttatctcatttgtttctctttagacacttttattactttttaaaaattgtgatgaccagaactgcacactggataaaaactctgaatactaaaaataggaattaatggtttccaaaatagtagttaagagcatttgtttggaatttaggagatctgatgcctggatccaccaataactatctcatcgtcttttttttttttttttttttggtggggatggagtcttgctctgttgcccagg

SEQ ID NO: 20674 - DNA, 1069 bp, Homo sapiens
tctctctggcgactggaaaggtgagagaatagtagtagttttgggcagagaagagctttgccttgtggtgggaagaaggaagaccttaggaaatcttgccgtattcctactaaggaatgaacccctacccctacctccactccctacctcttaactcagtttccagtggctgcagagagagatcatgtggccatgttggcaagtgtgacccacagtgactctgagatcccagcttctcttaaccagggcctctcactcctgctccatgaggtaaggatgagcactgctttccttcttggctacgaaaccattaatgctctcctgccttcattaaagtgatttttccccattcctctcatcagtttttttgagggggctccaacttaactacctaactacttgccatctaagctgtactgagtcacattcctaagttcctggtcccccaaatctcctccccatctagaacagagaggtcccttctgagagagtggaacactgtacactcatctgaaaactcacaagcacagctccttattcccacctttgccccaaattagcctctatttctccctcttttacaaatcatctactcttcagggttcttattcctaccctccacagctccatgaacttctttcttcttttccatcctttctgttcaggcctgtcctgtcctagtcactcatccttcatgctctattttccttcagctcttatgccagaaccccctccatcgtctacgttatctgcatcacttccaggtccaccctttctttcggggtgtggccttcgacccagagctcctacagaagcagccagtgaactttgtcacggagacacaagctacccagcccagttcagcggagaccatgccctttgacgactttgactgtgatctggagtccttcttgctctaccctatccctgcttgagcctctctactgtaaattggggcccggctgggagcctgaagatctccatccctgcctactcagtatgaccaccttgataatccagtttgtttttattttgtagcctcttaccgttctgctctcctaggctttag

SEQ ID NO: 20675 - DNA, 1027 bp, Homo sapiens
gacctgaacatgcaacagcaggaagaggaggagaaagcccggctcctcattggtttaagtgtgggcgacaagaaccctggcaagaagtccatctttggcaggcgcaaatgatttggcgattcgagtggctgcagtacaggatctgactctggctcaggctccagggacttgtggggtgggaggggcttcccgttatccacgaggatttgtgggtgtcagagcccataggcatcactcttcagcacctggtctgttcgctgcagggcatggtggacagtaatgctgagttctgtctcacactgatcaggctcagggccagagaggcaacaagagagcaagacccagggaatgggcccagggcaggaccctattcccttggggtcaagtgaaagggtagggggatagtcctgatcaagtgtgataaatttttatagacatatataaatatatatatattatatatatatttctaagtgtaactgtccttcctctgtgccaggaaacgggagggggctgatcctctgatcctcactccactgtcatgtttgaaagaggtattggtgttctggagtgggggtcaacccctccccagtctctgtgctaagttcacttgggaggatggcagtaggagccagggctggccatgggtcccctacccttccccgtaggatataccctggagaatggcaaaatgatttaaagagaaaaaaaaagatattttaaatttgatgctcatttttgtgtgtgtgtgttgagtgcatgcattcaatctgtgtattcctccctcatcaacccagaacatcctgcagctgccactctgagggtggccccttccttcctctgccctgaagctgtatcacagaaatttctagtcctagtgtgactctggccccatgctgatgggtttctgcagactggaagaggcggggctcgtgtcacgcagcatcagggagaggaattgcttatataactgggacagcagatttagcagagagaggaggcagaggctgggaatgggagcagtaag

SEQ ID NO: 20676 - DNA, 1074 bp, Homo sapiens
tatagctctgatgccatagggggagagtaagaatgaacaaagaaataaaataatttttaaaaaatgatacaggccacgtgtagtggttcatgcctgtaatcccataactttgggaggctgaggtgggaggattgcttaaagtcaagagttcaacaaaaattttaaaaattagctgggcatcgtggtgcatacctgtggtcccagctacttgggaggctgaggcaggaggattgcttgagccctggagttcgagcctgcagtgagctgtgatcacaccactgcactccagcctgggcaacagagtgagaccctgtctctaaaaaagaaaataaataattaaaaacatatatgataggccgggcacggtggctcacacctgtaatcccagcactctggaaggccgaggcaggtgcatcacctgaggtcaggagctgaagaccagcctggctaacatggtgaaaccccatctctactaagaatacaaaaattagccaggcgtggtggtgcacgcctgtggtcccagttgcttgagaggctgaggcaggagaatcgtttgaacctgggaggtggaggttgcagtgagccgagatcgtgccactgcactgcagcctggtgacagagcaagactccatctcaaaaaaaaaaaaaaaaaaaagaaaattgggtgtggtggtgtgtgcctgtaagcccagctactcaggaggctgaagcaggagaatcgcttgaacccaggaaggagatggatgttgcggtgagccaagattgtgtcactgcacttcagcctgggcaacagagtgagaccctgtctcaaaaaaataaaaataagatacagatacaggtgagtttgatcagatgcttctcttgttgagtaagaagatgatccctagaagtatggcccagaggcaaataatctttcatgtctagcttggaatagaatattctaatactgacattcagcttttctgccattgacgtaaagaaggcagtattatttattactttctcctaccagaggcgtttggaaatgaattagaacattttttaatgtcacaatggctagatagtactaccagc

SEQ ID NO: 20677 - DNA, 1020 bp, Homo sapiens
gccatgacattgatcctgaactagcaactcagattaagccacctgaagttcttgagaaccaggaaaaggaagatctcctaaagaagcaggaaggtattcagggcttgaaaggcttttaggaagggactagagaaattgtgaaagtagttatttccttggtggttttgagacagtagagttattaaaaatccactgtgcactggcattaacatttcactttgctctactttttgtaagttctgctatgagaaaataacctctattcttggagggagctgggatgaatgggcattgtttatgattctgaagtaaacatgtttctgcccatgagcaactctcaccctttctgtggggttgactagtggggtggttccaaatgtgggttaagagatggagtagatatttaggtagaaacttgagccttttatttagctgctaacaattatctaggggctgtggataccttcacccttatccaccatgagctggaaatttccaccaacccagctcagtatgccatgatcctggacattgtcaacaacctgctgctccatgtagaacctaagcggaaggtgagcatgggcccttgtagaatgctggttagcctcacaggaacacccagactttgtgctttatttgggcttctgtaacaaaagccatgcttcacactgaaaaagggccttgtggttggtagattctcttagtcggcagtgacaattgaaattccacttacttaggaaaggcctgaatatctctcagaccgtagggcttgtttgcctgattgttttctcctagtcatttctctactcagtcacctagacacctctaaaaacatttactattccctgcttccacctccatcccatcctgttgggcctgacctattgtgaaatccacattgccacattttctgcattgacctactactgttgctattaccagtgacagataaaggttagctttctagaagagaccccccccatttctttctcctttctctatttcactttactacaagac

SEQ ID NO: 20678 - DNA, 1154 bp, Homo sapiens
tcggtgctcagtgtagtgttttatacaaaataaatgtttgttgaactgaacttaaatgataaggaatgtctttgtcttgcctgcctttgattgtaaggtggcagtcatgtctttgtgtagtgcttctattgtgctgcacagagaacttaaggttatggtttagaagtgatgcttcttggttattttaggttcaagcgtatagtattgctggtgttcattgtatttggcctatgaaaatgataattttatatgagtcaacctaatatccttttggggttcctgcagattaccattaagagtagcaataaactgatgagttcagccttttatcttctaggtgtgtctcgtcctaagaatcacaataaaactctgaattctcactctgattgtgagagcttcagaaactgttccatgataggaagctgcagttcttttcttaccaaacaatgatgtcttgttcctatgcagaaccttcccccaaatcctggctcccatcatctttagcacctccatctccaatgtcaacatttccattcaacttggagatacaccaccttttgccttgggattcaattctatctctctgggtaaggctctcagatggaataggaacaagaatctgtccgttagtggagctaggcccaattgatggccacagtggctccatgcaatccctctttctcacctttgttcagattaccagcacctcaggccacaaagcatccatcagcggggcgtcctaactgtggaccacctctgctggcgtgtgggcagtgactcccacattcagcgggcgccacacccacccaatatgcatgtttggggtgaggcacttgttctggactccttcacactacaggtaggtgagggctttggtgaataggggcctgcacagctttcctcatcctgtcatgcgtcagagcgctgagcatcctaatgcagcaggaagtgcattagggcattataaaactgtgcgcctgcatacttctaatgggatccgtctgcttcttctctagggtagctataaccagcctctgggcctgtccagcacccagtcagataccctttttcttgattgtaccattcgaggacttcaggtggaagcatcagatacctgtgcccaatgtctgtctcgtatcttatccctgatgggt

SEQ ID NO: 20679 - DNA, 1107 bp, Homo sapiens
tgtatattctctaactaaatcctcagcatttcacaaataaggaaactgaagcctaggaaggttagctaggtaacttgactgaagtcatacaggcagtcagtagtaaaaatgatgtttaaattatttggccctaaggtccacattcttttcatttaccaacctgctccttgtactctttaggtttttagagactggagaaagaagtactgcaggtgcctggatctctggggcattcgccttatggtccatccagcttaggcatttgcttagcctactttatgtgggaggatttgaccatagaggccagggcatttcgggagaactgggagtgttaagaattgatggttcttacgttattcattcatattttcagaggtgacagaaaacttagttgagccaactctgcctggcctattccttctccagcagctgccagaccaggtcaaggttaagatggagaacacaagcgtggtattgtccatgaatagtcaaaagaggtgaggtctctcctgacacagaagatgggagagtgatagtgggagctgtatgttggtatctctgtaaccagcctagtatttgctgagcttgtctacggggagaaaggaagtagaaatggttacatccatgtagtgtgggaaaaattaaaaaaattattattatttttgagacggagtcttgctctgttgcccaggctggagttcagtggtgcgatcttggctcaccacaacctctgcctcccaggttcaagcgattctcctgcctcagcctcccgaatagctgggattataggcacgtgccaccacgcccggctaattttttgtattttagtagaggcagggtttcactgtgttggccaggatggtctcgatctcctgacctcgtgatccccctgcctcggcctcccaaagggctgggattacaagagtgagccactgcgcctggccaaaaaataattacttttaaaaaataaaagtaaaagaagtaggaatggcattccacatcttcctgagctggaatctgtctcggtccaggcacctgacttggactctgaagctgctgcagttcctgtaccaccgtgatgaggatcagctgccccttcgaagcttc

SEQ ID NO: 20680 - DNA, 1074 bp, Homo sapiens
tatttttagtagagatgaggtttcaccgtgttagtcaggatggtcttgatctcctgacctcatgatcctcccaccttggcctcccaaagtgctggggttacaggcgtgagccaccgcgcccggcaaggccaagtgctcttaatttttttcctttcccaggctaatctgtgaggtgagcttatgtaagatcaacagcaaagttctaaagagtggtcagctggtaagtatgccatgatcattcagatgcctcatttcctcctgggcgtaaagtgtgaaggagcttagggcttacatcctaggttctttgaccttagggggttccctcaagtcagtacccagtgttccagatcaccacattttgacctaaaacttccaaactttcttacatacaccttagaggcttatcatccccacaggaggacacctgcctagtggagctttcactggccctggacctgtgtctaaaggtgggcattagcagtcggcatctcactgctatcactgtggatgtgtggacactccatgctgaactgcatgagggcctcttccagagccaactgctgtgccagggcccaagcctagcatctaagcctgttccctgttcaggtaaagccccagtgattgagcttcttggctgccttgttctcagggtttgttttggaagtagaaaaaatagtggtctcactgcttatttagatgtgattcactagtcaccatggactttgaccctaaggatagttagaggaaatagggcatttgcttgtgctgagtggcagaaccagcattgagtgggcacctatcatgagttagacctgtactatgggttttttttttttcctttttttttaaaaaaaaagatggagtcttgctctgtcacccaggctggagtgcaatggcgtgatctcggctcactgcaacctttaaccttctgggttcaagtgattctcctgcctcagcctcctgagtagctgggattacagtcatccgccaccatgcctggctaatttttgtatttttagtagagacgggatttcgccgtgttagccaggatggtctcgatctcctgacctcgtg

SEQ ID NO: 20681 - DNA, 1050 bp, Homo sapiens
cgtggcttatttagcagctagcacacagagctttctccctcactgttttaggaaattgataacctgtggatttccagcaaactccttagccatgatcttccgtgagtaccctatattctcacttctcccctagaagagtactttggagttggtgtttgcagagtgacactcttctgcagaggcatcacaatccaaggaggaagggaggttgttgctgaagtcttcctgttagcctgggtgccattgtgttgtgaggaagatattgataactgctatgaaactaatctctgtgatttgagctatatttctaggaaggatgagaaagtgaatgtgagggtggggaatagactgctatgggagggatggacctggtggcagtgagatttctcttctgggcagacactatgtggcattgtgctttggagaagtgcgtatcagaacggacctacagaaagtttctgacctgtctgccccattctcccagagcgctggggtggatcaaaaggaactgtccttcagcccatccttattgaagatcttctgccaagtgagacaacttctcctgctatcctggactgtactttggcatggttggctttggagttatgggtagatttttctgtttttagggcataatgctaagagctgcccctctttctcatctggaaaggaagggcagttccttaacattaattattgttcatccttgcttcttccttccagctattctccattcatgtagatgctataaacatcatggttctcaaggtggatacctctgagtccttatggcatattcagatcagtagaagcagatttcttttggatagtgatgggaaaaggtaagcactggggagcagaggatctagccgtcctattcttgcctcagagttgcttcagggcctccttatcaaggtgttaagttctcattctgtgcagttggaggagatgctaagattagacatttccaattgccttgtcccttctagccaccagagcttgactggaggtaagtggtgaggaaagggaccaagttctcttttttttaaa

SEQ ID NO: 20682 - DNA, 1020 bp, Homo sapiens
aagcgccggccttggctggagcccgtggaccagcgcccacccggacgccggggcgggagcgggcggttccatcgaccctgagggtggaccaaggagactgagggttccacccgtggcatcacaattacctccgcggcggcgaggccagagaggcatttccaaggagacgcgggcgcactgcccctcccttgcttcctcctcttccctccttcctctcctagtttcttccctcccttcccgccctactccttccctcccttcccaccctactcctttcggctgctctggtgcccacccccagtgcctcgaggtcgaggagagctcctcggccccgcaggacggggaggattctgtacagatgagcataacttgtgagttttgagttaggcctttgtgcgccgattaacgcctcacggggaaagacgccataagcctcccactttctttcaccctatcaccctcctcattcattgtgtgtgttgtcagtcactcctgctgcaggaactctggactgctgctggtcagaggtctcctcctgtcctctggaactaaagagcagattgcttttctcagctctgaagagagttactaaattcgtctccccctttgtccttcctcccctcgtctccttcacaaacagagctgatgggtgtccgagctctgggggagctagtgagtggagagtaaacaggctctgaccctgcatgtgtgctttttttttttttttttttttttgagatggaatctcgctctgtcgcccaggctggagtgcagtggcgcaatatcggctcactgcaaactccacctcccgggttcaaacaattctcctgcctcagcctcctgagtagctgggattacaggcgcgcgccaccacgcccagctattttttttatttttttttatttttagtagagacggggtttcaccatgttggtcaggctggtcttgaactcctgacctcgtgatccgcccacctcggcctcccaaagtactgggattacaggcatgagccaccgcgcc

SEQ ID NO: 20683 - DNA, 1028 bp, Homo sapiens
ttgctaccccccttcccctccctccaggactaagaagcaagatttcccaggtgctctgaaagctaattacttactcatcgaaggatctcaaatcaaagctgacccagtcttcatatccttcaagttcctttccattcctcaaggctttgttttgtgtctatattgatcccacagccactgcacttgcccttgccacacttgatctcaagggcatcttggaagtatttgaccatttcttgagatatggggggaaaaagtctttgtattggcatcttggttccagactcccctttccaaacctagaaaaatacagtgacctttgagcatacccaagatccctttctcactgttgcctgtcccctaactcacctccccacagcccctatcctttccccctcaacaaaaacaaaatctaccttacttgaggaattaggtaggtaaggaatgatcacattggagtttgggattaaaaacaccaaaaaaaaaaaaatgcatttggttctctctacactggctaagaatattgctctacactgtaagttttaaacgttacgtttctgtatgaatgtagtgtgggtttgagtagcattgtgtgtgagtggccccacaggtacattcaccctctagtgcagcccctcagtttaatgaaggaaaaaaaaacaaacacaaagccttaagctctttgagtacttcctttaccaaatgagcatggttctaacacctggagctgggcctacattggaaacaagcccctcctgccctctgtccattcttagagcataccttcatccactccatgctcagcacgtctcatcccaagcgacaattagttggctagaaacacttttctgtaattttaaacttagactgttttgttacaaatttttgcaccattctgttaaagatgcagaattgggcttttttattttttacagatgaaataagcccttacctttcctcttgtctctggggaatgtcagctgatggttcttatttaaggttttgcattttgttcactatccactact

SEQ ID NO: 20684 - DNA, 1033 bp, Homo sapiens
atgcccagctgagaaaacttttttttttttttttttttttgagatggagtctcgctctgtcacccaggctggagtgcagtggtgcaatctttgctcactgcaacctccacctgccgggttcaagcaattctcctgcctcagcctcccaagtagctgggactacaagtgcgctccaccatcccaggctaattttttgtatttttagtagagacagggtttcaccatgctgggcaggctggtcttgaactcctgacctcatgatccacccgcctcggcctcccaaagtgccaggattacaggcatgagccactgcgcccagcagaaaactttttttaagagttaggcttaagtctggtatgtgaggtagatggtgctgtattcccagaatgataccccttttttgttcaatatactgtactcatctttggggttcttccttaacaaagctactgtagccttgtggccaccctccctaccctcatttcactttatttctgaatcctttgacagccctcttcaccatttcagcatcagtggaggcaggacaaagaaaactaatcaatgtggataagtgtccccttccatactcctgaatgaggtcaagcttcccccttgcctctgctaaaaaaaacctcagagttggtactaacttggaacaaagggactcttctactcatcaaggtactatacgacttctacttggatttcaaggagagaagcccaccagcatggaggtgggctaggtttaaagcactgtgctaggagtattatatgagattatgaccaataagacacataggtacagtggttgaccaaggcagcttctgttggaattctgatgtcttgagtttagggacttgctctcaatcagtgatcccagacttttttgccagtatttgaaagcacagacctgttttgggaggtggggatgcctggctctttttgcccagatctgcttgtgagcatgggcccaaatctctctgcccctcctgacttgagctttcttttcctgcttcccagagcaggagttgct

SEQ ID NO: 20685 - DNA, 1077 bp, Homo sapiens
tctcccgagtagctgggactacaggtgtgagccaccatgcccagctaatttcattgtggttttaacttgcatttctctgacagttaccaatgttgagcattttttcacgtacctattggccatttgtatgtctttggagcagtgtcttttgagttctattcccatttcttaattgggttgttttgttgctgttgagtcatttctttatgtattttggatattaaccccttattggatgtatggtttgcaaatattttctctctccctgtagattgtctctgaactctgtttttgtttctttgggttttttttttgagacggagtttcattcctgtcatccaggttggagtccaatggtgcgatctcggctcactgcaacctccgcctcccaagttcaggcgattctcctgctgcagccttccgagtagctggtattacaggtgcctgccaccacgaccacctaatttgtgtatatttagtagagatggggtttctctatgttagctaggctggtctcgaactactgacctcaggtgatctgcccacatcagtctcccaaagtgctggaattactgtcatgagccaccgcacccatcctcttcaatattttatacttattagtgtatgggtctttcacctctttgaataaatttattcccaagccttttttttttggtagttattgtgagattgttttatttatttcttttttggatagtttgttcttagtacatagaaacactgctgatttttatacattgatttccttatgctactacttaactgaatttgttcattagttctaatagttttttggagtctttagcgttttctatatgtaagatcatgtcatctgcagacagagaaaattttacttcctttccgatttagatgtctttttatttatttttcttgcctaattgctctgtctgggacttacagtactatgttgaataaaagtggctggagtgggctgaggcggatagatcatgaggtcaggagatcgagaccatcctggccagtatggtgaaaccccgtctctactaaaaatataaaaattagccggacatggtggca

SEQ ID NO: 20686 - DNA, 1027 bp, Homo sapiens
ggaggctgtggtgggagaatcacctgagcccgggaagtcgaggctgcagtgattgcatcactgtgctccagcccgggcaacagagtgagatgctgtcttaaaaacaaaagaagtctgggtgcggtggcttacacctgtaagcagtttgggaggccgaagcaggaggatcacttgaggtcaggagttcgagaccagtctgcccaacacggcgaaaccctgtctatactaaaaatacaaaagttaactgggcacgatggcatgtgcctgtaatcccatctacttggcaggctgaggtgggagaatcgcttgaagtggaggttgccgtgatatgagatcccatcactgtactccagggtaggtaacagaggaggactgtctcaaaaagaaaaggaaatcaataggacactgaggacacgtctcttttgctgtataggaattttagggtttttttttttttttgaaacagggtctcactctattgcccaggctgaagtgcagtggtgtgatcttgactcactgcaaccttggcctccctggttcacgtgattctcctgcctcagcctcccaagtacctgggattacaggcgcgtgccaccacacctgtctaatttttgtatttttagtggagatggggtttcaccacgttggccagactggtctcaaactcctgatctcaagtgatctgcccacctcagcctcccgaagtgctgggattacaggcatgagccaccatgcccagctagtatgttattttaatagaaagttacatatttttggaagtaacccttataagatggataaagagggatagaaacaagggacataatttgcctttcttgaagaagaagacttgtaggtccccttctgctttcttcaaactttcctgtcagtattgttttttgaaggttaccctgaaaagtggacttacaagcaaaatatttttaaaattttaattttatttggatttttttgttacttcttaaaatgttgtgggtataagcaaaatcttatctctttaaaatgcaaa

SEQ ID NO: 20687 - DNA, 1075 bp, Homo sapiens
agaacttttctccagagagacaaaaagaacctttcattttaagaaaagtcctttgactatttccatagtccctggcaaaattaagttggaaaaggcagctttttcagccagatatatttttatttttgcctcttctccaagctgaaccagtgtcccaactgaaatgtgtcattcttatcagtgatagtatattttgggagaaattgttccttagtgcgcctagaagtaagaagcttatgccacttcagcctgcacatcaattttaatagctctctaaaattgtttataccaactccctccacctcacatctgtccacatctgctcatctttcagttcctcacaactagttaagaaagtctcataggccgggtgcggtggctcacgcctgtcatcccagcactttgggaggccaaggcatgcagatcacctgaggtcgggagttcgagaccagcctgaccaacatggagaaaccccgtctgtgaaaaatacaaaattagccaggtgtggtggctcatgcctgtaatcctagctactcgggaagctgaggcaggagaatcgcttgaacgcgggaggcggaggttgctgtgagccgagatcgtgccatggcactccagcatgggcaacaagagtgaaactccgtctcaaaaaaaaaaaaaagaaagtatcattgctcaaccagagaaatgccagtctttatcaaagtcatagttacatacaacagcagtctttggtatgtgtggaagtttgcattactttgttttcttattgtttaaagagcctttcttgccaggtgtggtgactcacacctataatcctagaactttgggaggccaaggcaggaggatctcctgagcctaggagttcaagaccagcctgggcaacagccgagatcttgtttctacaaaaaataaaataattacctgagtgtggtggcaatcacctgtagtcccagcttactcaggagattgaggcaggaggatcacttgagcctaggagtttgaggctgcagtgagctatagtggtgcaactgcactgaagcctgggtgacagagtgagccctgtctcttaaaaaaa

SEQ ID NO: 20688 - DNA, 1033 bp, Homo sapiens
gttgatggcagaacagcctttcttcttaccaccctttgcgggagccattctgctaggcccaaattggaaagcagtcatcactttaaagctgggggtttctggctgggcgcagtggctcatgtctataatcccagcactttgggaggccgaggtgggtggatcacttgaggtcaggagtttgagaccagcctggccaacatggtgaaaccttatctctactaaaaatacaaaaattagtggggtgtggtggcagacacttgtaatcccagctactcgggaggctgaagcaggagaattgcttgaacctgggaggcagaggttgcagtaagccgagatcgcaccattgccgatcacaccattgcacctgggccacagagtaagactctttctcagaaaaaaaagctgggggtttctttaagtgctgtttgctgggaagatattacctgaacaatcactttttttctttttctttttttctttttttttttttgcattcagcaaagtgtttttgaggatcagttgctgaactgaatgaaaatcagattttatgccacttgcagaattgggatgatttagacaacattcgtgttgcttcaaaggagaagcataagcattattagtcataacttaagatttacttccttccaaaagctaagcacttctaccattggcattttatttatcttcattcttattatgtaaaggataggacttaatctactttaaaaggaaagatatatcaagtctgtgagaagttgaagacagctcatcctaaattaggagggaaaagtcccatttactgggttcctgtatggaccctctgccttacccagctattcagctgggaatggttttactagaagaagaagaacaacaataataataataataatagtaaagtgctgggattacaggcgtgagccaccatgcccagcctgttttactattatgaagacattaatttagcagctgtaaagatactggtttggcttttgcttatcttactctcccagaactttttcttttctttttt

SEQ ID NO: 20689 - DNA, 1026 bp, Homo sapiens
gataatgggataggaaaccatttcagctgtggaaagtaatagggattacgaagcttactttaccttttttaaaaagaagatttcaaataccttagaatagacatgttactaaaaagtagattcacagtaatcctgtgtcaggttttgggtttttattactcacttgtcccttaaggctccatgagttgtatttaaattgggagggaaaggggatcccccagatgttgactagttaacttgctactgagagtgaactgttaaaaatcactgattgaagcctttacagttagctagtatataaaacagagttagctagtatataaaacaaagttagctagtatataaaacaaagttagctagtatataaaacaaagttagctagtatataaaacagagttagctagtatgtaaaacaaagttagctagtatataaaacaaagttagctagtatataaaacagagttagctagtatataaaacaaagtgcactttgatatctaaggtataggaagctggggaagtgaccaaaaaaaccagttggaaggcggggtgcaatggcttgctcctgtaatcccagcactttgggaggctgaggtgggtggatcacttgaagtcagaagttaaagaccaacatggtgaaaaccccgtctctaccaaaacataaaaaaattagctgggcgtggtggtgcactcctgtagtcccagctgcttgggaggctgaggtgggagaattgctggaacccgggaggcagaggttgcagtgagccaaggttgtaccactgcactccaacctgggtgacacagtgagaccctgtctcaaaaaaacaaaaacaaaaacaaaaaaaaaccagttggaggctgtacaatttcaacttgcttctgtcaaaaaacaagtttgcccttctatttgatatctgggtggtttttatgttctctacccatgggtgagcagtaagtacagctttataaagttatacttcactcacttttttatattactattttttaatttttatgttttgtaga

SEQ ID NO: 20690 - DNA, 1731 bp, Homo sapiens
cccagtctgttctcaaactcctaagctcaggcaattcacctgctttggcctcccaaagtgctgggatttcaggcgtgagccactgcacccagcctcctttggagtttttaagtacgagtatgatatgagtcgatttgtgactagaaagaatgttcagttgctatgttagaaatggattgtagtgcgggcacagtggttcacgcctgtaatcccagcactttgggaggccaaggcgggcggatcaccgaggtcaggagttcgagaccagccagaccaacatggagaaaccccatctctactaaaaatacaaaattagctgggcgtggtggcacatgcctgtaatcccagctactcgggaggctgaggcaggagaattgcttgaacctgggttgcggtgagctgagatcatgccattgcaatccagcttggtcaacaagagcgaaactccacctcaaaaagaaatgggttgtagaaggaagcaaggagaccagtaacaaggctctttgcacgaatcaaatgagactttatggtaacttggactggggtgatggtataaaagctgtggaaagatgacagatttggcatatcttttggaagtgaagttgacagggcttgctttgggattgttacacctttggaagtgaggtaataaggaatcatggataacttctatattattgactggagcaaccagggaggtaaatggttgttgctgttaattgatatgggtaagactagcagaatataattgtcaaaaattcttggacagtggtggctcatgcctgtaacccagcactttgggggtctgagacaagaggatcacctgagcccaggagtttcagacgagcctcggcaagatagagagaccctgtgtctacaaaaaaataagaaaattagccaggtgtggtagtacatgcctgtggtcccaactacttgaggggctgaggtgggaggatggcttgagcccagggggtggaggttgcagtgagctgtgattgtgccattgcacttcagccttggcaacagagtgataacttgtctaaaattaaaaaaaaaaaaaaaattctcggccgggcgtggtggctcacgcctttaatcccagcactttgggaggccgaggcgggtggatcatgaggttaggagatcgagaccatcctggctaacacggtgaaaccctgtctctgctaaaaatacaaaaaatgagctgggtgtggtggcaggcgcctgtagtcccagctacttgggaggctgaggcaggagaatggcatgaacctgggaggcagagcttgtagtgagccgagattgtgccactgcactccagcctgggcgacagagcaagactccgtctcaaaaaaaaaaaaaaaaaaaattctcttttggtcctgccaagtttgagatacttgttaggtatccaaatggagaaattagataggcagttggatagaaatgcctggcattcctaggagaattctgagctgaaatagatagaatttgaagtcatggtatttaatcaggaggtcatctacagatggtttgtggctagagaagagcaatttgaaagagaaggaatagctagtgagataggtggaaaacccagaaagtgatgttttagaaggcaagtaaagaagtgtttcaagaagggagtggtcagcctgggtaacatagtaagatcctgtgtctacaaaaaatagaaaattagctgtttgtggtggcacatgcctatggcagtcc

SEQ ID NO: 20691 - DNA, 1477 bp, Homo sapiens
attttattttttttttaatagagatggggttttgccatgttgcccaggctggtctcaaactcctgggctcaagccatctgcttacctcagccttccacagtgctgggactacaggtgttagccaccatgcccggcctaaactatgagatttaaaagaagataagagaaaatccttattacattgagttaggcaaagagttcttagatatgacaccaaaagcaagatccataaaaataaaaagttgataaattggatttcatcaaaattaaaaacttttgctttgcagaagactgtcaagtagatgaaaatataagcaacacactgggagaaatgttcgccaattatgtatcagacatacagctcatattaagaatgtataggccgggtgtggtggctcacacctgtaatcccagcactttgggagaccgaggcagctggatcacgaggttgggagatcaagaccatcccggctaacacggtgaaaccgcttctctactaaaaaacaaagaattagccaggcgtggttgcgggcacctgtagtcccagctgcttgggaggccgaggtaggagaatggcgtaaacctgggaggcggagcttgtggtgagccaagatcgcgccactgcactccagcctgggcaacagagtgagacacgctctcaaaaaaaaaaaaaaaaaagaatgtataaagaggctgggcgaagtggcttactcctgtaatcccagcactttgggaggccgaggtgggtggatcacgaggtcaggagatggagactatcctggttaacacagtgaaacctcatctctactaaaaatacaaaaaattagccaggcatggtggcttgcgcctgtagtcccggctactcgggaggctgaggcaggagaatttcttgaacctgggaggtgaaggttgcagtgagccgagatcgcgccactgcactccaactccagcttgggagacagagtgagactcggtctcaaaaaaaaaaatttaaaaaaaatgacctaagtatttatccaagtgaaataaaaatctgtgttcacaaaaaaacttgtatgtgactgtttacagcagctttatttatagtcaccacaaactggaaacaacctgaatgactctcagctggggaatggataaacaaactaatgtatctacacaatggaatactactcagcaataaaaaggaactattcatatatgcaataacatgaatgaaactcattggtattatgcttagtaaaagaaacaaaactcaaaaggctatggtctgtatgattgcatttgtatgatgttctggggaaaactcaactataaggacagtggggaacagatcagtgattgcctttgggtaagactagagagacagtgggccgggcgcagtggtttatgcctgtaatcccagcactttgggaggccgagttggggcggatcacctgaggtcgggagtttgagaccagcctgagcaacatggagaaac

SEQ ID NO: 20692 - DNA, 1171 bp, Homo sapiens
tagcggaaggatacatgactttgtggggtgggctctgactgtgggagacggaagggcgtgggggaggtacagtttgaggtgatgatgggagaatttggggcacgggtggcccggtcgccggccgcagagctggacagcttggtggagggggacggggttgcgtgctgtggagtgaagcagcccatttgtatcatcccttcctccaggagcttttggtcgcctctcctttccgcttctttcagagaatgattgcggggggagggtggtggaggatgaaagctctgctggagcttaagaagccacctctgaaccaggcaggggaagggtcggtctcccggagtaataggctgctctgggtagaggatgggagtcgggaaccctcttttgaaagccgggaggggtctagggaaaagagctaggggcttagagtcaggcaggttcgaaaggaagtccaccattgataaagctgttaggtaaccttgggcaggtcccacttaacctttctgaacaccaggaagatgtcatgcttcaaacgggctattgcaagcatcacctatgtaattgagattgtttatgcaaattgtgaattgtaagtactatgttgatgttaatgtatcaccaacaatgttagtggaatttagaccttaccgttgttaatggaatgactgatttctctgttaagataagaagcgtattgtttgtaaaacctcagtagacacatatgtgctttctttatgggcacagcagaccatgtgcagaactaccagttctgtaatgtgataaattagccatcagacttctgtaggaaaaataccgtactccggcgtttttacaaacggtttgcagctcctcacccgaaaggatggagggccaatctattaaaatattttctgaacatagctaactcatgttgccttataacacagttggcactaatgtgctttaacgagttgagaaaaggccgggtgcagtggctcatgtctgtaatcccagcactttgggaggccgaggcgggcggatcacgaggtcagaagttggagaccagcctagccaacgtagtgaaatcccgtctctactaaaaatacaaaaaatcagccgggtgtggtggcgggcgcctgtaatcccagctgcttgggaagctgaggcaggggaatcactcgaacccgggagg

SEQ ID NO: 20693 - DNA, 1077 bp, Homo sapiens
gtgcatatacacataatcaaagatgaagggaggacagagccaagctgaaccagtgagacgagaacaaaatcactttaggcagatcacctggatttgcagaataaaactaagatcctcactcccaaaggagggacctcatctgtgggaaacccccaaagtccaggagaacagggacagatcttgatctctgtgaacacaaggtgggtagaaagttcaagtctcaatatcagacatccaggccctcccccacagacaggcaagtggtttattccactctgcctttctaggggcactttaattaaaatcagtccacccaactacaggaggcagctgcacaggctgcattggggcccatctcactgcaaatggcaagtgagatgcccagctgcagatccttgtacgctctgcactcaatgctgtttgagtaaaaatcacttggctggattttagaaatgccaaactatttgctctgtgaccctgatttgcttccacattccacttcccatctcagctgctttttaatctttctctttggctaatagaaatcgagataaatatgctggacgagaagctgatcaagtttctggccttgcagagaatacatcagcttttcccctcccgggtccaaccttcaccgggcagtgtcgggacacatcagctggcttctggagggcaccacatagaaggtgcgcatgtacacacctgtcaccacatcatcagatctcccctctacgtgtgcgaatggtcaccttgcctccatggagaatctgagcttccagtatctcaaacctccttgtgtgcttttcatgggcttaataaagcaccatggtttttttctgaagagagcaggaacaagatggcaaccacagctttctgatcagacttggggaagtctgctgtaactttctttcatatataagtccacttcgagacacagcaaagcagctaccagtacctttgggtatatgtagtgtactttctgcttacttgctttcaaatatttgaattagaagggcttcccgactgagtgcagtggctcacacctgtaatcccagcactttgggaggctgaggcggg

SEQ ID NO: 20694 - DNA, 1043 bp, Homo sapiens
tcaaaatgcagatcccaagctctgttggccagagggagtgttggcctgctgagggtacctataagtcttgcttgggaatggaaatggaattctatcaggagtcaagcacaccctttgtgagcattcatgatgggacctcggaaactgcttgtcagctctgctgcagccctggccactgtggcaggaaggaccggcgcctctcaggcttctcacccccctctcctctccttccattgcagtggctctgtagtgttgttgcgctccagtgcagcatattgaaacatttatctgctaagcagatgccttcgcattgggactctgaacagacagagaaggctgatattaagcctgttattgtgactgacagctcagtcaccacctccctgcaaacagctgacaagacacctacaccttcccactaccccttgtcctgcccctcagggattagcacccagaattccctgagctgctctccaccccaccagtccccagccctagaggacatcggctgcagttcttgtgcggaaaaatccaagaaaaccccttgtgggactgccaatgggccagtgaacacagaggtgaaagctaatggcccacacctctacagcagccctactgattccacggacccccggcgacttccaggcgctaacaccccactaccaggcctctcacaccggcaaggctggccccggcccctcacgccaccagcggctgggggccttcagaaccacaccgtcggcatcattgtgaagacagagaatgccactggccccagctcttgcccccagaggagtttggttcctgtcccaagcctgcccccttccattcccagctcttgtgccagcatcgagaacaccagcactttgcaaagaaagactgtccaatcacagataggacctccgttgacagattcaaggccactgggctcacccccaaacgccacccgggtgctcactcccccgcaagcagcaggagatggtatcttggccacaacagccaaccaacgattcagctcaccagcgccatcgtcaggtgagtgc

SEQ ID NO: 20695 - DNA, 1063 bp, Homo sapiens
tgcctaatctttctttagcttcccttccttcagctttgataattcagtactggcttcaagaacatggtttattattttctactttgagaactcttgtgggtaacaagagctaaattctcccttattaaaaaaggaagtaggtgtgcttgcacccaaattatgattgacccaaccctcaaattacaggctatggattagaatttgtctgtgcattgtaatccacccccctgtgctccccacactaattatacaccaagcaactttcctatgttgtgacctcacctctatttgcctggtccccgaacatgatgtcacaatgaatgatgacttccttggttgcagaaacaggatgagatgattaagattgtggtttatgtgtgtaacagtttcagcctttaagaaagaaagtaaacaagcagacattatttttcaaatacgtgcataagggttcatatttaaaagcaagccaaagccaggtcaaccacctaaccacagctgtagttaaatttctccataaaccaggctgtcttccagcctctccaccttccaagatcctttcctgtgcatccctaattaggttagagcagggcctgttagaggcacctgccagccaggagccctctcaaacttgccactcaaaaaagctggacctgaaaaggtttaggggagctgaaggaaaaggggtaaagacggtggagaaaaggaaatattatgttagtgcccatcgtgtgccaggtgttttaattacgttatcccattatctatccatccagccatagatggataccgaatgctggccgtaggtttccattttagaaaggaagaaacggaggctcaaaaatgtagattaactttcccaaggactcaaaggtattgacagaaccaatgtttgaaccaaattctctcattccaaacctctgttacctcttcatcagttttctagaaggagagctacttgttggggattacagtatgcccttttctaacatggcacttctcctgagatgcctctcttacctttcacatggacctctgcctaccagtgccaagtctgccttttcca

SEQ ID NO: 20696 - DNA, 1040 bp, Homo sapiens
attgatgcaattttcaaagtaatgaaaaacttgacttgctcactcagagagtgagtcccttttgctctgctgcctactttcccttttgctacaatcgtactacataaatgctcactaaactacttaaaagccggaggctgacccatttcctcttctcactgccgtgtaattcctagtggtattacagatgagagacatgcaaaggtaaacagtagttggggaacaaaaatgatatctgggttattccaagtggatgatacctttgttaacacagacacaaggtgaaaatttcttttcccctaattacatttgctttcttttaagttagtgactttggtgtttaatttttgcctctcccctgttttctgacaaattttatgggatatctcccaagaaatgtttctcagccttgacaggacaaaagacatacagagtaacagcagggcagggagcaactccgtgcctgaatgtagcgtcagtctttcctactgatctgggctctctgcgtgaggctcgttttgaaataagcttgagtgagcaaaagaggactctctgcagggtttgaatttaacggtagcccaaagacatcactttacctccaagccaggcagggataggggaacctctcagaattactagcaagcttgagttccaggtggacccctgtttgtggcagcacaagcatcttttttactcagctatggtcctcagagggatgttgaatattatttttctcctgtctgcatttgtgcagagaacagagcagagaaactaatgaaatgcacagagcttcaagtgaatttaaagaagcctctgcattatgaaataaggcaatgatgacctactcttgcttttctttccactacccctaggctcctgtgatcagctgagtgctcgttaattcccacgttcactaaaccatcatagttctgctgattctcagctttagagggaaactctacagtgaactttttcaattagcagtcatcaattactggtcagaatacattataattgtgaaaattatgctccattaatct

SEQ ID NO: 20697 - DNA, 1050 bp, Homo sapiens
cagactaattcctcaacaacacaatttgggtcctaatcattttaatacatcacgtagtagatccccagaaactgtttgctgaatgaataagtggatgctatttataaggccatgatccttgtaaattctcactaggctgcctcttgttcctgcccctgaagctgctgaagacctgcgttcccggtctgaattcactctaaactggacccagaggaggtgggagcagagaaattcagggagcagcacagtgtggtgaaaagtagactaggggtcatcctgaagcggcggccagagaagacacaaagacatgagcatcggatcaccatgcctttcttggccatccagaaaagattcggccttaacatagatcaatggtggacaatccagagtgctgaacagccctacaagattgctgctcgatgccatgcttttgaaaaagaatggatagaatgtgcatatggaatcagtgttatccgggcagagaaagagtgcaagatagaatctgatgatttcgtagagtgtttgcttcggcagaaaacgatgagacgtgcaggtaccatcaggaagcagcaggataagctgataaaggaagggaagtacacccctccacctcaccacattggcaaggaggagcctcagccctgagcagagcagctgctgatgtctggaggctgaatttcctgttctctgttcctcactggaaagattgtttatggaaaacctccttgtcaaagtgtataaaaataaaggattgctccatcctaaaaaaaaaacaaaaagaagaagaagaagaaaaaaaaaaaggaaaagaaaagtagagtggggctgtcgtcctggccatcagagacttaacctctctgggctcagtgtcttcatctatatatggtcattagtagagcagatcggggttgaaaactcaaatgcccacagaggccaggaaaataatgtagacaaggcaacaaagggggaaggtggcaccctccctttgttggagagcaggcatgctccttgcacagcgctgcccttcttgcccgctgatcatcgccaatt

SEQ ID NO: 20698 - DNA, 1031 bp, Homo sapiens
ttcttccaacctccctgcccccacacacttatcccagacacaacaccatgtggtctggaggtcccagcccccaccctaaaaaggttatccctgagaactccaccagacttgggagcccaagtgcagtgcctggtgctgctcccatctgccgccccccttctctcctgcaattggtttgtactcactgggctgtgctctcccctgtttacccgatgtatggaaataaaggcccttttcctcctggctgcgccagttttcctgcctgttccttcaggctcaggcaaagtctggattggtcctgggggtggtgggcagaggcaggattctgatggggaccgtgagggcatcaccctggtctctggcctgctccccaaagtgtcagaccagtgccacttaaagagcctaggcagctcattttggggcaggcagaggtagtggaatgaggggattggccaaggaagacacaagccccaccttttatgtgaagagcctagggactgtgattcaggttagcaagggtggcagagactccaagcctcatcctccctagcctccacaagggaatgttgaggtccctctgattgttaaatctcaccaattacagagattctcttctcttctcttctcttcctccttccgtccctccctctctccctctctctctctctttctttctttcattctctttctttttggattcaagcccttctcattagaacattttttaaaagcttaattttagccatttcaaaggtgactttttgatcaaaacttggcagaactagctcgggcccacagggcaatgtgaataggttgggagtgctgtctctgccctgctcggtccctgtcttcatgccctactccatgctttgttccttcattgacagctaagaggcagctcatgcagaaaggcaagaaacaaatgacacccctcctcctcttctaccttctaccttctcattctgtagtgtggccagttataatccctgaatgaataaagtagtttggacagatgggtgggaaaaaatagc

SEQ ID NO: 20699 - DNA, 1034 bp, Homo sapiens
catagatctcaagcctaggagtacaaggctcccagggctacagcccacacagcgccacaccctacagcagacccaggagatgcctgactccctccccagccctcccaccaaaggcccacacatgggcgtcaccttggttctactcatcttgtaaagttctaatgaatagaaattagcaactgctgagtgacagcctccccctggctctcctgcctcccccagctcttctccctgtggggagggagatctagcagttaggccctttatgcccacacccccaccatggaagaagggcagagcctgactcattggaatcccattgttgccagtttctctggtgcgtggtgacattttagatcaccctgcttatgtgaagctgtttttggcatgctgccctcccagggcaagcttgctgcttcccaggaggtatgtcccccgagtgcagcccctggggcacagacatttgtctcccagatgcatgaactaacacacctgtcgcatgcttgtgctgtggagcggctggacacctaggctgactttgaatggattataccaaacggactgatgtaagaccttttaaggaatggagcaagtggaatggctcagccctgctctgtcacttcccccatgcagcagatggttactgggtgctctgggaggaacaggaagcatctctgttgtaccaaggaaccagtgttggctccatagtaagacaagagtcagccgagcatggttattcacacctgtaatcccagcactttgggaggctgaggcagacagatcacctgaggttaggagttgagaccagcctggccaagatggtgaaaccccgtctctactaaaaatacaaaaattagctgggcgtggtggcgcatgcctatagtcccagctacttgggaggcagaggcaggagaatcgcttgaacccgggaggctcggaggttgcaatgaaccgagatcgcaccactgcactccagcctgggctacagagcgagactccatctcaaaaaatatatatatatatgagtcaatatt

SEQ ID NO: 20700 - DNA, 1085 bp, Homo sapiens
ttctcccgtttagctgcatttccgatggcacctgccccactctggggagagcagagatttaaaggctgtggtgccttgttactatgccagagattttctcataaaacccacccggggaatggtttggagagaaagagatttgtagtcttaggctgaggagacagtcacgaggaaggaaggccagcagtgcggggtagcaccaggccatggagaagctcccagggctgccctaggtggaccctagatctgcccccttcccaccttagggctggggcccatcctgcaggcaggtctggggcagcgcagggaccctgctgctttggggcaggggagaggtgccaggggcagcccgcatcagattttgaggacagtgccatcacgcatcccactacctggtctcaaccagccagagctggctcttgctgagggaagagaggtcttcagctaaggggtccaccttgggttgccgattgatttcatctgtttcctctggaccccttgcccaccattttccttctatttccagtttgcaggacatggtgacaaagtatcagaaaagaaagaataaactgtgaggactggagcgcatgtgctctctgcctgtcctcgcgggtgtctaaccacccctaacactggctcccaccctggggccgctgcacgcagcatgtggatacagcctccccacactcccgcctcactggtctctaacgctaacatgctgactctatcctcgggggaggcagggagcgggcaatgaggtgtgctccccagaaggctggggctggcccgtgcacccttggtgggcaggatgggggggctcctgccgaaaggaaagcgcagcctatttgagaagtttaccttcctgagctccagcacattcctccctcaaaaaccaagtgtggccacctccctggcctatttctctggggggaaaagtctgtttgggctggatctgtccacatccttgggctccttgggagcctgagctgcctgaaagaagcgggcgtgtttcatctttaaaggtccactaccttctcttggcagacaagggtagaaggtgaggggcatctcccagtttcttgttt

SEQ ID NO: 20701 - DNA, 1024 bp, Homo sapiens
gggtagggtgggcttgctacctggggcctccccagaccagttttccccagtcctcttcccttctccactggttgggtagctccgtatcttcctcttgcatgtcagggtggcggccactagggggcagcaggcaccgtggtaacgaatgggctgcagctttggcacttgcgctcggggacttggcctggcttggaggagctctgctccatccttcaagatgacttacgttggaggatggcgattcgagcacctcttcaccccctttttctccagtttagggaaaggggatgctggcgctgaacagcaccttgggctttggctttggccccttctgggatgtgaagggccccaggctgctcagctggagtgagaaagtcctggcaggtggtgggtgtatggaggaatgggtgcccaggcgtgaggctccatgcgagcgaccccaagaagtggcatccctgcccaggaggagccaggctctaggttagagaagttttctcgagaatgtggaggacagacaggcgggcaggcgtgtggctgtgtgttgagggaagttacttcactctgaggcggtgacaagcctagctttcctctaacctacccagccccaactgcaagcggaaagctccgggtgtcagcacagcgatcttctcaaacaatgtctgttagcgcctcagagcttccagtgttttccggcggggggggggggggggggggagggtgtgtttgcgcacacacacatgtgcacaaatgtctttgcgggtctctttctgtgtgtgtcagtgtgattacacccacaaacatactccctggagactgtgtgtgtgtgcgtttgtcccaagtctgactgtggttgtgttttcttgcctactcatcctcacaacacccccgccccacggtccctccgaggcggcgagctctattgatgactgtttgctaacacactgtttttctttgcatgctgcatgctggtcctttgccttacagaagctgctgaaggtaaaaccttgtttcttgttagctttcc

SEQ ID NO: 20702 - DNA, 1084 bp, Homo sapiens
tttattgtggatttcagcagctaacatttgaaagcaatgtctgtgagcagaacataaaacttattctagagtgcttagcaaggtctcatgcttgaggaattatcgtacttggagcttttaatcagctactgttggattcggcgaatcgattggatctgcgaagtctgggcatgagagccccactctctccaatgtttatagtctcctccatgatggtcacattccaagatatactgatacccacgatatccaggatattggtagcaaacccagctaggaaattcaaagtacatttcattattaaaactaattaggaatctggttaataccccaaaacctgagcctctttactcaacacaatggtatgagatgcttttaggcttagaaaaaatagccatcctaaatgtgtcaggcactatttgtaagcataatatggctatagctagttaattagccttaatcatcaaaacaggtataagtagtcaacgtaaattcttccatagaggcatgtctgggggagataaatctgcaacctaaagtggtagttggtataaagaaattgagattcaaaattatgtagaactagaatgtgacatctataccgatacgtatgaaatctgattaaaacataactattgatgcaacctcaggagttactttgaagtatattccaaccctgtttttgtacttacgccccactttgtatcttcatggagccgacttcgttgttgaaccagcccatggcttgcaaggaggggtagtcgtcagagatctcccactggcgtccaataaagttttccttctcaaagatggtcatcttagactccttatgattctgtaattcagaaattgttttaaaatgtttagtactagtgctatggctatcattcttcatgtttttcaaaattgaaacacttttggattatacaaggaagcacatgataatttaaaaagattaaggcaacagatttgtgagaaaaaagttacccataattttgtttattccaatttaaataccataacattttgaatgtacaaataactgatatactattttggaacaatgaagaggatttgacagtga

SEQ ID NO: 20703 - DNA, 1032 bp, Homo sapiens
cagtatgaaatgctcattctattgcccaactggtgctctctgtttaaagttacagatcttgcgaaactggaactattttataagctggggaagtgatttactttttttgttgtatcttttttgttcttagtctgttagtggctgtcctgtagtgggaaatagtaaaaggattcttcactcccttctcccctcagcaccttcttcaagtaaacatttcttgtgtgctttgaaaaaagtttcagcttgctgtctcttttagtgttttaaagaagtgttatacaaagcattgtttgcaaaatatagggagataatggagtccactttaatttggaattctgtgtgagctatgatccaagttatcagctctttccaactttaaaaattttgttaaaagcaccttgcttagaaaattttaaatatttatgtctgcaacaattgtctcaaaataataaactgtgcaattcttgtcattaaaaaaaaaaaagatctgaattttccctaatgtgacttgttagtttctctctgtatttcctgccagtgtaaatgtgaaagctttgcttgcattacgttttagaaatgcattttgcacactcgaattttgccgaagctccgtgaaaaggttagatctaagtagatgaataaagctatgcacatgttttgaaagtttaatttgtgtgtcattaccaaaagtgaccgatttgtccttactactttgctgttgttagctttaccatctttggaaacttggctcaaagttacatagttctgggctagctcatcagtggaactaggagagaggaaaactggcacctattttaataaagttcaatttaaacgagagcttgacttgtatctattaaagagcttttcttgaaacagggcagttttatcagctttacaaatcattggatgctcttccttagtaatattttggtttatttgatcaaatagaaatggaaagtaattcaaactgaaagacccttttttgtcatatggaacttggtgacgattttttgtcttaaagctggttta

SEQ ID NO: 20704 - DNA, 1178 bp, Homo sapiens
ttaacttgagggcaaattacatagctttccatgtacccttttttcctcaggtgctaatcaaaggctctgaaaatggatactgctttagtgatgtctgctttattcttaaaatgcttatttcttttgctagatgtaaagatttggtgttaacaaaagtggttttaatatgtaaatatgaatgaatgcctttagtttaccctgtttgtctattattaatctgttttcatttatccttcatagaggaggatcctttcatgatcttgaatacatttcattagatattgttgcattttaagaatgaaaatacaactgttttctgtcttagattaatcctgctgctatgagaaactgaaaatcaagaatgtgatgcactttttacattactatataccatacatataccataggttgctttgatacctttcctgtagcacagccactaacaagagtgaatgaattataaaattctttttgggagggaatcaatacaagtaactaattcttagctgatattgtcctatgaaggacaataacttaggaatataagaattctgttaatagtacactttttggccttaaatgtcttctactactgaaaatagtttaaatcttagctttgtttctattattccctctctctgcctcagaaagaggaattgggaagaatggcttaaaggacgtggtgtcattgatttgttgctgatcttttagaaaacatttgtctatgtaagctggggacttattttttgtttgtatatagaggggaaatagtgctgccctgaaccaatcagatttagtttaaatcaaatcaatcaaaactccagctgtttctcttgtctttttacttagcaaaggaaaactttagtgaatgctacttgacaagaagaaaagtcatttctcaagcacatacccaaacttgaaggtgattgaacccaaaataatgggtgggaaacaccaaatgaggtggaggaatgagaaagatgtgtgggccaaagctatctggttatattttgatgttgccaatatcgcaaagccaaaattttaatttgcttatttaatatatttgttggccagagatctatttttatatcaatgtgccttgcatgtatattaaaaaaaaaaaattggaaacgccatgtagtaatgcctgagatagtcgatggttcttaccacctcac

SEQ ID NO: 20705 - DNA, 2302 bp, Homo sapiens
aaaagttaaaaaaaaagacatataaggttgattaaagggaaaaaaggctccagtttgttttacaggttttaaagttctgctgtgtgttcaattgccttgtgtaaccacttgtcgccttagggccagattcccctctctagtccccttttttaaatgtccattttgcttgcctggaattttaaagttcttccgtctcacaactcacaagaaactttctgggtttgtgacatacagaggttgaattgagtatatatttgaaaaggaaaaaacaaaaaacaaacccagaccccacctgaattgggctttttaacttagaagcaacacttgattaaacatctttagaaagctattgcttttctaatttccttccatatccctcaggcctcagtgttcagagaagccaaaaagaatgtatcacttctctgtctgtccaaaggtttttgagagtctcacttctaaatgaaacaatgcaacatttcactttgatttctccactgaaatttccttgattatatggttagaggtatgtagttaggaatgtctgttaactttctgagaaccctagtgccccatcatattaactgtcagtattttgggggcattaggttaatagacttaattgcctaggtacaagcaggactttgggacaaatctctttgtgctgtttggtaacacttaactctatttgttgcaatctttctccttaggtcctcacacaattccttacagagcacttattaaaaaaaaatcttaagagttgatctgttttctgattattttgtgtaagcttctaaacaaacttcagctgtgattaatttagcacatttaaataacgtgttattgtttggtataaagaattttccttcaactcagagtattagtactgtagcataaaccaaatacagtctagaggggatttttaacatccctccattataaagactgaaaaaggggtgtgtgtgtgtgtgtgtgtttatgtatgtatgtatgtgtgtgtgaggaaaagatggagatattaaaaattagtaaatgaatgtgtataagacattagtattcagagaatgaacttgtatttattttgtgccatttgttttcattacacagaaaaaagtcaggtggtttaaatccttaaaagggtagtattgaaaaatggcactaagaatgaaattatgacctatttttttaatagctatgaagatactaattatgggtgaagatttctttttaaatctgttttgattattgtaggcttctgtgtcacataccactcttgtaggtgtcctcaataatccccttttcccacaaaatacacagggtgtattatctttctctttattcacccccactttgctgaactgaagttaattacatagcctttcttctaacctccttagtaatgaaccttcacataaagtgtatttacagcgtctgtggtagccagcccttcctcctctactttctaggaggggatagccaataactaggaatttaatgacagatttttttttctttgaaataaatggccagagtttctccattttagaattttgttgtcctccttaatcatctgcttacctagtcattactcaatctgcagaaacttcataaaggaaaagtgctgcattgtttttacaaataacagtttgtagggaaaatatgacaaacctcaactatgggagttgtccacaatacaaaattttgaaaaaacattacatagtgataatatcatacttggttgttaggcttgttgcttccccacatcagaggcatctaatgatttatcttttgtaattgctgtgaacttttttaaataagccatttagtgtgaaattgtcatgtatcaaatggctattggaaatggactttactcaattttaattccactgtaaataaggacggagtcattcctacaaggctctcttcagagaaatagattaaaagtccaatttccaggtattattagtatagttatgccgctgggccacatcctcaacaacagctgatccctcttgtataaatatgttaactgtgcagaacagttatgttatgggacaaatataatggtcattatggtcagattggttgatgccacaccagtcaaggtagagtctgatagggcagtatcttaataaccctacccatgacttaactgttggatttgaaaggaaaacgtaggatttgctcttgtccccttacccgccacaaaattttgataatttgtttaaaagggagaggcagaggaaaagactagaagcataaatagctgctttaggtttgccagaggcacatagcttaacattag

SEQ ID NO: 20706 - DNA, 1700 bp, Homo sapiens
ggttttttttcttctgttagtttttgtttttaagtgtgaatgcaagtgattaatgaatacagacttaacaagtgtggttctaaagttcctgctgtcatcaacttgggcaacaaatgacccactggaaaggcaaatccacttaaaagatctctgtatcttgttctgtgactgaagtgatacactaatcacggggaacccagaatgattcaacattttccccccactcctcccttgatctttttggttttactttaattaagccctgcgagaatgctggataaatgccttgaagttagcagggtgtatttttttagcgaatatgatttgcatgtcttgccaggagttaagcggcctctggggtgttggggaaatactttatttctttccatttattttttgtggggcggggataggggagggcattgaagttctacaattctggaatagttagttgatggtacatagttaacttggcttcggttacatattggactttaacaactgaagaatctatgcgtgtcatttaaagaaaagttgcagaacaagcaattggcttagatatacaatctggaaaaatattcctgtgcccatattttaatgtaattgtataactgggagcaaaaatatattctgcttttcaactgtaggtgctccagacttgctctccgtcactaacactaaatgtgctgttttccttgtttttcatcaaacatttaagacaaacttagacctttctgtaaattatcttttaatttctcagcaaaatctaaaaggggaagaaaaaagtccatgaaaactaaaacttttcatgtttttagccagtgagaagataataaaccctgactgtagaaggtgtgttttcatgcaaactatacttctgagcttgttagcttctaattatatcttaataaatatattttattactagagcaagatgggtttttaaggaaaataatgtgaaattctggaaattttctttggggcagagaagagcattagccctgtcttatcattacattgccatcctgttgcactgcagcttgtgtatagcatgctaaaataaatttttgtgtgtgtgtgcagaaattaagggtccaattgagattgggtgatgttagtaacataataacaagttgtctggcctgacacagcatcacatcacacacacagaaattagtatatccatgtatgtcaaatacaggttaaaatatcagggcatttatataaagagttgtagtcttctgataaaagtagactggatcccctggggtatttggggagaaagtaactactttggctctacccctagaaatgtccagttttgagtgactgtagtatggatgggttttcttgttttgttgattatttgaggcttttaaaacaagtagttcatgaaagaagctgttggactcaacatagagtagagtaactatctttttagtctggatttctgccctgcttagattttaaaagtataagcatggattgccaattccacttgatgtaaacaaaacttttttttatacataatatatatatatatatataaaataacttattgtatcagtccaggttcagaaacttgtggtaggccagttccagatagtttcatttcacctgtaaactgtatcactttgactgatattgtaattttcaaatgtataatatgtttacagatgtgccctgcatttagtctgcct

SEQ ID NO: 20707 - DNA, 1031 bp, Homo sapiens
ggcggatcacttgaggttgggagttcaagaccagcctcacaaacaaggagaaaccccctctctactaaaaaaaaatatatatatacaaaattatctgagcatggtggcgcatgcctgtaatcccagctactcgggaggctgaggcaggagaatcgcttgaacccgggagggggatgttgcggtgagccgagatcgtgccattgcgctccagcctgggcaacaagagtgaaactccatgctgggggtaaaaataaataaataaataaaaataaaaaagaggtgtggtttagaggttagaactacttgcctgaatggttaaactaattaaacatcaattttaattagtcaaatttgatgaatgctttgttcaaaaaatttgggcacctcattgaggagtcagtggattaccaagaaatacttggtgttttttaaataatgatgagctgttatgagaagtattattttatctgtagcatgtgtcttgcatgtccttgcaatttgtgaagacaaaattattctggcaatttgatttcaggtaataatctacatgacacttaagaattataagagccagccgggctggcacagtggctcgcgcctgtgatcccagcattttaggaggccgaggtgggcggatcacctgaggtcaggagttcaagaccatcctggccaacatggtgaaaccccatctctactaaaaatacaaaaattagctgggcgtggtggcgggcacctgtaatcccagctactcgggaggttgagacaggagaagcgctggaacccgagaggcggaggttgcagtgagccgagatcaggccactgcactccagcctgggtaacagagcgaaactcagtctcaaaaaaacaaaagagttacaggatccaggctcacgcctgaggcaggaggaccagcctgggcaacagactccatctctaccaaagaaaaaaagaaaaattagctgggtgtgatggcatgcggctatagttgagaggctgaggtgggaggataacttgagcctgggagtttgagg

SEQ ID NO: 20708 - DNA, 1987 bp, Homo sapiens
agtaacaggaagggaaattgcattcacttcttagttcagcatttctgataatgctgatttctttctttacttttctttttttttttttgagacggagtcttgctctttcgcccaggctggggtgcagtggcacgatctcggctcactgcaacctccgtctacggggttcaagtgattctcctgccttagcctgctcagtagctgggattacaggcgtgcaccaccatgcgttactaatttttgtatttttagtagagacggggtttcaccatgttggccaggctggtatcgaactccttacctcgtgatccacctgcctcggcctcccaaagtgctgagattacagatgtgagcccctccgcaccaggaatatgctgatttatttctttgctagaagcttggcttgcttcatagctagttttataggtacatcatacatccctatttccccctcagaagtcatgatcaaactcactactctagagctcacatttaagggtaataacattttatcataaatcatttttaaatgtatagtatttgagtaaaaccttaagctgcagtaaagaagtatcttcaacttgggtgtttgcaaatagttgttttgccttctttattctaaaatatgtatgtttgctttgtttttaaagtagtgttgttactgtgactctgaagtgtattctcaaaaaaaggggaaagtgcagggataggttgagtttccagtggggaagaaaaaaggaaatgttacttataggtggttaacatgaaaagttggattaactttttcttttctttcttttttcttatttattttttaataatagacacagggtctccctatgtttcccaggctggtccctcaagtgatcctcctgctttggcctcccaaagtactgggattacaggcgtgagccactatacctggccaattttttttttcagcgtatgactaaatatagatttatctttgcagtagacaaaatgaatatcaagttattactatatacataattcttcaggaatttatttgctacaaaatatgaaatttctgtgctttaaaataaaaaatattggttgtattggatcaatttttttttttgcagtaggtcaaccaagagaaggcttgtatttggacttttaaaaaataggccattctgaaatccagaaattcgtaagataataaagaacatttaactgttcctcgttgtttgaaactaatggaataagaaattatattggagtgataagtgtgatttctgtgactagaatttccgatcgtcatctttttttttttttttttctccaggttagattgattatagttctcccctttttagacctctcaggagaaagggaattttcctgcctttctttggataggtgtctgcgcagagatttgatggacataccatacaactaagcttggacaattggcacctttaaactcccagatttggtttaatcactgtaatatcttgaatgggattttatctggataattatcttattcatcctgaattattaattgatcccagtatatggatctgacaaattttcaaaaagctgagagtactgtaaaaaatattttttaaaagtgccaggcttggccaggcgcggtggctcacacctgtaatcccagcactttgggaggccgagccgggtggatcacaagatcagaagttcgagaccaccctggctaacacggtgaaaccccgtctctactaaaaatacaaaaaattagccaggcgtggtggcaggcacctgtagtcccagttactcgggaagctgaggcaagagaatggcgtgaacccgggaggcggagcttgcagtgagctgagatcgcgccactgtactccagcctgggcgactcaaaaaaaaaagtgccagacttggtggctgaggtggaaggattgcttgagcccaatagaccagcctgagcaacatagcaagaccccatctctacaaatggcatgtgtctgtggtccca

SEQ ID NO: 20709 - DNA, 1048 bp, Homo sapiens
gtcttctctggcctcagactttggtttgaatcttcgctgagttctacctcttgctttgcttagcagtaggttgcatttcctagtctgtaaaatggggctgacaggtgtcttctcatagagatgtgaaataatataaagctacagctcatagcatagtgtctagcatacagtaaatagttcttaaatgttaggtattagtgtaatttacatgttgtgatttttttttttaatcctttttttcccctcccctaggctatggtgaactaaacggtaatgctggagaaagagaaatatctttaaagaacctgagttctgatgaagccaccaaccctatttccagggtcctcaatggcaaccagcaagttgtagacactagcctgaagcagactgtaaaggccaacacctttgggaaagcaggaattaaaaccaagaatttcattcagaaaaacagtatggacaaaaagaatgggaagtcttatgaaaataaatctggagagaatcagtctgtagataagtctgatactataccaattccaaatggtgtggtaacaaataattctggttatattactaatggttatatgggtaaaggagcagataatgatggtagtggatctgagagcggatatacaactcctaaaaaaaggaaagctaggcgcaatagtgccaagggttgtgaaaaccttaatatagtgcaggacaaaataatgcaacaagagaccagtgtcccaaccttaaaacagggacttgaaactttcaagcctgactatagtgaacaaaagggaaatcgagtagatggttcgaagcccatttggaagtatgaaactgggcctggaggaacaagtcgaggaaaacctgctgtgggtgatatgcttcggaaaagctcagatagtaaacctggtgtgagcagcaaaaagtttgatgatcggcccaaaggaaagcatgcttcagctgttgcctccaaagaggactcgtggaccctatttaaaccacccccagtttttccagtggacaatagcagtgctaaaatagttcctaaaataagtta

SEQ ID NO: 20710 - DNA, 1032 bp, Homo sapiens
tctcctgcctcagcctcccaagtagctgggattacaggcgtgcaccaccatgcctggccaattttgtatttttagtagagacggggtttcaccatgttggtcaggctggtcctgaactcctgacctcaaatgatccacccaccttggcctcccaaagtgctgggattataggcattagccactgcacccggcctgtatatctgtttctaatgacttgacctcaagatgcttttatgaacatttcataaaaaggtagataactaatagcaccattttgttacagtggaaaactatttgaatcacctataatagaattgactttttatggtagttgaaggtttttttttcttttcttcttgaaagagggtctcactttgtcactcaagctagaaggcagttgtgccatctcagtgcatgttcactgcagcctcgacctcctgggttcaagctatcctcctccctcagctcccccagctgggagtataggcacatgccccacgcccagctaatttttgtatttgtagtagagacagggtttctccatgttgcccaggctggtcttgaactccagcagtctgcctgccttggccctcccaaagtgctatgtttacagacatgatccactggcagttgaagacttttaattaaacctgaataccataacactaaaaaattggattctttttattgttgttttgttagtaaatattttctcattgcatcttttgagtcaaggcagtattacatagtgataggaaaccatggattgcagatagactggcggtcagatttccagttctgtcactttgacttgggcaatttacttcatctctcttaaagtctttttatctaaatgtaaaatgaagaaagtatgttttataaaggttggaaacattggtacgtagatattttggtttcacgtattaacaatatccaatatctgggaaatgtcaaaatgaaatttaagaatactttagaaaaagttgacaagtgttagatatttgtctgatagatgccttggaaactgctgat

SEQ ID NO: 20711 - DNA, 1133 bp, Homo sapiens
acccagctccccggtcacgagtttctctgccacaggaacctcgtctcctgccaggttcgctcacgactccgcctctgaggctttcacttgggccttttccttctagcagctcattttctacaaaaaaaaaaaaaaaatccaaaaaccttgttccattcccctcccgacccagcacttaccttctgagcttgggtagtgtctttgaggtgagggattttaaaaaatgttaggatggggaagagtgcgagctttttgacccctctttcttgtccttaagggtgaacccaagtggctcatccatgaggttagactactaccatcttgcctcggatgaggcttctctccgtgttaaaaagaaaggtgtttttcgtattttaaaatcgatattgatccccaaactaatcttaataaacgagaaattgagggtaaaagtcatgtaagaaagtatttcacgagaagtgagtttaatagtttataacccacgcagattttaaaaaataagggctctttataaatcgaagagaaatgaagcgtaagaaagcgtatgttaaacccagcgtatcaaatttgatagaaggaattgttgagagctggagaaatactaagtgcttttttattgcagattgtaacttgaagactgaaattagaatgtcagattttccattttgggacttcgtagggacccgatagtatgcaatagaagtgaacacatacgcacgagttaggtgttttaatcctaaagatttggaacagtttaaaaactgttagggactatataactagattttttagcattagatcttgttcaaaagatgagaaaatactaccatattatggctgcataaggcaatattactgttgagattgaaaaattgtatctcatcggtcaggttaatatactcttgccagacttctctctacatgtggaagcaaccgctgaaccattcaaggtggtattcctccaaatatttcttgtcttggaaggggtggataaagaggaggaaactggaattagcagttttgacagaatgtaaacagtttggggcgagtgtatgatttggtcacagtactgttgctttgacatgcataatgctaataactaagaaaacattacaatatttttgaaatttatc

SEQ ID NO: 20712 - DNA, 1041 bp, Homo sapiens
ctccagcctgggtgacagagtgagactccgtcttaaaaaaaaaaaaaacagaaacatggttactatggttttgtataccagaacttatctgtatcagttaggactgtatgttacaaatggtagaaaatccaactagaactgatttaacagcaaaaacaacaacaacaaaaaagactttattattgctcatatgccagtgaaacagtttcttgcttcttcttgaaagaaacttgatccagggttcaaatgacatcttcttccttggtgatgactccatttctgggcaggctatcctttcatggtgccaagctggctgctaataggtcctgaagctatgtacttccatccagtagaaaagagactcaatttccctgatagctggaaaaagttccaaaaatttaatcttattagcattgaatatccttagttgggtcatatgattacgttcctgttcctgaaccaatctgggagtgagaggagttaaaggaatacgagatatagtgattggcttaagttgtcatccaagagttgcatgtgtagaggaggaaagtgaaagagaaagggagatgtatttcgtcaaccattactttaaaatatgccttccatgggagaaatgccataatcatcaaccacaatatttatggagctcctaattttagaaacagcttgaagatcattagactgattttgactgtgtctctttgctacaaggaaatttatttatttatttattttattttttagagataggatctcactctgtcacccaggctggagtgcagtgatgcaatcatagcctcaagggatcctcccaccacagtctcctgagtagctggagctactcagaactagaatattaggagtggagctggagctggtcttgaaaactgtactctggtttacaaggaagtttattaagaaaaaaagattgggaggctgaggcgggcctcccagacatgtgaggtcaggagtttgagaccagcctggacaatatggcgaaaccctatctctactaaaaaaacacaaaaattgggcctggca

SEQ ID NO: 20713 - DNA, 1033 bp, Homo sapiens
tctttttttaagaaagcattatgcaaaaagtcacttttaagggcatttaaaaatttttaagtaaagccattctttggcttttttggactatttgtggatactttgtttacattttgaatattaaaatgtgcatcatcttgtcggccatgcagtcctgcaggcatcagtgccctggctgtcctgtgagtcctcatgcagagcagggccatcatggtcagcccttgtgagtaagtgggtatacgctgaagctgacttccgtctgtgtcctgccctcccatccagcactctctatggaaatagttgtcatttcctcagtgatggtgtgtcttatagtgatggttgtaatggtgaatggctagtgtcattttgtttaattttgttttgctttttgatggtggataagatgaaattttagctgtttcagcatcaatccaacttaaaagcatcttggactttgttttcccttccaaactaaaagatcaaggcatgtattagacacaagcatatttgctgcctcaactcctctgacacccatattaggaaaaggcctgccaccaaagcaggaagctgcacactcctaacccttctcccagggtgtggggtcccttgacgtcatgaagagctattgcaaggtgcttctgtacttttccagcctggaaatggagggtgactggccctggctcctgctatgagaagataaccagcctcattttctcagtgccccagaggtctaggataggatttctaaactggaatcatccttaatcaccttgaagatcccttaagaggcatttgactggtgctgccgtctgtgtcctcaaagcaatgctggtggcagcgtcctgtgtacacatgcagagctaatacccaaactaaaaactgggtaactggccctgaagtgcttcccaatcagtaagcccacagggaaatgtttgatttttatgttctgttggattttggtttgcttggcatatctaaaggtgcctttacttttctttttttttttttttctttctgctttgttttgtaggac

SEQ ID NO: 20714 - DNA, 1048 bp, Homo sapiens
tgctgccccaacatgtacctcattgtccactcgtaagaattcaaagaatgattcttctgtggcagacctagcaccaaaagggaaaagtgatgaagcccccccagaacattcatttgtcctcaaggaaccagaaatgagcaaaggcaaagggaaatacagtgggtctgaggctggctcactgtcccattctgagcagaatgccactgttccagctcccagggtgctggagtttgaccacttgccagatcctcaggagggcccagggtcagatactggaacacagcaggaaggagtcctgaaggatctgaggactgtgattccataccaggagtctgaaacacaagcagtccctcttccccttcccaagagggtagaaatcattgaatatacccacatagttacatcacccaatcacactgggccagggagtgaaatagccaccagtgagaagagcggagagcaagggctgaggaaagtgaacatggaaaaatctgtcactgtgctctgcacactggatgaaaatctaaacaggactctggaccccaaccaggtttctctgcacccccaagtgctacctctgcctcattcttcctcccctgagcacaacagacccactgaccatccaacctccatcctgagtagccctgaagacagaggcagcagcctgtccacagccctggagacagcagcaccttttgtcagtcatacaacccatttactgtctgccagtttggattacctgcatccccagactatggttcacctggagggcttcacagagcagagcagcactacagatgagccctctgcagaacaggttagctgggaagaaagtcaggagagccctctctccagtggcagtgaggtgccatataaggactcccagctaagtagcgcagacctaagtttaattagcaaacttggtgacaacactggggagttacaggagaaaatggacccattgcctgtagcctgtcgactcccacatagctctagtagtgaaaacataaagagtctcagccacagccccggtgtggtgaaggagcgt

SEQ ID NO: 20715 - DNA, 1047 bp, Homo sapiens
gattctttggagtaaaatatgaggcatattttcagaatactatcaaggatacgattttataactacataaactgaaaatggaatttagatgttgaacatggtgaataactttttgcttaataattccctggtgcccaggtatgcccaggaaccctgctgtatcatttctctaataaataaatataacctcttagttttttagctgtcttcattatttttgtatttaatttcagtctatggaataaacaagttttaagtaagaaaaaacagtgctgggaattggatttagcctgagtagtagagcacatattctcccttggtttccttgcagggtacggtatatcttgaatgtcactcgagagatagataacttcttcccaggagtctttgagtatcataacattcgggtatatgatgaagaggcaacggatctcctggcgtactggaatgacacttacaaattcatctctaaagcaaagtgagtaatagtcctgcacaatgttgtgatctctgttcctcttgccccaccacacatggctgggtcctgagggctatagacaacttactgatggtactcaggaaaaaggaactaaggaaaggaggagactgaaatctttttaatcctaggcaaaagactagtgactcactttaagtaaagtaaacccctaggagaaagtaacctcatgttggctatttccattgagcacagaattaaagaaaatagacttaaactgcagcaaaagatacagaaatgagagaaggaagaaattctgaatgaaattaagttgccagtggggagttttaaaagttatatcatagaaattatttcagatagatagaatactggtcctccccgctgaagataaggagacaaactttggaaatcttttcctactctcttactttatttttatgatactctaaatgatgaaatttttctgtggcccttctgttgatgtcttccttaaattagttggctcttctagtgagagtattttgtattaacttagtgtttggtattaatgtcaacactgcctttttgttttt

SEQ ID NO: 20716 - DNA, 1026 bp, Homo sapiens
aagtaaaaagctgccatttttcccttagctgatgcctactaagtttcttattgaagttcattcactttaggaggtcagctaatcccaataagaaaagagaaaataaggtctgaaatttgccatgctaactcattgtggaaagagataagaccagctgagactcagaggtagtgatggttgctggctgcctgttttctcagccataagcctcctggttatctttaccattagtggataaatactccctactttttccccacatgaaaagtatttcataattggccaaatgaacttggaacaggacttaagccaaatgattatacaaagaattccggggggtggggaggggaatctggttgcttaatttaaaatttgaagttaaataaaacttggaaaacttaataagaaagtctagagttcttcaaggcagagactgtatcttagtcttgcttatagcttactatctacctagctcagagctgtataacaagagggtgctcagtaaatgtgaatgaatgataggtatgttcacacatatttgaacactgtgacttggctgatggcagataaggagagaaaatcaattagcaaactgtgttgggaattcagagacctcagttctaatcctgtatctgccatttgccttatttggaaatgcccctgaagcataaggaccccataattcaacaagattaataacattgcatctgctttatatacaagagtctccttaagatttctttaggagtgggacaatgttttttacaagcttctcaagtcatcaagctttaaaaattctgtaattctggccaggcatagtagctcacgcctgtaatcccagcactttgggaggttgaggcaggtggaccacttgaggtcaggagttcaagaccagcctggctaacatggtgaaaccctgtctctactaaaaatacaaaaaattagctaggtgtgatggcaggcacctgtaatcccagctactcaggtggctgaggcaggagaattgcttgaacccgggaggtggcg

SEQ ID NO: 20717 - DNA, 1060 bp, Homo sapiens
atggtgaaaccccgtctctaccaaaaatagaaaaattagctgggcatggtggcagacgcctgcaaaaccctgctactcacaggctgaggcaggagaatagcttgaaactggcaggcggaggttgcaacgagctgagatcgcgccactgcactccagcctgggcaagaagaacaaaacaatgtctcaaaaaaaaaaaaaaaaaaaaaggagggggattgtttcgtgtctattgctttgcagcctcattattttcatttcagcatattgagaacatcctgccattgtccccaaatgcatttctttcatatccttttaactggttgtttgttttccataagactgattcatattcaatccgattgttgaacattttgattatgtccagttttttgcagttataaacaaaacctcacctaatgaacatccttatgcttcaatctttgcccatgtccctaaaagacatatcctaagggtcaattctgggattgctaggacaaaggacatacatatttctagggcttttgatacagattgctggtttgctcaccagttggaccagtctacactcccatcaacagttgtagtaattcatatttctaatgcttctgaaattataaataaaagtttttaaaaatatgattctttcagttcacctgagctacttgaagacccagaaaaattgattcttacttgtctttgttatcaagaccctgtttcatacctaagtactggtgaaacatgctctagtttgtgagctatttgagtagaactaatggaaagatgaaataatagtacatcaatagttacaatgaagaaactaattatcccagagagtttttgagcatatgggtagtgtttgtgaatttaagtttgttccccacattgtcagtttattctaaaattatcaccattttagacttaaagaattttaaagccaaaagataagcaaacagacttgcttaggtcctgtagcaaattaattcagaccttgaacaacatttcattgtgctgtttaggaagtgttaagtatattgagattttccatattactgtgttacta

SEQ ID NO: 20718 - DNA, 1076 bp, Homo sapiens
ctcagtattagccaattataagctttctttaaaagttgtaacaatttaggtttccagggtagaagaagtagaattatttgattttttttggtaatgaactaaactatttaaattgttgtatatgtttgtttgaggatggtacctgcctcatttcaggacattttggatatcacgtgagataattattcacaagaaataacaataaaaattccagttatggttgttacttttatcatctgtacttaatatttatccatcaaaatttacatggatattcgtgatccataacaggatatttcaagtcctgagcgttctaattgtggactttatattgattgtcttctgtagtgactgcggaaaagtttatgctacatatggctttatctgtttgcaacttaagcaacactttaagcatacttcatcaccccagcaaaaagctggtcaggtttatgagcttggcatcttattggtgcatttttgtctctgctgttctctgaattttgtgtcataaaaaccagttagtctccatgagggctaaattgaatgagagtttttttcctctgattttaaataaatatcacttacaacagagctcttgggagatgccatttcttcaggactctcctctgacccacgtcccttttaagttactctttctcttaatgttaatatacacagttctcatgaacatcaaaagttttaatttcccataattgtatcatctctcttttttcctttttttttttttttttttttttttgagacagagtctcactctgtcgcccaggctggagtgcagtggtatgatcttggctcactgcaacctccgcctcccgggttcaagggattctcctgcctcagcctccctagtagctgggattacaggcgtccaccaccacacccggctaatttttgtttttttttagtagaggcggagtttcgctatgttggcaaagctggtgttgaactcctgacctcaggtgatctgcctacctcagcctcccaaagtgctaggattacaggcatgagacattgcacctggcctcatctatttttagggggagctttagtttgaa

SEQ ID NO: 20719 - DNA, 1033 bp, Homo sapiens
ttcttactattgctaatttacaaagatttttcagttaggtatagttgaattttactgactgcttttttatatctacggaataatattttcccctttactgctaatgtaatgacacattgaattattgaagttgaatcatccttacataactgaactacaccctttttgcgttattcatttaacatattgctaggcttggtttacaaatatttaaggttttgcatttagggatctaaatatttattgaatctttgctgtcttcgtccagcttatgtctgatttacagaatgatttgggtagtttttcatttttttctgtgctctgaaacagctctgtagtaggattatctgtattttaaagcttagaaccaagaagttttattccaagtattttttattttatgaattttttttaccactcacatttttaaatttccatgtttgcattgaataaatataattatcatctgtgatgctcttaaaatctagatcttgtcttctacagaaatgggcaagcataactgaataattgataattgagtaattgaaaccaggcattcatttatggtttaagggctttttttttctctttttggtggataaagagactaatattaatatttaagagaggtacgagatgcctctttgattttaaattaatactgactttttgtggttatttttgatccttagagaatatagccttaaaatttagtatttttaagaaagtgatcaaattggtttacatctagtgaatcttctgggtgttatggccttcaaatgtgaaagaacagttaatgatcccctgtcaaagtataaagatgcatttgtgtttttattattggtggtaactttctgtggctttatccacccttgtgattgtttaaaatcagcagagcagtaattaacctataactgaggggtataaaaaaagagctctcaactttggctttcttggaatcatgcttagccaagttaactgagaagtaaatctgcacaatgaagatgaacaggaatggtaaggtagtgatgtg

SEQ ID NO: 20720 - DNA, 1027 bp, Homo sapiens
cttgaacccaggaggcagaggttgccgtgagccaagttcatgctgttgcactccagcccgggtgactgagcaagactccgtctcaaaaaatttaaaaaaggcagataattttttactgaacatttactatctaagggacactgttttgagcagtggatatattatttcattctctcttcttaacaactttatgagttagatattatcctcaattacagaagagaggcacagagaggttaacttgtctgagattatccagccaggatgcatacacaggcagtcagactccagagtccctgctcttaaatacctctctatttacaattccccttattgctatggaggtgtagcatctttttatgtgtaactgatctttttggttttttttttttctgtgatttgagtgtgcttctgaccatttttctattgatatttggcttttttcttttttatgttctctatatattctgagtatgtggcaaaaatactttctcctagcctattgcttgacttttaactttgcgtcccatataaaagttttacatttttatatagtcaaatctgttgtattttatcttatgatttcaagattttgcatgttgctttttaaaaacctcttgccattcatcctcaggattctcaaagtgttattttatattttttctggcatgtttacatttttaaatatttaactctttaaaacatctggaatttatttttatttatagtgtgagggaaaaatctagcttaaccttttttttccaattggatagttattctaataccaaatttaccattatttacattcttacttcactaatttgaaatgctacatatatattaaattcttacagatgcttggagtacacttctgtactcttaagttctgttcatgtttttctgttcatatgccagtactcattttacttattacacctttagtagacaaatgtatgccagtgctttacctccttgttggtatttttcagtgtcctaactatttttattttattttccagataaatct

SEQ ID NO: 20721 - DNA, 2262 bp, Homo sapiens
gccccctgggttcaagcgattcttttgcctcagcctcccgagtagctgggattacaggcatgcaccaccacgcctggctaattttttttctttctttttttagtagagacggggtttccccatgttggtcaggctggtctccaactcctgacctcaggtgatccgcctgcctcggcctcccaaagtgctgggattacaggcatgagccaccgcgcccagcctctatctctttgaaaataaaatttagctggcgcggtggctcacccctgtaatcccagcactttgggaggccgaggcgggtggatcacaagctcaggagatcgagaccgtcctggctaacacgatgaaaccccgtctctactaaaaacacaaaaaattagccgggtgcggtggcgggtgcctgtagtcccagccactcagcaggctgaggcaggagaatggcgtgaacccaggaggcggagcttgcagttagccgaaatcgtgccactgcactccagcctgggcgaaagagcgagactccatctcaaaaaaaaaaaagaaaaagaaaagaaaattaaaaaaagtgaatagaccaaagtgagatcctatggactctcctaggaaggaaactttatgactttcggagtgtgggttttgggcatctattttggtaatttcataggctcttattactttcaactgtgttatatataataggtgaaattatggaatagctggggtattactgtattttattggtaattatgttatcattattagattaaggtctacccttgccgctatataaaactcaccaaatatggtattattttttacctgtcaatgaagaacattaataaatgatcaaaatcattccagaaataaactgtagttactattatactgttaagtgttaattctactagaaaaaaatatatatgagcaactcagagaatcatttggtcaaacttcaggagtcttggattagactgatgagaatgatcataaaaagttcataccctttaagagtctgtacgtgcattttagtaaaacaaaaagctgaacttctgaaaaatatggaagcctgtattattttttagagagctattatccagtccctgggaagtagtcactaagcaaggagccaaggtgttagtgttatcattatatactaaacaagtggccatttttgtgtcctaagaagctcagggaagaataaaaattgttagataaaattctggcaaagactaccatttaaaatattcccggctgggtgcagtggctcacgcctataatctcaattctttgggaggccgaagcaggtggatcccttgagcccaggagtttaagaccagcctgagcaacacagggagaccctgtctttacaaaaaattagctgggcatggtggtgcgtgcctgtagtgccagctacttgggaggctgaggtgggaggatggtgtgagccagagaggcagaggttgcagtgagccgagatggtgccacttcacttcagcctgggcaacagagcaaaaccctgtctcaaaaataaataaataaaaataaaataaaatattcccattatgaaaacctctgatcaaaaaagtcttgtcttgaaactaaggcactgaaacattgcttgatttgctgttgaggttatcttaagctttttatatacttgacctaaaatatttttatttatttacttggttcatatatgaacttgacttcctagaagcacatgagtgctttctaaggctcagcgtcagcagtagaggagcatattggatgttcatccaaaatgtaccttttcatgaaatcaaaaggtagaaagtcttattttttgtattagtaatagtactaatgctctttcagttccactttgtagttgtacaaggggtttcacatgaacttatctccaaacttaagcttgcatcagaatcacctggagggcttggtaaaacacaaattgctacccacagtccccagagtttctgattctgtaagtctaggatgtggctggagaatttgcatttctaacaagttcctagatgatgctgatgatgatggcctaaggaccctaccttaattaaagtattcctctgaggcagattgggcaagtcatcgtccacattttatagcataacaaactagagaatcaaaatgctgaagtgatttgcacaaggctacatggcttgatggtagaactgaaactagaacaagcatttcttgtctctgaatccagagctcctgtagtgctgcactcacaatcctgatacacacatc

SEQ ID NO: 20722 - DNA, 1027 bp, Homo sapiens
atgatctcggctcactgcaacctctggcgcccccaaccccggccccccaccccaccccccacccctgccactgggttcaagcaattctctctctctctcttttttttttttttttgtagagacagcatctcactttgttgcccaggctgatctcatactcccaggctcaagtgatcctcctgccttggcctcccaaagtgctgggattgcaggagtgcgctaccgtgcccagccacttcttttttctttaaagagacttgctataatattcacttcttctaaactgtatttattagtattactttagaggtcatgtttatttagcatttatagtgctgcacagcttatcatcattaaaaaaattattaggaatcattctgagtaaactactaaactttatgaacttaaatatatccactgttagcacctaataaagaagttcttaatttgaggtccatggtcacctagaggtctatggattggcttcagaaagtcaaactccttgagattatatgaaaatgttgagtaaataaatatattttaaaatcagattctcaaagtgatctgtgatctcaaaaaagattaagaagctctttcctaaagggaagtgttatttctaagacctgattctgtaaacctcaagtgctgtgagtatttccctgtggtacatagcaataactagtgggagcagctaaacaattcagatttagggtcctaagtgaagactgactcaaaagattttgtatttgggggagggagtaccttgatacatgagtacacttagcccagtggttctctcgtcactgctgagaaccctctcaaaagagctttttgccctttctcatttgctgccctcaggtttgctgtgggtttagaaaccacgaaacaagccaggcagggtggctcacgcctgtaatcccagcactttgagaggctgaggcagatggatcacgaggtcaggagttcgagaccagcctggccagcatggtgaaaccccatctctactaaaaatacaaaaaaagtagcc

SEQ ID NO: 20723 - DNA, 2054 bp, Homo sapiens
tgaagatgatgaactccaagatccagaccttccgttaactcttcacttgccacctggtgctttcctattaccagatatctcagaaacttagataactctttacagcatgagttttcagtatttcaagtccctcaaggtgctttggcaacaggcttaagttttatagaagaatcaactaacgagtaattctggttttaggcatagaccttataatttggattgattatttcattactagtatcttgaaaattgccaaactttccaatgggaaaagagcataaatatttatataaaacaaaggcttattattttcttgattatagcatgttgagtcttaaagtcacttcttcctaattttaatctaattggttagtgaagtttttagaaattattattaatttctgactccagaattctaaggcagcttcagtgatatatattttagtctagtattcaaaaatgctgaaaatgctgatacctgaaaatatttgctgtagcataatgagactggaaaggtaaaataaaaggaagctaacttctattgaatgcctgcaccatgccagccccatttgtgagcacaacatgcaggagagagagagcgcagtcatattttacaaagagctggtccctggtcaggtgaaaggcactgctcagtgaattggaaggaacatggtaagggcttaaaactgtaaaggcgtcagggaatacaatttgaaggtaaaagccctagatcaaatgtcataaaacctgggttcctgaatgacattatttataaacgaggtcatctgcttagaccttaaatgttactgtatctgtaaagtgaagatatgatctctactctgccgtctcaaccatggctgcactttggaatcacctggggagctttgaaaaatacgtctaaatcccaccttcaagagattccaattttattaaggtgcagcctgggcattgagatttttaaacccaccacaagtaattcctatgtgcagctaaggctgtgaatctttgaattgggggatggctaagaaagccctctatagatttacttacaaacattagtagatgttatcgacaatctaaattgttttttgtttgtttgaccattacttcaactgtttaaaaaaaaaaaatcttgccgggagccctggctcacgcctgtaatcccagcactttgggaggccgagacgggcggatcaccggaggtcaggagtttgagaccagcctggccaacacattgaaaccccatctctacgaaaaatacaaaaattagccaggcgtggtggcgcaaacctgtaatgccagctactcgggaggctgaggctggagaatcgcttgaacctgggaggcggaggttgcagtgaaccaagatcgcaccattgcattccagcctgggcgacaatagcagaaactccatctcaaaaaaaaatatatatatatatatacacacacacacacacacacacacacacatatgtatgtgagtgtaatctctgaatttccaaatcacataggaagtctctgataaatatttgttgcacttgtgaatttatggcctttacattttttaagatctttcaaaaacgggtttgaggtacaatgtatagagccaatctttaagaggcaggacttttctgttgaaacatcctcctttagagaaatgcaagcctttctcgtccacccttgagtagcttcactcccttaccgaggcagcagtgtcttggggccgccggatgccctaaaggctgtgacgcgcgctgcgggatccgcgcgggcgtcccgagatctggggcggggcgccggccgggcctaccctctccgctctcaggacccgcccgtcccgccccggacgcgggtgggggcgaactgctggcgacgcccgtcagtccggactctaccgccgagccctggggcttcggcggctgcctccgcgcgacccggcgggcccgcctccgccgccgggtgcacgcgcagcctgcgcctcgtgccggagcagagcagaggccaggatgcggagttgtgcactttgagccggccccatgaccctgagcacgttg

SEQ ID NO: 20724 - DNA, 1051 bp, Homo sapiens
aagaagacctgatttttggctaacacggtgaaaccccgtctctactaaaaatacaaaaaattattcgggcatggtggtgggcgcctgtagtcccagctacttgggaagctgaggcagaagaatggcgtgaactcgggaggtggagcttgcagtgagccgagatcacgccactgcactccagcctgggcaacagagcgagactccgtctcaaaaaaaaaaaaaaaaagacctgattttagttccgtctcacctcacactatggtagccctcaatttcctcattttgtaaaatgaggataacatctgcccatctatccttttaggttgctgtgaggtggactgaatagaatctggaaaaaaaaaaaccacatcttttctcagttaattgatgtactagctgaagaatgataaatactgccccctttctactaaggactgaggagttaatttttgcatacttgttggttttatctaatccagagagaaaaaacaacttccaatgttgtggtaaattcttgaacatatttgacatggttgttgaaaagtgtataattgtgtaagtgtctgattttgcatgttcacctgatttcagagaagaaagacatagaaagtgaaatatggccagggaagttgatacacgaaggcttagagagataatgatgctgctctgccagggcctggaaacttgaccatcctaaacaaactgcatagtactaaattgcttgtgaaagggctgaatcaatcctgctgtgatttgaacttttggctcctgaaagtctagagcaggcttgaaaataaaaataaaacccttacctacttactaggttgtgtttcaggccctctactgaattctgtgtgtgaaggaggtatctatccaaagaacaagaggcagcaagagagagatgaaaggcagtgaaaaggagtcttaagggctactccttatttagtgaggcagtgctcccagggagaaagaacttccatcattaatgtactgattctttaaggaaatatttactagagcataatgtgtgtgtgaaagaaagatgatatat

SEQ ID NO: 20725 - DNA, 1041 bp, Homo sapiens
tctcaaaaaaaaaaatttccttcttgttcactacaagttatttgttttggatgaaaaagtaaaaggctattaggaaaggtttattatgaacacaattcagaactgctgagtttagtataaggtcaagtttttgttttttgtctcttctgatcttatgtttatgagtttaaacagtataaactttaggaactccttatatacttggtttttcttaccttgaaacctgtatgtatatgctccttatgcatatgtttatgtcttaaatatattttaaaggaaacagacactatggaaagattcctattataacccaaatggctgggcgtggtggctcacgcctgtaatcccaacactttgggaggccaaggcaggtggatcacctgaggtcaggagttcaagaccagcctgaccaacatggagaaaccccatgcctactaaaaattagccaagtgtggtggcacatgcctgtaatcccagctacttgggaggctgagacaggagaattgcttgaacccaggaggtggaggttgtggtgagccgagatcgtgccattgcactccagcctgagcaacaagagcaaaactccatctaaaaataaataaataaaaaaaataacccaaatgatctctcaaactgccaatatcttcatatcactttaacaaaattcatatttaataatctcaaaaggcgatgtgtaaaccatctgatggagaaatcttacaaagtgaaattaaggagcatttaataaaactaagatgttgaagattagtattatttgtagaatattggtcttcagaaaagagagtcaaaatgtttgccatctattcatgaggtgcttagaaaacaagatttctgaaaaacaaaagatttcccaggtaaaattaaaatgttttaaaaaatgtaattaaacaaaaaatgtatatgagttttaaatatatattttctattctactgtgtaatgacaaggaataggaccccttgtcttttcttttctacattgtaatattatttctatggatagaaactcagttctgatttaat

SEQ ID NO: 20726 - DNA, 1103 bp, Homo sapiens
cggagtttgcagtgagccgagatcgtgccactgcactccagcctgggcgacagagcgagactcctctcaaaaataaaaaataaaaaaagggaggaaaagtggggaaaaaagtaggtccattgtaaatatgagctgataatttaatcctcatcttttttatctttaaaaaaatgtttagaccgggcgcagtggctcacacctgtaatcccagcactttgggaggctgacgcaggtggatcacgaggtcaggagctcgagacctgcctggccaacatggtgaaaccccgtctctactaaaaatacaaaaattacctgggcctggaggcgcgcgcttgtaatccctgctacttgggaagctgaggcaggagaatcgcttgaacccgggaggcggaagttgcagtgagccaagatcgcactccaacctggagacagcaagaccctatctcaaaaaaaaaaaaaaaaaattgaaacaatctcatacttacagagaaattacaaatacaatacaaggaactttttttctgagccatttggcaataaaatgctctatcacctcactcttctttaagaaatagagtgatgatgttaacatttcatggagaaactgaatattgattgcacttatgacaggaaatatacattagaaagagaaacagagggtttttttgttgttgttgctgtttgagatggagtctcgctctgtcacccaggctggaatgcaatggcacaatctaggctcactgcaacctccgcctcccaggttcaggcaattctcctgcctcagcctcccaaatagctgggattacagacacgtgccatcatgcccggctaatttttgtatttttagtagagatgagatttcaccactttggccagactggtctcgaacaactgacctcaggtgatccggcggcctcccaaagtgctgggattacaggcgtgagctactgtgcccggccagagttgtttttttgttttgttgttgttgtttttaaacaaaagtagagctttccatttattagaaagtggctgtaactgatcacattgaagctgttcatcttttttttttttttttttttttttttttttgagacagagtctca

SEQ ID NO: 20727 - DNA, 1035 bp, Homo sapiens
ccaatcagcactcccaattcaatggccccctacccaacaaattatcctttataccaaaactctgatccaggccaggcgcggtggctcatgcctgtaatcacagcgctttggaagcccaagacgggaagatcaactgaggtcaggggttccagaccagcctggccaacatggtgaaaccctgtctctactaaaaatacaaaaattagccaggtgtagtggcgcatgcctgtaatcacagcactttgggaggccaaggcgggcagatcacctgaggtcaggagttcgagaccagcctggccaacatggcgaaaccccgtctcaactaaaaatacaaaaattagccaggcgtggtggcgcatgcctgtaatcccagctacttgggaggctgaggcaggagaatcgcttgaacccaggaagcagaggttgcagtgagcggagatcgcaccactgcactccagcctgggcgacagaatgagactccgtctcagaaaaaaaaacaaaaaacaactctgatcctcaagttttcaggaagactgatttgagtagtaataaaactctggtctcgcacaaaaaaagaaaaaatgtataacatgacttccagaaggagtctggcagtattatacagcatgaggggaggggaggcaagaaaactatcaagaaagctgttgcagtaattcaggcaaatggctagttcctgtacgagagcagcatgaggacagggattatgtattttactttggtatccaattagcatgtagttggcactcagtaaatgcttagtgaatgaacaggaatagaagaatattgattactgtactagaaataatactagttaagaaagggaactctgtcagaaaccatatgaagagtttgactttggatatatgaaacaacggggcattattcaagtagaaacagtttgaaggcagttaaaagaaaacatagggccggcatggtggctcgtgcctataatcccagcactttgggaggctgaggtgggcagatcatctgaggtcaggagttcaagacaagcct

SEQ ID NO: 20728 - DNA, 1092 bp, Homo sapiens
acaaagaaaataagggagaaaataactcaagctggtgctgataaagtcagcaaaaggccagatgctgcagccttataaactaagtcaaaaatcttgatcttggctaggtgcggtggctcacacctctaatcccagcactttgggaggccgaggcggaagggtcaccaggtcaggagatcaagaccatcctggctaacacagtgaaaccccatctctactaaaaatacaaaaaattagccaggtgaggtggcgggcacctgtagtcccagctactcgggaggctgaggcaggagaatggcatgaacctaggaggcggagcttgcagtgaaccgagattgcaccactgcactccagcctgggcgatagagcgagactctgtctcaaaaaaaaaaaaaaaaaaaatcttgatctttatttcttggacaacaaaaagccactgaagagttttcagctggggagtgaccaggttgagattttttaaaaatatttgcctgtctttgctatggagaatgggcttctatatgagcacaactatttccccagcaatcagtacaatgtctagcacataggaggtactctgtacatattggttaaaagaagaataaatgagtgataggtaacgtatacacaataaatggaagctaaagtcataccctgaagaaagaggtcaggcaaggaaatgtgaatacagcagcgaaggaagaacccaggctcccttcttccctctctcctctctccatatatatatgtacagacacacacacacacacacacaagccatcgacagttggggcttcatatccctgtgatttagtttggttaactcacttgtcagggaatggagctcttaataaaagggaagttggcagaatagtagtatggtgttatggtgtggtggtaaggaatgtatatgaccctagttaagttacttttcttctgtcttaatttcttcatccaaggaatggaaatgataaatagtatacctaccttggagggaggattagtgtgaagattaaatgagataatggttgcagagcacttcgactaaggcctggcacattgttagcctttaataaacagccactattacag

SEQ ID NO: 20729 - DNA, 1024 bp, Homo sapiens
ggatgcctggaagaaggaaccagtcaatttatcctgatttaaattttcaaattgactcagttaaattcagtaaccacagattgtatccctaatactagacaatttgcaaatctgtaccatttatcacgaaaaaagcctatgtaaaatactatgagtggattaaatccaaatcatcacctctccagaaaaagctatttcaaacattctgtggctgatattaagtttttgcgatcctctttatgtgcaaagtatataactatagtgttgtatttcccattgtacttaattaattttttgcttcccagtttattggtgtaaacactggattctagaaaacaattgtttccccccagtaaagccttcaaagacgaagattatgggccaggcacagtggctcatgcctgtagcactttgggaggcccaggtgggcggatcatgaggtcaggagttcaagaccagcctggctaacatagtgaaacctcatctctactaaaaatacaaagccgagcatggtggcgggtgcctgtagtcccagctacttgggaggctaaggcaggagaatctcttgaacccggcagtggaaggttgcagtgagccgagatcgcaccactgcactctagcctggacagcacagcaagaccgtctcaagaaaaaaaaaagaagaagattatggtggtgggcagaataatggcctccagtagagtcctcattctaatcagctgtgaacctgtaaatatgttatcttaacatagtaaacgagaaattaaggttgctgatcatatataactttaaaataggaagattaccctggattatcggggcaggatgcaacataatcagtcacaaaggctgttaaagtagaagagggacacccaaaactataaaaaccctagaagacaacctaggcagtaccattctggacataggaacaggcaaagattttatgacacagatgccaaaagcaattgcaaagaagtaaaagttgactagttgactctaattaaactaaagagcttctgcacag

SEQ ID NO: 20730 - DNA, 1065 bp, Homo sapiens
ggggtcttattcacaagggtctctgctaatctcttgccctgggcagggtaattcttccctatgacttggcagttccccgatctttcatttcttccttgatgctctcctattttgggtctctagtctcttgcttttgttagttagggctaaattcttgtcctgaatcttccctttggcctaaagcttagagacccaaggtgtttctctttggcctccataaagacacaaagcatcctaggcaagggacactacaaggggacagccttgtggctatctctgaagccctacctcaaagttgagcttccgctcaccagcaagctgctctttaagttatggttggcttggatttcgggcaaccaacactcttgattgtaggaggcattccttgattactgaagtccctagattactaagatcctcctttagcttttgggagtttctcaccccagtggttctcatgacacctcccaattatggtttagtaggtaagaccccttgtattgaccatctctctagaatctctgtccgttgaagcaatttctgaattcatctccaaaatccttttcctaagatggaaactagtttagagaaatgttcatttctttgagaaacatctctttttagacactctcactcctctgttctctggctctggggcattgctattttatggctagaatcttttgaaacacttctactcttatccctttacttatttcctgacattgctcaacctgtaatcagctctgagctacctctattagcattctataaagtcccacttttctaggttattttccatgatgctggatgagagggactgaaaagtctgccaatttttctccccatccaagggaacggggaggattctgcaggcccatgaccaatattcgacagggcttcttccaagaatttcctggtgggaactgagtttttttttttttttttgaggtggagtcttgctctgtcgaccagcctggagtgcagtggcacgatctcagctcactgcaacctctgcctcctgggttcaagcaattctcctgcctcagcctcccaagtggctgg

SEQ ID NO: 20731 - DNA, 1032 bp, Homo sapiens
cctgtacccacttaaccttttgtaaatatcattattctcttttgggagggagggagatttctttctttgttaatgtagtctctaggaatagggatatacactctttttaatattactattttgattcttgaatgggagccaagagttcatgttgatgttatactgtgctgttatggccactgagtaatattaataatagtcaccaattccatgggattgtaaaacaaattgaaagctgtaaactctccattttcaagaattagagctggagttagtttaaaaacaaacatgtgcataatacaaaagaaacaatttaaccctttaataactttgaaaacaaagagcaatcataatgtctaatagacaactgctttccaccagtgtttttccatttaacaaaatcaatcaggcttattaaaggatttggctgaaataagagttccctatgttgtattaaggacagtaactcatttcagtgttctacaatgtaattattcatctgttgttgaacatttgagctgatatatgtaatataagaaaaaatagggaatatttttgtataaatatttatacacctctctatttctttaaattctgtaatcgactaataggtcatgaacatctttaagatttttgacacaatgtcatattactttcagaaaaattttactattttacactcccagccattagtatgtgagagttcctctttcacttttcccaggtttggaaacatttataatctcttatctttgccagtctgaaagatgaaagtggagcttgttttattttgcattttttattaattaagtagggcatgtttatttttatgatttattttcttatttattttaaaaaatcaaatgaatcagaaagcactaatataaatagaacagtgtatctttattccacactgacatgaaaaagaattgcctacaaatggctgcaagagagtatattttcaaatcttgttgtcttgagagattagatgtaaacttacaattctgctatgaatatctcaagctctaaaca

SEQ ID NO: 20732 - DNA, 1050 bp, Homo sapiens
tcgcaggcaacctaagcaaaaatggacaaatgggatcacatcaaggtaaaaagcttttgcacagcaaagaaagcaatcaacaaagtgaagagacaacccacaaaatggaagaaaatatatgcaaactacccatctgacgagggattaataaccagaacacatgaggagctccaaacaactctataggaaaaaaaatctaataatccaattttgttcttgacacctttcccaaaaatgagttcactatagatgtgtggatttctttctggattctctattctgttccattggtctatgtgtctattttcatggcagtagcatgctgttttggttactattcctttgtagtataatttgaagtcaggtaatatgattcctcctttttttttttttttctttttaccttaggatagctttggctattctgggtcttttatcgttctgtataaattttagggtttttcctatttctgtgaatgtcactggtattttgatagaaattacattgaatgtgtagattgctttgtgtatgtactgtgaacattttcacagtattgattcttccaatccatgaacatggaatatctttccttttttttttttttttttggtgtcctcttcaatttttttcatcagtggtttatagttttcattataagcatgtgtacaaattcgtagttacaaattataattctatgactgaaataactagggagcagtacatagattaaatgttaggcaaggccttcatgatggagttataccgagtgaggtttgaagaataagtaggagccaggcatggggtaaaagaaaaagagtcatttaaacaaaaggcatattcaaagccccaaggtgggagagagtttggcatgtttgaggaggttgaagggagggcaatgtggccggatcataatgtagtggggctgaatgaggaaactatggagaagtagataaggatgaaatcatgtgaggctttacagactgtagtaagaagttttgatttttttccccaagaactatgggaatacaactgaaaggttttcaacatgg

SEQ ID NO: 20733 - DNA, 1516 bp, Homo sapiens
ggataatggatggatggatggataatcgaatgaatgactagaaggctgttcatcctagcagcatgtgtatacagtatattgagttgtctttgcaattggtttgctcttttttttatttgagtctcatgagcaaaatataacaatagatttttgaaaacatcttttatgtttttaacattctagtctcttacatctttaggtgtcaaaatttagtatgcccaacattaaatttgtggcattgctttcaccagcttaatttcatgagctttggctgggatttggaaacattgcatcttgttttgatgattttctgattggctggaagcctcaaatggatgtcacatgctgttagagcagactttgcaaagaaaaagacagttgatcttctttgtttcaggtggtctgttccctcagtttaggttttgtttgatttggggagtatttattaactttagggatgagttgcattttctttctaatatccatttgttcacaaaaacacctagtaggtattcagttcatattggaatgaatgagaaaatgagcagcacatcaattgtaacaaatgtaccactttggtcggagatgttgataatgggggaggctatatgcatgtgtggaggcaggggatatataggaaatctgtctaccttctgttcaattttgctgtgaacctaaaagcgctctaaaaaataaagtttattaaaaaaaaaaaaaaaaacagcagaaagcactgttcctgagaagtggaaacagcatgagcctctgaataagaaaaacctatttgaatactgattctacctctcacaattatcactcaccttggatagataacatggctgagtccgtgtatatccataatatggaaatgataatacttaaactatattacagattttcaatattcttagtttaaattaggtcaacattctgatttttttgttgggaaaatatggtcatcatatttcagctcttggactttttaccatggaattttaaaaccatatacttctggacacattttaaaaagtaaaatgtacagacatgagatgtgaggggaaatcatgtaatttagccaccaatttgtgcagtttgtataattatgacaaataacacaatgctgtctgtatttgttaagttttcctgtgattgacttcagaatatcaatgaatcttaaaccagactttttctgttattcatttgctgctttgagcttgtttctctgcctatccattttttatatagctcagaaaattaaacaattgagatcttgagtttcatattataccattaatttgcttattacaatcataacatagtatatttagtagggcacagctggattttcttttatttgcatatgccttatggtaatactatgactagtaactcattatttaatatggaatatctactgtagtggaaatctagaagaaatatgagtgctgaataaggtagtaagggagatttgtagtctatacttatttgatctttgtttccatctatttctccaatt

SEQ ID NO: 20734 - DNA, 1048 bp, Homo sapiens
atgtatgtcatcttttgagaattgtctgtttatgtcctttgcccactttttaaatggggttgtttgtttgttttcttttaaatttgtttaagtttcttgtagactctggatattaacctttatcagatggatagattgcaaaaatgttctcccattttataggttgtctgtttgctctgattatagtttattttggagtgcagaagcactttaatttagttagatcccatttgtcagtttttgcttgtgttgcacttgcttttggcgtttttgtcatgaaatctttgtccatgcctatatcctgaatggtattgcctagattttcttctagggtttttatagttttgggttttacatttaagtctttaatccatcttgagttaatttttgcatgtggtgtaaggaaggggtccaatttcaatttcctgcatatggctagccagttcttccagcaccatttattaactaggaagtcctttcctcattgcttgtttttgtcaggttaagttcagatggttgtgttacgggatctttgggtgtcaatttttggaaacctctgtggccagttatgcctttgcctgagttcttgtccatccaggaagaatgaggtagaatgaggtatgcagacaaatgaagggtgaagaagacgaagaagagctttatttaggtttacaactgctcagaggagacccgcagtgggtagctcccctctgtaggcaggcaggtcatccatcgagtgttcagctctcatcagagaggaggccctggagagggtagttcttctctgcaggcaggtcatttggtgatctctgcaggtctctgaaactctcagcagagagggtagctcctttctgcagttagtcatccagttcagttgtctgctcagctctggctgagcccagggttttatgggcctcagaggtgaggaagtgcatgcagattggcccatgggcagtcctgagaaaggcaccagtttccactctggtccatgggactggcagcccagcccccagcccacaggccctccctggcctgagggagggacctt

SEQ ID NO: 20735 - DNA, 1048 bp, Homo sapiens
ctttttttttttttatttgagacggtctcgttctgtcgctcaggctggagtgcagtggcacgatcttggctcactgcaacctccgcctcccgggttcaagtgattcttctgcctcagcctcccgagtagctgggactacaggcacaggccaccacacctggctaatttttgtatttttagtagagatagggtttcgccatgttggccaagctggtcttgaactcctgacctcaagtgatctgcccacctcagcctcccaaagtgttgggattacaggcgtgagccacagtgcccagtcaaaagaaacattattaagcaagaacttaaggcacagggctacaaatagcatgatatatgctgggaaccacaggcagtacagtgctgatgccatgtaaagtgcagaaaataaggctggagaagtaaagataatttcttctgaattttaacatctgcacccttatttttaccttgaatacagttggcttttctttaaagtgactgtgcaaatttgtgattgtagacactgggttcagcactaaataggcatcacaataaccattggaagtagtactattattgttctcaatttacagatgaagaaactgagtctcagggaggtgtctagactcccccagctagaaatggcagagctgggatttgaactttgtcagagtcagaaagcaactactaaattccacccccctgcccttaggtgttaccttctcagtgtcaatcaaagtactgtttgattgattgattgattatttgagacaggatctccatctgtcacccagcctggaatgcagtggtacaaacacagctcactccagcctcaacctcctgggctcaagtgggattcttctgcctcagcctcctatgtacctgggatcacagatgctcacgccaccatgcccagctaattttttttattttttgtagagatggggatctcactttgttgcctaggctggtctcaaactcatgggctcaagcagtcctcccacctcagcctcccaaagtgccgggattacaggcatgagccatatgc

SEQ ID NO: 20736 - DNA, 1046 bp, Homo sapiens
gtgaccggctacaattttcaagtctacaatatattattattgactgtagaaaccatattgtacaatagctcttcataacttactcctcctgtctaatggaaactttgtaccctttgaccatcatctcctccccattctcccaccaatccccaatctggtgtgaattttctgaattgatacctatattgatccagggttaaataaacaaagtataatactataataatattttagttttctgtagtgccctatacttttcagagtggtttttggggtgtgtgtgtttgtgatctaatttaattctcaagtagccccaaaaattatgcaggacaggtaccacagtttaaagacttggctgaaagtgacaaaacttgtgggtgtaataactgcatagaagtaagttccttggctcctggtttatatctctttccatgatgtgataagagaaacagcatatgcggtttctgttccagagacttgactgccagttgagtaaaggtgcaagatatgaggcacaatcaagaactcacactctctttggagatcatttatattgcaaccttgactacctagaacagaatcatctaagtttgtgcaaaccattttaggtgacagctttgtttgaagcctattaactcttactttatacataaatcttataaatgtggatattaagtttccttattcttagattaccaaaagcaacataataatggaaaattacaggtgctgctaaaggcaggttccctatagtgctgggaaaggatagctgttggtttcaccacaagggaaaaggaaaaaaaaaacccacaagtacctggcataataaaaaaattgagcaattcttgcctaattaatatagggacagatagccctctaggacccagtagttcctgagagctactattatacgttcctaatgatgattctgaatcatcataagaaggcttactcttgttttaaatcttgatttaagcgatcaggattgagtgtggtatatttttagatagatgtccatctaagtttcaccaaagttttgacattta

SEQ ID NO: 20737 - DNA, 1033 bp, Homo sapiens
ttggtagtatcaggttgcaaaaaaaggtatttaataaacactgtaccactttccactgtaaaaaaatcatcaggttacccttaatatttgtatgttaactgaggtgtgagctttgatatcctgaaatttgctggcttgtcatttcagtataatttcctgaatttcaaagttttgttgtgtatggttgtggtttcttcttttctgagctttaattgcattttgtgtgatgaaattgacaactatatcttaataagtgattttatttcaaaggttatatatcttgtgttgtttcagagagcagaactgggattcttggttcagggaggcagatttccagtgattgtaaggaagaatttgtaacagtggagtgcactgccttgcaaaatagtgagtgcacattgctggaaatattcaagcaaaggctggagaacattttgcctgggaggtggtataaagaattcctgcagtgggggacttctaagactatttctaatctaagattttgtgatttgagaatacttgtacttcaaagctggtaaaacattttagggtcatctgaagacaagtatcataggaataaatctttaatataatttattcttatgtgtagtactttatgctagtttttggaaagtcattaacataccatcaaaccttcttaattcactccactagtaaactctttggtttgtggttactaggcctgattttgaagaaatcgattgaaagttagtagagtcatgcaaataaactagaaatcagtactatagtaacatttattttccttgggcactgttgaaaatagcttatgctatgataatatatgtatatcaagttgtcatcatactaatttacttgaagtgaatgattagtatacagtaagaccgtgtacacttgatatgacttcattagccaaaacttgagttactttagaatcttgaggtatgttaatagtcacttttgacataggtaattaaattgatcatgtaataagctcagttgttgagcaaaatcactaatatttctatatcta

SEQ ID NO: 20738 - DNA, 1104 bp, Homo sapiens
atcaaaatcccactttctatctgagtggaaatcgttgggcgttcctaaaaagccatcctctatgagaaagacactttaaaaaaataattgactattgcggaaatgtgttcagtgcatttgggagtgtaatgaaagattttccagagcccccgtttgctatgttactttggtaactttgtattttgtcattgtgacaagtgggactaatttgcatgcatactttatagcattcctcctggtcatttatgacaatgaaggttaatttgtaaactaaatcatataggattccttgactgttcaccattctctattttagggttacttataaatagttgttacttgtaggaagttgagtaaatatcttgatagagaaatctgctaaaaaaaagaattaatgaggtttaaaaaatttttgaaaacaggtacatgcaactcccaagtgtgtctctcacactaactagaacatgcaaggacctctctcacatgtattttgccttttgtttctttgtatttaacaatgtgagtgtagtgcttatgcaaaaatattccccaatattttggacattatttatttaaattttaatcagcagtgatttaaatgaattcagaaactggttggttccaccagctcaaaagagatcagttttctaagaagttacttcaaacgcttttttcattattttttaaagttttcttgcctaaatgacaatgtaaacttgtcagcttctgatgtggagaatttatgtttaatcatctcctttttttcctgcatactcttgtgacacatagagaatggactcccactgagagactaagttctgcatgttccatattctttctgaagagctacagctagagccttatttatttggagctgttgagccccttcagtttcttctgaattccttttacaaccaaaagccagttttccccatgatcgtactccctttattttgtactatcattctttttacagctatgaccatgagttagtgtttggtgtctccttgaagaacatgaataaagcggagaggctgacttttggtgagtcacttatgacccacgccatgaccttcactgctgtctcagagaaggtatgaccct

SEQ ID NO: 20739 - DNA, 1078 bp, Homo sapiens
tgcagttttcacatcaccagtgcatccagatcccctctactagaaatatatagcatatagaagagaggtgacatacaggtaaatgtaaggtaaagacgaactaataggcactagtgactttcataaaacactatagttaactagagttttcttcttgttacaaaattatttttgtttaatgtagaatatttgtaaataccaagtaaatatttttcttgtatatttgtcaagttttgtgtgtgtgtgtgtgtttaatagtgtttaatatgcattgataccttatacattgttatgtaagctacctatctttttcacttaccaatatattataaacatattttcatattagtaaaaaggttatacccaatacaagtcaaagtttttccctcagaattttccctcagaaaagagataatttccctgtatttaagaccttaaaagacttttctaatggcgctctcagttaatttattttgaagtagagtacaatttggagaaggcattactctgaaaaatggattctttatttgatacgtaaagagtgtttttgtgttaaagatattaaacctttgcatatatattgctaataataattaccacctttcttgttttgtttttaatctttctgctctttctgatttactctttctgaattgtccagatcgtgtcatgagttcattggtgggaaatacagttggagcagtgcagtctatgtgaaccctcataatttcttgatgtgctttcttgtttcagggcgatgctggatcttttcttgtctgaatgttatgaggcttccattcatgaaaaagttaaatattgaagaatttgagtttagccaatcttacctgtttttttgggacaaggtatgggacagatctggcaagattctttttgtattgatatcagccttggtagggactgcctcttcttttgtagcttttccagttatagcctgccctttcataataggtgagacaccttttattctgacttccagagtatcaaaagttgactctttcaaaggcagaactgtttttggttggtaggtggccatttttttgcaatgaaataagtttac

SEQ ID NO: 20740 - DNA, 1043 bp, Homo sapiens
tctgttcgcaggattgttttaaagtatactgacaaaactttgagactgtaagtgacctgagatatacattatccttacttgagaatagtaatttttcaatacgcgttaaagatcattacacatgagccaagacaaatgagctggcctacttactttgtatataaatgtgtaaactcctcaagaattccaataatgaactccaataaggaaattagttcaacgtctttatggccttggtgacaaatggttacagacaatcagagcatttttttcctatccactaatggtcaagaaaaaagcagacagatcctcactatcttagagaactaagtgagaaagttggtcgatgaagaggacttcatccagagaggaagggatgtagcttacagggaagatgctgcaggaggctgaggaaagtgaggctagagcagtaaaacagatctgacaacctggtgaagataaaaaagtgacctgacaaaaatgaacggagcagagtgccaaatagagggccctttccatgctaatcttgcataatgccctcaaccagccttagcataactgagtttctatttagcttgccatattgtgggggggggtgtggtggcacaatttaagttgcagtaagttgtgtaacaaactcacaatagggccctgcagaaatatatatatatatataaaatatatatatataatatataatatatataaaatatataaaatatatatataatataaatatataaaatatatatagaaatatatataaagatatataatatatacatatatatgtataaatatatatgtgtatatatatataaatatatatatatatatatatatatatatttttttttaggcagggtcttgctctgtcacccaggctggagtgcagtggtgtcatcttggctcactgcaacctctacctcctgggttcaagcgatacccccgcctcagcctccctaatagcggggactacaggaatgtgccatcacacctggtgaagatatatatagatatagatagatatatatctataccta

SEQ ID NO: 20741 - DNA, 1026 bp, Homo sapiens
caagtagctgggaccacctgcatgcacaccacacctggctaattttttatttttttctagagactgggtcttgctatgttgcccaggctggtctcaaattcctgggctcaagcaatcctcttgcctcggcctcccaaagtgctgggattacaggcgtgagccaccgcgcctggcctattaattagatttttatcaggttggaataagttcaagcaattatgcttgtacaatgattttattagataagagataacacttgtgtgatttattatgtcaaaattatgcaggaatatactaaaatcttttgtaatttgtgggactgatcatgataccctgttaatggaatcttttattttattgaacttgaccatggcccctaagagtagtctcccatttccatgttttatttaacgtgtctgtattgaagatatccctcaagagattctaacagttttcaatatctttgctttgaaaaagagtggacagctggttttgaggggtacagtctgagcagtcgaagaaatatagcacttcggaacgattctgaatcatcgggtgttctctactccagagctccgacttatttctgtgggcagacattaacattcaggcaagtagatattaaaacatctcacctgcctcaggaagcagagtgaagtgcatagagcatacataagctttgaattcaaaacatcctgagtttattccgtcatttataggcagtgttactgtgggaaggcttctttatttcctgtagctgtagttttctcatctgtattcacagggttattacgtagattaactgggaaatgtatataaaatgcttgttatttaatatgtttatatctcttttcctcttggtaagtagaggtaagtagagtatctctcaaaagtcaatcttaggctgggcatagtggttcacacctgtaaccccagcactttggtaggccgaggcaggtggatcacctgaggtcgggagttcgagaccaacctgagcaacatggagaaaccccatctctactaaaa

SEQ ID NO: 20742 - DNA, 1035 bp, Homo sapiens
gcgtggcagcgcatgcctgtagtcctagctactcgggaggctgaggcaggagaattgcttgaacccgggaggcggaggttgcagttagccgagattgcaccactgcactccagcctgggtgacagagtgagactccctctcaaaaaaaagaaaagaataaaataggtgagagttctttcctttgggattcagagcccagtgagagagagatacatgctaagagatcaagaccttattggagcatagaggaggaagttcttaactttgtctggaatagtgtgggatagctttctgtaggaagagttccacagaggcttgaagcaattcatccagcagacataggaaaaagaggaggtaacagcatgattccaagcagaagtaacattatcataagtggagtgaatggcatattcaaggattagttgaagcattttaagcagcagagtgacaggatcagatgtgcatttaaaaaaaaaatgaccctgcctatttggagactatgttagagattgtaagactagagggaaaagagactgattaaaaagttattagaggccgaggccaggctaacacctataaccccagcactttgggatgtcaagatgggaggatcacttgaggtcaggagtttgagactaacctggccaacatggtaaaaccccatctctactaaaaatacaaaatttagccagacgtggtggtgggcacctgtaattccagttactcgggaggctgaggcaggagaatcacttgaacctgggagacaaaggttgcagtcagccaagatcacaacactacactccagcctgggcaacagagtgagactccgtctcaaaataaaaaaaaattattagaaactgggcacggtggttcatgcttgtaatcccagcactttgggaggctgaggcgggtggatcacttgagcccaggagttcaagaccagcctgggcaagataatgagaccccatctcaaaaaaaaagttattagaaagtaatccaggtaggaatggtaaaggcggtggctggtaaagatga

SEQ ID NO: 20743 - DNA, 1099 bp, Homo sapiens
tctgttgcccagctggagtgcagtggcgcaatcttggatccctgcaacctccatctcccaggttcaagcaattctcctgcctcagcctcgcaagtagctgggattacaggcccgcactaccacgtccagctaatttttgtatttttagtagatacagggtttcactacgttggccaggctggtcttgaactcctgacttcaaatgatctgccctcctcggcctcccaaagtgctgggattacaggcatgaggcactgcgcccggctgaaataactattattatgctcatttgacaaataagaaaattgaggcatagaatacttaattaacttaaccaaattgacatagtttgtgaatgatgaaaccaagatttggcttattctatctgacttgaagggcagttctgtgtacttctgtctgtttgtgcaaatgaatcacatttggtttatcaatgaatggaagatgtatatatacaatggaatgccattcaaccttaaaagagaaggaaattctgtcatttgtgacagcatggatgaacctgaaggacactatgctaagtgaaataagccagatacagaaataaacatactgcacgatctcatatgtagaatctaaaaaggtcgaagtcatagaagcagaaagtagaatggtgcttgccagggatggagttggggatggggagatgttggtcaaagggtacagagtttcagttatttaatatgtgtaaattctagagagctcaagtacaggatagggacaatagttaataatagtgtaatgtatacttggaatgtgttaggagagatcataagtgttctcaccacacacagaggtaaccatgtgaagagatggacatgttaattagcttaactatagttaacagttcactatgtatatgtgtatcaaaatatcacaccttaaatataatttcagttaatcttttttttactaaattgaagaagatggttatacagtgcttttagattcatgtgaattatacctttggattagccttttttaaagattctgattttgagtattttgttatttctttttagatcaaagaaagtgcatcacagacaagggatgttctcaaaca

SEQ ID NO: 20744 - DNA, 1044 bp, Homo sapiens
tttaagaagagaaactggccccagccaagtgctgtggctcatgcctgtaatcccagcactttgggaggctgaggcaggcggatcacaaggtcaggagatcgggaccatcctggctaactcagtgaaaccctgtctctactaaaaatgcaaaaaattagctgggtgtggtggtacacgcctgtagacccaattacttgggaggctgaggcaggagaatcccttgaacccaggaggcagaggttgcagcaaaccgagatcgtgccactgcactccagcctgggtgacagagccagattccatctcaaaaaaaaaaaaaaaaaaaaagaaaagaagagaaattatgctgtacttattttgttattttgtgtcttctaaagtttcttgctgtaacaatttatatctagtggtatatcaaaaagttattaactaatttgttacaccaggatattttccatgtgttatgtattatatttacttttgagaaatggttaaagctatgggcttacactgaatagaatatataggcatatctactttgaaaaagaataatatgaagctgggtgaggtggctcatgcctataatcccagcactttgggagcccaagaggggcggatcacttgagcccaggagttcaataccaggctgggcaacatagtgagatccccgtctctacaaaaaattaaaaaagttagctgtggtggtgcacgcctgtggttccagctactcaggaggctcagggcggaagacggctcgagtccaggagattaagctggagtgagccatgctgcactgccactgcactccagcctgggcaacagaatgagacactgtctcaaaaaaaaaaaaaaaaaaaaagaaagaaaagaaaagaaaaaagaaaaagaatacgttaaaatgttaaactcattagaagaaaaaactgataaggataaatattacataatttcaccttggtttccttgaaatatttgtgtatttaccagaataggatctgtaactacaaaaccgtgactatggagcatggaaaccaaactaaaacttct

SEQ ID NO: 20745 - DNA, 1051 bp, Homo sapiens
tctggaaaaaacaggactttccattcagaactcatctctgtttccaatactgttacattttcatatcatggaagccatgctgtatgccttattaaataaaacttttgcccaggatgggcagcatcaggtgctgagcatgaatcgaaatgcagtggggaagcattttgaactgatgattggtgactcccggactagtggaaaagagctagtgaagcagtttctcttcgattctatactgaaggcggatcctcgggtgttcttcccatcagataaaatagttcactacagacagatgtttttatctactgaactacaaagagtagaagagctttatgattcattattacaagctattgccttctatgaattagcagtgtttgactctcagccttagaattctgaggttaacgtgctaaagtataattattagctctaacgtaacaccaactgttgtgaacatccatgttattggaaaagaacacattttcagtgtattttagatgtttaaattctgacttttggctattaaatggtttacacaataagccaagaccaaatcaataaacattttatgagattctgtgcctctcaggttaatgtgttaaacagtaacatggggcttggtgcagtggcttatgccgataatcccagcactgtgggaggctgaggcaggaggactgcttgtgcccaggagctcaagagcagcctgggcaacatagcaagaccacataatttttaaacatttttcattaaaaaaaagaaacagtaagatgccaaattgacaaaacaagaaacaaagttatctccctttaaaagcaaatactatctatactaaacatttgcattattatcatattgttaaaatagggaataatggttttcctaggtggtacttattataagaataaagctggccacgcatggtggctcacgcctgtaatcccagcactttgggaggctgaggcgggtggatcacctgaagtcaggagttttgagactggcctgaccaaagtggagaaaccctgtctctactaaaaaaaaaatacagaat

SEQ ID NO: 20746 - DNA, 1101 bp, Homo sapiens
gaacttgaagctttccgattgcttcgtggaagaaggtccatcaatatcgtagagcacagagaaaactttgggccatttcagaatttagagagtttaatgaatgtgcccttgtttaagtataaaagtacagttcaagtttgtaactccatactttgtccaaagactggacgggaaaaaagaaagtcaccggaaaaccggttcctgagaaagctcctcaaaccagacatagaaagagaaagacttaaggtatattcttcatgtctgctatactgcctaatatttgagaacctactctagaaagcactcttctgggcattgggttgggaagtggctaagacagggttcttcaggtttagttggcaagtatatgatcactaccaaataatgagatgtacagatagtaaattggcagttgagaggagagaaaacaatgggctgtgactgttgtggaaagtttactggaagaactcaatttaggtcttaaaagagagatcctttggatgggagaggagggcattgtaggtagaaagaacagttgatgctgagaagcaggtctaggcaaggcttatttaagaggagtgtcgttggagataccaggctgtgtctaagggtgatgttaggattaatgagaaattaaggagcaaagataggttatggccagtgagtgactttagaacattataccagtctttccggcagaatttaaaattattttctgtaccttttctcctttaaaaagcattttatcttgaatcatgcaagtctataggtaagattaaaaaaaaaaaaaaaaagcggctggctcacacctgtaatcccagcactttgggaggccaaagcgggcggatcacaaggtcaagagatccagacaatcctggccaatgtggtgaaagcccatctctactaaaaatacaaaatttagctgggcatggtggcgtgggcctgtagtcccagctactcgggaggctgaggcaggagaatctcttgaacctgggaggcagaggttgcagtgagctgacatcacgccagtgcactccagcctggctacagagcaagactctgtctcaaaaaaaaaaaaaaaacaccattctaaaagcaatt

SEQ ID NO: 20747 - DNA, 1043 bp, Homo sapiens
cctcccacctcagcctcttgagtagctgggactgcaggtgcacaccaccatgcctggttaatttaaatttttttttgtagagactggtcttgctatgttgccagggctggtctcttaaacagttgggctcaaacaatcctcctacctcaacctcccaaagtgctggtattataggcatgagccattgtgcctggccagagtttttaaaaacatattcagaatattaatatcttgtttctcatttgttgcaaataattttacccccagccttgtttgtggtgattttttttttttgagacagagtcttgctctgtggtccaggctggagtgcagtggtgtggtcttactgcaacctctgcctcctaggttcaaacagttctccctgccaaagcctcccaagtagctgggattataggcaccttttgtggcgatttttgatgcccagaggtattttgtgtgtgtatgtgtgatgtctgtttttaaaatgctttggaagctcttcctggtgctgagaacaactctttttccccaagcagttaattttgccaacactatttgggcagttatgtttctctctgctgatttgtgatgttacctttattatatattaaatttctatgagtattagagtctactttagaacatttttattttaagcttttgtactgttttctttttctttctggttttttttttttttagaccaagtctcactctgtcgcccaggctggagtgctgtggggcaatctctgctcactgcaccctccacctcccgggctcaagtgattctcctgcctcagcctcccgagtagctgggattatgggtgtgtgccaccacgcctggctaatttttgtatttttagtagagatggggtttcaccatgttggccaggatagccttgaactgacctcaagtgatctgcctgcctcggcctcccaaagtgctggaattacaggagtgagccaccgcggccagcccctgttttcttgtcatttgttttaaaataagaaaaaaattcctctttttcctgtcccttaagtcc

SEQ ID NO: 20748 - DNA, 1026 bp, Homo sapiens
caaaacaacaacaacaacaaaaacaaaaaacccaaaacaaaacaaacataatagctgtattgaaggcagccagcatacatgtgaaaaaatgttcaagatgactaacttttagagaaatgcaaatcaaaaccacaatgagataccatctcactagtcagaatggctattaaaaagtcataaaattatagatattggcaaggctgcagggtaaaccttatatactgttggtgggaatgtaaattagttcagccactgtggaaatcagctggagatttctggaagaacttaaaacagatctgccatttatctcagcaatcccattactagatatatacccaaaggaaaacaaataattctaccaaaaagacatgtactcgtatgttcatcacagcactattcacaatagtaaggacatggaatcaacctaggtgcttatcaacagttgattggaaaaaaaacaatgtggtaaatatactctatggaatactatgcagccataaagaacaacaaaatcatgttcttggcagtagcgtggatacagctggaggtcattgtcctcagcaagttatcacaggaacagaaaaccaaataccacatgttctcacttgcaattatagctaaacattgggtacacgtggatataaagacagaaatagtagacactacaggatagggggaaggagggtaggaggaatggaggaaagggctgaaaagctacctatcgattactgtgctccttacccaggtaacagggtcagtctatcccaaacctcagtgtcacgcaatatacacacataacaaacctgcacatgtactcccctgaatctaaaataaaagttgaaattaaaacaatacatggctgatgggccaggcactgtggctcacacctgtaatcccagtgctttaggaggctgaggtgggagaattgcttgagtccaggagtttgaggctgcagtgagctatgattgtgccaccacactccagcctgggcaacagagggagagcctgtctcaaaaaataaaaaaa

SEQ ID NO: 20749 - DNA, 1017 bp, Homo sapiens
tgcccaccaccatgcccagctaatttttgtatttttagtagagacagggttttgccatgttggccaggctggtcttgaactcctggcctcaagtgatccgcctgcctccgtctttaaagtgctgggattgcaaatgtgcgccaccatgcctcgcttttgctgctcatttgtacgtacctctgggacatgaatgaagatcagatagttcagcctagattaattagttcttgtgttgtgggtcttagacagcagagacatgacctgggtagctgtgggtctaactgtgtgggctgttaattacttacttaactaaaagatgattgatgataactacatgaaatatttcccaatagaaaggaactaaaattcacagaagagtgttgctctgagtgacttggtcagaaggctggctgtgttctggagtgccattcctgctgggcaatgagaattctgtcacaatgaggactgtttgggaatgaatccctattttacatgttgattatcttaggaggaacctgcctttttaactagttttcagagcataggactaaactgtcattttatagcataaaaaaattgatacataatattttacatatttatagggtacatgcgatgttttgttatatgctgttctctaactaacattttttaaactgggagtaggtttgtctgccattgtggatttcctgggcagagtggagtgaaggtgccaaaagccaagaagacactgaggcagtctttaaggtataggctccgtgttccaagtcttgtggtgtggggaatggcagaaggttccctggttggtcagctctagtgttgcaggtgcgcctaaagcactatggagtggcctcaggtggttctgggaaaatctgttttggtatctataagttttctcacatagcttctttcttttttcttttaaattgtagaaagctctcttagctgtcataggtgccgactcagtaaccctgaagaataagtacctggattgggcttatcgaagtggtggctaca

SEQ ID NO: 20750 - DNA, 1074 bp, Homo sapiens
agaggtcaggagtttgagaccagcttgaccaacatggtgaaaccccgtctctactaaaaatacaaaattagttgggcgtggtagtgcatgcctgtaatcccagctacttgggaggctgagccaggagactcgcttgaacctgggaggcggaggttgcagtgagccaagatcccacaattgcactccagcctgggtgacaagcaaaactccatctcaaaaaaaaaaaaaaattaatatcatattacgttaaaaaaaaatttcctggcccagtgtagtagctcacactttgggatcccagtactttgggaggccaaggcaggtggatcccttgagctcaggggtttgagaccaccctaggcaacacggtgaaaccctgtctctacaaaaaataagctaggtgtggtggtgcatgcctgtggtcctacctactctggaggctgaggtgggaagatcacctgagtctgggaggttgaggctggagtgaactgtgatcctgccactccactcctgtctgggtcacagagtgagaccgtgtctcagaaaaaaagtatcttcctgattgagttctttgattcacttactgggggaaatagtttattcaataaaaaaaaaaaatctagccaggcacggtggcttaagcctgtaatcccggcactttgggaggccgagatgcatggatcacctgaggtcgagagtttgagaccagcctgaccaacatggagaaaccacgtttctactaaaaatacaaaattagtcgggcgtggtggcgcatacctgtaatcccagctactcgggaggctgaggcaggagaatcacttgaagccgggaggtggaggttgcagtgagccaagattgtgccattgcactccagcctgggaaacaagagcaaaattccatctcaaaaaaaaaaaaaaaatctaaagcttatataaaattctaaattctattttcctggcatttatccataaaatgagagttatactcatatgtttatagttgagtgctggtaattttattctttttatttctttattatatttttatttatttatgtttttaattatagagatgagg

SEQ ID NO: 20751 - DNA, 1095 bp, Homo sapiens
taaaccaaagctgacttaacctgtgcttccttcttaatcaccttagtgtgttaagccctcgcccccaactctgtcctcccctccccaataacacaaatccaattatgttctgagtgcatgaatcatttagtaaagggggccccagcctgcccacaaaaagaggtctctgtaatggatggtcagtgcattttattgaatcagcacagtacaaaaataaataaaaataagggaaggggaattaaattacagccaaactgagcttcatgactttgtcagattataaaccacacatactcacaaacacactacacatacatacaaaatgagacaaatataaattaatattaacaatacccacagtttggtcaaagaatagctacagaagaaattgcactaaaaaaccaacatacatcacacgtgtgtaattagcagtttcaaatatacagctatgaataattctgagtgaaaaaaatggcacattttcttttcattgcaagtttaactgttggaacaaaactaagttctaataactgcatggaaagaatatatcaaccctccaggtttacaagaaaaagagaaaaaccaaatcctgaactattattcctgtggcttgttctgtgcatgggtgtaattttcacagccatctgttctaagattatttttcttaagacacaaaatgctcctggtttgcatgcacaatatcaccgtaaaagcaacaattaaagaataaaggtttttttgtaggtttttttttattgttgatctaaaagtagtcttcatagcagcatggcaaatgggttctttgcttgcacactcaagtatatcagttgttcctttacacaatactgatgaccagtgcaaggggagagaacacgacaggcttcacactgagggaactagagagttcttcccttagtccccaccacttccgaaatgtccacctcctccgaagaataaaaaaataaatacggagaaagagaaggaaacagacacgcaactggaatcctgtggatgcaacgtaactgcacagttcgcagccaggttccgccagctgagggtgatacacacatgcgccctcctcctgagacttggcac

SEQ ID NO: 20752 - DNA, 1057 bp, Homo sapiens
ttgaacttctgacttcatgattcccccacctcggcctcccaaagtgcggggattacaggcgtgagccaccgcgcctggcctaatttttttatttttagtagagaagagttttcaccatgttagtcaggctggtcttgaactcctgacttcatgatctgcctgccttggcctcccaaagtgctgagattatgggcgtgcgccaccgcacctggccctgagatttatttatttaatccaggttggctggctagggttctatggaccaagaagtactcaccacccacatctcagcaaattaatgttttcccgaaacattttaaattattgatcatgaatttcactagcatctatatttaaatattccttgacgctatggctactaaacacaggagcaatttgtatgaggaactgaaaattcctccttaacctcctcactgttcttttcagtttgttcctgattatgcgggaatttacaggccttcatcacatgaagtctgcctctacagaaagactgctttactcttcactatcatagcactcatgagtgctatgagagacaatatgcgttttttgagccttctcttccctattttaggtgtgtttctaaggagtaggttggttgtcatggttcaggatggaagaatactggagtaggcagcggagggaggcaggccatctggccctgagggaggggtctttaggaaatcagtagacagcctgctggccagaagattttagatgtgttcttgcttaaagctgaactcaaggtcggatcttttctcaaggcccagttctagacttctaaccttccaaactgaggtctgatcttttgggtaagccaatggaaacattgtgtgttatctctagattttgctgaacaaaggggcgcgattccccgccctatgttctcagcagctgagtcctaccattccctgattgatttccaccccctgccattcccaataccgcctgcaaagaagatgaactttgtcagtcacctttgaatatggtgcagtttgaattctggaatgcaggaataacagcagttcacgcgtat

SEQ ID NO: 20753 - DNA, 1052 bp, Homo sapiens
tggatagggaggggaaggaagtaggaattacaaagcagcacaagaaacctttggggagtaatggatagtttgagtgcagtgatggtttcacaggtataatatatatttcaaaacctgtcaaattgtataccttaaatatgtggagtttattgtatgtcagtgatgccttaataaagcatgccttaataaaagtgactagaatctggagtatagggagggatgttcaggtgagacagggccatgaattgtgtatagaagaaaacagcacgaacaaatacataaaggaactatttgaaaatacattgggctggacgtggttgcccatgcctgtagtcccagcactttgggagaccaaggcaggaggatcacttgagtccagcagtttgagatcagcctgagcaacatggtgagaccctgtctctacaaaaaaatttaaaaattacctgggtatagtggcacacacctgtagtcccagctactcaggctgaggcagggaaggattgcttcagcccaggaggctgaggctgtagtgagctgtgaccattccaccgcactctcgcctgggtgacagagcaagaccctatctcaaaaaaagaaaaagggaaaagaaaataaaaaataaaaaacattgccactgttctgaaaacagtgagtagtccagagtggcaagatcagagattgtgttgagaggagtggcaagaactaccagaaaggtatgtagatatgaccagattgtcaaggaacttgaagggaatgtaaatgagtctgaagttacgccaaagcaggaggaagtcatcaaggaaacatgtagagtgaaaaggggccaggatggacccctaggcaattcctacatgtaataaatgggaggtcaaaaggcaggaggagacttaggggaagtactctcccagaaagaagacaacaaggtcaaatgcctccgcattaaaggagacctagccctagagcagtccctttgatttggtgacctttgaaagcaccttttgtaaaagcattgagggtaaaagccaaattgcatgctaaaattaataaaaaga

SEQ ID NO: 20754 - DNA, 1031 bp, Homo sapiens
aggttgaaagctgagataggccaaaagctgggcctcttaaattaaacagcccagttgtgaatgcaaaggaaaagttcttgaaggaaattaaaagtgctactgcagtgaatacatgaataataagaaagtgaaacagtcttattgctgatacggagaaagtttgagtggtctggataaaagatcaaaccagccacaacattcccttaaaccaaagcctaatgcagagcaaggccctaaactctcttaaattctttgaaggctgagagaggtgaggaagctgcagacgaaaagtggaagctaacagaggttggttcatgagaattaagaaaagaagacatctccataacataaaagtgcaaggtgaagcagcaagtgatgatggagaagctgtggcaagttattcagaagatctagctaagataattgattaaggtggctacacgaaacaacagatttttcaatgcagacaaaatagccttacactggaagaagatgccatctaggacttccgtagctagagaggagaaggtcaatgcctagcttcagaggacaggctgactcttttgttaggagctaatgcagctagtgtctttaagttgaagccagtgctcactgactgttccaaaaatcccagggcccttaaaattacacaaaatctactctgcctgtgctctataaatgaaacacaaggcctggattacagcacatctgtttatagcatagtttgctgaatattttaagcccactgttgagacctgctgctcagaaaaaaaagattcctttcaaaacattactatgcattgacagtacatctagttatccaagagcactgacggaaatgtacaaggcttgattaatgttgttcccatgcctacaaacacagcatctattgtgcagcccgtggataaaggagtaatttcaactttcaagcctgattatttaagaaacacatttcatggccaggcacagtggctcacgcctataatcccaacacttttggaggccgaggtgggctgatcacctgaggtcag

SEQ ID NO: 20755 - DNA, 1042 bp, Homo sapiens
cgaggtcagcagatcgagaccatcctgggtaacacagtgaaaccccgtctctactaaaaatacaaaaaattagctgggcttggtggcgggcacctgtagtcccagctactcaggaggctgaggcaggagaatggcgtgaacctgggaggcggagcttgctgtgagccaagatcccgccacttcactccaacctgggcaacagaaggagactctgtctcaaaaaaaaaaaaaaaaaaaaaagtttagaatgtaaggaaaagacataaagaaggcatctctgcaataaatgtctataactcaaataagcaagcttattttcctgctaatatttatagcaaagtatagaaaattaaaggaattttaatttgttactcttaatttggataccagtactaatgaatgcaagagtttttgcctgggagattgaagtattttatctctatctgggtgcttatttagcaaattctgatctattaagtgccttctacaagtgacagaaatacgtgaacctggatgtagatttcatcagttgctttcttttcctagctagcatatgcatgctgaggtacatttctaggcgtatgtcctctatctttaatgtatgtaaggatttttaatttctttaaaatttataaatgtgaagagaagactatcaagatgctaggaattttttggtggattttttttttttaattcttggtgtttctatcttatgaattaagagtgaagtggaaatgagagataaaatctttcctcccagaccccagaaaagtcaggcttgaaattttgacttagagttttagtcatcaacttactatttactttttgggaaaaggttaatttgattttttctagctattttcctttattgtcaactatcgtatcattgccatgacattgaaattcacattgtattttataagcatgatgttgtggcacataatcttatttgtccctgagttaattatggaaatccaaaggttcgggagggaattaacttcagaccaattctttatcttccagataatttccctaaagtaca

SEQ ID NO: 20756 - DNA, 1063 bp, Homo sapiens
tttttagggatggtgtctcgttatgttgtccaggctggattcaaactccagggctcaaatgatcatcctgtatcagcctcccaagtagctgggactacaggcacatgccaccatgcccagctccaaaatgtattttttaattcattcttttgagaatgatccaaatagttttccatgcattttctctttgcagttgactggtctgagtgtctccaatggaaaggaccaacttgtagtgttccatacgaaagacaacaaagacctcattgtctgcctcttcagcaaacagccaacccatgagagtcgaattggagaacttgttggagtgctggtgaatcatttcaagaggtaaagtttgatttttgtaactaagacacgttttaaatctatgaaatctttaatcgtaattatcactgagcttgttttgtgccaattttaatgtattgagctatttttctccataaggacaacttaaatcatctgtttcgcagaaggtaaaattagcatcccagcttactttcaaggttaggaatgatcctctacttttccagcctccagctgaaccaacaatgagagatttccctaaatggtgatttttattccactgtcgatccaaatgcaattaaatccaaaagatagacaaattactttatattcttctcgtcatagcttctcatttaccccaagtataatcagtttgtgtgtccactatgaccataagcaaattagaaggcagatttgggatggtttgcaagtccatgaagactacaagaattcctgagagaggcagtgaccactgcagaaacatggagtcatgatggaacatggcataatctgagaacttcatagtaagccctgatgatacctggggcaggggggtgaacaatgatataataaatataaacagagagcaggtcctgagagtgatggggaccagtgaatggataattttaagcaggggagtgattttgtctggttatttattggagttgtttcagagattggatttctcttcccataaggggtcatggagtatttgggtgggtgtatctctccaaagtca

SEQ ID NO: 20757 - DNA, 1035 bp, Homo sapiens
atttatttggttatttcagtgggaattttccattttagttaaatctcattctatggaaacaagtttgagaacagccggccttgattattcgtctgatcaaaaggaagttctctgtttgcttccaacctccgtacttcaagctcctgtggcagaagagaggatataagcatcgtgcagggctagggtgccgccaagcgcataagagaacttgtacctgttttttcccaatcaggaacaggttatttttggtttaagctttcagttgcttagccaaaaaattttggagtcatccttaaatcctctctggcccccacatctaatccattgtcaaattctgtttgttcttccttcagaaatatgcagaaccaacacttacctccacctccacctccacctccctgatccaagccaccttactctagcatgtgtgtttcggaaatagccatctaacaggtcttcctgttcccagcctatagcaaccacaatgacccttttaaagcatgagtcaggtcatgtcccatctttgttccaaaccttccgatggcttctcatctcattcagaggaaaggccaaagtcctcatcatggtctcatggctttgtggattctgaccctgactctcccagctccttacactgctcctctgacgcaccaagcaagctcacatcccggagcctttgcacttgctgtgttctcttctcttcctagaacactctggtgcaggtctccgtatgaccagctccctcacggcctgtaggtctctgctcatctatccttatcagtggtgcctgcccagaccaccctatataaaccaccctatataaaccacacccactctgcattccttccatcttccacactcccggtcctccttgccttaccttcaccatcctacatactatatgtctactcatatatttgctatctgtcacttctctccagaagacaagcagctagcagaaaggacctttgttttgcttattactgtgcccccactgcctacaacagcactgggagtttagcaggcacctagaaa

SEQ ID NO: 20758 - DNA, 1019 bp, Homo sapiens
ccaagcaaatggaaaacaaaaaaaggcaggggttgcaatcctagtctctgataaaacagactttaaaccaacaaagatcaaaagagacaaagaaggccattacataatggtaaagggatcaattcaacaagaagagctaactatcctaaatatatatgcacccaatacaggagcacccagattcataaagcaagtcctgagtgacctacaaggagacttagactcccacacattaataatgggagactttaacaccccactgtcaacattagacagatcaacgagacagaaagtcaacaaggatacccaggaattgaactcagctctgcaccaagcggacctaatagacatctacagaactctccaacccaaatcaacagaatatacatttttttcagcaccacaccacacctattccaaaattgaccacatagttggaagtaaagctctcctcagcaaatgtaaaagaacaggaattataacaaacttctctcagaccacagtgcaatcaaactagaactcaggattaagaatcccactcaaagccgctcaactacatggaaactgaacaacctgctcctgaatgactactgggtacataacgaaatgaaggcagaaataaagatgttctttgaaaccaacgagaacaaagacacaacataccagaatctctgggatgcattcaaagcagtgtgtagagggaaatttatagcactaaatgcccacaagagaaagcaggaaagatccaaaattgacaccctaacatcacaattaaaagaactagaaaagcaagagcaagcacattcaaaagctagcagaaggcaagaaataactaaaatcagagcagaactgaaggaaatagagacataaaaaacccttcgaaaaatcaatgaatccaggagctggttttttgaaaagagcaacaaaattgatagaccactagcaagactaataaagaaaaaaagagagaagaatcaaatagacacaataaaaaatgataaaggggatatcaccaccaa

SEQ ID NO: 20759 - DNA, 1027 bp, Homo sapiens
tggtctttactgaatgtgtatcacttttgcaccattatgaagtcaaaaaaatcaaaccatcataagttagggatcatctgcacaagacattcctgccttttggtcactgttgatttgtccaaggatgggcatctgactcaagctggaccaaccacagttcttccccaggactttatatttgaaatgaaatcatctttctctctgttttggtggctgaaattcagaatgtgtatgttttggaattgttgggagtcaagttctgagggttgaagagtagaaaagagtagagaagaatgaggggaaagaaagacgagagagtaagagagggagagaataagaatgaattatagccaaaaggcaaaaacatttccttagttctttacaagcagtgattcctaaccttttttatgtcatgacacacatagcaaatggtaatataaatactgcccattgaaggagatggacaaggctgtgcttatggctggcggacacacctgtaatctgaacccaggtaaaaagctgtactctgcagtgttctgagaggtcatacttgtaaatcactcccacgttgagaaaagctctgttccagaatctggttctaattatcttggtcctaacccttgggtcgtatgagatacccttgcaaccttcctttagatgccatttcctccaggctgcttcctgaactccccagatcctctccagtgtgcgccagtaacaccctgggctttttgttgtaattatctaattatttatctgtataatctgttgtatatgaaccccaggaggataagaactacatctctcttttcatctttatagccctagtgcctccagtggggtaaacatctcctgaatgaaggaattatgctctgcccacataaaaagatggaacaagaaaattgtaattgaaacaagatcttttgtgtaaatattctttctttctaaaaggagacggctttgaatggcagccctggaaaggaaagtgaatgagaactatgtctttttggcattatgtgtctggtag

SEQ ID NO: 20760 - DNA, 1022 bp, Homo sapiens
ttcccttggttttgcccttcttgtgctggtttcatcctcagctggtggaaggtcgttgcaacagttctgtgcatctcacccaggcacagtaatgtcctgaggaaggagagtgagctctctgcttgtgttgtgctccttgcttaggaagccccccagaagacttccttacatgtcacattagttagcatttggtcacatgcccattattaaacctgccactggtaagaggaatgtggttatcatgatggaatagtcaggcgctgatgatagatttctcatttcctgcagcatgtggctgtatggaagggagtggatacctgaacaaagtcaggcttttttaggaaagaaggaattttaggggcagaataggatattggataggcaaccaaaagtgcctcctctacacagttttacaagctatgtagacagaataggatttattcagaaaagaatgctcaatatgttgagggtacttgaaaccatgtcatttaaggaatgactgaaggaacaagacaggacatgaacaccaacctcaaatacttgcgtatgaattgattatgtttattctgggagaccccaaaagacagaattcatgccagtgggtaaaagtgaagagatgtagatttatctttctgctccttttcttcctcttcttctcttcctcctgaagaatttggtcctaaagccattgggttggggcacagcaaggtaggcatccatcccaggggaaggggagccacaggggcccagattagagtttggagccaagttgagtaaagagggggccaatgcatgaggacctgagtatggaaaaagagcatccgtgctggcatggtcttggtgacagcagtgggagataagtgataaacagggagattgacaaacaagtaaatatgttgaggataatggagtcaggtttctcatggtcataaaagagagctccaaatatggaaaggggaaaagtacagtcaaccctttgtagttagattggaatcagaagttttcaatatacagctagacag

SEQ ID NO: 20761 - DNA, 1707 bp, Homo sapiens
attgctttgctgtgtttggctggaaaggcaagtaggccaaactgagttctaagtaggtaaggtgctactctaaaacatattactgcccttggtatttgaattgtttgtgtggttgaacaaaccaaacatgatgagtgcatttttccacacagtgtgcaatttatgactgcttgttgacttgtggtaggcagctgctattggcagaatctgttactgtttgcatctccacctctcaggttcctattttatctgaaactcttactgaaaagaaacctcttcttcaacttcttgatttaccctaggctggggttcccaaatccagctttgtgtcatgatcacccagcttttaaaatacgcagattccccggactctgtcttctggagatggtgatttattaagcctccttagtgcccaggtgagtctcatatgcagccaggctcggagccactgtcctaggctaacgtttttcactccacagttgtgttctattaaaactaaatggactatcactgtaatgtgagctgactgacatattaacaaatgtattacaacttatccaaatagtcagtgttcttagttctgttttggttattaaatcaatttaatcgttgataatcacactttattctttatccttacaacaagttttccattttttcacccgatggttatggttatccagttttagctacaatgtatgtatttttctgtcctcagattatccataaaaactgtataatcccaccctccttgttaataccttgatttatttcctttacagtcttttctagacatataaaaaatgtacatattcaaaactttggcatcttcctgcttatacaacatatagttttgtaaactgttttctcacatagcatggtatcttaaatgcttttccatgccattaaggtgcctttgaaagtatggtggcagccacgttgtctttattcttttctggatatgcaggagcaacccagatagacacggttcttgttctcatagaactgataaaccagcaaggggaatatactaaaccagtaaacaaacaaaaggataactacaaatagtaataagtgctatgaagagaaagagcagagttcccccataggggaaatggaaatgacgtgtccaagtatgtgggtgtgtcacagggaaggcactttatggggaagatagctttaagcaagatcagaaggatgcggaatatgtgcctgttgggggagaggtggggagcgggggaacaatcagatagggaagagagagaagacagagacataacttttattgattatttatttattgagacaaggtctggctctattgcccaggctggagtgcagtggcacaatctcagctcactgcaacctccacctcctgggctcaagctattctcctatctcagcctcccgagtagcggggactacaggcgtgtaccactatgcccagctaatttttatattttttgtagagacggggttttgccatgttgcccaggctggtctcaaacttgtgagctcaggtgatccacacctgccttggcctcccagtgttggaattacaggtgtgaaccgtggcacctggccgagacatatttttagataggctcagtttctgaaactgaaaggtatccagtgaggctagagtctttgggcagagtggggcaggcaaagtaggggcaggtgaagatggagcactcatcagggacc

SEQ ID NO: 20762 - DNA, 1030 bp, Homo sapiens
atttttttttttttttgtatttttagtagagatggggttttgctatgttggtcaggctggtctcaaactcctgagctcaagtgatccgcccgcctcagcctcccaaagttttgagattacaggcatgagccaccgaacccagccaagatctcttgaatagaacaatgttttccaaactttagttttgagcatttgtgggaaaagagaatcaaaagtatgcttccaatagggaatcatggaaagagcacaggctctgagacgtaaatgaccaagttcaaatctcagcttcagctgagcatacttctcttaccataggcttccctaagcctcatttccttatatgtaaaatgatcgccttttagggttattgagatgaaatcacatgttcagcaagtgcctggtatataattctcactcaactaatgctaactcttcctgaatccttcccgaatggcctcacctccctaccctgaccccataactgctagagagctagatattttcatctcttccttgtcatttcttcctccctcactaagacaaagttttgtcttttttgtttgttttgattttgtttggggggcaaggatgaaagtttgcaatggcgcaaactagggaattcagattacctagcagagagtgcaagaacacgaaatagacaaatctggaccttaatcttgtctttgttcctttactaccacctgtgtgactttggacaagtgacttagcttctttgagcctcagttttttcatctataaagatgatgtgttcttgtgaaattatagcacatttaaaatatgtgtcaaatacctatggtggtggctgaagcatagtagatactcagtgggtacccctctgtctctgctccattccctggtccagccctgtgaaccaaaaatgcccttgctattcccaattcactctgtaactatcaccctatgcattctcataatcacattccctccaggtatcactatttaatttctagaaatcgttttagactctttggaaaatgaaatatattcatat

SEQ ID NO: 20763 - DNA, 1086 bp, Homo sapiens
ttcaagaccagatgtgagaaatctttcccaatcccccaaaacaggtcaatgtcacattctcatgtgctctcaggatacatggacatttattcataacagagaatttatcatattcatattcctcaccaacctatggaatcctcaaaggcagatagcctgttcagaggtagatccaggttttctggtgctttgaacctcataatgcttgggggcaaccacctttaagaaaaagaatgtaaatcatgaatgcagaataaaatgcaaggctttggaaggggaaggtgcaagtgagtggctgtgaagcaaacctacctttaatccttttgcgttttctgtgatgctacagaatttgcccttccccatgtttaatacatcttaaaatgaattaactgagtactcaaatgttggctgattggtcttcaaccaatggaattatttcttttttttctttctttttttttttttttagcagacaatcttctcaaaatactgtactttaatagaacttaactgtgtgttggggcagtgagttatagattagaagaaaggcaggaaacagacacacacatactcaccacaccacccctgtattctttctctgtggctgtttggtcatttggaaaatttggtgggacaaagggtgtctcttgcttgccagggaaaaaaacccatagataccctgggtggtcttcaagtaaatgtaaacctgccattggttcagggctctagttagaaatagctctagttagatttataggagaggtgaatggcacactaaatctttttggcttccatgtgaaattctttggcaacctcttttgaaggcctttggaaaaggacagtttgctctctgcctgttttgtacattggcttcatattgggacaaaaatgggaatttgggttttggagctgccatttggagtgaatcaccctgccgcctggtttcctttcctactccgtgacagatttccgagactatttttattcagggtcatttcttgaccctggagacttctgctgaatttagttcccaaatagagccagatgtgggtggaatcaagcacttagaagttgctactggttcat

SEQ ID NO: 20764 - DNA, 1086 bp, Homo sapiens
aagttacttaacctctctgtgcctcagtcttcccgtctgtaggattggggttgtcctgagggttaaatgaattattaataatatgtgtatacatacttcaaagattagtgcctggcaaatccatattagtaaaactgttttaagttttcccaagtgcacataaaatagataaaggggtaagttacatagcaatttcatagattaaggttgttttaaattaagagattctactcctctcccccacaggaaataagttgtgtgctttgagaaatgcctttataattttgtcactctcagttataatcatttcagtttttcagacattggtacatttattatgtacatactgtatacaagaccatgtagtaacagttgaatatgaagcctttcattttaacctccatctttcacctccagcaaatacatgggcttagccagagcttttgcagaattttcagaatttgaaattgaaggcatagagtctaacagggctacattagtttgtaggactactcctctgtaatagaattaaaactcttgtggtttttaaaaagtaaattgagggaaggcacttagaatttctgcttttttttttaaagcattaagtctcttaagtgtgaagtttgaatctcaaaatagattactaaggtgagcctaacaactcctatgtgtacagaagagaatgctgcaatttatttatatttatatttatattttttagagatgggcccttagagttgctatgttgagcagactgttcttgaattcctggcctcaagcaatcctcccatcttggcctcccaaagcactaggattataggtgtgagccaccatgcccggccgaatgctgcaatttaattctactgtgtgcaaggtactctaggagataagctaggagtatccaaagaactacaagatgtgctgcttacctctcgaagaggtgacatctcaatgaagacctggagaaaggtggaattttctattgatttaaagaatagttcaagaaaacaacatcaggaggctgagacagaaggattgcttgagcccaggagttcaaagctgccgtgagctatgatcacaccactg

SEQ ID NO: 20765 - DNA, 1033 bp, Homo sapiens
gactttggacatcttagcaatcttggagacttatttgaggaaggagaagagacatcagtgggcggaacactagcaccttggttccttcattcattcattcatcaatttgctatttcgtagcaggtcctgtgctgggtgctagggatacagaaatgaacaaacacagtcctggctctggagttgctcacagtctttgcaagacacacttgtaacaaggtgtgataaggactttgatgtttggaggtactaggggccctgggagcccagaagaagggcatatagctgaggctggttttctaagtgatgagatgatggctagtgaaagcttcctagaagaggtgacctctgagctgaggtatcataagaagcagctcttccaccagaggttctcaagtttgtttggtagaatccacctgggggcttccaaaaaacctgatgcctggggccacccagacctatcaaattggaatctctgctggtaattctgctgtgcagccagcactgagcgctgctgaattagaggaagaaaggtggagcaggcattccaggttgatggggaaggggataagagctaagacaagggatgacatgaaggtgggaaagaggcaggcatgtttagggggctgcaagccagaccacagggactgtgaagcagtggacagatgaagcaggaagagctatgagggctgcaaattgggggagcttgggcagaccctgcaacccaggtcccagctgtcttgggcaggaagcctccatgctggtaggccaccccatgtcctgcacccatcctgctgtgctagccacctcggtaaggggcaggaatttaaggaatacttccgttcccatcgctgcctttctgtggagctgtcagctgcgctgccagctgtgtgcagagccccaccacttggaagagcactggatcagtcataaagagcccatggcactcagagggagctcagggcttccagagcagcatggaggcctcatggggtagaccgagtgtgtctcatggcctgtcagagaccctgggtcc

SEQ ID NO: 20766 - DNA, 1026 bp, Homo sapiens
gtggtggctcgtgcctatagtcctagctactcaggaagctaaggcaggaggatcacttgagcctgggagttcaaggctgagatgagctatgatcacaccactgcactccagcctgggcgtcagagcgagaccttgtctcggaaaaacaacccaccaaccaaccaaccaaacaaaaatagtgatggggttgaaaagccctgatctagactgagatccctttgttcagggccacattttattcatctttgaatccctaggaactctcatagagtaggttctcaataaatgtcacatatacaaatgagagggagtgaatggaagcaagtgggtctaagccaccttgggaaataactctacttaatccagtgcctcttctacttctaaattatccccaaaagagcaaaagcattttccctcagataccctctgcggatggtcacatggaggaagggcagtctcctagaatacggaaaccatacagtacaataataacaggcaacacttagtgagtgcttactgtatggctcaggtgctatactaaaagcattgacatgcgtttaactcatttaatcttaggagacaggaactattactctccttggattatattaatagttgaggaaactaagagtgaagtgacttgcccaaggtcaccttgtcaaaaagcggtggatcacagggcactttgtaactgttgtttcccattgggatttctgagaactgaaatcatcattcttccccccatcagagaccactaaggagtacacactttattgctggcgaaatagggtaaggcagagtattgtgggagtgtgtggagaaaatctgaggataacaccctgcaacaaagaggacttcccagcctagcaagggattgtgaaaagcactggactgctttaaccttgacagcaaacttccctcatcttaattcttgctattttggggatcctgtcatgttttgcacattttattattaaatatagaaaatatattggactaggaaatcaagttacatctagtcttagt

SEQ ID NO: 20767 - DNA, 1085 bp, Homo sapiens
aaattgaaggaggagcaattttgatgaatacgagaaagaattttttgatcatcaaagtggggaaatgtttgaatgactgcccaagagagtgttgaatttctgactgtttcagttgtctattgtgtgacaaattacccgaagacttttggtggcataacatgacaaccattttattgcctatgattttgtgggttagtaattcaggaaaggaggacatatttttttttgtcccatatgatgctgattgagctggaggatccaagaaggctgcacatgtctgtacctttggagctagctgttggctgggatatcttggttctctgtgagttctctttcttggtctctcatcacttataaacctatatcgagtggccgagcgcagtggctcatgcctgtaatctcagcactttgggaggccgaggtgagtggatcacctgaggtcgggagttccagaccagcctgaccaacatggtgaaaccccgtctctactaaaaatacaaaaattagctgggtatggtggtgggcacctgtaatcccacctacttgggaggccgaggcaggagaattgcttgaacatgggaggcggaggttgcagtgagccaagattgtgccattgcactccaacctgggtgacagagcgagaccgtctcaaaaaaaaaaaaaaaaaaaaattctagctcgagcttcttttacatggtggctgggccataatggaagctgcaggatctcataagacctaggcctggcagtcatacatcatcacttttgccccattctttttgtcagagtaagtcacaattatagcccagatacaagaggaggggacattgacttcacctctaaaggatagagggtaaaaatcacattgcaaaagggcatgcaatgtgattgggattattactaccaactttattttttgaaacagagtctcgctctgtcacccaggctggagtgcagtggcgcaatctcggctcactgcaacctttgcctcccgggttcaagtgattctcttgcctcagcctcctgagtagctgggattacagttgcttgccaccacgcctggctaatttttgtatttttagtag

SEQ ID NO: 20768 - DNA, 1088 bp, Homo sapiens
tttgttcccatattcctttctgaattaataggaagaacctccctcatctctaattctactaggctactactctatctccctcctgcttttcatcgccaaacttttgagtccttcacctaatcagactatgatatctctaggtagtcgtcaccctccaaattacgtttctgctccttataattccaacaaattgcccacgttctctttcacctcagaccttagcatatgtaagcgttcttttacacaccttccccaagcttaatctggccaactggtttcagcctagaagtcacctcttccatgaagcctcttcttacttaccagggttgagtactcaggagaacctggtatttactccaatcatagtatgtattgagaatcagggtctgctttgctagaattgtatccatggtacgttgcacatagtaggttctcagtaagggtagaatgagcaagagcctgtactgtactttctcaactctgatcctctcatcaactcttttttttttcttctgagaggaatcttgctctgtcacccaggctgcagtgcagtggtgtgatcttagctcactgcaacctctgccttcctggttcaagcgattctcctgccttagcctcctgagttgctgggactacaggtacgtgccaccacgcccagctaatttttgtatttttagtagagacagtgtttcaccatgttggcgaggatggtctcgatctcttgacctcatggtccacctgccttggcctcccaaagtgctgggtttacaggtgtgagccaccgcgcccggccttgttcattctttttatgctcacatctttaaatgtgctaaaccctgttgattttgttggagtactgtttgatgtgtggcttttcttcattcccactgtcattgccttaatttaccagaggtcaaaactggacgtttaaagtcaggctgggcacggtggctcacgcctgtaatcccagcactttgggaggccgaggtgggcagatcacctgaggtcaggagtttgagaccagcctggctaacatggtgaaaccccatctctactaaaaacaaaaaattagctgggcgtggtggcac

SEQ ID NO: 20769 - DNA, 1030 bp, Homo sapiens
tctcatgaccaagccagttgacataactctgcttggtaccatctaataggaacaccttttttttttttggagacagagtctcactctgtcactcagactggcgtgcagtggcgtaatcatggctcactgcagccttgacctcctaggcttaggtgactctcccttctcagcctcctgagtagctgggacctcaggcatgtgcaaccacacccagctagtttttgtattttctgtagagatgaggttttgccatgttgttcgtcatgaactgggctcaagcaatcctcctgccttggcttccccaagttctgagattacagatgtgagccaccgcgccaggccggaacacctcttaagggttgtggaaaaggcgtttttagtgaccagcatttaagaagacaaaacaaacagcaacaataacaaaaaagggcacaatttcttttctaattacatgtgcattgttatttaaatacagtcacacccatctctatgagcgtcatgcctaagactttctgagaacacctctgtaaacctaagaagttgttagggggactaattccaccttgattttttattcttgtcatagaacctttaatactgccatggttttaatgatagaggcttttataccaaacttgtactagtcatagtgtttatgtttttggaggaaagatttaacctctataccttagaatctcataacttgttaatacaataacagaattaaggtattagagtttaatgagaacgcatagtttaaattactattggtgaagtctcaagtgaggagctgcttcattgttgtttggtaatggttactggtttaatgatgattactggttatttttgtttcacttctggttattggtaatggttatttggtgtttgtgtaagaaagattttggcaattgtaaagatagtctttttttttttttttaattgagatgggggtctcactcttgtcaaccatgctggagtgccatggaatgatttcagctcgatgcaaccttgcctcctgggctcacgcaat

SEQ ID NO: 20770 - DNA, 1014 bp, Homo sapiens
agctccgtgtattcaagacactgctggttgaaagaaaaaaaagcaatacattccagctccacctttttctaaccatgtagttttgggtaaattacttaatatgtagatcctcattgataacatgggaataatagtactcagtttgctgggttgtgaggattgaaaataatacttgtaaagtgacagagtctgatatgtatacgtgatcttattgttattatttctgaggcgtcgtctcgcccttgttgcccaggctggagtgcaatggcgcgaccttggctcactgcaacctctgtcttccgagtagctgggattaccggcacccgccaccattcctggctaattttttgtatttttagtagacatggggtttcaccatgttggccaggctggtctcgaactcctgacgtcaggtgatccacccacctcagcctcccaaagtgctgggattacaggcatgagccaccacgcctggctcatgatcttattttccttacgatattccttgtttgaaaatacaaattgttcagaaaaactaggagttctcaatagaacctaaagcctaagaaaattgtgtcactagacaccatttaaaagaaggattagaacttaatattatgttcatgactaggcatcgtagcccacgctggctaaccatcccctgggccgccctgctgcttggcggtttactaaccacagctacatgcatgcgctcactaaatcctcacgccaacctgcgtttctgggatgagaaaaccagagttcgtaaaggttaggtaccttgctgaaaggtgcatgggtgaaaggcagggatggatcctcgctgagtcattctcattctaccacagccttcctcagcagcttcctgactttcctgaggggaagtagctagtcctagcggtttagactgggcagtgctagagtgagtgggacaagcatgggtttttaggtcccacagacccggcttctaatacctcccagttgtgggacgctgaataagctcgtaacccctag

SEQ ID NO: 20771 - DNA, 1081 bp, Homo sapiens
gcacgggaatccagacacatgtctgcctgataccaaacccattttttcccatctgcacgctgccttctgctgtaaatatgtaaatgtttccacaaaattctttttcatactttgccctgatagcagcaggggctgcacatcccaacctcttttcagcttagctcaccataaaaagcgggatcagagatctacttctcagctctttctgatttcccccagggaagttacaaaagaatgacaaaaacttggagaaggcagatatcattagtattaaagagaactggaggtttagggggaaataaagctgaataaaaaacagcagggctggctgagcgtggtggctcacgcctgtcatctcagcgctctgggaggctgaggtgggtggatcatttgaaatcagaagttcgagaccagcttggccaacatggcgaaaccccatttctactaaaaatacaaaaattagccgggcgtggtggcgggtgcctgtagttccagctactcagaaggctgaggcaggagaatcgcttgaacccgggtggtggaagttgcagtgagccaagatcacactactgcactccagtctgggtgacggaacaagactccatctcaaaaaaacaaaacaaaacagggcctatgcatccctgagatgtgaagcagggggagataagggatttagatgtatatcctactaggtttttgctgtgttctgccatgcagttgtctgggcaggatttatttatattttaatttatttcaggggccatgctaatcatctttgtattgttccaattttagtgtatgtgctgctgaagcaagcactgggtaaggtttaaactgtctagttctgtgtgctggggtttggcattggagaaggctctgtgatgcatagaccttaaattagagttaggtatattattaatccaaagtgatcctgaatgctttctatcatttttttcttgtcctattgcactggctaaactgacttttagtactacacagaatagaagcaacaataacaatcatccttgtcttgttcctaactttagtggactatttacaatattttactgagttagatgcc

SEQ ID NO: 20772 - DNA, 1046 bp, Homo sapiens
gtatcattaaggctgcaagtaacaaaacctaggcttaaagaagtgtaaatactagggacacttatttatatttatttcttttatgtttcaagacagagtcttgctctggagtgcagtggcacaatcacggctcactgtaccctctacctcccaagctcaagtgatcctcccacttcagtctcccaagtagctgggactacaggtgtgtgccaccacacccatctaagttttgtattttttgtagagacggggtctctgtacgttgcccaggctggtcttgaactcctgggctcaggtgatctacccgccttgacctcccaaagtgctagggattacagtcatgagccaccatgcctggcagggacacttattatctctgataacaggaagtctgaggtttgttaatttagtggctcattgtcaaatggcgtagagcctttgcatccttctgctctgttcttttatgttggttttgtcttcaagcttgttccccttatgaaagcctggctgcagccattttgagcatcaatccagacgtgacaatatctacaggcaggagaaggatcgcctcctgtgtgtcctttaaagaacaaggtgttaacatgccaggaactgtggctcctgactgtaatcccagtaatttgggaagccaaagtaggaggatcgcctgaggccaggagttccagaccagcctgggcaacatagcaagaccctatctctataaaataaaataataaaaattaagaaaacaaggtgttaaaagacaaaattaaagcaaatatagttttgcagattgtaattgacttttatttgcaattctagaattgggctgccctcagaaccaggacaggttcagagaattccagagctgcaacatagtctgaaagcatttatggtcagaaaacagaaatgagatacaaagacaactaattggttacagctctgcctttgccttatttgaaaatggtttgaatagttggctgcctggaacccactgaagctgatgatgtgattggctgagcctcagcaatctgttacaaaagtat

SEQ ID NO: 20773 - DNA, 1047 bp, Homo sapiens
ttcttggttagagagcctgttgtgtaattaatcagttatgtcttggctgcaggaaaggagggtccgagttacactcagaaagtaatgacatttagaggtgatgaatgcaacagggatagaatcatggaggattgggaaggagtggcaaactggcaccagggtgttggattcaggacagggttggtaagcctaagcctgggggaatcctagcgcttgctttcacagaagacctcaggagaaattaatcttcagtatctttataccatgggtgattggcacattcctgcaaccacagtaagatgcaatacatgaagctggaaattgcaaattcttgccactcaaggtactatttgggcatcttcagcccacagcagacatgaccaatcgggcacaagcactcttttttgtggaagtcaaagtgtttttagaagtttttctcaatatagcactccagggggccactaccagtcagttggagttggtattcaaggtggagtctggttgccgtctctgccctgttcccattatgtagtgagttcaggtacttaatacctaactgaggaccctaggactgcagtttgagatcatctggggccaggcacagtggctcacacctataatggtagcactttgggagcctgaggcgggaggatcacttgagcccaggagtttaacagtttaaaatcagcctgggcaacatgatgagacatcgtttctacaaaaaaattttttaaattagctaggcattgtgatgtgcacctgtggtccctgctacttgggagcctgaggcaggagaatcgcttgaaccttggaggttgtggctgcagtgagccctgatcgcaccactacaccccagcctgggtaacagagcaagaccctgtctcaaggaaaaaaaaaatcatctggcccatcctgttacttaacagagaaggtacctgaggctcaaaaaggatgactgacagtcctagtggcagaatggaggtgggatctggaacccacaacttgattcctaggactcttttttttttaattcccacattggctggg

SEQ ID NO: 20774 - DNA, 1095 bp, Homo sapiens
acaaactttagaacatataatagttgaacaagctgggagtggtggcccacacctgtaatcctaatgactccagaggctgagacgggaggattgcttgagcctagcagttggaggttgcagtgagctatgatcataccactgtaccttagcctggtcagcagagctagaccccgtctttaaaaaaaaatgttgaacaaatacttacctcagaagtcatagctggttatgacccaccagcttgttgagacatgaagctgagtagtgcttacctcacttttagagatgagaagagtgaaggccggagaagtgaagtgagttgaccaaagttgaccaaatatttagggcaagaactaaccttatagcccaaacctctcaattccagatcagaagactgtattttttactgtaggaccattagatgatatatcttctattattgcataataagttaccaaaaccttagtggcttaagacatagtatttcttatctcacagtttctaggggttaagaatctgagactaggagcggtggctcacgcctaaaatcccaatgctttggaaggccaaggcaggaggatcacttgagcccaggagttcaggaccagcctgggcagcatagcaagaccctgtcttaaaaaaaaaaaaaagaaaaagaaagaagaaaagaaaaagaaccagaatcaggatataagaagtaagggagaagagaaaagaagcatcaaaaacagtttaagtccagggaaaccaggaggattctcctgcttgtgtaaagacagaaaattatggttagaaagatggcacaggctaggcttggtggctcatgcctgtaatcctggcattttgggaggccaaagtggccagatcacttgaggccggatttcgagaccagcctggccaacacggtaaaaccccgtctctgctaaaaatacaaaaattagcacccgtagtgtgcacccaatgtgtgcacccatagtcacagctacttaggaagctgaggcatgagaatcgtttgaaccgaggaggcagaggttgcagttagctgagatcatgccactgcactccagcctgggtgacagagcaagacttagggaattt

SEQ ID NO: 20775 - DNA, 1095 bp, Homo sapiens; identical to SEQ ID NO: 20774

SEQ ID NO: 20776 - DNA, 1023 bp, Homo sapiens
aagcaatcctacctctgtctcccaaagtgttgagatgacaggtatgagccaccatgcctggccaggcatcagtatttttttgaagctcccaggtgaatccaatgtgcagacaactttgggtactgctgacataggcattttttaaaaaactcccctgattttattttatttaattaattaattttatttttttgagacggaatcttgctctgtcgcccaggctggggtgcagtggcgcgatctcggctcactgcaagctccacctcccgggttcatgccattctcctgcttcagcctcccaagtagctgggactacaggcgcccgccaccacgcccagctaattttttgtatttttagtagagacggagtttcaccgtgttagccgggatggtctcgatctcctgacctcgtgatccacccgcctcggcctcccaaagtgctaggattacaggcgagagccactgcgtccagccaactcccctgattttaatgtgcaggcaggattgagactaactactctagtctaatggttctgaaacttgagcaggcttcaaaatcacttggaggccttgttgaaactcaagtttcaagtgtgggctgcattcccagagtttctgattcagtaggtcttggggagcggagctgtgaatttgcatttctagctagtccttaaaggttgctgatgcacctggtctggggaccacactggggttcctctgatctcaatgggaagaatggaatcaggagtggtagaggctggatacttattaaacagagatggggtgagcacaattatctcaagaagccacagggctagagtggtaaccagagtgttttgactggcaggaacctgtgggtataatcatggggagtccctggaattaaaatggttgggggccaggcacggtggctcatgcctataatcccagcactttgggaggccaaggcgagtgggtcacctgaggtcaggagtttgagaccagcctggccaacatggcgaaaccccatctctactaaaaata

SEQ ID NO: 20777 - DNA, 1066 bp, Homo sapiens
agtgtggtgcttgctttccctggttgggggtctgagtctgtgatccatcaagcactggctaagggcctgctgggtgcttggtatgtgcagatgatacatacacgaatgaggcaaggcccctgcccttaaggcctctagttgggtgtaggggaaaatcaagtgaatacaagagagctgtaagcaccgagggaggcaacggtaaggagggagtggtgaacaggaagccgattggccttgggcttagggagtttataaatccaacagacatggagggcgcactcaagtgggaacctgggaggactgcagctgcctcaggtccccgcagggagatcgtggagtggggtcaggaatgctctgaagaaggcaggacttgggcatggaggaacagatggactttcgctgaatgctttcgatgaacgaggcactgcggtcagcacttcacggtacattatttcatttattcgtcacaaccaccaatgagcatgttactgtttaaatcatcattctaggccgggcgcagtggctcacgcctgtgatcacagcactttgggaggctgaggtgggcggatcatgaggtcaggaaatcgagactgtcctggctaacacggtaaaaccccgtctctactaaaagtacaaaatattagctgggcgtggtggcgggcgcctgtagtcccagctactcggaaggctgaggcaggagaatagcatgaacccgggaagcggagcttgcagtgagcggagatcgcaccactgcactccagcctgggcaacagggcaagactccatctcaaaaaaataaaataaaataaaataaaataaaaataaatcatcattctataggtgaagaaattgggactcaggttaaatgacttgttcaagattgtgcagttagcaaacggcagaccagttatttgagttcatgcttgtcacactcctaagtctaagaacgcggctcttaactcatctgcccggctgtctccctggaggcgggaggccattgtgaaagcagggttatagacagtggggtagaggtgtgcagggtggaagggtggcagaggccaagcag

SEQ ID NO: 20778 - DNA, 1104 bp, Homo sapiens
tttcaatgcccttgacttcccagcctactcacaatcatgggcactgaattgcagagtctaaaaaccaatggctttggaaggggaacattatagtgatgttgaaaaatacattcgtttgcattcctagtgggccccagagtggcttaatccttaaacctcccagaagcatgcattctggaattgatgcttcttgacccaggcagaaggaaagctagccagatgagtcatgtgggcataggggtgttcccaacctccaaagccctggttccctggctttggacttctctccacccccaaggcccctcttttcccagggctcactttgtagggcttgcaccacttccccaccccagctgtgttggctgcacggacactgaggcagtaacacgtgttaggctttagctccatcagcttgacagtagtgcccaaaatcttgttgaagatccatggacgattctttgcctcgggcaactcattctcctgtgtcttggccacctcctgtaacaggagctggtagaaactgaccggctgcttgcccaaggcgtaggtccaggaaatctaggggaagagagagccccgaggcttcctcagatatgtcctgtccttcctgtcccttcaccctcccaactggggtcaggacgtcccatgcccatcccctgctcctgctggggcccaggcaggtcagatggaaggtgcaaggtactgcagcactgagtgtggaacccctgccccgaagcatgtactactctcctgggcagccccacccactttagggtacaccctcattccatatttcttatacgccaggggtcctcaacccttgggccaccaactgatagcagtccatggcctgttaggaactggatagcacagcaggaggagattggtgggcgagcaagcgaagcttcatctgtatttacagctgctccccacggctcagggtaccacctgagctctgcctcctgtcagatcagcagaggcattagattcccataggcacgtgaaccctattgtgaattgtatgggagggatctaagttgaatgctccttatgagaatctaatgcctgatgatctgtcattgtctcccatcacccccaaatggg

SEQ ID NO: 20779 - DNA, 1001 bp, Homo sapiens
cagatgtgtagaagttattgagtcttggagcaaggggctgagtgatcaattaccttatggctcttacagagaggaaaccaacaccccaagagatgccccacaaaaactagcagctgagccaggactagggttcaggatttctcacctctggtccaggttctccgcatcctactccatttcctagaaaatattttatgctcctggctcacatcagtaatcccagcactttgggaggctgaggtgggtggatcacatgaggccaggagttcgagagagtctggccaacatggtgaaaccccatctctatcaaaaatacaaaaattagaatccccgccccgcggtggggcgcgggaaatgtggcgtacggaagacccactccccggcgccgctcgtgtggggcccaagtccttctgatcgaggcccgcgacctcagatcagacgtggcgacccgctgaatttaagcatatttgtcagcggaggaaaagaaactaaccaggattccctcagtaatggcgagtgaacagggaagagcccagcgccgaatccccgccccgcggtggggcgcgggaaatgtggcgtacggaaaaatacaaaaattagccaggtgtggtggtgcacgtctgtaatcctaggtacttgggaggctgaggcacaagaattgcttaaacccaggagaaagaggttggagtgaggagctgagatcatgccactgtactccagcctgggcaacaaagcaagaatctgtctcaaaaaaagcaatcatgctcctaatggggcctggctctcctctatccctcatcgatgtcttcaattcccatgtattttataatacatagaaagagagagagatcatgttgcagacatactaagttataataatatttctaagcctccatctggaatttttttggggggggcgggggtgggagagacagagtcttgctctgtcgcccaggctgaagtgcaatggcacatgatctcagctcactgcaacctccacc

SEQ ID NO: 20780 - DNA, 1050 bp, Homo sapiens
agacctggtcatcaatgtaggagaagtgactcttggagaagaaaacagaaaaaagctgcagaaaattcagagagaccaagagaaggagagagttatgcgggctgcatgtgctttattaaactcaggaggaggagtgattcgaatggccaagaaggttgagcatcccgtggagatgggactggatttagaacagtctttgagagagcttattcagtcttcagatctgcaggctttctttgagaccaagcaacaaggaaggtgtttttacatttttgttaaatcttggagcagtggccctttccctgaagatcgctctgtcaagccccgcctttgcagcctcagttcttcattataccgtagatctgagacctctgtgcgttccatggactcaagagaggcattctgtttcctgaagaccaaaaggaagccaaaaatcttggaagaaggaccttttcacaaaattcacaagggtgtataccaagagctccctaactcggatcctgctgacccaaactcggatcctgctgacctaattttccaaaaagactatcttgaatatggtgaaatcctgccttttcctgagtctcagttagtagagtttaaacagttctctacaaaacacttccaagaatatgtaaaaaggacaattccagaatacgtccctgcatttgcaaacactggaggaggctatctttttattggagtggatgataagagtagggaagtcctgggatgtgcaaaagaaaatgttgaccctgactctttgagaaggaaaatagaacaagccatatacaaactaccttgtgttcatttttgccaaccccaacgcccgataaccttcacactcaaaattgtgaatgtgttaaaaaggggagagctctatggctatgcttgcatgatcagagtaaatcccttctgctgtgcagtgttctcagaagctcccaattcatggatagtggaggacaagtacgtctgcagcctgacaaccgagaaatgggtaggcatgatgacagacacagatccaggtaagagggagaaagctcctccctc

SEQ ID NO: 20781 - DNA, 1025 bp, Homo sapiens
acaaaaaaataagaaccacccagaagcatacagaaaattgggcactacttgacaatttgacattgcaaagttttcccaggctaattcctcaccttttagggagtttgctgagcaaactaggtaagccttcttggcaggggagaaatgcacagatgctacccactgagcccctcgcttgggggtggttgtccctgcatgtccacatcagagtcactgctccatcaggggtcctgcaggactagatcctggggcatggggagaaatggggacagctaataaatggaaaccgtacagctaataaatggaaaccatacagctaataaatggaaaccatacagctaataaatggaaaccgtacagctaataaatggcagagctgagatttgaacctaggaaaactgagtcttaatccttgaactctgttacctctgtctacataggtttctgtatacatagccttcaggactgcttttggtggaaagagatagcaggtggtgctaattcactgtgttggtgggaactctggctacactgaaaggtttgaaaaagttatcctgtaaactgactagaatcaggtgcttttgtttctgaagtgcttttgtaagtgtactgagtttcttttctgaattcttaatttcttattgacttagtttaattttatttaggatttcaaatttatatgggacaatatctctaccttacaaaaaatgtgcaagtgatgctgattataattcctttaatcctaaggaaagagcttgagatagagctccctaagccttttttgcctgcaaaagaatctaagcagatggtggggttgctgtttaaatacaattgccaaccaaaaactataatctattggctttgacaataaagtttatggggcagagaaaatatttaactttgaaatccctgtacatcgaaaggaatattttacaaataacttgacaaagatgtttcaatggtcttggaatgcagaatggaattttgagaaatagaaatttgtaggcaagggtctaaactaggca

SEQ ID NO: 20782 - DNA, 1033 bp, Homo sapiens
attttccaatttattggcatacagttgctcatagtagccactaatgatcctttgaatttctgcagtatcagttgtattgtctcctttttcatctctgatttcatttatttgggtattctcctttttttctcaggtagcctggtaaaggtttgtcaattttgtttatcttttcaaacaatcaacaggtggtgaagccagccaagctgtgttcttttcttcagagtggcaagttcccccaggccctaggtgggttcacagatgctatccaggagccagggactggagtaagaaaaccttagaagtctacctggtgttccattctactgggactgagctggccctcaaatcatgagacacagtccttcccattcttccctcctttttccacaggcagaggagatgaccctgtggccaacacaaccacgggttcacagggagtactgttagctattgctgatattcacttaaagcccaagggctctttagtcaactggtggtgaatgctaccaggtctgggactcactcttcaggacagtggactcccctctggcccaggttgggtccagaaatgctgtccaagggcctacttgttgctctacccctgtggctaagctggtacctacggtgcaagacaaagtcccctttacttttccctctgcttttctcaagcagaaagagtctctgcctgtatgcaccacagctggggttgtgctgagtctcacctgaagccagcagagtctcacccaagacccacggcatattacctgggtatcgttgctgattattcagggaccaagggctctttagtcagcaggtgatagatcctgccaggactgggtctttccctttaaggcagcagtttctcttctggcccagagtgtgtctagaaatgttgtccaggagatagggtctggaatgggtgtctcatgaccctgaccaatgtgctatcctactgtgtctgagctgacatccaagatgcaagacagaagtcctctttagtcttctctcttctctcctcaaatggaaggaaggg

SEQ ID NO: 20783 - DNA, 1791 bp, Homo sapiens
gcaggaaacataggagtgcagatgtctcttggatatactgatttcctttcttttgggtcaatacttaggagtagaattgctgaattgtgtggtagctttatttttagttttctgaggaacttccaaactgttctccataatagttgtactaatttacattcccaccaacactgtttgagggttcccttttcttcacatccttgccagcgtttgttattgcccgtcttttggataaaagccattttaacttggatgagatggtatctcattgtagtttggatttgcatttttctgatgatcagtgatgttgagcaccttttcacatgcctatttgccatttgtcttcttttgagaaatgactattcaaatcttttgcccatttttcaataggattattagatttttttccctatagagttgttggagctcctgatatgttctggttattactcccttgttggatggttaatttgcaaatatttcctcccattttgtgggttgtcttttcactttgttgattgcgttctttgctgtgcagaagctttttaacttgatgtgatcccatttgtccatttttgctttagttgcctgtgcttgtggggtattgctcaatgaatttttgctcagatcaatgtcctggagatcttacccaatgtttacttgtagtagtttcacagtgtgaagtcttagatttgagtctttaacccattttcgtttgatttttatatgtgacaagagttaggagtctagtttcattgttctgcggatagatatccagttttcccagtgccatttattgaagagaatgtcttttccctagtgtatgttcttggcatctttgtgaaaaatgagttcactttaggtgtgtgtatttgtgtctgggttctctattctgttccattggtctatgtgtctgtttttaatgtcagtatcatgctattttggttcctgtagctctgtagtataatttgaggtcaggtaatgtgattcctccagttttgttctttttgcttccgataactttggctattataggtcttttgtggttctatataaattttaggattgttttttctatttctgtgaagaatgtcattgatattttaatagagattgcagtgaatctgtagattgctttgggaagtatggatattttaacaatattgattcttccaatccatgaacatgggtatatttcccctttccatattttggctcttcaatttctttcatcatgattttatagtttttattgtagagatctttcatttatttggttaattcctaggtatttaattttatttgtggctattgtaagtgggattactttatatctttttcagattgttcactattggtatatagagatgctactgatttttgtatgtttattttgtatcctgcaactttactgaatttgtttatcagttctaatagttatctggtatagtctttaggtttttttcaaatgtaagatcatatcacctgcaaacaaggacaatttgacttcttcctttccaatttagatgccctttatttctttctcttgtctaattgctctagctaggatttctatgttgaataacaatggtgaaagtgaggatccttatagtgttccagatcttagaggaaaggctttcagtgtttccctactcagtatgctactagctgtaggtctgtcatacatggattttattatgttgtggtatgttccttctatacccagttttttgaggagttttccatgaagggataatgagttttattaagtgctttctcagcatcagttga

SEQ ID NO: 20784 - DNA, 1023 bp, Homo sapiens
tggagtggagtgggggtatctgtgcttttctcccctgtccgggggcccagctagtttgctcagcaggttccctaaaaagcggactatggaggactggcgggcggggcgggggtgggtaatgggggtagaaggcattaggggcggggcgggcctgacctgtgcacctgctcccgctggaagttggaagagcccctggccagccagccgcggtttctgcggggcgcggagcaggaaccgaagcctagaaggccactgagtgcaccttggtggctcccagggctgcagatctcaggtttcagagttattggtattttaaacttgagaaactagttctacagctgtctatgtgaccgaccaaccactctaaactattttccttaatatagaaactaaaaggcagaattagaattgccattgccctgcggggagatttataatctagaggggggagaaatgagaaaaatgtctccctctggacaagatctgtagaatacacgtgctaccccagaaggacaaagagctctaagttttagttttccaagagggcacatctgtcgcagcccatttccctttcttttctttttttttaaattaatttttaatttctgtgggtacatagtagatgtatatgtttatgggttacatgagatattttaagacaggcatgtaatgtttaataatcacatcacggtaaatgggggtatccatcgcctcaagcatttatcctttgtgttaccaacaatccaattatgctcattagtttttattttattttattttatttttgtaggtacatagtggatgtgtatatttatggggtacatgagatgttttgatacagacatgcaatgtgaaataagcacaccatggagaatggggtattcatcccctcaagcatttaccctttgagttgcaaacaatccagttacattctttaagttatttaaaaacgtacaattgttatcattgactataataactgttgtgttatcaaatagtaggtcttattcattctaatttttt

SEQ ID NO: 20785 - DNA, 1135 bp, Homo sapiens
gttaatttagaccttatgttgtagagacaaaaaatctaatcaatgtccttttatctttttgtaatataaattctttggtatatacattctggatttctaattgggccaaattatggacatttgttttaatttagttacttatgttatatccatatctatatgtacacatacaatctattccttaagtctatattgaaatattatatcgaaggcctgaccagagtgtccgccatggagtcgcagaaagaggcgcgaccccgtcgcgcgaccgcctggggcctcaaggtctcagacgccaaactacaaggagcagcgggagggcggcgcagtgctggcgacggctgccctgggaacagaggcggacgacgctagtgcgggcgggctgtgggagctgcaggtggagccgaggagctgaggcctgcgtgcagccgctgcaagccggcctcagaaagtgtgtttttgtccatttctcccagcgcaccctttgcatatctctacctacttgtgcataattcagcatccagcagaggaagacaaaatgttgcggacagttcctctaccagcagcatgcctcccccaggacaagcgcaaagtgaagactggtcgtcgcttcagtgaagaaagagatcctgaactttcaactgtttgccggaagtttggtacattaatgttatatccaggggctaatataagaagctgctaatctggaagaatttatattagattctcctgtttatccttctacaatcatcgtcattgatggtacacggagccaggctaaggacattttctgtaagaattccttgttctgacacccccaaacaggtgcagttaaaaacgagcatttctagtcagtatgtaattcggatacagccaattaatagatgtctttctacactggagtgtgcacctgttgctctttccatcttggagaaaaataattacatacaagagactttgcttcgccctcttgaagctttatgctctttccagatttagcatggtgcccaaattggccccagcaagcaacgccttctgaaaaaatggattatatcctaaaccaatgccaaagaacaaacacaaactcaggaaaatggaactattaaagaatagtgttaaaatttagtacagttgt

SEQ ID NO: 20786 - DNA, 1054 bp, Homo sapiens
ctcatgttggtggctgaccccctgttcccatcccacaggaatgccgcctcaatcgacccagcagcgcagcccagctccagacacgcattgagactgccctggcaggcagcccctgcctgggccacaataagctcagccgggagcccagcttcattgtggtgcattatgcggggcctgtgcggtaccacacagcaggcctggtggagaagaacaaggtacgggctgggccatgccctgtggggcctgcgagaaacgagatgctgggtctttgctatgcagacatagtagtttcccatcgtgagtcctttctctcctgaacctcctcccagaatccagaatcaccatcttgggcccacctgtctgaggtctccactaatcaagcatgacctgcctggagataacccatgttagactgggtctccaggtctctggttgtccaatggaccttctcttggactcaggccctgtcctacctggaagccccgtcatctgcggcttgggtgggcagtggatggccctgagcagaagctccacctgccctcactgctgctcttgccatttcccaataggaccctatcccacctgagctgaccaggctcctgcagcaatcccaggaccccctgctcatggggctgtttcctactaaccccaaagagaagacccaggaggaaccccctggccagagcagggcccctgtgttgaccgtggtgtccaagttcaaggtgggtctgatgtgctgatgggaggtgcttggttcaaactccacggtctcacaaatatttattgagcacctgccaggatcggtgctgtttgttggggagcagtggcaagtcaagtagatgtggtcccagtcccctggagtttatacttcagtgtggaagacagaaacagtagacaaataggctatcaggtataatatgatgggaagtctaggggcctatgggggcactatgcagcctctcaccccctgccactggggtgctcatgggaagaggatcagctacatgagcttctttgacctggctcatctccagctgtctagcttcctgttcta

SEQ ID NO: 20787 - DNA, 1114 bp, Homo sapiens
acaagcccaggataagtggacaacactgggagtcggggcaggagtgctttgggggtgggcatgaccctctgccacagcccttctgcctggtgggcatggcagtcttctggagcaagttgtggccggaagaccagtagcacatggaggcaccctgcctgggaccatataggaatggtgggtggggtccctgtgtcaggtctgagggtggtggttttttcttttttttttttttttttgagatggagttttactctagttgcccagtctagagtgcagtggcacaatctcagctcactgcaacctcctcttcccgggttcaagtgattctcctacctcagcctccgagtagctgggattacaggcatgtgccaccacacccagctaattttgtgtgtgtgtgtgtgtgtgtgtgtgtgtgtgtgtgtgtgtgtgtttatttttagtagagatggaggttcaccatattggtcaggctggtcttaaacttctgacttcaagtgatccacctgcctcagcctcccagagtgctggaattacaagcgtgtgccaccatgcctagctgggtctgagggttttgaagttgctgggccttggtggggtgaggggagcttctgtctatagccccagggggcttgtcggtgtggaacattgagtacaaaggcaaaggggcacccatcggacacagaccaaggtcacagtgcctccagcaggctgggctctcagaagcctgacagtgggaaagggctcaaggaagcagagacaagcctccagcaggcacacagaagcagccctgcccccagtcaccagtctattcctagagagcagggggcagaaatgtagaggatgggtgggcatggaggcccacaggctgccccaggagacatctgaagtcagcctgggttctcatcccacctttcccctcaggaagcacgtgtcctcagtctcatctctatcataggcagtggcgtagcacataccttacaggttgttgaaaagttgcaatgaggcgatgcatgtaacttgtatagaattgtgtctggcagagatgggcacttgggccatgattgggagctgcccttctgctgtcgtgattgtactcagcagaacggccctt

SEQ ID NO: 20788 - DNA, 1439 bp, Homo sapiens
tcacccattttgtcagcaacacactggtggagaagagagctctggtgggcactgttctctcaggcaggctcagaagtgggcgggagcatagatacagctcccacagggctgtttctgccacagacatggacgtctcgctgcctaatgaagttctatgctgtggtggccacctcacctgcatcttgggagagccacaagattgcagagaggatagaacagaggatcctgaactccaaccctgtcatggaagcttttggtgagcttgggctcctttgcacagtatctcagtcccatttcctctgggattttccaccttccagggagagggacagtgctttgagaccctctcttgggtgggggtggaggatgagtgtatccttcactgcctcagatccccaacctctccctggtactccttagcatcattctaacagaggtcatgtcattcagtcctcttcctcgctccagcctaggcacacataacagtcgtgctggagaagacctggtggcttagctcgtccaaattctgtctttctatccagtttcctgatggttcaatgaagggtacttgttaagggatacaaggtgattagtgtttgtgttggcactggaacccagatgtgccttcctgtctaaagtcagtagtgacagctgattgtttttgacctttcccttcaaagaaaggtccctgactgcctaggcttgctcattccaatttcttgccaggaatttcttctaactcccctgaatcccacttgctaaagcatgagggcccattttctagtcctgtcccctatgacatgaaaaccaacaaaggggcctttaggtgacttgagcacgggaacatgacctccagagacctgcagccaccttggcttatgaggactctgcaaacccaggggagtgaaataaacataggtgtgatctgtagggaatgcgtgtacactgaggaataacaacagcagtcgctttgggaagttcatccagctccagctgaacaggtaatagctgctgttgccctggctagtgggaggatgggactggggaggttgaaagtggctggggcagtatctggcctgggccacccctatgggcaaaaaccctgctcctcctggtgcatgccctttacctcaggtgtgagctctgagggtgatctttgcacctggagaactatagctcctctccccttggggaaccctggggcagtgcgcttattcaggcctgggttcctcctggcttttactcttgttcagggacttcaagctaaattgccacctctttggaccatatccctgagcttgaggctgagacttcgactcctgtcttggggtagagcaaagtgatgtgcagaggccttggccctgcccacctgagctagatgcaggggaatattccaggacacccaaggacattctgagtggtccccacccctcagtgcc

SEQ ID NO: 20789 - DNA, 1107 bp, Homo sapiens
aaatatgaatttgaggggaacacaattcagtctgtggcataccttaagaagctagaggggaacagaataaacccaaagtatgcagaagaagggaaaaagtaaagatgaataaaatagaaaaattaatgaaataaaagacttttctctgaaaagatgaataaaatgataactcactgggtgcagtggctcacgcctgtaatccagcactttgggaggccaaggtgggtggatcacctgaggtcagaagttagagaccagcctgaccaacatggtgaaagcccgtctctactaaaaatacaaaaattagctgggcatggtggcgagcgcctgtagtcccagctcctcaggaggctgaggcaggagaatcacttgaaccccggaggcagaggttgcagtgagccgagatcgtgccactgcactccatcctgggtgacagcaagactttgcctctaaagaagacaaacaaacaaaaaaatgataactctccagtcagacttataaaaagagaaaaaagatgtaaatcaccagtatcaggaatgaaggagtagacatcaatatagatcttacagattaagataatattttgaataactttatgccaagaaattatacaatttagatgaaatggagaaatattttgagaaacgcaaactgctgaagatcacacaagaagaaaaagaacctgaatagcccctatttctgaaagaaattgaagtcatagttaaaagccctcccacagagaaagctgtaggccctggtggcttcacttgtgaattctaccaaacatttaaggaagaaatgttaccagttctacataaagtctttcagaagatagaaatatctctgatcccaaagaaaaatctaaagaatctacaaagtaagttgccaccttactgcaactaaaaagttgtagagcgtttagtgaggtgataggatacaaggtcaatatgtaaagacagtgtatttctatgtcctagccacaaacaattagaagttaaaatgaaagtatacctcacttcagctgattaagaacaagagtatgaattaaaattagactgcttggggccaggtgcggtggctcacacctgtaatcccactttgggaggc

SEQ ID NO: 20790 - DNA, 1065 bp, Homo sapiens
aataaatattacataaaaatgaacaaagataagaatgaccataggaatcttgacaaaaactgtaagcccacagataaaagtgacacctttaaggtgctgaaagaaaaaaatctgtcaacttagaattctgttatcagcaaaaatatttttcaacaatgaaagtgaaataaagactttaagacaaatagaagttgagggaattcattgcctgcagacttgcactgcaagaagtgataaattctttagtgcaaaagaatatgaaaaccagataaatatttggatctacacaaaggggtaagtttcagcatcacagatgtaaaatcttttttttttttttgtctctttagaagataatcactataaggcacaaatggtaacaatgcttatatgatagaatggaatcattaaaatgccaaatttaatcaaaggcaataagaaaaaagggaactaagatcacatgggacaatttaaaaaaataagatggtagatttaaacccaggcatagtgacaattacgataaatataagtggtctactcgtggataagttcaaactaaatggatgggaaaaaatataacatcctaacattcataaaggaaagctgaagtggttacattagaacaagcaatgttgctaaggataagatgagacatttcataatgataaatgggtgaattcatcaagaaaacagttctaaacaggtgtgtacctaattacagtttcaaaatacatgaagtaaaatctgctctcattgaaaggaaaaatatataaaatcaaaactacattttgaggccaggcacaatggttcacacctgtaatcccagcactttgggaggccaaggctgatggattgcttaagttcaagaccagcctgggaaatgtggggaaaacccatatctacaaaaaaatacaaaaattagccaagcgtggtggcttgtgcctgtagtcccagtttactcacacagagcaagcaagactctgtctaaaaacaaaaaacaaaaagattaaaatgatacaaactatgttccttgagctgaatagaattgaattagaaataaacaacaaa

SEQ ID NO: 20791 - DNA, 1033 bp, Homo sapiens
cactactggaaacaaaagtcagctgctggggattccagcatagtggttaagaacacatcagaaaagtacgtagcttctgcaaagctctcagttcttccacttgtaaaatggaagggaagggaggaccaacacctgactcataggacttctgtgagagttaaatgagtcactgtacatatggcacctggtggcatgcttggcatgtggcagtgctcctccaaagtagctggggttcttgtgggaaaaagtttattggagtaaaccacctgaaccctctgggttgcgcatggtggcaagggcagtatattgggccaggtgttggggaggacagaagctcctggtatggccacgtggccttctgggtagcaaaaccacaacaggtgagacaggatgttgcatacagatgagtggggagttgcacagctagtcaaaggagactattggccaaggccttgccaccttcttgacaagcctcacccagctgcctcgccctttccacaacacttttaccttcatgaggaactctttggaccataaactccttctgccttcactcacatatgagaattgctgaacactgagaacttgccaggttctaggcttctggctgggcactgaggggtggcagggggatgaaaaatgcaacatgtagctttcagggggcacttagtctgctgagagacagataagaaaacaaagacagtaagttgcagggatgagggcttggacttgggttaggaggggatctctaggagctatatcaaggtggctagtgaagtggcttatgcccagcttctcaacgaagccttgtcccccagaattgctctggggaactgaagctgaacctggtccaagactcattcaaccagagagctaggtaaccctttattgagcagccactgtagccctgggctgggcctggtatattttcaaaaatttatttttaataaatagtaatgtagttacatagttcaaaaaatcaagcaatactacaaggcttataaagaaaaacagcaaacctgctccttgtctt

SEQ ID NO: 20792 - DNA, 1028 bp, Homo sapiens
gtatcttttcttcagggagctgctgggatttaatgattcttggctaattgcagaaagagggctgttacttaagtagatgtgtgtctgtgtgtgtggtttgactatatttgagcccgagtttgctaaaggcatctctgcctcagtcctgaggtgcctgcaggcccggtacatggcagacacattctacaccaatgctggctgcaccctggtagccttgaaccccttcaagcctgttcctcagctctactcgcccgagctaatgagagagtaccatgctgcgcctcagccccaggtaaggctctgccgctgcctgtggcctcagggctcctctacctcccgctaaacctctttgcagttacccctgtccttattcatctattcaccagcaatgtggtcattcagagtctgctagtgccacggcctgcccaataggagctggcagaattttgaaccatgaagaactgactacaggacagaaggtgcaaagtggggaataaataaatatttgtttaactgagtttggaacctaaaataagagacataagagaaaggatttttttttcttgtttgcggttttattaacaggaaaggatttataaaggtattatatatttgtttatttaacaaactacctttttattttttattattatttatttatttatttatttattttgagatggagtttcagtcttattgcccagactggagtgcaatggcatgatctgggctcagcgcaacctccacctcctgagttcaagcaattctcctgcttcagcctcctgagtagctgggattacaggcatatgccaccacacctggctaattttgtatttttagtaggcatattggtcaggctggtctcaaactcctgacatcaggtgatctacccaccttggcctcccaaagcgctggaattacaggtgtgagccactgtacccggccctatttattttgagactgagtctctccctgtcacccaggctggagcgcagtagtgcgatcttgactcaccgcaacctccgcct

SEQ ID NO: 20793 - DNA, 1043 bp, Homo sapiens
tgactgtcggagcagctgcaagacacaagagtcagcgacagatgccacagccccagcctttgtctgagcaagagaaaaatcacaccctccccttaagcccctggggcagctgaagctgggaggctttagtcatctcacccctcaactccatcgccaaccctggagagcaacaggggcctttttcttgtctcccaactttggggaatttgagcagtgatgggaaagatgcaggaaagtgaaggtttgggggagagatcccttgaacctgtctgcctaaactgcgtgacacactcccagaacccacttaggctgggggtggggtgtgttctgccacatcaacctagatcagctggaaaagggctgagctggcaggtggggatcaggcttctagtttcatctctgccacttctctgcggccacctacttactcttctgggccttgcttttctcagctgtaaaatgtggggaagcaatcactcaaatgacagatgcaatagtaacatggataactgtggattttagacacatatcaagccaaggagtgagaacgtgactggttgtgactatatctcacttgctactggtttgggctgagtctggaagagccagaggcctggtctccctgcaggaaataatccctggaaagtaagtagcctcttccaggctgctgggatcttttggactcatttgcaagctgtctctggagattggctacagaagtccaaggggaactccaagaggaactactgtggataaccaggctggggtgtgttggggcagatgcccaaattttctgcagtggaggacttagccagagtagggaccctgggaactgtcacccctttagagcaaatagtagaaaagctccaagggaagcctagaagtcacaaataggtgtcctattgatcttcatattggcaagctggtgtctacactgggacatgaactcccatccatttctatagtgggactttggctatcattgatatcacattggaacattgttaccaccacttttgtatatcattgactgccattgatcc

SEQ ID NO: 20794 - DNA, 1031 bp, Homo sapiens
attgcttctgccctctggcggattcgtagcaagccccacttctctggacctcagcttcctcatttgcaaaatgaaggtattggggattagaaaatgataccccacagtttggcactttgacacgctgagtactttgaactggaggacactggcgggacctcagaaacaaagtctctctctgaccttctcctggtcttttttctcctgctcccttttctcccccagggcaggccatggaaactagaatttctcttctccaagacgggtcatagaaactagaaatattactctaccccttcccctgcctttgtgtgtaggaggtggccataaagaaattctctgacctaccttgtctggtagtaggtcataagaccctcattccagaaggggtcctgccctataccagcgaggaaggaatgctatgcagagaggccaagaagaatctgaacagacaggccttgctgggctccccgactcagtctcttactgttaagtcacatcttttctgtctaatcacatttctatatggctgtccccttcttcattgaacctaaacgtaaaaatagacagttttctctgagtctttgggttttcatttctgaaggctcctgtgtcacatcaaactttgcttaaatacatttaatgcttttctcttattaacttggtttttgttatagaaattttggctgtgacccttatgatggggaggaaaggtatcatatcctttctaccccttcaaagatgctattatctccagaacatactgctaaggttctaggattcactttgtatgtcaatgtgtactaggcatggctacaggaccttccacaatcccacccctggcagactcttcagtttcatctcccatgattctaccacagttatcccactcccttgtactctacatatctctgcagttctaatttctctttagtttagcttcttgaacaaaccatccatccatccatccatgcagccatccatccactcaaccaaccaaccaaccaaccaatcagccagccagcaaacca

SEQ ID NO: 20795 - DNA, 1031 bp, Homo sapiens
acagttctgagccttaaccctgtagtttgcacacaagaacgagctccacctccccttcttcaggaggaatctgtgcggatagattggctggacttttcaatggttctgggttgcaggtgggcactgtatggctgggtatggagcggacagcccccaggagtcagagcctcagcccggctgccctggtggaaggtacaggtgttcagcaccttcagaaaagggcataaagtggtgggggacaattctcagtccaggaaaatgcattgaccattgctggctatttgcttacctagtaagaattggattcatttttgaccagattattcttctatgcttttttgcaataaatcaaatcccacatatctacaagtggtatgaagtcctgcaccccccaggaggcctgtccaggcatgtcttcagaggcagggtgggttacactcatttacctcccctctccccaccaaattatgacacaaacgagtatgtttcctctctagaaccctgtaatgcctcctcccccatccccagagctccttactgtaggtcttaccctggacaaggattttttcaagttggaggcacagaacatgagcaatctgacattcccacagcccctcaaacatgcaaggctactaaggcaggaggagtataaatgatggatattgaccaagacctgcttggacggagaccgccatattatctgttctcttcgttcacaaaacagccttcacttgtctcagaatttgatggacacatactgtgatgagcaggagcttcagatgcactctttacacattttgttgaaataaacctctacatttgtagaagagttacagtttgtcatttcaatccatgcccagccacctcatttcttgttctgctttcagcaggggctcagtgtggggcaagcccctccatggccctgtaacacctaaagccctttgtctcctgaacttgcataaagatgatgggtaggcagtaaaaagctggccttggccagccctgtcttatccgctgaatcaaggtcaaac

SEQ ID NO: 20796 - DNA, 1044 bp, Homo sapiens
gggggctgactcctgagcacagtgggtgctcagacgctctttggtttggcatgctctcatgttcccacaacccgatgccatggtgcattcttattgttcacacagctacccactcgctcttattctggatttccaagtgaaatgaatgctcaacagaggcccctgtgaggaccataggaaaaagcactattgacagggtcacttatttccactgacctcaaaacctggcctcaggctactgatgaataagtctcatacaccaaacttctcacacagggccaggcagggaggaggtaaggtagaacctggaaagtgttgcttggccctgctatgggcctggagctgagatgggattggctcacaggagcttggttcacaggggtctgatggccaccctagcccacatgtcctttggctattgtactctaaagcccttggaaaaaaaaatcacatcctttcttgggcttctgttggatagggcttagccttgtaagtgtaggtgtattgaaaatgtctttccaaaatatgagtgtaccttaggatttgtatgccatccctacacccatcaggctgtgtgtttcccagaagtctagaaggtcagaaatgggaggagcctccctagctggaggtgtctcccagcagctcccaaggtgagttattagtagggtatagtaatcagggctcacatccatcaggttgtgccctggtcactccttggccctgctgaaccattgtctaaggaggacttaacagctatccagtatgttagaaatgaaactttccaaacaggtcatttagatgttgtgagatagactaattactacataaaattagtgaggctgactagtgcctgagatacttatccactgatgcagacagaaagtgtctgttgaacattcattttaggacaggccactgttgtgatgtagaattattgatattttattgataaaatgttctgatacagatggatatgctgacaggtggcatacgggcccaggcctgtcatgatgttagcagcctagcatatcacacctgtttaaa

SEQ ID NO: 20797 - DNA, 1026 bp, Homo sapiens
ttggggatggggcgggtctcaagccaggatgacctagcaagggcaccagcatttgctcctggaatagtgggctgcataagtcactccatggatgggaagaaaaagctggaacttttatttctgtttatttttactaacaaaaagaaattaacctttattagtaattaatatatggattaatcatttacatcaaaaatgcattttatcagaatattggtagtatgtgctcaaaatatatttgtctgtctttctcattgctatgtgatcacaaacatttggtgactaccaggttagagtattgatggagggctgggtggctggtggtggcttgaagggtcctggcccacaaagaggggcactctggcctctgcctagaaagtgttgcctgaagcctctgctaatcgttctcaaggaggagctcccagatttgctgtcagttttaaagccagtgaattggggtgcttctaggattcacctttgtattaagtctgcccattttttttatgactgaaaagcttctttggataaatatttcaaatgtgcagttggggagcacagccttctccgacatttggttcaggttaaggtcagtctgtggcatcataattgagtgagacaattttgtcagtggctactggcagcttctagtggaagttggcattgaaagtcacgcaagtgtaaaataagagtttgtcctccagttaagagtggccggctaggtaaatggagtgtgtgtgtatgtgtgtggccaggagaggcctgcactgcctccctaccacattagtcactaatggacgtgtccagcctcagtaggcacaaggatgagaaggaagtttccccccaggcatgaagcaagtagataggcccttcagcttttccctagcatcctgctcccaagcggacagagcgtctgaagaaataggtcactgccgtctcttatcaatggagagaacagttgaccacgtgtgtacaagctcctggctggaattgaagcacagaagagaacctccaccccgtagctcagta

SEQ ID NO: 20798 - DNA, 1205 bp, Homo sapiens
cagtgagccgagatcgtgccactgcactccagcctgggcgacagagcaagactccgtctcaaaaaaaaaaaaaaaaaaaaaaagagctggatgccattggggaagtccctttacatttcagagctgtggttttcttacctgtaaaatagacaccctggcataaagttgagttgtcctaaggattggagatcatgtacctgaagcaactgggaaagcacgcagtaacgttgaagtattcagcttggcagcagtgttaacagctgaccagatgtaggtgtgtagatctgtattgtgcttggtgattatgatatgtgatcctgaaagatttgagtgcagtgagtggtaaatgctcaataaatggtgtgttagatatggtccatgtatatgtgcgtttagccatgtcagtggtcttgccatccctttgctccctgcagggctgtgactttacctattattgtattagttcttgaactcacagtaacaagagacacaactcttaaatcttaggcctgcctaggaaattgcatctgaatgggaactattggagacattgtcctggtcttagttatggaattgggactaagatagaacctttatcagccaggagcccaccatcatcacttagcctctcagaaattaaagggacactactactgaagcacgtgtcttctgcccaagtaagcgagaagagacagctaacagtgttcaaaagctttgggacccaaactgctgcatttgagtcttggctctgtcacttgctagctttgtgaccttggtaagtccataaattctcagtgcctcagtctcctcacctgtaaaatgggaataataagaataccagactcctaaggttgttgtgataataaattaatagatataaagcacttagaatggtgcccagtaccctataaatattagctttgattattgattgtatgcattggatagccaggaataagttttcttttccagcttgcctaatttttaaaactttccaatttcacaaaaaagttacaagaataatacaatgcttttttctcaaattcacctattgttaatatcccaatgctttattatttctgcatattcacatgtgtacatgtatttattctctcttgctccacacacatatgcattttctttgagccatttgaaagtaatctgtggacctcttgcctttttttttttttttttttctgagacag

SEQ ID NO: 20799 - DNA, 1514 bp, Homo sapiens
ctgtaacacagttggctgatgtgatgtagctccctgtaacacagttagagcctaaaaccagaactagatctactagaatatccctataacagaatgtcaaggttcctgaaaaagttattatccacctacttcccctctactttggggatgtccttggttattgtgaaaagaaatttcaagagctcagaaatgagttcattttttattgtggtaaaatatacataatatttatcactttaattatttgtaagtgtacaattcagtggcactaaatacattcacagtgttgtgtaactatcactggtatctacacccaaaacttcatcatcctcaacataaactctataccccttaaacaataagtacccattcctttctccctgctgcccttggtctgaaatgagtttttggcctgatatatagaccagggcaagttctgtcttaattttggtgctgatgcatccttttacacctcacgtaagacaaataagacttagggaagatagagatccctgtgaaggtaggagggggaggaacagtgcctttcatatttacatacaggtcagggtgttgtattatctcatgtaaagggacctaaactgagggcctcttgtcattcttcacatcccttggggagatgtttgcagttttggtttcaatactggctggggattatgcagggagggaaaataaacaattatgccatccctcagtgcacacaaacacacagccaggagccgactgcactgtgggtaaaatgactccaaaattgtgtgtaatgagtaggaaaagattagagacagctcttgctatgctgaaaattgacattagtgaagggaaaaaaaaaaaactctactagtcggcctaggaggtctaattcgagcagtaaagatataaataaataaataaaagcatgtcaagatggtattggtgctttttttcaatgagctctatctggccggaaggctattcagcataatgcaaaattaaattataaaaactggctgaatatttagatggaagagccatttggaagcagtttatttagacgaaccggcaatgacccacaacagggagacatcaagcgtgaaatttactagaaattagcaccagggtcccagcctcagcatgaatagcttgataggatgcaaatcccagtgatattaagctgcctcactgctggtgctacagggtcactctcagttggcttttcatgttatacttattattttttcctgggacaggttataaataacaataaaaaaaatttattgaaaactttaactggaatgaaagtctattttaaagtctctgattactaggatgttgaaatacagtgtcagccgatcataatgaactaaggagagacattatgtatatgtagcttgtgtatggctaatgtttaccttcagtttctaacagataatcttgcccaagccaataagatctgtttcattttcaagagtgtgggacactgtggaaacactctgccaccctgttcccttgtttgatac

SEQ ID NO: 20800 - DNA, 1002 bp, Homo sapiens
cacctgtaatcccagctactcaggaggctgaggcaggagaatcacttgaacctgggaggcagaggtggcagcgagccaagattgcaccattgcactccagcctgggcaaaaacagcaaaactccatctcagaaaaaaaaaaacaaaaaacttttgattgttcttctccctgacatttactaggtaagcaactttgggctttaatctatttagatgttagtttcctctttgtgaaatggaaggcataatacatttcccattttaaagtagaaaatcaggttggcgtggtaatcctataatccaagcactttgggaggccaaggaaggaggatggcttgaggccaggagttcaagaccaggctggccaatatagcaagaagcaagaccccctctacaaaataattaaaaaattagccaggtgtgggggtgcctgagatggggaaccgtggaacctttggcagtggcatccagggctgggaccatggccgtgaacagggcctgggccccacagagctcatggaggcaaggctgagggcaaggaatggatgaccaagttgggccacctggtcaaggacatgaagatcaagtccctggaggagatctatctcttctccctgcccatcaaggaatctgagatcactaactttttcgtggggacctctctcaaggatgaggttttgaagattatgccagtgcagaagcagacgcgtgcttgccagcacatcaggttcaagatgtttgttgccatcagggactacaatggccatgttggtctgggtgttaagtacttcagggaggtggccactgccatccatggggccatcatcctggccaagctcttcattgtccccatgcacagaggctactgggagaagaaggcccacaccattccttgcaaggtgacaggtggctgtggctctgtgctggtgcgcctcatccctgcacccggggcactggcatcatctcggccctggtgcccaagaagctgctgatgatggccagt

SEQ ID NO: 20801 - DNA, 1013 bp, Homo sapiens
aacgttaaactgtgaactactatgaactatctaaagctagtagttcacatagggtcacagataccacatataatagtgcttctctcaaaaatttaaaatatcttgtagtgcttctgggagttcatcatggtgccctgagacacaatatagttacggtgagattctgccaatttcttcatgcttatttctaaatattttgcattttttcttgctactctgaatgggattttcccctatgatattttttaactcttcatttctggaatctatgaatattgagtttgttacaggcaagtctggctgggtccttgaatatttatgactatatggaccttatacaaacaggcacacaaacacatatacaattaatgtagttaattaacccccttaagggacagtagcctcatttctgacataactttaggatagagtctagatacagaacaaaaggaagaactgggaaattattggatattaggagaggctaaaaatagaaaggcagcagaatctgggaagcagagatgcaaagtcacagaccaacagcaagggcaaagaaaaagaattgatggagggctggaaatgaagaagggagcaggaaaatatgggggcaggaggaagtattttaagagccactatggggtacttatttattatttcaatttataaaactgtgcccactgccaagccttctgggtacacgtggaacaataaataatatatgcccatctctacttccaactttgtatttttcctttcttttattagttgcattccccatctcccatttcccattatcagctatcactcctaatcccctgccaggaagacagatgagtgactcccactagatccacaggatgctttctggacaacttggtcagcatttcacttctacacacattccaccttcccctccagaggacatatccagggacccttgtgtatatacttgatatttatgaaggagtatgaatgggagttcagtattttgacctttgcttcatcctacctta

SEQ ID NO: 20802 - DNA, 1029 bp, Homo sapiens
taggggttcaaacataaaaaatgtagcaaagaacccattttttgataattatcccaagaatgcattttctagccttggcatcctttctctcagagtaacctatgaatagtgatataaagtcctattttgccctatactcttatactcttgtccatgcattatgattctttctgattttaactgtgctcctaatgtacagttataacaatgataataccagtaacaaacctaaaaagagagatatttttatttcaaccttaaatataatccctagaaagatttcattccattgaaggagtaatctttacctgtgttttcaccacaaataggctgggtagacctttggaaataataagcagtttgtttctattttgctcaatctttttcaaaaaatttcactatatatacaaggtgtgtggctatttcagtaatatgccagtggatgccaacagtagatgatttggtatcaagatggatgcaagcattggaccagatggagagtatcagacttgtaggagtctcaacaaatagcaaagtcaagaggactggggtggaaggatgcaaaacattttgacaagcatagatatatactcatcagcacacgaagttgaaacagaggtttctgccactgtatgtagcatctgcctagtgagcccctcagcagcaaagaaaagcttcattgtgctagacttaaattctgattcattgaacagtgtagtcttcaggaatggaaggcacccttgtgaacatggggctgagagcaaaatggttttaactaatgtaattaaaacacaaaatgagatttttggccacgtgaaagctagctgcagtgctgtgtgaaaccccttgccatgatctttctttcctgctttctttctgccctcattctgtgtttgagcgaatggagactcagggaatagtgaagtcccagagggacagagctctgttcttgctgaaattacaagcacagagctgcctgggcatgaacatgtagtgtttactctgccagtatgaatacaaatagtctta

SEQ ID NO: 20803 - DNA, 1067 bp, Homo sapiens
tttaaatcaaacagtgtgtactattttgtgtctagcttattttactcagcataatgtttttgaggttcagccatgttgcatagattatgtgtatgttccttttcatttttggatagtattccgtttcatggatttttttttttttttttgagacagggtctcactatcttgcccaagctagagtgcaatattgtaatcatagctgaccacagcctcgacctccttggctcaagcagtccttccacctcagcctcctaagtagctgggactaaaggcgtctaccaccatgcccagctagtttttaaatttttttagagacagggtcccacaatgttgcccaggcttgtctcaaactcctggattcatgggaccctcccaccttggcctcccaaagtgctgggattacaggtgtaagctgccatgcccagccccatttaatggatttatcgaaatttttacattcatttatcaaaatgtttatattcacagatatgttttggcaggtaaggtgactaactgggagctctgacatgttccaaggaaacaaggctttccagagtttccatcagatatagctttgactagcaaggggcacccccaaagggcaggcaatatcttgacactgttttcatttctatttcatttggggatgggtgactgccaactcagatattagatggttctttatgaattaatgggaggaatgatgagaatagaagtctctattgagtaggagagagtaaactaagaccacatgcttgtgatgatagtttacaacgatttgtgtgaggagttacatgtatatttcctaagtccatattcaaattatggatattaaaaaagactggctgggcatggtggctcacacctgtaatcccagcactttgggaggccgaggtgggcaaatcagctgaggttaggagtttgagaccagtctgaccaatatggagaaactccatctctactaaaaatacaaaattagctgggcgtggtggcgcatgcctgtaatcccagctactcgggaggctgagacaggagaattacttgaacccaggaggcagaggttg

SEQ ID NO: 20804 - DNA, 1092 bp, Homo sapiens
gataagattctaaatcaaacagttttacatctgttaataaaatgttaccttttgttcttgtaaaatttcatgagatttaaaaaaaagatctacatatctcccgagagagagttgttgttttatgactattgtgtgattcccactttaaaatgaaatgttttggattatttggaccttgaaggaagagctcactatatgagcagttatcataattagtagttctttttttctttttttttttaagatagttctgtttggtagtggaccaactattagttttcagaagggttggtttggatttttgttttaattacagtctatataattagttctcagcatgttgaggtaaaagagaattgtaccagcaagctcccaatttcttcatctcattaggtttttaacacgattattagtatcataatcagctatgatgttttttgttgcaggttttcacattctctgatttgcggggtgtcttgattggctaatttgggcaaattattttgattgtcttgatgatggttggctgattagaacacagcaagggcataatttcttcctgtgaaacgttgcattcttttgttttttggtaccagaatactaagagggtttttctttgtgtacattcaattatgatattcgcccatgacactagtagaatacttggaaagcaaatacattgatgatggaataagcatgaatgctttcagtggaaaaactggcagtatgaggatgagataggataaaagaatttactaaaactgtaggatcagacttttagatttcttcttttctgtgttttctgtgattctgtggtttttgagtgccaaaagagattactttttgtaagagtcttcagacttccatgtcactgaagaattgcttagtagttccacttttccattgcacagaggttcttgccatctcttgttctgaatgtttaatacttaaattgaggattttaccggggagttacaaatttactcagaagtttaaaaaaaaaaagttgtttatatgatctcatgacaacttttcttagctaaccttaatgaaagtggtttttctaattggtagtcattgcccacctctgcc

SEQ ID NO: 20805 - DNA, 1074 bp, Homo sapiens
gtataagtggctgtcttgaaactactggtgtctgttgacttctttttttttttttgagacagtctcattctgtcacccaggctggagtacagtgatgcaatctcggcaacctctgcctccttggttcaaacgattttcatgcctcattctctcaagtagctgggattacaggaatgtgccaccacacttggctcatttttttctatttttagtagagacagggttttgccatgttggccaggctggtctcaaactcccggcctcaagtgatctgcccatcttggccccacaaagtgttgggattacaggcgtgagccaccactcccagccttctgttgacttctaatatactagtcgcctatgcctagtggagatatgaatagttcctaaatttaaaggcctattaaatattgcttttaacaattttaaaagagagagtttttaaaaaatgccttcatgtaaggtaaggggggactgttgtatcaaaactgaaaggttacaatttgttagactgaattctagggatgctgtatctgatggtaggtaacatctacaatctaaacagtttaggacctgtgttttatgttttatggaaagtccttcttttctctctacctaatttcatttagcatctttatcaatattaatgtttacatttgaatacatgcccaacagtatgatttctataagcagaaattgtgtcatggcctacctttatgtaaatcagttctgaggtaatttagttgacttcatatcaccctttctcctccacaaagttctctttcagttttgtccaaatcaatataaaatttatttcgtaagacttagtcctaggagccagattgaaatttgttcacttgcaagtttgaaggtactaagctaagataaggatatccaaaaaggatgtttaactccaccaaagccttacaagggccgaatgggataaaatttagaatgaatggaaatctcatctatcttctgttttacatgtttttgctcctagaaagctaccctggttgaccatgggatccggcgccttactttcctggttgcacaaaaggtactgacatgtga

SEQ ID NO: 20806 - DNA, 1029 bp, Homo sapiens
gtataggatgaaaaatttgtagtggccaggtttgctggctcatgcctataatcctagcactttgggaggctgagataggaggatcacttgagctcaggagttcaagactagcctgggcaacatagtgggaccttgtctctatttcttaaaaaaagaaaaagaaaaaaaaaaagaaaacatgtaaatgatcattatggacatgaccaaatatttatctgttaatagacagtttatccttccttccttccttgcttatctcccttacatccccacagattcttattctacctaagtggataagctggctctaaacctacttacatgattgatttgggaccattcctttaaaaattagagatgttgggagtttttgctttttgacccatactgtgtagatggtgcataattcttataacaaagcagcagggggctctctgtaggagcttgagagttgctgatggagaaagcctggctttttgttgttattggtgttcttttcagttcgggcctttttctactgaaaacatggccgtcatcctgtgaagactcccaaagggattagaatgtagctacagaagcagttagattattttattagattaggaaatttgttaacagttgagagagattatactggtttctaaactctagaaacctggatgaatggaacctgaggtttctttggttgtagagttctctctgaactgagattcatgctaagaaactgtgcaggcggcccctttctttagcatcctttatatcgtaaaaggaaaactattctcattagcatctgcagttagttttctgttcagctgtacctccctctgttctagaacctgtgcctattttttctgtattgttgaggcccaagtgcattataactaaggatctcttgtaaaaataaaacccactctcctgagtgagaggcttaaggaatccaaacagcaaaggttcaggtttctgcactcagaggttgctcttgctgtcttatgaattcactctgtgatacaggtttgatgcaaagagcat

SEQ ID NO: 20807 - DNA, 1008 bp, Homo sapiens
gtatcaacatcttcatagctgtctagatggcaatgtacatatcttctagccaccttgatggtaagtagtcttcccctcactacttgtaacttatttttgatacggtccacatgaacatgctataaaccatgcttctgtatgagtaatgccatgcctatgaacccctgatttggtttagatggggagaatttatgatgctgatcagcacctttccttcctccacttaacctgactgcaaataattttgtccaatatgtaaataaagaagaaaagtctttctcagtgattccacattcactgaataagggtgatattaacaattgttaaacttaccctatgacattttttgggatatcaaaaagtgcagatatgactagaagaagctaccagttcattgctgatcctgggtttagtgcctacccggctaaataatagttaatgtcttgagggcattacacataaggtcacattcttttcgttttgaattgccttctaagatcaagttggactatgttggtttcttctgtcagtcaactgtgtaactttggctatgctttttttttttttttttaaattaaagatgtggtctcactgtgttgcctgggctgctgtcaaacttctgtgctcaaacggtctcggcctcccatcttggcctcccaaaatgctgggactacaggcatgagccactgtgcccagccttggctatgggtttaacgttttatcatgtttgttgtatttctgcaaattcgaactatttcctatagttagctaccatctaggtcaaaagtaaaagcaagaaataactgttttgtaccagtatggctgaataataattttcacttcgttttatgactctggacagttggaacagacctttggttggtggattgggatgccagatttttgcaagtgacctgtaatcccaaaatcagcaggttggctctttaaacaaacctttttatgttgactaaacacatctgctgacctagacaccatctaaaggtatcc

SEQ ID NO: 20808 - DNA, 1091 bp, Homo sapiens
gtgtgtgattaacagagaacttaaacaatgaatatataaatcttctcttccttcgaaacataatatggtctctcattctttattctctaacagggttttaagcccagctcaggaacagttcaggagctaaatttccgcagcaataagaatgtttggggatatttcagtgttgctgctgcagggggacttcatgaatttgctgattctcagtttggtcactgcttttcttggggagaaaacagagaagaggcaatttcgtgagtataatagcatttgattgcattttacaaaataaatttgtgctaatcttaagtgaaggtgtgagcatgggaataggaatcatctgctgtcaaagtaataatatgaacaacctttttgaagaaattttgaatatctttaattacacttgcattcatgttgtattaaattatgcagtgcttggcagatgtttttctgtttgttgttctgagccttttgaagtatttttcctttcaaatatttttgataaatgtataaaattgattgctttaaaggtatcttatttttccacaggaacagtattgttattgaggggaggtagattcttggccaagaactaggtatcaaataaatcatagacttttattttatttttttcttgtgagaagacttaaaatctattagcaattttcaagtacacaatctattgttatgagccatagtcaccatgatgtactcttatagttatttaaaataataaaattatactgctcatattatgaaaaggacataaagaaactgtctacattgctaatacaagagaccttagcatgctgtatataacagcttatgcaaatataactgctatatcataaatgttagataatattctattaatcataaacaatgaatattaaattaacagcacttttgcttgcctaaaacatagggctgaaggaggtaattttaacagcttagatcttttggaatatctatctaaaattgaaacttgaactagttcttttctgttttttaatggtttattgccttgtatcaaacatttaataccattccctttacctttgtactgtacatggagtaggtaattaata

SEQ ID NO: 20809 - DNA, 1084 bp, Homo sapiens
gaaaaaggaaacccagagatgtgagcctgacatatgaggctacttttcccctagatatatcttctagttcaagatagtagaaaggctgataagttttcaacagtcttaaaagactaagagggcttcctggggaggggtgccctggaaaacctcccacattttaggttaggatctttaaggactgactacatcatgggagaaagggtgaactggaaatagactagccctcacagggactaaatcttggcttcaaaacattcaacctctgatttaagcaagatgttttaggattgctagtgcttctagacacctgcaggaagcaaatgtaaatcctttccagagaaagataacatccagaacttaaaattatttctattaatttttcttacagcttatcaaccactcaattgaaaataggcatacaaaattagatgattgaaaaccaagaagaacaaaacagtagaaacagacccacagagggtttatataatgagattatcagacaaggactttaaagtaattctgcgtaatatattcaaggaaagtaaaggcaagattgagaattttggtagagaactggaaatcataaagaagaaacaaaagttctagaactgaaaatgcaataactaaaattaagaagtcaatatcaggggttcaagaccagcctggccaacatgatgaaaccccatctctactaaaaatacaaaaattagctgggcctggtggcacatgcctgtaatcccagctacttgggtggctgaggtgggagaatcacttgaacccaggagacagaggctgcagtgagctgagattgtgccactgcactccagtctgggtgacagagcaagacattgtcttaaaaaaaaaaaaaaagaagaagaagaagaagtcaatataggagtttaaaattatagcatattagatgcagttgaagagaatcagtaactggcactggagactgagatgggagaatcccttgagcccaggagtttgaggctgccttgagctatggtcatgccactgcattccagcctgggtgacaaaacaaaaaaatctagaaaaagataaataattaacgactggt

SEQ ID NO: 20810 - DNA, 1048 bp, Homo sapiens
tgggacaataggtgagagtctcactctgtcccccaggctggagtgcagtggcgcaatctcggctcactgcaacctctgcctcctgggttcaagcgactctcatgcctcagcctcccgagtggctgggattacaggtgcccaccaccaggcccagctaattttttttttttttttttagacggagtcttgctctgtcacccaggttggtgcagtggcgtgatctcagcttactgcaacctctgcctcccaggttcaagcgattctcctgcctcagcctccctcagcctcactctgtctgtggtgggactacaggcttgtgccaccatccccggctaattttttgtatttttagtagagatggggtttcaccatgttagccaggatggtctccatctcctgacctcgtgatccgcccacctcagcctcccaaaatgctaggattacaggcgtgagccactgcgcctggccaattttcacttttaaaatatagtattgttatattctgttgtattatctaacattgtttaataatttgcatgctttccttcctataatcaaagagaacaataagcctattttaattttgaagaaattctagcggaattttttttagtagaattttttttagaagggacttaaaatcttttagaaataagaacaagataatcaccattctgactggcatgagatgatatctcattatggttttgatttgcatttctctaatgatcactgatgttgaggttttttttaaaatatgtttgttggccgcataaatgtcttcttttgagaagtgtctgtctgttcctgtcctttaccagtgcatgtggggcttaatacctaggtgatgggttgataggtacagcaaaccaccatggcacacgtttacctatgtaacaaacctggatgtcctgcacatgtatcctggaacttacatttttaaaaaagaacaagataaaataaatttattattagtaaataatggtggatgcttgagttgaaatttgaaagctaaaataaatttataaatggtggaaatgaactttga

SEQ ID NO: 20811 - DNA, 1032 bp, Homo sapiens
acacagaatatcatgagcatctacttaagtaaaagctaaaaacaggaagatattacaagataacattcagctagtgtttatttctttaagagatctgtctgtggcaaatttgctttcatagtaatatatgtgtctcagtaagtagtctttctaggcaggatttttcttccctgcttaagggggttagacctccaaaatatttgtcagggtctcttttccttttaagggtttaacccacaatcttttctgtatccgttttgtaccagctccattcctattctcaagctttggtgcataaaaccttagtttaggtgtctatatataccactactttggcctgaaaattagaatcgtggctcacacttgattctaagttccctagtagtggcgtgtttcctttctacgtgcttactttcccacctgacctgcttttccccaccgtgcagtctgataattggtattatttgttttgattggatctcagaaattacctctttagaccgagctgtgctcctccctctggatttcatgagcccattattttcttggcttaattgtccttgtaaatttggtctttttgtcctgggctttccctgtcatgtgctcctggcagccaggagaggcagtggagcttttctccgttgactgtcagaagaaagtgactgttgttgaaaatgtttgctgcaactaaaggagagctgctaagatctactttctagttaaacaagcttttatatttctccccggctcctctcagttcccttgggaaatcaactaattgtgtgtgtaagctaagtgtgtggaggagagaagatgcaaaaaggaagagaaaggtggggaaagaaggaaattgggaacaattagacaaaaagactatagtttgaggccatcaggagtattctagtctgactgaagccaggcagaaggcacagtatctcttgtcctcctgggttttaagcagctgcaacaggaggaggaactgcggcttgtgtttacaaggccgaaatctgaagaaaaagcttccattctttt

SEQ ID NO: 20812 - DNA, 1048 bp, Homo sapiens
tatcaagatcacagggtgtaagatctatatagaaaagttaagtatatttctatatgctagctagaaatgaacaatccaaaaatgaaattaagaaaatattctgttcatgatagcattaaaaagaataaaataggaataaattgagcaaaaaaggtataagacttatacactaaaacttgtggaacattgctgacagaaattaaataaaatcagccaggtgtggtggctcacgcctgtaatcccaaacccagaggctgaggcggatggatcacctgaggtcaagagttccagaccggccgggtgtggtggctcacgcctgtaatcccagcactttgggaggctgaggtgggtggatcacctgaggtcaggagttcgagaccagtctggccaacatggttaaaccccatctctactaaaaatacaaatattagcctggcatggtggcagtcacctgtaatcccagctactcgggaggctgaggcgggagaatcgcttgaacccgggaggtggaggttgcagattgcagtgagccgagatcgcgccattgcactccagcctgggtcacaagagcgaaaccctgtctcaaaaaaaaaaaaaaaaagagttccagaccagcctgtccaacatggtgaaaccctgtctctaataaaaatacaaaaaattagctgggcgtggtggtgttcttttagttccagctacttgggaggctgaggcaggagaatcgcttgaacccagatggcagaggttgtaagtggagatcgtgccactgcactccagcctgggagacagagcgagactccatctcaaaaaagaaaaaaaaaagaaattaaataaaatctaaataaatggagaggcagtccatgttcatggattagaggactcaatattgtcaagacagcagttctccttaaattgatcataaattcacagtccatatcaaatttccagcagcctttctttttctttctagaatttgacaagccgatcctaaaatttacatggaaacaaaggacctagaatagccaaaacacttttgaaaagggaatgt

SEQ ID NO: 20813 - DNA, 1006 bp, Homo sapiens
ttaccaccttgggaggccaaggtggatggattgcctgagctcaggagtttgaggccagcttggacaacattatgaaaccccatctctactaaaaatataaaaaattagccaggcatggtgccacacgcctttagtatcagctgcttgggaggctgaggcacgagaaccacttgaacctaggaggtggaggttgcagtgagctgagattgcactccagcctgagggatagagcgagactctgtctcaaaaacaaagcaaaacaaaacaaaacaataagaaaaaagacattcaacacaatagaaatatggggaaaagacttcaacaggcacttcaaaagaagataccaaatgtcaagtaagtatatgaaaaggtgctcaatattactagtcatcagggatttgcaaattaaaattacaatgagttaaacacatagcccaaccaaaaaaggtaaaattaaaaaacgagcaatatcaagtgttagcaaggaagtggaacacactgactcttacacatcactggtattaatatgaattggtacagccactttagaaaactatttagcagtatcatttaaagctaaacatgcacatacctcactagtgagcaatttcattttagtgtatattcccagaggaaattagttcatttatccatcagaaataagcaaatattgtcaaaattcataaacaacccaaatgtccgtgaatagtagaataggtaagtaaatcatggtatatcatatgatggaataccatacagaaatgaaaatgaacaaactactgctgtatcacaacatgggtgaatttttttttccataaattcgaccaagtggtaagcatagataaattttatacacataaggccaggcgtggtggctcacgcctgtaatcccagcactttgagaggctgaggtgggaggatcagttgaggccaggagttcaagaccagcctggccaaaatggtgaaacctcatctctagtaaaaatacaaaaaaaattacctgggt

SEQ ID NO: 20814 - DNA, 1046 bp, Homo sapiens
aatggtgcgatcttggctcactgcaaccttcgtctcctggtttcaagagattctcatgcctcagcctcccgagtagctgggattacacgcgtgcgccactacgcctggctaatttttgtattttcggtagagacagggtttcaccatgttggccaggctggtctccaactcctgacctcaggtgatccaccctcctcggcctcccaaagtgctgggattataggcatgagccaccacgccaggcttgttttgttttgatttaccagtgcataatagaaatacatcaagcataagattaaattgctttttaaaaaggaagtcttgggaaatggtggcatttatcttagtgaatttatagttcaaaaactaggtaatgctgaagacctggtattgtgaaagccagcctcagagaacgctctctcatctgatgttgacctctctaaagtgctgtgaacaggttcaggtgtagatcactatgtaacattatttcctttgcagtcaatgactaggaaaatttttatacctgtcacgtggactggtttaacaggtttagggctagtgtttttctttctttaaaatctttttttcctttaattggatggctaatatcctaatagtcttagttgaggaaagaagtaaattaaaatacaaactgtggaataatgcattagaaattagtattttcaattgtgggaggagaagagaatccttttgtaattcagaaaaaaaagttatctcattatctaacatgttcctaaagattaacaattatagaagctgccgggcgcggtggctcactcctgtaatcctagcactttgagaggtcgaggctggcgaatcacaaggtctggagatcgacaccatcctggctaacacagtgaaaccccgtctctactaaaaatacaaaaaattagctgggtgtggtggtaggcacctgcagtcccagctactcggaaggctgaggcaggagaatggcatgaacctgggaggcagagcttgcagtgagctgagattgcgccactgtactccagcctgggtgacagagt

SEQ ID NO: 20815 - DNA, 1033 bp, Homo sapiens
aggcacacgccaccatgcccagctaatttttgtatttttagtagagacgaggttttaccatgttggccaggatggtcctgatctcttgacctcatgatccgcctgcctcggccttccaaagtgctgggattacaggcgtgagccaccgcacctgacgcttttgagtttttaagagtttttctgtaacatcctgagagcctatccacttatttcccagttttagtctagagtttaaagttttttccattattctgcttgtggatccccaatttctctaaaaatgtcaagttttattttatttttccagtaatgtagcaatagcatctaggggactgccagtttataaagaggaaccggctacactaaagaaaaaaaaaaactatatgaaaaaaagaaagggtgagaaaaggaaaggagggcagaaggagagaaacttcaggctgaggttaagaaccactgtccagcagctgtgggggaataggcattctcccccagtgtggatatgcacaatggaaccaacctctagtgagggtaatttagcagtaactatcagcctttgatgcaacaatcctgcttcttggaatcttattgataaattgataaatcttattgataaattgcaggtatacaagaagaatatatatagatactgagtaatagtgaaagaggggaaaagaatttattaaaagaaaaaagagaaaaaagaagaatatatacggtcattgttttcggaattgtttgtatttgcaaaagattggaaacgaccaaaatatatatcaatagggggctagtagaatatagaagagacatggccgggtgcagtggctcacgcctgtaatcccagcactttgggaggccaaggcgggcagatcacaaggtcaggcgatcaagaccatcctggccaacacggtgaaaccccatctctaccaaaaatacaaaaaattaactgggtgtggtggcgagtgcctgtagtcccagctactcgggaggctgaggcaggagaatggcgtgaacccgagaggcggagcttgca

SEQ ID NO: 20816 - DNA, 1046 bp, Homo sapiens
ggggcagtggtgggaaaagtctctgatgaagcccccaggactttacattgtgagatccctggtaaaaaagctataaaacaaagtagaaaagatgaaactttaggggaaaactttatcctgcctttggttttatctgatgaaaccctgcccagctgatagtaaacttccaattgtggtcccattaacctgtctgtccataggtttagggtgtgagcacaaaataatgccaagagtaaatgaggatagagacactaataagagatatggattaaatgcccatgggacttttaactaacataggatcaaagtgaaggagtcatgccaatgatatcattgcctatcattatttaggccataataataataaagatgaaggccataaaaactgttgacagtttccttctttaaaaagagatggctccaaagtccaaggaagaacatgaaatatcacagttagccttaatgactgctgcaagtgtgtctagtagaatctagatcaactactctgagaggggactggggaaagcaggaggagctggaagaaggaaaagccacccagcttcatgtactccttgatttcattcattcagcaatttttttttttttaagacagggtccccctctgtcacccaggctggagtgcaatggtgtgatctcagctcactgcaacctctgcctcccaggttaaaatgattctcatgcctcagcctcccaagtagctgagactacaggtgcatgccatcgcacccggctaatttttatattttttggtagagatggggtttcaccatgctggccaggctggtcttaaactcctgacctcaagtgatctgcccacctcggcctcccaaagtgctggggttacagacatgagccactgtgcccagcctggccttgctttcaaaggatctctgggctactgtgtggggaatgggttggggtgggcaagggtagaaggagggtaacctgttaggaggccattgcaaaagtccagatgagagatgatgtgattcacaccagcagtggaagtgatgggagatggatag

SEQ ID NO: 20817 - DNA, 1572 bp, Homo sapiens
cagcctggcccacatggtgaaaccccatctctactaaaaatacaaaaattagccaggcgtggtggtgcatgcctgtaatcccaactactcaggaggctgaggcatgagaatcacttgaacccgggaggcagaggttgcagtgagccaagattgcatcactgcactccagcctgggcaacagagcaagaccctgtctcaaaaacaaaaacaaacaaacaaacaaaaatatatatatgcttgaaaattgctaagagagtagattttagttgttcttaccacacaaaaaaataagtatttgcggtaatgggtatatatttgaggtaatggatttgttaattagcttgatttagccattccacaatgagtacgtctatcaacacatgttgtacatcatgaatatacacaatttttatttgccaaaaaatgtttaaatatgccataagtaaattaaataaaatatatttcttagaacattatttataaaaataaagcaaaaaaccagatctgtccaaatataactaataaactgactctcattatttaacactcaagagttggctggtatcaggattttcataataccatggccattaaacagttttcgtgaatccaggccttcgttacccatctcttctgcttcttcctcaccttactgacttctttctcatgtacacagagtgcggaatatctgtctcatgagtcaccagcctttgggcagaacccaaaaaattaggtgaactagaaatatattgttgctaagtggctcggtttatcagacaattctaaaatgcctactaggctgcctagctgcatacttttctgcctaatgtacaggacctccatcttgtgactgtcaaaacaggctcctaaattattttgcatcatttggtgacaggcagtctatactcttgtgcaaccaacaggtgcccaataaatgcttggaatatgcaaggaacttggcattgtttaatataattgaaaaagcaagcatggactttgaaactttcctgaatttgaattctgtctccactccttatcacctttaagaatttagggcctggtgcggtggctcatgcctataatcccagcactttgggaggctgaggcgggtggatcacttgagatcaggagttcgagaccagcctagccaacatggtgaaaccccatctctactaaaaatataaaaaattagccgggcatggtggtgcatgcttataatcccaactacttgggaggctgaggcaggagaatcgcttgaacccaggaggcagaggttgccgtgagccgagatcccaccattgcactccagcctgggcaacaagagtgaaactccatctaaaaaaaaaaaagaatttagggaagttattatcttcctgcatctcctttctcctcctatgtaaaatgaaaataataatgtctaattcataagcgtttcataaggatatgatgaaagcccgatgcagtagctcacgcctgtaatcccagcactttgagaggctgatgtgggtgggtcacttgaagtcagtagttcgagactagcctagccaacatggtgaaaccctgtctctacta

SEQ ID NO: 20818 - DNA, 1035 bp, Homo sapiens
caccgcccagacgcggggcgggcccccggggtcaggcccggccccacaccgccctcccccacagagcggcgaggcccgccgctgcccgcccgccggcccgccagcctgccgcgtcaagcccgccgccggggcccgcagcccgcgactcctcccccgccgcacctcgtggcccccgcttctccctagtcccgctagaggggctcgcgctccgccacccgcccgcccgcccagcgctgcctggcgcctcacctcgccgagaccccctaatccgcgccaaagagccgccggtcgcgcgcgcctccgggctttgcgtgcgcgcccccgggcggcgcagtggcgagcgcgccgcgtgccgcgcgcccgccgcctccgcccctcggccgtggaggcccccgccgggtgctgagcgcccgccaccgccctcttggccttttcccggtccccgccgcgcgcctgctgctgtccccgtgcccgaggactgggaggatggggctgagccgcttgcctgacttttgatccgaccagtaatcactttgcccgtgtggcgcgtggcccgttgcctgaggcttcctggcgcgtggggctgtttggtcccctccggagtgcggtgaggcgggccgagccgggactgcctgggtttggggataacgttcccatctccacccctgttgcagcaagggaaattgaggctgagggaactgggcccagggacggcgagccgtggctgcctctccagtccgggccccgaagggctgctcgtggatgaaccagactgattttaaggggtgaagagggtgcgtttcaatcagatgcttctggaacgtcgaaattgtcttctttggaaagaaccatcccctctttgggcttcagaggcccaaattgaggcgcaatgatgagaggatgtggtggtctactctgatgtcaatcttgagggctaggtatgtcccaagatctcttattactgctgttaatgatgattctaatagctaccatttgtcgagtacttattgcatgccagacattgcacaaagcagg

SEQ ID NO: 20819 - DNA, 1011 bp, Homo sapiens
gagcaccactccctgtaggtgggtcattctctctctcctaccataatccccaccgcttcctgtctcagcggacctacttaagttgttcactttacttgcctggtctctgaaggcatttgagtttgcctcttctgctttaatctcatcctgacaggaggggtcgttgatttcaactggattgagagactgtgaaggaactcggttacaaatccataacaaatgactggaaaagccacacaactcttacatactgatatttagaaaggtgcttttgttctccagactccagtgattctgcactgggcattatggaagacttgtgatagatcagagaagagtcatgttgaaaacgaaacgcagggaaaccgtgcaagagagaacagtagaaaagatttaacatgtagcttcccagaaagaatgaatgaggaatgtgtttgtgaatgcctcatgacataagcatctgaagaagagggtcgtgggctgggcgcggtggctcacacctgtaatctcaacgctttgggaggggaggcaggcagataacttgagatcaggagttcgagaccagcctggccaacacaatgaaaccgtgtatctactaaaaatacaaaaattagccaggcatgatggtgtgcacctgtagtcccagctactcaggaggctgaggcaggagaattgcttgaacccaggaggcggaggttgcactgagccgagatcacaccaccgtactccagtctgagcgacagagcaagaatctgtctcaaaaaaaaaaaaaaaaaaaaaagaagagggttgtggtagcgaggaagagcctctgcctgaactaaggtgagtagccaaaacctttgactgtattatccccttctcccaggatcacacaagaggagtttgagccttggtgataaagaaataagccgttcttctccttctccagctttggagcagcctttcagagaccgttccaatactctgaatgagaagcccgccctgcccgtcatccgagacaagtacaaa

SEQ ID NO: 20820 - DNA, 1014 bp, Homo sapiens
ggtgcatgcctgcggtcccagctactcaggaggctgaggcgagaggatcgcttgagccagggaggctgaggctgctgtgagccatgatcatgccactgcactccagcctggacaacagagcaagaccctgtctcaaaaaaaaaaaaaaatcagtaaaaaatatgccgaaatagcttcagagtaattatgaattgccttccaaaaaccactgttttgcacttgcctgcaagaataggaaaaacaaaaggactgtaaggtggcaggatggcagaaccaaacaagagtagtacaccttggagttttttcgaaatatgggttgggtttttgggctcttggttgatttaaaataaaatttaaatgccttcagcgtctgtgataggtgccaacatgaagctaccgagttccagagaaagaggggagagctgatcactcatcagtgctgcgagactatcaaagggcccttcaggacctatctgttctttgtgtgtaaagagtaacaataaaagaacaccagtgtacccaccgtatagtttaaaaatcaggactcagcctactctttccactaaccgcgatcatggttttcaaacggaggaccaacggcgctttgccactgggccgccagctgggccctgcagagggcctaccagacaatgaatcagctcccttggagaggcgcccgcgaccgccccaccagcccgagagctagaattgaatctgggggacccctgcggcgccgggtcacgtgccgtgggcgcgccacgcctccccgagggccgggggagtcacgtgggcgcgaggccccgccccatcgcccggtccgcggcgaggtggggcctggtgtttgacccggaagtggctgtgttcagctgacagctgctgataaggtggcggcggcgaaggcagcggcaggtcgggagcaagatggcgctgcggccaggagctggttctggtggcggcggggccgcgggagctggcgcggggtccgccgggggaggcgggtaggtgtgaagagcc

SEQ ID NO: 20821 - DNA, 1030 bp, Homo sapiens
tcgttatcttcagccccaacttccccattgagctacaaacctgaatccttgctgcctagtggacctcacttcaggcatcacaaactcagccccatgcagtgagtcggggaggaactggatttggagccagaagaactggttctaatatctacttccctgtgtagagttgggatttgggattatatgagttaatatacaccaaagaactttgtattactataataatagtttgcaaacattgattattttctcaaaacttttttcctttgtctgttaccacttagttaatgacattcaaccttcactaggctataggatcagactgataggattcgtgtctaacatggattaccagtgagtgatgactggcaagtcaaccactctgtgcctcattttcctcatctgtaaacggaggataataatacaatactcctcataagttgttaggaaaattacccgagttaatacatgtaaagcacttagtaaccgtttctagcatgcagtaagcactgaatcattgtgaactcattaggtcaggatccgaacctatgtgtcataccatgtagtaatgtagtttactgtgatggttctgcctcacttaggtgattgtgattttctaaagggcagagaccatgtctaatgcatctttgtgttcctagtgcctcattatttgatacacagtaggtttcagtaaatgtttattaaactggtggtagggttatggaaagtaaatatacgtagaattttttattcaatttttcttactttgctctttacaggaaaaaggtcactggtcagaacagcaagaagaaagtagctcttgaagacaaaagttaaaaacagactttaaaaatactgtcccagaaatgtaattttatgatcccagcatgaatgttattttcatggaatacttgaagtcttacagtcacctgtaccaaacatttgaaatcaactacaagtacatgggactggtgataaatgatcctaaactatcaagtcagtttcaatttgtaggtgccttttttttttc

SEQ ID NO: 20822 - DNA, 1047 bp, Homo sapiens
aggttagaagttatgactatgacaataacacattaatatgaagaaagcatagacattttatgaaggttttctatgaaagggcatgaaatgtacctaatatctgtgatgttttgattcttggatttaaccaaaaagtttcatatgctgctaaaggttatcccagaaactgttaatgttgctttataacatctgagaatgtatttatttggccatatccatggtggcctctttacttcacttttcagataaacttcttgcggaataaacacaaaattcacgtccaaggaaccgatcttcctgacccaattgctacatttcagcaacttgaccaggaatataaaatcaattctcgactacttcagaacattctagatgcaggtttccaaatgcctacgccaatccaaatgcaagccatcccagttatgctgcatgtgagtatgaagatctagaatgcctgtaacattccttcctctgtgtgtttgctcattctcttccctctcttcttgaactctttctttccaccttatctcccctgttaaaatccttcacttccttttaaggttcatcaaatgcctgtgcctccataaaagttgtcttgatcactccatctagatgtgatcttcttccttttctagtaccctttcccccacactgcagttcttccatggtatttggtgtgttcttttccttgcaacatttattttacattttaaactactttgtattcgcaccaatcatatttatctttttcattttactagtgtgtaaccccttggagaatggggattatgttctattcattcatacattcattatttagtttataatgcccaggaactactccagaaatacaaatgctttctaaagttcttgtacataaactgacttatttttccgaatactttttattattaaagtatactttacatacaataaaatgcatagatttttaagtgcccagtttagtgagtttcagcaatgcatgccctgtgtaaccactattccagtgaagatagagaacatatgtattaccccagacaattttct

SEQ ID NO: 20823 - DNA, 1079 bp, Homo sapiens
accacttgaggtcgggagtttgagaccagcctggccaacatggtgaaactccgtctctactaaaaatataaaaaaattagccagatatggtggtgcacgcctgtaatcccagctatttgggaggctgaggcaggaaaatcgcttgaacccaggaggtggaggttgcagtgagctgagatcatgcctctgcattccagcctgggtgacagagcaagactctgtctcaaaaaaaaaaaaaaaagaaaaaaaacaacttccatgttttcttatttgtagtttcaatttgttatattaaaatctttgaccctgtgaaattttatttggtataaggagtgaatagggaactaaaatttttttcagatgtctgaataattgtcttaataacataattgtcttaataccatatgttggtgttttatcttatgttgactaattgtcttaataccatatgttgataatccgtgttttctctattggactttaacgcaactttaattgtatacttattttccatatacattcaagtctgtctctggacctcttctattctgtttctgtatttgtacaccaatactagcttgttttaaatactatggccttatatgttataaaatccagtagagtggagaggcataccaatattttaggcaactcaatgttttctccctacagtgatctacagaatcattgcaatcccaattagaattctagcagaattttttttgtagaaatttctactaaagctttggctaactttcttcagacactctcataataagcagatactactctttggccttccagaaagtcaacaagtgaagtgccttgagcatccaaaaaacctgttgctgttgcctttgctcttgactggtcaacttttgctttgactggaccacttccacctcttggtagccattggtttaattgtgctttgtctttatgatcaaactggtaaaaccatgtttcatcttctgttacagttcttcaaagaaatgctttaggaccttgattccacttgtttaaaatttcttttgaaatctctgctcttgtctgcagctgatttgggagcagtggttttg

SEQ ID NO: 20824 - DNA, 1048 bp, Homo sapiens
aactctggagccagattatctgggtctaaatgctaagtctgccagttactcatttttagacctacctcaagttacttaatttccgaatgccttggttttctcattcgtaatactgctatttaccttatagagttgtaaatatgaagcaatttaatatgtataaacatgcttagaaatctgcttgacatttagtaagcatatatgtgttcattgctaatattaatttgttactattatgaggtcagagaaggtctcttcagattccatttgtccagacacctgttagctcgacagatacttggtgaaagggtagaaaagatgaggagtcattgaacagtcttgcttgaatgaaagcaatggtattctgtcagtaggtttcattttacattttttgggttttagataggaaaaaggaaatatgactttgattcttcggaggtgcttcagggactggacttttttggaaacaagaagtctgtcccaggtgtgtgtggagcatcacaaacacatcagaagccccaaaatggagagaaaaaagaagagagcctaactgaaaggaagagggagcagagcaagaaaaaaaggaagacgatgacttcaggttagtgtttgatttctgtcatgttttttctctttaatttttttcagttataaaaataatacaggcttatggctacaagtcagacaataaggtcatttgtcagctgatggcactcaggttgtttccaggtatttgtcattagaaatattgttacagcaaaggtaattttaagtaaagatatttatacataaatccttttgtacaggtactgttatttctgcagaataccatccgaaaagtagcatcatatggtgaaagggtatgtaccctttctctgaaaaatactacaaagtgacttcccaagtccttgtcagtgctgaatattattggtgttaatttttttgccaagctaatgaatgaaactttttttttttgagacagagtctcactctgtctccaggctggagtgcagtggcgcgatctcggctcactgcaacctctgcctcc

SEQ ID NO: 20825 - DNA, 1767 bp, Homo sapiens
acgcctgtaatcctagcactttgggaggccaggatgtgaggactgattgagcccaggagttcaagaccagcttgcaacatagcgagaccccacctctacaaaaaatacaaaaatattagccgggtgtggtggtatgtgcctgtagtcccagctactcaggaggctgaaatgggaagggtcacttgagcccaggagtttgaggttacagtgagcaatcgtggcaccactgcactccagcctgggcaacagaacaagatcctgtctctgaaaaaataaaaaatcaagggaatagtcatgtgttgcttaacaacagggatatgttctgagaaatatgttgtcaggcaatttcatcaatatgtgaacatcatagaatgtacttacagaaacctacacagtatgtcctaggctatatacacctagcctacacggtatataccctgttgctcctaggctacaaaatacctgtacagcatgttactgtactgaataccataggcaattataacacaatagtatttgtatacctgaacatttctcaatatagaaaagttacagtaaaaatatgatattaaagatgctccatcagctggctgatatgcctataatccgagcactttgggaggtggactgcttgagtccaggagtttgataccagcctgggcaccatgccaaaacctcatctctataaaaagtacaaaaattagctgggtgtggtggcatgtgcctgtagtcccagctacttgggaggctgaggtaggaggatcatagtttcaaagtgtggcacttactggttctccactcactccctcctgccatcttgtgaagaaggtgcctgcttccccttccccttctgccatgattgtaagtttccggaactgcaagtcaattaagcctgtttcctttataaattacccaatctcaggtatttctttacatcagtgtgaaaacaaatgaatacagtccccttccctgaggtgccttctccttaggcaaccagctgcccccatgctcctcttctgcccccctggtatttcctttcccctcatgaggcccaagtgatccacatggccagccacagccccatcctactgcaggcctgtgtggctgctagagaggccaggctcctttccgcaccccgaggctgcccgatatgctttctgcatcctgtagaaaactgacccactattctcatactggtgcaacttcttccattacctcaaaactggacaacgtgaacttgtttcttgtctcttcttgctagggctgtcactgggacagtccgagatgggggggtggggggagacaatggatgaatggatggatgaatggacagtagtccagggagatgtccctgtgtgtcctgaactgggaccttcctccaatgagaagccttcctgagtgagtttatacagtcatcccttggtatccatggattagttctagggtccccggggatgccaaaatccatggatcctcaagtctctgacataacatggcctagtatttacatatcagctatgcacatcctcccgtagacattagaccatctctggattattcatgatgtgtaatacaatgcagatgctacataaatggtcgtgatactggattctttagggaataatgacaagaacaaactctgcacatgttcaatagaaacataaccgtccaatttattttctgaatattttccatctgctgttgctgaatctacagatgcagagctcctggatacgagagccaagtgtgctttgagagtagggtggg

SEQ ID NO: 20826 - DNA, 1038 bp, Homo sapiens
tttgccttctactttcaattgccttcttagatgagctaagtgttgaacggccggctcagtgctgtttttgggactatggaatgcatcttcctccaccactcccctcatttaatgaaaggactttcttctctctccatctagcacagtaatcgctaatcccttagacaatgttttcccaaaatttcaggcagctattctatcaacaaactgataattaaacttgtgtcacatctttgatattctgttgtattaattctgttggggtagtctttaatcttcgtgaaactttttctttccatattaggaaatattttcctaatatctctaaagcctaacttgtccatctgacttactgtctgaatcttcccaacttatgcatgcccacttttattgtttaaatttgtttcttttttttttttttttaaacatagggagactgcattgcttattgatccaaaaaattcctgttcttcatcccgccagtgggttgctctggttgtgggacatgaacttgcccatcaatggtttggaaatcttgttactatggtatttaatatttttaagtgctcaaatatatttatcttcatcctactccacattattttggctacatagtatttcaagtttggctgcaacactgtgccaaaaaataattgagtgatagaaaagtattattttaaaaggtccactttgaaagggcttatcagaatctctgcattgaacaagggcatatggacagtctttattcaacagacacttcctaaactgttctaaaatttgtctgcaaatgggaaaagtcaagatactaatttgggtgagaggaaaagattcctcttaggtgtagatgaatgaatcatgcagtgagattccaggctaactgtagtttcttgaatcttatttgttaatctgactcacagctgaaaagtaacctgatgaataacagactgatctttaattagagagaaatgtttttaggagtcagttttttcattgcctaaaatgttaagttgaaatttaatgaaataaaagtaaacaaac

SEQ ID NO: 20827 - DNA, 1029 bp, Homo sapiens
ccaggctggtctcgaactcctgacctcaggtgatccgcccacctcggcctcccaaagtgctggaattacaagcatgagccactgcacccagtctgttgtttctttttatgatacagtatcttgtcattggttccattttatttactaaataaatggaaaattctgtttactgaagtgtctttcctttataactgataccctgcagaacccctaagttttattttgctttcataaggttgctcttttttaaatttttaatgaaagagtaaggactcaagtaggtcaagtggcgacagttttatgtgtagcatatggaagtgccattaaatgaatgacctgtcttgaattgatagagcatctgtctttattcccattgctgccatcccagataaagaacaaagcacatcaaagattgagaatatttttatttttaattcaaaaataaaagccagagaggcaacttaccatgttttcccaactttgaattcttatagcatactctttactgttctgtgctctgtgctgtgttaacattattgatttgaaggcatttgcattaaatttgaaatgttaaaatgtaaacaaaaatttagttgtaaataattataatatattgttaaaatccatagcagacactgttcctggatatttgctggaatggcagtggtagcaagtgttgtcttttctttctagttaatgcctagcttgttgcctggcactgaagagaaagtaaatatttgaacaagggaatgaatgaatgacagagggaaatggcgactgctttatgaaataacttgttaggttaattctaaggtatttatatttcatattcttttcttaaggctactgatgcccgaagggcttttccttgctgggatgagcctgctatcaaagcaacttttgatatctcattggttgttcctaaagacagagtagctttatcaaacatggtatgtatgtgtttataagtttatctaaaattttaataggctttagcagatttagtttgctgattagatgggataatat

SEQ ID NO: 20828 - DNA, 1051 bp, Homo sapiens
cactacttactaattttatgacactggacaagttatttagcttctcagcctcagtttcctcatctgaaaaaatgaggacaatatctacttccaggtttataaatagttatatatattttaaaagcactgtgcacaatagcacatatcaggcatttaagaataaatgtttgtttcctttcctgttcttatttccacatattggtagtttgagactaagttaataactttttaggcagtcaccctaaacatgactttcaagagttattttaggattagtctgccttttactttagtaagtactgtattctctccattgccaggaggaatatttgaaaaaggaaggaatgatttgaacattgtaaatagctaactgaatatagtgtcttgaggacatatttttggtaactgtgtttaacatctccataaaagtgttttttatttatcttcaatcacaggtacgggaaccttaaagatagattttgttggagagctgaatgacaaaatgaaaggtttctatagaagtaagtatactaccccttctggagaggtgcgctatgctgctgtaacacagtttgaggtatgggttattcttctctaaaatattattattcttaaattaggcattctgacaaaggtgtgtttattatgtggggtgattatttgaggctaggtgcccttggccatgattgtattcacaattttagaatttttattttatatttagccattatctctatagaaaggagggaattaagggtatgggttggggaatgattatatacagttatacacacagacattcaaacacacgacacattttgatacctgaattgcctatatactgtgtacctttcttaaaatcattctcttagtatttgacacctatggcttttcctacagtattattagctgttttctagaattcctttccttctttgacatcttttgtttatcttactgtagtatctgtgctgtctttgattttttttctctctctctgtgtgtgtgtgtgtgtgtgtgtgtgtgtgtatacatatatatatatacacac

SEQ ID NO: 20829 - DNA, 1082 bp, Homo sapiens
ttggagtgggggatggattagctaaagcatgactttctacagtgaagagaaaatgtctaaagttgaaaaatgaagaaataggccgtggtcgtggctcatgcctgtaatcccaacactttgggaggctgaggtgggaggattgcttgcccaggaattgaaggctgcagtgagccgtgattgtaccactgccctcgagcctgggcgacagagcaagactgtctcaaagaaaggaaaagaaaaaatagctgtgtaagcaagacatttagaagtcacagagtttgaaattgattgcttctaggggcagggtgtggggagtagggcctagtgttgagcagggcctggagcttacgtattttaaactgtgaactattactttgatagaaatttaaaaaattttagagttttaaatctatatcattacagactatatatattctgtgtttacactgtgaaaaaattagaagtcaatagaaaaagagaaatgaaaaaaatccctttttatatatttgaaaaaattatacctctgaataattgagtcaaagaagacttgttatggaaattagaaaatatttagaactgaataatgaaattaccacatatgaaacattagggataaacatgtttcatatgcagataaaatattagaatatttagttaagaagaaagactgaaaattaattagctaagcattaaactcataaaaacaaaaggtaacttggagaaagtagaagaaagttttaagagcagaaacaaatgaaataagtgaagtgaggggcagaaatattaaaaaactgatatttaaaaatagtcccaaaagatatataaacctagccagtatagaaaataaaagcgtagattgaattgttgttcagcattaggaaatatggtaaccatttttcattaaatttaaaaagttaaacattctatatttatcaaaaggaatcagtttatttgctagaattcaccagggaagagtagacagaaacttctaacatgatagaagatatgtattacacacacacacacacacacacacacacacacacacacacacgacataatctgtgccaagtactgtttta

SEQ ID NO: 20830 - DNA, 1027 bp, Homo sapiens
aaaaagcaaagacaaatctaaagaaagttaaaaaaaaaaacaaacccatagctaattactatccttagagagttaagagaaagcattgcgtgcattaaacaaggacaggacagaatgccatcagataggaagaattacagcaggaaaacttggaaattatgataggtataaaaaacccagtaaaagtgttaaagatgaagttgaggaaacttccaagcagtagaaaaaacagatagaaaacagaaaaatagatttgagaaccagtccagcagaaccaacatccatctagtaaaacagaaagcagaggaaatgggaagaggattttttaattttcatttttgcaacagaatcttgctctgtcacccaggctggagtgcagtggtgcaatctcggctcaccacagcctccacctcgtgggttccagtgattctcctgcctcagcctcctgggtagctgagattacaggcacacaccaccacgcccagctgatttttgtatttttagtagagttggggtttcaccatgttggccaggctggtctcgaactccggaccttaggtgatgtgcccacttcggcctctcaaagtgctagggattacaggcgtgtgccactgtgcccggccagaagagaaactcaaaaagacaggaacatttccttgaactgatagagcaggagccttcagtttgcaaaggtacaccattgagagagactagcttaaaaaatgtaaaaattgccacactgactgaaattttagaacttctgcgataaagtaaaactcccagaaagttcctgtctgggatagggggcaataggagggaaggcaggtagcatactacctttaaaatttaggaatcagaatagtcctagacttaccattaggaacagtggaaacttagactctaatgaagctgttcattcaaaatacaaagtgaatctgattttcaacctaagattgcatgcttagcccaactttgaatttcggagtaaaaatattttcagatttgcaaggtcatagaaaatttgatt

SEQ ID NO: 20831 - DNA, 1094 bp, Homo sapiens
tcccgagtagctgggattacaggtgcctgccaccacgcccagctaatctttgtatttttagtagagatggggtttcaccatgttagccaggctggtctcgaacccctgacctcgtgatccacccaccttggcctcccaaagttctgggattacaggcatgagctgccgtgcccagccatgtttctgaatttttaagtcaacttctgaataggcaaagaattctttttgtttttttgttcaactttagtgctataaatcgccagttggacacaaaggttttagtgctatttaggtatgttttggtgaaatagtgtgaaggaatattgctgcttaaaagataagccattcattaaatgacgtctttgttttgaaacatgaagacttatgagaagcattttttttgtaagccaaagtagtttcactttatgtgttacagattttgaatagctcattatagactttgtaatttactgtctctcatttaggcaggtaattttagttgccagctaatcatgtttaaatatgtattggttattaataaatgattacccgtatacaggtctttcatgcagatagcgtactactctgatgttcttacctagttttgtggtatgttcagttgtctaagagcattgttgatctgcacacagattttgtttggtctatacagtgtttctgaaaacttgaattagttaccattaataaaaaatagagagactgcacatgaaatctgaatttgtagcttttaaaaaaaaaaattggaagatcaggccaggtgcggtggctcatgcctgtaatcccagcactttgggaggccgaggcggtcagatcacctgaggtcgggagttcgagaccagcctgaccaacatggagaaaccccgtctgtactagaaatacaaaatttaccgggcgtggtggcacatgcctgtaatcccagctactagggaggctgaggcaggaaaatcgcttgaacctgggaggcggaggttgcggtgagccgagatcacgccattgcactccagcctgggcaacaagagcaaaactccgtctcaaaaaaaaaaaaaaaaattggaagatctgtcagcactaaacct

SEQ ID NO: 20832 - DNA, 1024 bp, Homo sapiens
aatagagacagggtttcaccatattgatcaggctagtctcgaactcctgaccttgggtgatccacccgccttggcctcccaaagtgctgggattacaggcataagccactgtgcccggccaattgttaattttttttaggtttgataataatgttggggttatgtttacttttaaagggtccttatagaaatatgtattgaaatatttaggaatgaaattatgtgatgtcttggatttgcctaaaaataacatggggtttgttctaggttgggcacagtggctcgcacctgtaatcccaacagtttgggaggccaaggcaggaggattgtttgagcccaggagtttgagaccagcctgggcaacatagtgaaaccctatatctacaaaaaaatacaaaaattagccgtgcgtgatggcacacgtttgtagtctcagctactcaggtggctaaggtatgaaaatcacttgaaccccagaggttgcagtgagccgaggtcgcatcactgcactccagtctgggcaacagagcaagacctgtctctaaaaaacaaacaaagcaaaacaaaataatatggggtttggggtttgttctatatcttatatttttctttctttctttttttttttttagatggagtcttgttctgtcacccaggctggagtgcagtggcacaatctcagctcattacaatctctgcctactgggttcaagttattctcccacctcagcctcccaagtagctggaattacaggcacgagccaccacatccagctaatttttttgtatttttagtagacatggggtttcaccgtgttggccaggctggtcttgaactcctgacctcaagtgatccacctgcttcggcctcccaaagtgctgggattgattacaggcatgagccaccgtgcctggccattgttctataatatatctttttttttttttttaattgagacggagtctcgctctgttgcccaggctggagtgcagtggcgcaatcgcggctcactgcaagctccgc

SEQ ID NO: 20833 - DNA, 1058 bp, Homo sapiens
ctcctggttcttcctgggtcttcctagcttcattctttctccgtccccagggaccgggacgagaagaagggccccctggagaatggggatggggacaaagagaaagtgagtgctggggcctgcccaggactggaatgtgggctgggagggagtggcctggggtggatcccctaccatgggtgcctgtgccccagcagacaggggtgcgcttcctgcgatgcccagcagccatgaccgtcatgcatcttgccaagtttctccgcaacaagatggatgtgcccagcaagtacaaggtgggtccctgggcctttcaaaaaatgagtgtctgtgtatgggtgtgtcagacagtctgtgcagcccagccattggtcagagctggctaggtgtcacccagggcttgcgcggttaactgagcccatgcgttaacagaagggtggttgaaaccaagattgggggcagtctaggggtgttgaagtcagtgtgcagtggtgcatgggaccaagacggtgtgtatgtgtgcatgttgcacactcggaactgtggcagaggtgagtgcaaaaaacgcagggcctcctcaggctggttggctgtgggaaggctagtctgaaattccaacggagctccaggacatagcttttcaagcttgaatgtatatgtgtcccctggagatcttgttaaaatgcagattctgatttatttagtagattccatatttccttttttttttttttttttgagatggagtcttgctctgtcaccaggctagagtgcagtggagcgatctcggctcactgcaacctccgcctaccggattcaagcgattctcctgcctcagcctcccgagtagctgggattacaggcgcctgccaccacacctggctaatttttgtagttttagtagagacagggtttcaccatgttggccaggctggtcttaaactcctgacctcgtgatccaccccaccttggcctcccaaagtgctgggattacaggcatgagccacggcacccggccagattccatatttctaacaagctcctaggtactgaaggtccat

SEQ ID NO: 20834 - DNA, 1025 bp, Homo sapiens
ggaggagatggaggtggaggagcgggcagaggacgaggagtgtgagaatgatggggtgggtggcaacctactctgctcctatggcacacctccggacagccctggcaacctcctcagctttcctcggttctttggtcctggggaattcgacccctctgttgacgtctatgccatgaaaagccatgaaagtaagtcagagcctgcgcctgctctgcacagccctgccctcatcctaccccctcagctcattgtttagatccttctaggggcatctggacctccacctcattcattgctgcctttgacctctttctgcctccagattcccatccagggtcaccacctgaacctggggctcctcctctgccaggctttcctatacttccctgcttgtcctggctgactgaagagtggttctgctctggttcatgagatgaaccaaactttattcatactgtcctgtcagccccacagagtgactgtgaagatccaataagataagagctatgacagctggaaaggactccactggtccttttctcagccccaacatgataaggatggagctgagccttgtgtctgggggttgtagcagtgcccagctgctgtctgcccttctcctgccccctcttccttcttccctgctctccttgtccctccaggttcccccaagaaggaggtgtatttcatggccatcattgatatcctcacgccatacgatacaaagaagaaagctgcacatgctgccaaaacggtgaaacacggggtgagtcctctccatcttcatccagggcccagctgggtcggtgcatctgtgcttaccctcagaccccagggagggcagtctcaggcctcctgctccaaggaacacactcctgtctccttcttcccaggagagcagactggaagagcagcctgcctgccttgccatgttccctgccttcacccacctgctccctgccaggctgggcccaatttgtttatcccccagttctccagccctcggggccaagcctgccagtgtc

SEQ ID NO: 20835 - DNA, 1080 bp, Homo sapiens
cggtagctctggagaagaactttatgaaaagatgaaaactgtcccctctcttattggttttcctgcattttccagggaagctgctgaccccttaattctctttataagagttcaaatgacttctttcacagatgtcaaaccaccagtgttcaaagtgaccctgcttcattgagtcctgaaacagctcacttcctttgagagctagtgtgacttgctttgtgggacactcagtaactttgggttttgactctttaacgggtgggcactggaccatctcggtgggagtgcttgtgccactctggaaggctgttccctggggttgtgatgtttatcatgccacttccttcttacctgtgccaacagacctatttcactgcctcagcgtacaccagacccttcagaaacctctctggtgtcacccagatagattgtgcttactgagacaaatgaacgtttacttgatttagaagataatgtgacagaatgatgtcaggttaggtcaaagccaagggagtgacagaatctggaaaatcaaacaatacaaaaagccctaaatgaactgttaactatttgatctttggatgtaaaattgtaatgcgtatatgtacaaatgtacaatttttacatgcttttaaaaaaggttagctttgtgaaaataccttgtttggtcaatgactttactgggtaatagaaccacattgaaccttgatggcaagtaatacaataaggcaggccagctcgtttttctctctgaatctggctggtttaggaggagcctgggtttatcgacgagatctggagtatctattcttttccactgcttgcagtctccaatgtaggcagtgtaaaggtatagtaaaatgattttaggagtcagaaccaaattgccaatatgctccatggctcctaaaggaaaataaaatggaagtttttattttgcggcttcacttcttaccgtgtagtaaccttactacaattacagattttcaggagttgtttgctagtctctttcagtcaggtactaaaaaaaaaacaaaaaacaggctgggcgcggtggctcacacctgtaatctcagcact

SEQ ID NO: 20836 - DNA, 1049 bp, Homo sapiens
ttagtagagaccgagtttctccatgttggtcaggctggtctccacctcccgacctcaggtgatccgcccccctcggcctcccgaagtactgagattacacgtgtgagccactgcgcccggccagatatatatatatatatattgtttcctttgtcactgtttatattctgcaagttctttctaggtaaaagttttaatagaatggattcaagatatcagatctgatttatagtagcttgcaacttgaacagtaatacatgtactttcataataaaaatagtagtaaatataaaaaaatagtaaattcactacaagacctagtggagcatgcctattatcccggctactctggaggctgagatgagcaattctgaagtctagctacaggcacgcaaaaattggccgggtgtggtggtgtgtacctttagtctcagctactctggaggctgaagtgggaggatcacttgaggccaggaggtcaaggctacagtgagcaatgatcacactactgcactccagcctgggcaagactgtctctatgaaaaaaacaaaacaggccagttacagtggctcacgcctgtaatcccagcactttgggaggccgaggcaggcagatcatgaggtcaggagatcaagaccatcctggctaacggtgaaaccccgtctctactaaaaatacaaaaaaaattagccaggcatggtgacgggcacctgtagtcccagctattcaggagactgaggcaggagaatggcgtgaaaccgggaggcggagctttcagtgaaccaagatcgtgccactgcactccatcctgggcgacagagtgagactccgtctcaaaaaaaattaaaaaaacctccatctcggctgggtgcggaggctcacggctgtaatcccaacactttgagaggccaaggcaggtggattacctgaggtcaggagttccagatcaacctggccaatgtggcgaaacacgcgtctctactaaaaatacaaaaattagctgggtgtggtgatgggcgcctgtaatcccagctactcaggaggctga

SEQ ID NO: 20837 - DNA, 2245 bp, Homo sapiens
tggcaggagggtggattgttggtctcagtcagtggtgggacagaccagagctccgaacacttcagttttaaaactagttgtgagtttccaattctgttaatgtcttttttggtccttgtttctgctaaatgaatacatcccctccccttggaacttaatatcaataaataacaagcacagaaatatgcaaaaggaccaggtctacttgaagaatttgtgaggattaaatggtttatgagtagaggagggtcagtcagtaagtattggctacctcatgtgtgtcccattactaacttggttagacttatctattttttgtgtagtcttcctgtcataaaaattctgtgtaaggaccccatgctagtatcagtgaagattgtgaatccaggtgtgtctgactctacaatagttcttcacaagcattatatttcactgtgtagtgatacttcattttgaaagttgggaaaagcgtctttttcactttagtacagatgggtataaaagttacttaggacactagaaaacagttcattaaaagtaaaacaaagcctggtgcttgggcccaggaattcaaactgttttccagtgtaaatctgaatagcttggtctctgctcattgccaggactgggaggagttgggggtcccaggtcccatttctacatcccaattcagtgatactgggatcttaataacctacctgtaaggtgaagttggaaaaggcataggcaaggatagttgtcctgagagttttacacttgtgagaaaatactggcagctttgattttaagatgtgaatagatgatcgtggttcatgcctttactccctatactcccagcactttgggaggccaggcttgccaacatggcaaaaccctgtctctatgaaaaaaaaaaaaaaatctgggcatggtagtgtgcacctgtagtccaagatactagagaggctgaggtgggaggatcaccttgaagattgatatttacactgtcactgtctcaaacgctgagtgtacattctgtctagttggaaactgcttttgtggtggcactgcgacttgacaggttaatgactgctgtccttttttcttctctcagtacatccagcagtggtcattcgacaacgaaagtcataccgtagaaaagatggcgtgtttctttattttgaagataatgcaggagtcatagtgaacaataaaggcgagatgaaaggtaggaaatcagtccagcttgttccttaggtctctgaggttgggtggattgtctagaagtacaggccaaggatcttctgtgtttgacgatgtcttaatctgtcccccacatgtttttattttattttattttatttttttaatgcaggttctgccattacaggaccagtagcaaaggagtgtgcagacttgtggccccggattgcatccaatgctggcagcattgcatgattctccagtatatttgtaaaaaataaaaaaaaaaactaaacccattaaaaagtatttgtttgcagtgcttgtctccctgttcacttccagggttcaagcgattctcctgcctcagcctcctaagtagctgggattacaggcacctgccgtcatgcctggctagtttttgtatttttggtggagacagggtttcaccatgtttgccaaacgactcaaactcctgatctcaagtgatctgcccacccaggcctctacagtgtttttgacataccctgaccatcacttttctgaaatggaaactctgggcattttttttttaaagcaatccttgcttttttgtgagtttgcagactttcagcatcttccaattgctgtatttacaattttggcctcaaaaagtattatttgggttttgagtcccaaaaataatagtagatactgctcaatgactggctatacatggtagcttctcctggagtgaggaaggcattcaaatggctgggcgcggtagctggcacctgtaatcccaacactttcggaggccaaggcaggcagatcatgaggtcaggagttcaagaccaggctgaccaacgtggtgaaacctcctcttttctaaaaatacaaaaattagctgggcgtggtggcgcaccgcctgtaatctcagctactgagagaatcgcttgaacctgggaggtggagtttgcagcgagtcgagattgcaccattgtactccatccagcctgggcaacggagcaagattccgttcccgcccccgccccaaaaaaaggcattgaagttaagatagact

SEQ ID NO: 20838 - DNA, 1059 bp, Homo sapiens
cggagagagagagccaggccaccgcgagagcactgccagggccctcgaaagtggcagtggggtgctggagagttgagatggcaggatcccgacgtgaatgtagtctggataccgcgagatcgctccgcgaatagggctatcgtaatggggttgaagttagactggattaggccctggtttgcgcgacctctgcggttttatgccttgcaggagtaattgcgttttgcgaaagttagagcaagggttgagtcgtctaggtttcttaatttcgatgtcagagtgttaatagtaagaaataggctactttccgtgagaatcgggtggcacatggggacggcataagtaaaatccgagcgagctaatctatagcgtacagtctatcaaagcatgtgcggtgaattacagcttgagtatgagggggaactccgaaccatgtctagattgtgatctctttatcctgtttcccttccctttatatccacaggacgtggtgggtcctctggtgcgaaattccggatttccttgggtcttccggtaggagctgtaatcaattgtgctgacaacacaggtgaggtctttgcacgttgctatactcccccttttaaaagcactcaatgggcctgtggctaatgacctattgagccgtcaagaaaggggagagtgaaaacatcgcttttgggtgaagtggcaacatgtgttgtttgcttcaatcggtggtgtgacaaggcgttcttgcggactaactgcttgggcagtgagtggagggaggggctttggaagtgtttgggaaatgttatactgatggaacggcctgatggccctcaacattttttatttttatttacattcttttgtaggagccaaaaacctgtatatcatctccgtgaaggggatcaagggacggctgaacagacttcccgctgctggtgtgggtgacatggtgatggccacagtcaagaaaggcaaaccagagctcagaaaaaagggtgagtaaacactgagcccaccttaatactgatgagtagtggggggacgctttcctttattggaaaatggatc

SEQ ID NO: 20839 - DNA, 1024 bp, Homo sapiens
ttctaacacccattcccacatctgtcccccatttcccccacccttcctggttctccctggccatccctccccacccccaccctgatccctacatctgggctctgggaccagggtgggggaaggctgcatgggggagcctggagtctgggggagaggatctaatgtcatctccactctggggtttcccctccctgcttccccccccagacagagcatgtgcccccctatgacgtggtgccttccatgaggcccatcatcctggtgggaccgtcgctcaagggctacgaggtaggacttcctagaggggagtggatgcagaggggccttagaaagatcttcagaccccagagagatcccctagaagggcccgatcccaaggcatcctcccaggagggctacagactttcagagacaacccccagggggcccaatccacagaaagacccactcagaggagccccgtcccccaaagaaaccctcagaagagccctcccagagatgccacttacagggaccttggaaccagagaccccagtggaggcccctcagactcagacccccgcccgccgtaaaggcctgtccagaagaaagtggaacgtgagggtacaaatacccagcgactcagagtctgagcggctttaaatgcctgccttctcctccctccctccccacaaacccccacccccaggttacagacatgatgcagaaagctttatttgacttcttgaagcatcggtttgatggcaggtaagatcctgggagctgctcctcgcacctgccgttgctctctgctgctggggatgggcaggatgcctcgaatcacaatcctgggactcggactgaggaacagaaggcgggcctggaactggggagtgggcagggcattccagcccaccctgacccctgactcccctcttgccccattccccaggatctccatcactcgtgtgacggcagatatttccctggctaagcgctcagttctcaacaaccccagcaaacacatcatcattgagcgctccaa

SEQ ID NO: 20840 - DNA, 1027 bp, Homo sapiens
taccttagcctgaaccttctcaggccttgaagtcattattctactctttttttttcttttccttttttatggcactagagaatgaaaacctaaggtcttagaaaatcttaacttgaaaaagtctctaactggcatgatttgattacttttttcccctgtggacaaataattttctttcctatataatagatttttagtaagtgaaacctttgctgctgctttcctgggtttacattagttttttcctgcccttaagaataatttatctgtgcttctctgatgactgttaatttctaatagtgcaggaagggatgagcttttgatttcttctcactcccctcctcaccctacttccaaattacacactaacttctaacccttacagcctgttggcacatacacaagatccacgagaccatgctcctcagaagctacccatgtcctttctcaccatggtgtggctcttggagccctgagtatctgtgactacccactccaaaggttgactgtaagaggagagcggccttcttaattttgcatttcttaattttgtttttctccattcctgttttatgacttggccttcagatgcttcctactctggcctcctccttttttctcctaggaattgtttccaggtaacctaccatgtgcacttctcagctgctctgctcacctttgcccaccttcccgtgaccctgagagtacagatccgaataatgtggcctgtgcagagctcagagaactgtgaggactacccatgcctgtcagactctgctcagggacagagatggatgggtaaatggtgctgttggagacatttttatcttcataccaggctctgtttcatccctgcaccccgcacccccactcactcccctgagggggtaaaatgcagaggtggttgacctgaagggtctgattccctccttcccaagccttagggcctaccctggagtgctgcagtgtgtgagagctgctgcttgcttgtttctccactaggcctgctccaaatgcttagccaatc

SEQ ID NO: 20841 - DNA, 1052 bp, Homo sapiens
tttccatgccaacatgctgagcatgctcacaaagaaggctcgtccattcctcctgtgttttagtatttggcccagaggtttcctaaatggttgccttgaaatcactgtggtccaaatgtaattcttacacactcaaattatcactgtctgtagcacacttgtgcacctgtcttacattctctgttgctcccccccacactcttgctcagtctgtcacctgttcagtctgcttactcactcaattgttacccttttgctgttgtcgtgtttacagtttgcattttgaatgattagttgggattaccaaacattttttaaaaagatattatcaataaatatttttttaattctaaattttaccattaggggaccctgcctgaatctttgccaacctgcaaggaaactctaatgaaagcaagaaaagttatgagaagaaactgttttgatgaaaacagatgctaccttttggtttctattttatcttctgatatgtgataattcgcatggtatccccaatattccccctacatattcttccttctgtcagactccaccaactgtatcataaggaaagagagagatgtattattaggaaagagtgaaaatgataaatcacaaaacagagcctgaaagtccccaacacccaagttcagacattaatgattaatgttattatatatttactgaaatctaggagtgatcagtggcatctctgacctatgaggttgttttaacaggaatgccactagaggagctgtgtattctagccagtctgtttctctcttttcccccatttcagcctttcagggatacaagaatggctctataacagctggtcaattgtatgtcagtgttaatggattcatatctagtgttggcaccccaaagggccagaaccttcccataacctgtcagtcatctctcttttctgccccagtctttttttttttttttttttttttttaagacgggttctcactcttgcccagactggagtgcagtggtgcgatctcggctcaccgcaacctccacttcccaggctcaagcgattc

SEQ ID NO: 20842 - DNA, 1016 bp, Homo sapiens
gggctgtttagttaatgaagagacaaacagatttagtcatttaggagagtttctctatgtgggatgacaaccgatgttctttatgagggacattagatgtatagaaataattaaattacctttccttaaactttaatgtggatacaaacatttgttgagtgcctacagtgttccaggcattatgctgaagatagaaataaacaatcactgtcctcaaggagctcacagggcagtagagagaacaggcatggaaataatcaatatagagctagaaaagaggttttgcctagggcattatagcaatctcacatgtagggctttaaacctagcatggagagttcagaaaatgcttccccagaaatgagacaaatgagctgtgacttaaagagtagtagcctgtatctacaaaaaaatacaaaaattaggctgagcatgatacctcccacctgtaatcccagcactctgggaggccgaggcgggcagaaaatctgagtccaggagttcgagaccagcctgactaacatggtaaaaccccatctctactaaaaatacaaaaattagccgggcatgatggcacacacctgtaatcccagctacttgggaggctgaggcagaagaatcgcttgaaccccggaggtggaggctgtaaaaaaatcatgccactgtactctagcctgggcgcagagcgagactctgtcttaacaaaacaaaacgaaaataaaaattagccaggtgtggtggcacatgcgtgtagtcccatgagagagattgttgtgttgagtcctttttgtgggcagaggaaaaggactttgattcaggtatgctacaagatttgaggcccaagctctttgcatagtacctagtattgtaatttaggattttatttttaaaggcttgcctggcaaattaaccatcatttatctctcttggagaatttacaaactttgtacatgtactccttttgtaaattggatgctgcctctctgtaggatgttattttctccctggtttgtttc

SEQ ID NO: 20843 - DNA, 1071 bp, Homo sapiens
gtggcggctgggcagaggggctcctcacttcccagacggggtggctgccgggcggaggggctcctcacttctcagacggggcagccggtcagagacgctcctcacctcccagacggggtggcggcggggcagagacactcctcagttcccagacggggtcgcggccgggcagaggcactcttcacatctcagacggggcggcggggcagaggcgctccccacatcccagatgatgggcggccgggcagagacgctcctcacttcctagacgggatgacggccgggaagaggcgctccacacttcccagactgggcagccgggcagagggtctcctcacatcccagacgatgggtggccaggcagagacgctcctcacttcctagatggggtggcggccgggcagaggctgcaatctcggcactttgggaagccaaggcaggcggctgggaggtggaggttgtagcgagccgagatcacgccactgcgctccagcctgggcaacattgagcactgaatgagcgacactctgtctgcagtcccggcacctcgggaggccgaggctggcagatcactcgcggtcaggagctggagaccagcccggccaacacggggaaaccccgtctccaccaaaaaatacgaaaaccagtcaggcgtggcggcgcgcgcctgcaatcccaggcactcggcaggctgaggcaggagaatcaggcagggaggttgcagtgagtcgagatggcggcagtacagtccagcctcggctgggcatcagagggagaccgtgcaaagagggagacggagagggaggagggagagggagagggagagctgaatttttttccttctaaaatagtagagagccaggtgtgactcaggcctataatctgagctacttgggaggctgaggcaggcggattgcttcaggccaggagttagagaccagcctgggtaacatggctaggcactatctcttaaaaaagaaaaaggaaaaaggcagcaattcatactgtgttggggtcccctagatccatccacaggtatggtgatgtgcaggaggatccacaggactcatc

SEQ ID NO: 20844 - DNA, 1065 bp, Homo sapiens
ttgtagaagtcatgtgaacaacatataatgtgtttttttgttattttccattattatgtatattgaagtgaacatagtgccttattaggtgagatgtggcatttaatactttgttttctaaaattaaaatgattaagttttactttttgtggatttgggttggacatagttctagtagattgagtgtttgatagaatattttaaataattttttgggcatgaaacaaagttttgactgcatcttttttttttttttttgagacggagtctcgctctttagcccaggctggagtgcagtggcgcgatctctgctcactgcaagctccgcctcccgggttcatgccattctcctgcctcagcctcctgagtagctgggactacaagcgctagccaccatgcccggctaattttttgtatttttagtagagatggggtttcaccgtgttagctaggatggtctcgatctcctgacctcgtgatctgcctgcctcagcctcccaaagtgctgggattacaggcgtgagccactacgcctggccttgactgcatcttgactgtgacttatcacaagaggtcaggtgtggaattttcttattttttttttccagaggtggggtctcactgttttaccaggctggagtacagtggtgtaaacactgcttgctgcatccttgacctcttgggctcaagctatcctcctgcctcaaccttccaaggtgccgggattataggcatgagtcaccttgctcagcccaaaatctgaaagattttgagtgctgacatgacaccactatggaaaattctgaccaggcatggtgacttaatacctgtaatcccagccttttttttttttttttttttttttttttgagatggaatcttgctctgttgcccaggctggagtatggtggctcgatttttatttatttgcttatttattttgagacggagtcccgctctgttccccaggctggagtgcagtggcatgatctcagctcactgcaacctctgtctcccgggttcaagtgattctcctgcttcagcctcccaagtagctgggattac

SEQ ID NO: 20845 - DNA, 1087 bp, Homo sapiens
ttgggaggctgaggcaggagaatcacttgaatctgggagttggaggttgcagtgagccgagattgcgccactgcactccagcctaggcaacagagtgagactctatctccaaaaaaaaaaaaaagaaaagaaaaagataaaccaggaggtccaatgtttgactaataggaattctacaatgagaggacagagaaaccagaaaaacttccaaaatatttaccagattgaaaaatataaacttctagattgaaaggactgataggctgggcgcggtggcttatgcctacaatcccagcacttttggaggctgaggcaggcagatcttgaggtcaggagatcgagaccatcctggctaacacgccgaaaccccgtctctactaaaaaatacaaaaaattagctgggcgtggtggtgggtgcctgtagtcccagctacttgggaggctgaggcagcagaatagcgtgaacccaggggcagagcttgcagtgagtcgagattgtgccactgcactccagcctggctgacagagcgaggctccatctcaggaaaaaaaaaaaaaaaaggactgatagaataataacctcagaccaagaggcttgatgatgaaattttggtaaactgaggataaagagaatatactaaaagcttccaaaagtaactagaggttacattcaaaggaccccaaattagaatggcattatatatcacagcagaaacttacgaggtcagaaatgcatcaagcagtgtcttcagatatcttcagtggaaaggattttcatcttataattttattgcaagccaaattatcaatcagatgtgagtctaaggtaaatacatattttagacatgcaagagacttaaaaacctgagttcccatgagctgttttttcataaattactgtgagatgttcccttaaaaagcaagtgagacaatatggggtactggaaacaatgcaataaaagagaagagctactggagagcccaagatgacagttgtgtagccagtctagggaatttcttagagtgtaggaaaagaaagtgttctgggaatgtttagcaccagagaaaaacagtatctgatgcattt

SEQ ID NO: 20846 - DNA, 1030 bp, Homo sapiens
aaccactaaagtcactgatgatgatacactaattctgtgagtattgtctttgtcctatattattgaaaagtagcagctgggtgcggtggctcacgcctgtaatctcagcactttgggaggccgaggcaggtggatcacgaggtcaagagattgagaccatcctggccaacatggtgaaaccttgtctctactaaaaatacgaaaattagctgggtgtggtggcacgcgcctgtagtcccggctgctcgggaggctgaggcaggagaattgcttgaacccaggaggcggaggttgcagtgagccgagatcacgctactacacccagcctggcaagagagagagactccatctcagggaaaaaaaagaaaagaaaagaaaagtagcttgagctgtccgcttaaattctgtccatttcattggaattgctttggcacagttgtctcctcagtgtaaatggaattattttcagttttaggtttagaagatgtataattagtttttaggaatcctagacaatacatacaaaaaacagaaacagtgatgacccaacatattatagcaaggaaaaataaaatcttagttataaaattagttataatctagcaattttttttttttgagatggagtctcgctctattgccttggctggagtgcactggtgcattcttggctcactgcaacctccgcctcccaggttcaagcagttctcatgcctcagcctcccaggtagctgggattacattacaggtacccgccatcaggcctgattaattttttttttttgtatttttagtagagacggggtttcactatgttggccaggctggtttcaaactcccaacctcaagcgatccaaccaccttggcctcccaaagtgctaggattacaggcgtgagccattccgactggtcttttttttttctttttttctttgagacgtagttttgctttgtcgcccaggctagtgtgcagtgccgtgatcttggctcactgcaacttccacctcccaggttcaagcgattctcctgc

SEQ ID NO: 20847 - DNA, 1071 bp, Homo sapiens
aaagctatgacatgattaaacacagacattaaagatgcatttatttatttatttgtttatttagagacagagtctcactctgtcacctaggctggagttcagtggtgcgatcttggctcactgcaagttccgcctcctgggttcacgccatcctcctgcctcagcctcctgagtagttgggactacaggcacctgccaccacacctggctaattttttgtatttttagtagagacagggtttcaccgtgttagccaggatggtctcgatctcctaaccttgtgatgtgcttgcatcagcctcacagagtgctgggattacaggcatgagccactgcacttggcctgcatttattttttaaaacgagcactgcattgccaataccctttcccactgcacttggcctgcatttattttttaaaacgagcactgcattgccaataccctttcccgacattcgtccttatcagctttttgaaaatcgtttgcatgtgtttcatgtaaagaaaagaaggtcatattaaacaaaatcatatcacaacttatttctgccacccacttgtagaaaagcaacctgatgtatcttggcgttctcctaggactggttaaaacttttctttaatactataactttccttgtacattatcatgaatagtaactgcagggagataagaaacttcattattattcagtattcttagtcacagttgactggggttatataaaagaagcttcccaaatgtagatctaatttttttttttttttttttttttttgagatggagttttgctcttgttgcccaggctggagtgcaatggcgtgatctcagcttactacaacctccgcctcccgggttcaagcgattctcctgcctcagcctccctagtagctgggattataggcgcctgccaccatgcccaggtaattttctgtatttttagtagagatgggggtttcattatgttggtcaggctggtctcgaactcctgacctcaggtactccacccacctcagcctcccaaagtgctgggattacaggcgtgagccactgcacccggcagatctaattt

SEQ ID NO: 20848 - DNA, 1048 bp, Homo sapiens
ggtggcatactataataaagtaataaggaaatttgttgctgtattaagaggtttctttttaacttgtagctgatgtagctggcaacgaaatctttctaaatatgatctgagaaggtaaaaaaaagaataaggtggggagtccttcttggacggtttcatgattaaataagtgtttgtttataaactaaaagctattcacttaatatgatgtgaagtgttccatgccggaatacagatgagaatggctagaaatgatatgtgttaatgaagttcattgagtacttcttaaaaccatttacctctttattgacctaatttacaaggactgagacaattagtaattggcttcttaggaagtagtaaataaatttattgcttatttgttgaaaatattttaaatatttactttcaataaaagatacgtaaataaagcagatctaaacatttacatcaaatgatattttaaatcctcaagattacagtctgcttcttaaagaactgataattttacaactgtaagcagatagcagatctcattgagaatttttgtggatgcatgaaatctttatatcacataatagctaatttcaaattgtggctacgtaaggtttatttttcttggagaagataactgaagctctatgattttcagatagttgattcattgaaatccttttgtaggtatgcttttatatgttgtaactggaggccacacaccttaaatctcccactctgggttagagctatagaaaaaaaatttttttaatttaaaaccaaggggccgggcgaggtggctcatgcctgtaatcccagcactttgggaggccgaggtgggtggatcacgaggtcaggagttcaagaccagcctgaccaacctggtgaaacccggtctctactaaaaatacaaaaattagccgggcgtggtagtgggcacctgtaattccagctactcaggaggctgaggcaggagaatcacttgaacccaggaggcggaggttgtattgagccgagattgtgccattttactccagcctgggcgacagagcga

SEQ ID NO: 20849 - DNA, 1049 bp, Homo sapiens
ctacgggcactcaccagcatgccaggctaattattattattattatttttgagacggagtctccctctgttgccagggctggagtgcagtggcatgatctcagctcactgtaacctccgcttcctgggttcaagcgattcttctgcctcagcctcctgcatagctgggactacaggcgcgtgccaccatgcccagctagttttttgtatttttagtcaagatggggtttcaccatgttagtcaggatggtctcaatatcctgaccttgtgatccgcctgccttggcctcccaaagttgtgggattacaggcatgagccaccgcacctggccaattttttgtatttttagtagagatggggtttcaccatgttggccaggctggtcttgaacttctctcctcaggtgattcaccatctttacctcccaaagtgctaggattacaggcattagccatcgcgcccggcctattattattatttttagaggtggagtctgactgtgttgaccatgctagtctcaaactcctggactcaagtgatcctcttgccggagcctcccagagagccaggattacaggtgtgagtcaccacacctgccatatttcataagctgttttggagcatgactcttcatatatgttaaagtactttcttgaatatcggtttatataataaatgttaatgtttttctgtgtttgtaatttacctgataaagatacagttatgagttttattttttataggtcatttaatgaacctgaagtactatgtctctccttctgacctactggatgacaagactgcatctcccatcattttgcatgagaataatggtaagactttaattgtaaaggaattaaaggttttgttcggtgcccagcttgcctttaatttctggtttgctattctctaatgagtttgttgaccttaccatttgcaccttatacacacaacacctcacacacgtatatgtgtgttcacaagtacatacatatgtatatacacacatgcatatatacacacatacataataggagcttaataagtac

SEQ ID NO: 20850 - DNA, 1032 bp, Homo sapiens
cttgcggaaagggaagttgaggggcaggtgaacgggcgtggtgagagtcagtctactggacctgatgaaggaaactgacattgatgggcacctactatggaccaggcagcaaaaccagcagccattcagaggagttccttggtgccaggcattccgcagacctcgtcctcatggcctcctgtgcagtgagcatcattatgaacctgttttgtaggtgaggcagtggaggctcacacatactgggttatgtgtccaaggtcacacagctgcgtaggggctgaggcaggacttgaatgcagactctgtctcattgtgaagactggacactcttcccccagcctggagctgtggaggtgggcctaggcagctaggagaccaccccttatctgcctaaacatccttggcctgcagggagagtgggaggcagacatcctcttaggcctcagttctatgggaagctgacggggttctgtgctggtcaggcaagtggagagaacactcatgtttcagcctgtcctgggctctgtgctgtacgctgtatttgtattgctcattaaacccttatcaactatgattattcccattttgcagatgagaaaactgaggcacagcaaggctaaataacttgcccaaggacacacaggaaatgcagagccaggaactgaaccctggcagtctggctgtagggcttgcattcttaatgataccactacctcccaaatctgaggaaagggtgagaagaggagcacccccagagtgggatgctccccaggggggaggggcttttcaggggtgcagaggccaggcttcaggtgggtctctgtgagtggaaggcacccagggaggcggttggagaggggacccagcagccccacccatcctgtggccctacgcatatgtttgcccgcacacacaccccctgctttcggtgttctgagccacttagctcagtcctgcagtcctcttctcacctcccccttcctgctgtgggtgacaaggaggcctggctggctgccagtccctgccgccttc

SEQ ID NO: 20851 - DNA, 1075 bp, Homo sapiens
agaggtatgggtataaaggactccatttactattataaagaaggaatggaatatcaacattcagagatagctttctggcagctgccaggcacctctggtgcctgacagctggcaaactcaatacaggattctttctgagatttgacattttgctttcctttagtgcttatacttcctactgggaaaacagaccatggagtagaaatatgatctctgaaattaagaggaaaattttgttagctaatattcttaattcaatggtaattatttaatagtacagtattagaaataaaggcaagtttataaccattagaattaaaaacatgattgtacatttttgttgctaatgtaaatatttgattttcttcatagctaatttatacttgaactaataggtaaagcattcatatgtgaacttccatgaaatctcaattaactagactcctgccatttccaagtttaaattttatttataatctgccccctttcgttttacagcacatgaaatgttagaaactctgaaaaaaaaaaaaaaaaaaaccttggtatcttaaaaaaactaaccggtgagaaaatttatatagtgtcatcgtcaatgaaaagagaatctaaaaagccaaaaacgaatttgaaattatcatctcttagtaagcatgtgatgaagtcttgttttctatactggtagaaaacaatttgagattgctagaatggctatgagtagctatgaatgggagagtgctgtggaacactgcaaaagaaataagctttaacttttacagtctaatatatatgtcagtatctcagtagtagactagttgtgtcctttagaagatgtgttatttaagagataaggtgttaatggaaaacacttatgttttaattaaaccttaaaacatatcaggagattggttatttagttgtggaaagagcaaaaagacaaatgaaataggtattaactagagttttctgctagattacaactctggcttttaaatgaaataagaaaatggttttatctaatgatacccaaaaatcctgatgaaaacatgatgctaagtatatatttgtatacata

SEQ ID NO: 20852 - DNA, 1048 bp, Homo sapiens
aacctcttctgtaactccttagctgttgggattctgcctttcccctcccaggaagtgagggaggaaggggtcctcccaacagtcttttatatctctccccacccttcccctcccaggtacttcctcaccagcttctacactaagtacgaccagatccattttgtgctcaacaccgtgtccctgatgagcgtgcttatccccaagctgccccagctccacggagtccggatttttggaatcaataagtactgagagtgcagccccttcccctgcccagggtggcaggggaggggtagggtaaaaggcatgtgctgcaacactgaagacagaaagaagaagcctctggacactgccagagatgggggttgagcctctggcctaatttcccccctcgcttcccccagtagccaacttggagtagcttgtagtggggttggggtaggccccctgggctctgaccttttctgaattttttgatcttttccttttgctttttgaatagagactccatggagttggtcatggaatgggctgggctcctgggctgaacatggaccacgcagttgcgacaggaggccaggggaaaaacccctgctcacttgtttgccctcaggcagccaaagcactttaacccctgcatagggagcagagggcggtacggcttctggattgtttcactgtgattcctaggttttttcgatgccacgcagtgtgtgcttttgtgtatggaagcaagtgtgggatgggtctttgcctttctgggtagggagctgtctaatccaagtcccaggcttttggcagcttctctgcaacccaccgtgggtcctggttgggagtggggagggtcaggttggggaaagatggggtagagtgtagatggcttggttccagaggtgagggggccagggctgctgccatcctggcctggtggaggttggggagctgtaggagagctagtgagtcgagacttagaagaatggggccacatagcagcagaggactggtgtaagggagggaggggtagggacagaagctagacccaatctcc

SEQ ID NO: 20853 - DNA, 1173 bp, Homo sapiens
ggcttcatcttgtctggctgtgtctggcctgttaagcccacccagaccccatgccctctcctttccgggttcccatggtccctgtgcctctgtcttccctgccaggctttggctgctcgagtgcagattccatgtctgccttgttccctgctgtgtccccagcacttagcccagcgtctgcacagagtaggtgctcagataaatatgtgctaacggaatgaatgtcagacgaacttgagaactttcctcctcctccctggacctcctccccagacctcctccccgacctccctctggcctctcccacccttcagccacctccccagcccctggccaggcaccagctggactcaagaaggaggaaggacgtgactggaggcaaacactttattatcctgaagttcagttacaatgtgacagtggaggggacactggtgagtggggggtgaagaggtggagggtgacagtggagcttcctttcacacacaggcctgacatgattcctcctgtctgctccctcccacatccccagtccccgtccagcaaggcaaatgtccaggcacctgcctggccctaaaaagagtcacagtcctgaccctcgtgggggcagggcaggtgtcccgaggccacccagaaaaacaggagacgcgtcggtgatgttcgggagtcaaaccatgtcccaaaagtcttaagaagaaaaacgagattccccagcaaattcgtgggaccccagggccatgcctcccagctctggccacctctgcttgtccaggggcctcacagccaaggggatgcaggggccgctgtgcagtcggctgaggccagagtgaggggtgcaaggacccagatggggaacactgctgtttaaatattaaacagggatttcttgtctcccacgtgggagacctgatactctcaagggtcccaggtggggaccctcaggaccaggggctcacagcggctcatcccagtgcccattgcagagccagggctggggagcagtcatagtaataaatacttggtatttacctatctacctcccagtccaggggatgggaggacaggagctttttctcactgctacaggcaggagaatgaaactcagaaatgcagggaaggacacagaggcctggggctccgttctgctcttccctgtctttaaatatgaggctt

SEQ ID NO: 20854 - DNA, 1090 bp, Homo sapiens
tcaatgcctgggagaatggggtcctggccttcgagtccatccaggtagccccgccttcccagcagcgtttgctcccctgagacacagagccagccagtgatgacttgttatatttcgtaagggcaagaagacctttaatccaggagctcatgttttgatattgatattttgtgtaatcgttgtcttagctactccctctggcccaggtagctctgggaagatcaaacttgtggagagaggtgtggaatgtggcccgggactccacccgctgcacttagctgcccgcagaggctgagaaggtgatgttggctcaagaaagggagatagatggtagcccatcacctttccgtctcccctagaaaatcactgataacatcaaagggaaggtatgcagtctggcggtgtgtgctgtggcttggcttgtggcccacgtccggatgctggggctggatgagcgtgagaagtcgctgcagatgatccgccagctggcagggccactgtttagtgagaacaccctgcagttctacaatgagaggtcggtaacctgccttcccttctcagacccttcaagtgtgttgtgagaagtcagcacatccaataacaagcacccctctcttttctgaccttcgcaaacacgctacttgatcactcactcactttcctattcatgcattcactcatctgactcagcaaacatgtactgtgtctctgtggcagaagcgtttatatgccagcacctgctgtgttgtcagaaatgcagaccctaaacagggtctgcccgcagagactcaagttctagacaactagctcccaaaagaacaaagctgtgtgactgtctaggagctaggaacctgtctgtagattttacaggccatgccccaccctcagttacctcttaggacagtttcctgccctggctcttcaggggcttggaggacttccctggtgaccagttacgttgagttcattcacccaaccaataagttgtttgctttttttaattgtaaaaaacacataagatttgccatcttagccatgtttaagtgtactgttcagtagtgttaagtatattcacactgttgtgtaacag

SEQ ID NO: 20855 - DNA, 1781 bp, Homo sapiens
gctgcacggcagcctctgcagagcggctgcgggaggggctggaggccggcactccagccgctggggagaagcagcttgccatgtgccttcagcgcctggagaaaaccctcagcagcaccaagaaccgggccctgctgcacatcgccaaactagaggaggcctgtatgtcccttgattcccctgagccccacctgccgctgctcccatagccggtcctttaattgagaagggagaggcaggatgccatcccacctctttccaggaggatctgaaaccatcccacttccttttttttctccccataagcattgcacacatcccagggacttgggcagggtggcacccgagccaatcaaccaacaggtatttactgagcattgttgtatacccagcactgtgctaggtgctgggggtggggggtggggggctaccaaaggagcatgtggcagggtccctgccctcatcaagcatagctgctagtgggtagcaagactagtacatcacagacgaggaaaaaactagaggacaagacaagcacagtgtccattattgtgtttgtctccatgttactcatcgcttggaagcagatgactcttgtatttgaatgttacctaaaatgccccttttaacacagtgcctgtctgctgttgggcctgttgtaccatatgcctcttgactcaagttcagatgttaagtttgggtactttccagagcctgagaacagacagatcacctggcgggagggaagatgccagtatttccagcaatggggtcctaaggccatagtcttgctccttgaagcccaagtggcttgggaccacctacaggtctcttgttctccaggaacaagaatgctagaatgggctactctcgaggcttcaggacctggttggagagcttgttttaggactagtatatttatttcttccccaagtatgttttactgcctgtgaaaagtccaaaaagacaatctttatataaaaatggactgtgttgacagcctcttccctaccttgggcccttgataaatgtttattggctgaaaatcggatgaatactgaattttaatggatctcaggtcttgtctttttttcccccttttatgctccatggaggttaatgggctagttggtgccattattcatcatttgaccctctggaattgtaactaggataagtaacttatagttcagtgctaaccaatatggcttagaccatgagtgtgggcattaaggagagaacagtgagttagaccagtcgggtgagttgctaaaggaactggggcttgaacagaagcttagagcatggtgggagtttgagagagagtgtgtaagaggccttcagcaggggagggcagcaaacgcaatgcctagatgagggagtggttgagaatgagaaagccatttagggacccagttcccccagaggagagtgacagcctctgcaagactggactttgggatccgctcactcctcgagtgatttgtggccgccctccctgttccagccactggattctggcctccctctgcctctctctcctgagcctgtgtgatgccataccttctgaagtcagctggctgtgtcccctggaaatcaggcttttgggaatggtctctggggtttccagctctaggtgcccaccccccttctggaaacagtgcatgctgccctcaggcccctccctccctgttgtcctcaggggaagccttcctgtgtggtttcgtgtgccggagggagtgccaaaatcgaggagttcagggccaggtgctccttctctc

SEQ ID NO: 20856 - DNA, 1048 bp, Homo sapiens
aggctggagtgcaatggtgaaattcagctcactgcaacctccgcctccggggttcaagcgattctcctgcctcagcctcccgagtagctgggattacagtcacgcgccaccacgcccagctaattttgtatttttagtagagacaggatttctccttggtcaggctggtctggaactcccgacttcaggtgatccgcccgcctcggcctcccaaagtggtgggattacaggtgtgagccaccgtgcccagccctgaaatagtcttaattgcttgtttttcttttttgtctgaggtgtgctttttaaaatctctatggagatggagaagactgacattctctggcctgatgtgaaaacctctcattaaaactgtgtctgtgctttgtgggctgaaagcatgaaacactggaaattttaaacaaacgtatgtgaatgtgttaagaagccaagagtccggccctctttcaccagactgtatggcctcagatcagcaagggaagtattgagcttagggacaccaagtaatggagtgagcagggatgagagggcacatagaatgtggtgatctctttccatgtcaaggcttgtgtgtttgtggcactggggtcttgctgtgtccccaaggctagagtacagtggcacaattatggttcactgcagcctcaacctccagggctcaagtgatcctcccacctcagtctcctaagtagctgggacaacaggcttgggctgccacacctggctaactttttatttttttgtagagacgggcctttgtaataccagcctttgttgcccaggctggtattgaactcgctcaagcgatcctcccacctgggcgtcccaaagtgctgggattataggagtgagccactgtgcccagccttcagcgtcaagactttctgcaccatctctacgctgacagctccgtaatttatatttctttctggactcatcccctaactccagaatcatatatccaactgtctagtatacatacccagttggatgtctaataggtatttcttttttttgaggtggagtcttg

SEQ ID NO: 20857 - DNA, 1053 bp, Homo sapiens
gatcatatatgatttgactgcccccttgtggtaatttacatttgtcaatggtttagggagacttgcctgtataccgggatatacaaatttatgcaagcacgaagacagtttaatttccagttttaaacttttgacttgtgtaaaaccttatccccttcctaaaatattactcaaaatcattatctctgtttacttttttaaaaatagaaaataagcctaagaaagaattaattaaagttctgattcagaggggatatgattcggatcctgtgaaggcctggaaagaagcccagcaaaaggtaatcttgggtggcacttttctatattgttaaagactatgtattgtacaatgtttatgtttcacattttctaataaagctagattttaattaatcctttaggttccagatgaagaagaaaatgaagagagtgacaacgaaaaggaaactgaaaagagtgactccgtaacagattctggaccaaccttcaactatcttcttgatatgcccctttggtatttaaccaaggaaaagaaagatgaactctgcaggctaagaaatgaaaaagtgagttgatagtaggatggtacatgctgcttagttttgttctattctaatggtaaaagtaaaattgtgtgttgcatgaaaatgctgcttgtatacatatattaactcaattttgtaattatcttatgaaggaacaagagctggacacattaaaaagaaagagtccatcagatttgtggaaagaagacttggctacatttattgaagaattggaggtatgtagtttataatgcccatgttagaatttttattaatgaaataatatattccagcagtatacctttgtcaagatagttcacaattggcaataaaaagaaaataagaggcataaggataaattccaaatagcgtataaaagaacagattattggccaggtgcagtggctcacgctggtaatcccagcattttggaaggctgagttgggtggatcacttgaggtcaggggttcaagaccagcctggccaacatggtaaaaccccatttcta

SEQ ID NO: 20858 - DNA, 1459 bp, Homo sapiens
ggtgatctgcctccctcagcctcccaaagtgctgggattacaggcgcgagttactgcacctggcgccctcagtgtcttttctctgctcaaatgttttcctatcagaaacggcttaactttccttagcacctcttcagtcactttcccactttttcttctcttgtttatcccaccacctaacaaaatatgtgttaattgcaaacttctactggactgtgagctccttgaggattgagactttatgtccatgtgcgtgacacatagcaagtgctcaataaatattgttaaatgtatattagtcagcaagtaaaaccaagataattttcatgtataatacatgtcctttccataaaagttaagtgtgaaattcagtatttttgtaaaataacattctttgtttcttttctttagctctttggctcgattgttatttccaccaaaagatgatcacacgttgaagtttttatatgatgacaaccagcgtgttgagcctgaatggtacattcctattattcccatggtgctgataaatggtgctgaaggaatcggtactgggtggtcctgcaaaatccccaactttgatgtgcgtgaaattgtaaataacatcaggcgtttgatggatggagaagaacctttgccaatggtaagtattctgtgtgtgttaagagccttaacttttccttgggtttcagttgaatagattgtatgattaaagatgatgcaaacataaaatttaatttcatactttagatttattgttaaacgctgttgtgatttccgtctagtatcacatttagaaaacatactgtttttttaaatgccaatttagcttccaagttacaagaacttcaagggtactattgaagaactggctccaaatcaatatgtgattagtggtgaagtagctattcttaattctacaaccattgaaatctcagagcttcccgtcagaacatggacccaggtaaataattatggatttcttttttaggtttgtgatcaaaagaaataccttttgtactattgctgttgactattcagaagcctatattttagaaacttcaggattatttctttctttagacatacaaagaacaagttctagaacccatgttgaatggcaccgagaagacacctcctctcataacagactatagggaataccatacagataccactgtgaaatttgttgtgaagatgactgaagaaaaactggcagaggcagagagagttggactacacaaagtcttcaaactccaaactagtctcacatgcaactctatggtatgtatttgttttgtgagatgtacacgtttcaatttatattaaagattaatatcaattttaaaagtatatcttagtctacctttataaagtttagccaatttgtctattcttggctctaatcttgttttcctttttcaggtgctttttgaccacgtaggctgtttaaagaaat

SEQ ID NO: 20859 - DNA, 1030 bp, Homo sapiens
taataatgtttccaaacttttaagtcttatagttgttattttattcattaatggcataccacggatatttatttttcccttgacagaataactatattcaacagaataacttgttaaaaatcggcccgtttcctattatggaagatttaggtcatttccatgttataaataatattgaggtgattattttggagtataaaacaagaatgtttatattatgatctattacctaacaaataattttgctcattatatagtaaattgtgttttatcacaaggctataaacagcatgttcaagttagtatatttgaggttgaactaaatgtgctaatattaatatgtatatttttattttagggggccgaaactccactgagtgtacgcttatcctgactgagggagattcagccaaaactttggctgtttcaggccttggtgtggttgggagagacaaatatggggttttccctcttagaggaaaaatactcaatgttcgagaagcttctcataagcaggtagaatataagacgatcttcagaatctaaatctaatttataatacaagactttatgcttatatttaattccctcattaggcattttaaaatatattttagacaatttgtgcttattttgagaaattaggtacattgtagcctattttaacagacctttctgatgtagtaaattataagctaatagctcaaaatactggagctcaagaaaatccaagcaacatatactgttaaatttctttgttcttttcaaatttataaacgatgctttttttggtatatgtccatttcagatcatggaaaatgctgagattaacaatatcatcaagattgtgggtcttcagtacaagaaaaactatgaagatgaagattcattgaagacgcttcgttatgggaagataatgattatgacagatcaggtcagatttgttattaaatttttagattgttcaactaaattaagcatgtcttaatttaatttcattgttttttgccatgaaaataaattagttaaa

SEQ ID NO: 20860 - DNA, 1726 bp, Homo sapiens
taatcagctcattttaaacttaccgaaggaatttctttctcaaagaaacacctaaaataaatatttcatgtcctttttttattttcctttttctttcttttcttgataacctcgctgtgtcacccaggctggagtacagtgatgcaatcacggctcactacagcctggacctcccaggctcaagcgatcatcccacctcagcttctggagtagctggaaatgcaggcagcaccaccatgcccagctaatttttttttttctttttaatagaggtggggatctcactatgttgcccagggtggtcttgaactcctgggctcaagtgatccacccacctcggcctgtgtcctttaatgaccattcccttatgcctatcagtgaacatcattgcattggttttggaaagtcctcatagtctatcattgaacctattttttaataactttcttaatactgttacctttaattcctgtacaggtaaaaggatttcgtagttatgtggacatgtatttgaaggacaagttggatgaaactggtaactccttgaaagtaatacatgaacaagtaaaccacaggtgggaagtgtgtttaactatgagtgaaaaaggctttcagcaaattagctttgtcaacagcattgctacatccaaggtaattttattcttaaattattaatcatgatttatctttacatatatgtgttcttattgtttttaatatataaagtggacttgaatattgggctagcttagtataaaggaggttaaattagtttttaatgtttgattattataattttgaggatactgagttttacagtttggtatttttccttattagggtggcagacatgttgattatgtagctgatcagattgtgactaaacttgttgatgttgtgaagaagaagaacaagggtggtgttgcagtaaaagcacatcaggtatgtgcttttggcagttttctttttctaaagtcaaggaagaagagaaaggctataaataaagcatgagtacatttttagtggcttaatatcaacttctattgcaggtgaaaaatcacatgtggatttttgtaaatgccttaattgaaaacccaacctttgactctcagacaaaagaaaacatgactttacaacccaagagctttggatcaacatgccaattgagtgaaaaatttatcaaagctgtgagtacttagaggaaaataaaaatagaaacacctgactttattttccattgcacttcttagctctgcagaaacaatgattcttctcatagtgagcttctccaagtcttcccaatctgaaaaggaagtaaaaaagggctttactttaactgatttaccaaagacttaatgaccgtctatatttcagtatttcccaattacattttaccattaagcttagatcacttttgaattaatctagctgtttaacaaacaccctcacttaaatgcctaagacttgctttcagtcaacacatccaaaattgaatttgttacctccatactcactgatttgcccatacaagcagccccccactctccaacaaaaaaacaacttcctatcttagtaaaaagccccaaccaacctctaggttgtataaacaagaaagctgggagccttcctttatttcccctcctctctaatccggtcaataagaatcatctcttggatgctgcagtagcttctcaccattatctcttttttggtttactacaatagg

SEQ ID NO: 20861 - DNA, 2016 bp, Homo sapiens
aacagaggacagtttttagatttcagggatcttaaatagattggcagttcctggagaataaacatcctttgcttttctcctgcacacttttgcctcaggccaccccttcccgcttccaaagcccatctcttccaagctttccgcacgagaaaacaagtgagcccttctcattggccagattccctgtcaatctctccgctatgacgccgagtggtgccttttgaagcctctctagtcccgcctccctaacctgattggtttattcaaacaaaccccggccaactcagccgttcataggtggatataaaaggcaagctacgattggttcttctggacggagacggtgagagcgagtcagggattggctggtctgcttcgggcgggctaaaggaaggttcaagtggagctctcctaaccgacgcgcgtctgtggagaagcggcttggtcgggggtggtctcgtggggtcctgcctgtttagtcgctttcagggttcttgagccccttcacgaccgtcaccatggaagtgtcaccattgcaggtacggctcgcgggggggactggcggtggagcctccgcgcggcccgggcatctctctggccgcccgtgacgggtgaagctctggggctgcggtcaggccggcgaccggcttgggagcccatattctccattcccggttccggggtgatcgtggagaggcggaagccccttctggtgctagtagtgaagtatgacccggcttccagggtgtcgtgcgttgttgccctgtttctaggggcaggagtccgttggtcccgtagtggatccatgttacagcggcccgggtgcgacgttattgagtcgcgcgtacagatgctttcccctcctgcccgctgcttgaaaacggtcttgaatgtccccgatcttggaaagggcagagcctagcacagtgtttctctggagcagctggccagcttacaaaagcgcccccttcctgagttcacaacgctcaggtggccaagggattgaacggatagccgcccaaactgctgctgccgaactagaattatttacggtgtcgtgtgctcgggacaccgtaaataatttataataataggcactcggtaaataatgtatgcaggaactgaaagaagtgggtgtattttattgatgacatctaccatgttgctcaagaaaagaggtttccagacagacccacttggtgagataatatgtgtctgtttaacctgacacctggggacctggccgcagcgaatttaaattgtcctatttgtacaaaactggcaactccaccactgcctactaacagattgcaatgcatgttgacatctcactatggtaggcattttgttcctagtttagggtaaacttatgattaaaaattcccttctttctctctttttttttaattgctagcctgtaaatgaaaatatgcaagtcaacaaaataaagaaaaatgaagatgctaagaaaagactgtctgttgaaagaatctatcaaaagaaaacacaattggaacatattttgctccgcccagacacctacattggttctgtggaattagtgacccaggtaaaatcaagctcatcaaaggcagttaacctagtagttgaaatggatactcttctttctgtacctttcatgtactgagtgtgacctttctgtatctctcatgtactgagtgtcactggaactggcctaaatatggtaatacttaatatgaacactttatggtaatcatgataacagaacaatgaatatagaataaaaataacagtatttctttgccttatttctagcaaatgtgggtttacgatgaagatgttggcattaactatagggaagtcacttttgttcctggtttgtacaaaatctttgatgagattctaggtgagtaaatcctttaatataaagatctggtcaaatctttcataagaagtatcattccaaataaaaatttaaaaaagataaaagtaaaaacaaaaagtatcatttctaccaaacctgctgtagccagg

SEQ ID NO: 20862 - DNA, 1035 bp, Homo sapiens
tttataatttgcactttgcattcagacaaggaaatctagttggtagcccaaaatgtaaaacggaagccttatgtataccccagaactttcactattttgcctcaccagctgctctggaatatcctatattatacaactgctagagctgctgttttttcttgtagacccaagagtttcagagaagacctagaaccacatttttttggcacacacacacacacatacaggtgtatagatatatatatatagtttataggcaagaaaaccaacttttgaaagaatatatctggctcaaaaattataaggaaaaaacattacggagttctgtttttttctgattagttgtgcggtctgaaagtagaagtggatatggagaaaattgcagctgagattgcacaggcagaggaacaggcccgcaaaaggcaggaggaaagggagaaggaggccgcagagcaagctgagcgcagtcagagcagcatcgttcctgaggaagaacaagcagctaacaaaggcgaggagaagaaagacgacgagaacattccgatggagacaggtaacccactagcaacaaacgcagaggcagtgccaagactttgtacggctgtctttaatttaggtttttctttctaagtgcaagtattctggtacctgccactgagggtgattcccagtactaaatttgacatgatattgacattcagtattttaacctttaaatgcttacattatttatcaagatgtggttattaccgttaagattaattgtctttggtgtcctaggacagcattctgcaaagtaatacctgtaagccaatcctgcccaccacttgtttttgtaaataaaactggaacacagccacacttgtttgtttacatactgtctgtggctgctttggggataaaacagtatagttgagtagttgcaacaacaactgcctggcctgcgaagtctaaaatattttctatctggctctttacagaaaaaaattgccagctctgtcctagaaaaacccttacttctaggtatactgattt

SEQ ID NO: 20863 - DNA, 1047 bp, Homo sapiens
tactcaaaatgcacgaaaggtttttaaatcacaatcaggattttgcctcatctgcttttaaaaagctaaatgcattctaattatatcttgttttcttattggttcactaaattcgctgaattaaaggctcttaagggagaagctaatgagtatgtggaaacatgaagtttcctttccatttaattcagaaatccaataagaatgtataaatatagctcatgctactatttgtatgggtgtacatgagggtatacccatacaaattgtatacatgcacacgaatggcagagcttcctaattgccattctgtatgagtagttagcaggtgttctgattgttctggtcttgtgcagccaggcagggtctgaagctgcgaggagacccagagatagccacctgcagtgtgaacacactcaaccacatatctagtgtgctgtataaacattaatagtttctctgtatactgctatgatgtgcaaaaggttagaagctttagctgcaagcgacaagaacatcaggaaaatgatttaagatcccatcttaaagtagcagtaacaaagaggaaggctataagaactttaaagacaatatcaatgagggaggaagcaataatagtacctgaagacaagaataagttgataaaagtggggaaaaacagaagtcatttttaaaaataatgtactggaatattgtcaaatgttctcataaatacagacagtggaatgtaatactatagagaatagaatatggaatagaaacagtattgaatgttaagcagaatcagcagtgctaaagacacactagcatcctcacactttaattactcaaatggggtgattaatgcaagagaaacatacagaactaaaaatcagaagacaatccagtctacagatattgggaggatggaggtcagtacaagaggaaacaaaggctagcaacgtaagtagaaaataactaaagctttcattaacaccatgaacactgagaaggactaaagagattcactcagaaacagtctgaaacttgggcctatgatgtttttaactt

SEQ ID NO: 20864 - DNA, 1033 bp, Homo sapiens
agcatgtacactttctagagatatttctaaaaggtttctatcatctttttaacgagttccattttataccagattgttataaatagaaatcatctgagtgtgtgaacatggcattcagaaacaatgatataaattatgaccattgaaattccccaaattggtaacgattctccactaagatttttgcttctgtactataagatgagaaacatttctttccattacaaagcttgtaatatttaagtatttaaaaaagagaaagagagcctacttagataaggactaaatcctaatttcatagacttagttttaaagtaacaatcaccttcagcaagtaattaaggtctcaagtctttaaacaaatttacaaacaaatattttagaaacaaagattaagaaatttaggggattttttagtttacctatcatatatgggttcaagttatcttccaaaccctgaaatacagcaaaaagtttacttaagaatatcacccaaaattttaaaaaaaaaaattggtagaaaaatgtcaggcctttattccattagccactcatttttagttccattgtaaatttcacctctagataacattttcagccttcataaagaatgatcaacatcttagattaagcaaagtcactggtacaggtaagcattgggatagttcattcacctttacaaacagaagaaaaaaatcaatagatgacaacttctaaaaatcataaacaaaacacttaactttgcagtagtagaaatatgagtttagtttacaagtcacagggccaaaatgagtaaattcaaatgaaaaagcaagactacggtgagttttgtttaaagtgtcttttaatttgaaactactttagaggattttcttccaaataactcagaaagtcagctgaaataaattcaagacagcctgattagttatttttttaaatttctaaataagctattttagttacagattgttgtataacaccccaaaactcatctgggacctcaatcgtcttggggcatgactgggctcactta

SEQ ID NO: 20865 - DNA, 1046 bp, Homo sapiens
caacctgtaggaaagccagatcctggagtctctgagggagcctggggcgctccagagaaacctgtcagaccgcttccctgccccgcccagtttcctgcccaatggcttgggtgcctcctccctgcagcctttcccagggagccccagtagttgagggtgggcccaggggacctcagaagctgctagaagccctgagtgccttctcttgcccctgggagagttgggtcagggcagcaaggtgcgtgagcaggggcttctggcggcagctggcccttgactgtcctgccccctggggctcatccccctgggaggtcagagatgcaagcccaggacatacacacagccgcacccctggggctcactgctcccagggtatctcgtcgtgggcagcccctccctgggcctggtgcccttctgggcagtccccccatccccagcctgcatcctcattgaaatccctgggccatggtgatgatgtgggaagacaggcggggcttggtgacgggctgaagctgggggctgggccaggtgacttcctgcttcctgacttcctcctttgtgcccccagtagccacgatggaggtgatgaacctgatggagcagcctatcaaggtgactgagtggcagcagacatacacctacgactcgggtatccactcgggcgccaacacctgcgtgccctccgtcagcagcaagggcatcatggaggaggatgaggcctgcgggcgccagtacacgctcaagaaaaccaccacttacacccagggggtgccccccagccaaggtcaggacccctggggactattgcatggggcagaaaacctgcctgggtcctggagagaggtcagagtgaaaggaggcagattgtagggggtctctggtctgagggaggaggcacagctcatgctaactaggggcccacccagtctgaaggaggaggtgcagctacttcagggtgctgcatctgggagggtcacagaatcctcttctgtgaaccatcagtagggagggaaggcatagtccctgcccttagggtgcctccagtc

SEQ ID NO: 20866 - DNA, 1027 bp, Homo sapiens
gacaccagaatgggcctggatttggggtctgggaaatgggttctctttatgtgatggtgcagccggagtactgaacctgtcactaccgcgcttctggattccctgagggcaggcggggaccccaggcaacgggattattgatcgtggagaaggctaatgggacttgagacagagaagaaaacagaatgaaccccatcccactgactactacaaagagggcatgaggttgcagtttttccatctcccccgaggacttgagagctgcaggcccgatgcacttactgaagggacgcagtctagacaggaggaggggctttctgcctgctaaagatgaaatcttgagttgagaaataagagggagaggtggagactcagcattgactcttctctgatgagggccatcctgtgcggcagggaggccagacaggaattgctgccctttggggagactcctcatttgtatcttttgggagaagagcgacctggcagtgagagggaaaggcatctgtgagctggtcctgtgacccctgtgaagaggaaaagcaagcagtgtggctgggcaggtcaccagggcttgtgttcctgcaagtgacactgagcggcctctcctgggacatggttgagtctggggacatggaatatcttattgtgaagcgacttcctctgccaggcctgaagggcaagctcatggaccactctcctttgctcagcctcctggcatcttggcctttggggccagcagagcaggaagctcagctttctttttctctttctttctttctttttttttttttgagatggagtctctcactctgtcacccagactggagtgtagtggcacaatcttggctcactgcaacctccatctcccgggttcaggtgattctcctgtctcagcctcccgcgtagctgggactacaagcgcctgccagtacgcccagctaatttttttttttttttttttttgagacggagtctcactcactctgtcgcccaggctggagtgcagtggcacgatctccgctcg

SEQ ID NO: 20867 - DNA, 1089 bp, Homo sapiens
ggctaacacggtgaaacccggtctctactaaaaatgcaaaaaattagccaggagtggcggcatgcgcctatattcccagctgctggggaggctgaggcaggagaatggcgtgaacccaggaggcagagcttgcagtgagccgagatcatgccactgcactccagcctgggcaacagagcagactccgtctcaaaaaaaaaaaaaaaaaaggaagtcatggtccctttcacgtgccgctcacagtctagtgggggaagcacaaactgctgctggagagggcagcacacggcaccaggggaggtctccagcccagccagagtcaccagcaagggctcagcctggaactgatgcctggctttggagggattagtgcgggctacgcaggcacaggggacagcagtagttcctggcagggaaacagtatgagcaaatattatgcatggactagcaatattcttgccagggtctttatgcttaaaaggtggggctgtgcaggggcgatgtttatgctgacaccaaattctgctggtggtgccctatgcagccactcagggaggggcagtttgggaaaaatcctcaggactgtctcattagatcttgagactggggagggggaggggctttggggaccgagagatgggatgggaagtcccattggccaggaagggagcccatatgggtttgggcgtactgtgacccggtttctcccacaaccgtggcgctactctagatggagctggaggagacagaaccgcccctggagcctgaggatgccctatctgacgccgagtttgagggggagggtgactacgaggagggcatgtatgctgactggtggcaggagccggatgccaagggtgacgaggccgaggctggtcagtgacacgagtccttggggggtggggatgcagcctgggatggaggttggggacagatgcattcacccgctgggctccggagcccagggtgtgtgtgggtgctggggcccatcctccaggggcctccagcctgttggcaacccctgtcccgcttgggggtggtggtgcagcatctcccctggagctgggaccagctgagacctgtccgggg

SEQ ID NO: 20868 - DNA, 1049 bp, Homo sapiens
tgatgagcttgtgagctgatacctattctctgatccttgagctagaagagggccagtgggcccagatcctaggagccctggcttcttgccatctggcaacagggtatggctcaccccccaccccgtccttccctccttccaggaggccatgctctaccacaaccagaccgccgagctgcgggagctgctggagttcacccacatgtacctgcagtcagatgatgaggtgagtgcctcctgctttccaggattgggctgtgatggggacaccttggaccttttcctggggccaccagtgtgccagaattcagccccagcccctggtggtcagctgtcgtgaagaagagaggtttgcctgttccttgtctagactgtccgttccttccccagccttagtattctcatgtcctccttttgtacatgtctcaatcctgttcctcccaggcccagctcacatggtgcctcctccaggaagcccttgctgcatgccctggctctttgttctgggctagcagtgcccactctgacctgtgtgcctccctggccacctgtggcctggacctgggtgattgcagccctcgtccatctcagccctgggccccttctccagccagtatccaggagaaccgcactgcaggacacagggccacattattccctgttctcccacatcctgcacagagcctgggctcagaaactgagtttgaatgaaccagtgaatgaatgaatgcaggacctcaggacagaaggaccgtattgtattacattgatttattttatttatttatttattttttttttttgagatggagtctcgctctgccgcccaggctggagtgcagtggtgtcatctcagctcactgaaacctctgcctcccgggttcacacgatgctcctgcctcagcctccggagtagctgggattacaggcgtgcaccaccacgcctggctaatttttgtatttttagtagagacagtgtttcaccgtgttggtcaggctggtctcgacctcgtgacctcatgatctatctgcctcggtctcccaaagtg

SEQ ID NO: 20869 - DNA, 1055 bp, Homo sapiens
gcacttcgaattctagtcccctccaggtgggtggtgaagccgcggagtgtgagaggcatctccgtgctcatccgtgaccccagctgtactccaagggaaggcatctccagggaagagcagcttggtcccgcaaaagctggactgaaagaaggactttgtgacttgggatgtgacgggcacggagatggagtggggggtggtggcagcgcaaggtgtgcaggtgacagcaggtgtgtgcctccgacgtgggcgggggagacactcggagggtgcaggagggcgcagcgacggaaggcccggctccagggcttccttctcgtatgggcagcgcagaggaggcggccctcactcagtgtcctgatctcaggcgggggcactgtttgcatggggaggggcttcctgggcttcccatctctggcgggaagcgctccccgacgcattctctacctaggggacacccccaaggcaggagcccgggccgacggagaggacttaacgacactatcggaccctctgggaaaagaggggagacgtcgtgacccaggccccgccccaccttgccgcctcgtgcccggcgctaagacccagcgggcgcgccgcccgcccggggcccggccctgtccccttccgtccgcggggcagccagctcagctccggagagccggcggcgcggcgggcatggctcgggtggcgtgggggctgctgtggttgctgctgggcagcgccggggcgcagtacgagaagtacagcttccggggcttcccgcccgaggacctgatgccgctggccgcggcgtacgggcacgctctggagcagtacgagggagagagctggcgcgagagcgcgcgctacctggaggcggcgctgcggctgcaccggctcctgcgcgacagcgaggccttctgccacgccaactgcagcggccccgcgcccgcggccaagcccgatcccgacggcggccgcgcagacgagtgggcctgcgagctgcggctcttcggccgcgtcctggagcgagccgcctgcctgcggcgctgcaagcggacgctgcccgcctt

SEQ ID NO: 20870 - DNA, 1012 bp, Homo sapiens
ccggctaatttttgtatttttaatagagatggggtttcaccatgttggttaggctggtctcgaactcctgacctcgtgatccgcccacctcagcctctcaaagcgctgggattacaggcatgagccaccatgcccagccctcaaatttactcttaatgctcagttaatataaaggattcctaacagtttacaatgtggttttcttgtttttgttgttgttttggttttttaagatgtgaggtctcaccttattggccaggctggtctcaagctcctttcctcaagcaatcctcccaccttggcctcccaaagagccacctgtccaatgatttatcctgtttcttaagaactgtctttaccttcttagacattttgtcataccattctagaagtcaaattccaagtgcagtgattttttttttccctagtccattatagttaatcttcttgttagtgatcaaataccaaaagagaaaagcacaaccagaaattttggctatttgctgcaagttgtaggtcttgggctctatactaagaacttgaaatttttaaattagtatccctgcctaggtgaaaagtttttaataaatgtgttgaaaatcaactttaaatccatttaatttagactggagtgggcgtgagaaactgcaagtctatttctacatataaggatatattattatattgtcccatcccaccactacctttttctcaatttctatttctttgtagttattttagtaaaagccatttggattctgagaagcactaattcttagctgtgataggtctatgcaagtaagacagaatcattaaatgaagctcactaaatgaagttctcatttctctccaacagactgtgctagcaaacttcgttttcttgattgtatttaaataatttagtatctcactacgataatagtttttaactggaagggtgtgatgtgttttttgttttttgttctcagagttgtcttctgagataattattaccaagtcatttgtggggttg

SEQ ID NO: 20871 - DNA, 1139 bp, Homo sapiens
ggtacaggcaccgaagaccaacatccacaggctaacaccccttcagtccacacaaagaagcttcatattttttttataagcatagaaataaaaaccaagccaatatttgtgactttgctctgctacctgctgtatttattatatggaagcatctaagtactgtcaggatggggtcttcctcattgtagggcgttaggatgttgctttctttttccattagttaaacatttttttctcctttggaggaagggaatgaaacatttatggcctcaagatactatacatttaaagcaccccaatgtctctctttttttttttttacttccctttcttcttccttatataacatgaagaacattgtattaatctgatttttaaagatctttttgtatgttacgtgttaagggcttgtttggtatcccactgaaatgttctgtgttgcagaccagagtctgtttatgtcagggggatggggccattgcatccttagccattgtcacaaaatatgtggagtagtaacttaatatgtaaagttgtaacatacatacatttaaaatggaaatgcagaaagctgtgaaatgtcttgtgtcttatgttctctgtatttatgcagctgatttgtctgtctgtaactgaagtgtgggtccaaggactcctaactactttgcatctgtaatccacaaagattctgggcagctgccacctcagtctcttctctgtattatcatagtctggtttaaataaactatatagtaacaatgaaggcatactgctggctcctggcatccatatcctttgatctgtattcctttgtaactgtacttttttccagacagggtatcactctgtcgccccagggctggagtacagtggcaccatcacagctcactgcagcctccatctcctgggctcaagcagtcctcccactccagcctcccaagtagctgggactacaggagcatgccaccactccaggctaacttttgtattttttgtggagataaggttctgctgtatttcccaggctcttctggaactcatggactcaagcaatccatcctccttggcctcccaaagtgctgttacaggcgtgagccactgtgcctggcctggcctgaactgtactaatagtttcagta

SEQ ID NO: 20872 - DNA, 1050 bp, Homo sapiens
ggttcctgaatcgccgctgggatatgtccagttctacctacctgtaacacaagtatgaacaaacacatcccagcagtgtgtgagtgttcctctgtaccgttgggttcatttctagataaacaacccagacatgcgagtgcagatcctcaaagattacgtcaggcagcacttccctgccactcctctgctcgattatgcactggaagtagagaagattaccacctcgaaggtaacaaagaaaaaacttcctaattccctcacgttggacaagtttattggaggaaacaggagccacgttacattttgattatgcagctaaaagcaaacctagttttctagaaatgttatttttgtttcataactaaatttaacagacatgcactaaatgtcaactaggtgttgggtactttgctagatgctgggaattgaactgagtcagacacagtgtcgaccagtggggctggtagaaggtttttaaatgatggtcacaattcgtagtaatagtagtgacagtggaaaattatgaagaaaaaatgagaaataatgataaatgctttgaatttttttgccttcccagaagccaaatcttatcctgaatgtagatggtctcatcggagtcgcatttgtagacatgcttagaaactgtgggtcctttactcggtgagcattgtagctgttttcttcttcattacgtttgttgatttttgttgtttcctccaaactataaaagtaatgcatactcataatagaatatttgaaaaataaggagaggtataaagaagaaaacaaaaattgcctgtaatgctaccacccagagcaccccttttcttctcattcttgggcagtagtagtactgtctgtggggaggagggcagtcacgtgagccttttaaaactacaagttgatgtgtgttgcagggaggaagctgatgaatatattgacattggagccctcaatggcatctttgtgctgggaaggagtatggggttcattggtgagtccattcgttgttgttttaagtgtttttttttaaaccccacggttcagcta

SEQ ID NO: 20873 - DNA, 1032 bp, Homo sapiens
ccagagattgggacatgaggtagtagggagcagagggcaggtgcagtcttggctagaacttcttttcatttagttctcagaattcagcaggtaagagtaaactaagaaacctacagtgtttgggttagatagagcattcttgggatgtcttacaggagcccaaaataagaaaatccacatggatgtcttttttttcctgcctcccaggtctgtatacgaagatctcgtggccaatggagtcattgtacctgcccaggaggtgccgcccccaaccgtgcccatggactactcctgggccagggtaggtgccttaaatgtctctaacagtgtgagcaagggagatctgtgggtctatggtggtgggtttcgcgttgatttgccttgaactcttggaaaccaggccttctgtattagtcggggatctcttagagggacagaactaataggatatatatatataaaggagagtttattaagtattaacttacatgatcacaaggtaccacaataggctgtctataagctgaggagcaaggagagccagtccgagtcccaaaactgaagaacttggagtccgatgtttgagggcaggaagcatccagcacaggagaaagatgtaggctgggaggctaggctggtctctcttcttcacatttttctgcctgctttatatttgctggaagctgattagattatgctcactacactaagggtggatctgccttccccagcccactgactcaaatgataatctcttttagcaacacctacacagacacacccaggattaatactttgtgtccctcaatccagtcaagttgacacttttggaggtcaaggtggaaggactgcttgagaccaggagttgaaggctgaagttagccatgactgtgccactgcactccagcctgggtgacagagtgagaccctgtctgtaatttaaaaaaaaaaaaaaaaaaagggctgggcctggtggctcatgcctgtaatcccagcactttgggaggccagggtgggcggatcacctgaggt

SEQ ID NO: 20874 - DNA, 1060 bp, Homo sapiens
aggagactttcctaagcaggaaacccagtgggcaagtgtgatttctcttggtcattctctccccagcctggccagaaggggctgggcagtaatgcaggggctttgtgattctttgtggtgaatctggaagtcaccttcctccctgattgtggtttctgcccccacaggttggaggcatcaagcctgggtgctttaagattggcaacacaggtgggatgctggacaacatcctggcctccaaactgtaccgcccaggcagcgtggcctatgtctcacgttccggaggcatgtccaacgagctcaacaatatcatctctcggaccacggatggcgtctatgagggcgtggccattggtggggacaggtaatcagctgggaagccaaggaggggcttcctgctttgagagcagtgggctaggagacgatgctgtgtcctgcaggctgcttgctgcccctgagttccaggcccgcaggaatgctgctgaagtctaaacaatggggcatcactgctcttgtctcaggactgacagagcatgaaatcggaaaacacagaacagggcaacaatgtgcaggaggggcgactgggctttggggataattctgtttgttgtgattggccatagggaggcagcagagtacagtggttaggagggccagttctgaaattggactaaagaggttcaaatcccattttccctctttagtagggggtgggtggcaggggccatcctggtccggttacttaacctccctagacctccatcatttttacacatcaaatgggtaaataatacccccacctcatggggctactggaggaataaatgaattgtaatacatataagtgtctgagccagggcctgcgttcagcaggtgctcagtgagtttttattgtagttaataatagtatcctcattatttttggtagtgggaacactgatcagtaggtcatgaatacagtattatatctcagagtaacgtctggcacttagtaggttcataataaatgttagccattattgtttattattcctactattactactgctgtcgggcttag

SEQ ID NO: 20875 - DNA, 1032 bp, Homo sapiens
atccatgtgagttttgagaataatgactagataagtgtcaaacttgaaagtctgaggtctcaagaagtgagaggctgggcgtggtggcttataactataattctagcactttgagaggctgaggcaggcagatcacttgagctcagaagttcaagacaaggctgggcaacataatgagatctcatctctactaaaatttaaaaaaaattagtgggttgagctaggaggattgcttgagccccggaggttgaggctgcagtgagccgtgatcgtgccactgtgcttcagcctgggcgacaatgagaccctgtctcaaaacataaataaaatgtggggccagaccccatcagtcctgcccaaaacagggtgtccataactggacctgatttaacagacaaatctgggacaggggagcctcagcagcttttatttaacttctgagctgccctgtactgacccttggttagggcacttggtttggagcaggtactgtacatggaactttgtgtaaaatgccttgggtgacagaagtcagactctaggctcaaaaatctagcctctgtcttgagaaacagaactaggacacacctttccaccctctcatttttccaaagtggatatccattgtaagaactgttcttacaccgcgctgggcgcggtggctcacgcttgtaatcccagcactttgcgaggctgaggtgggtggatcacctgaggtcaggagtttgagattagcctaaccaatatggtgaagcctcatatctactaaaaataaaaaaattagccaggtgtggtggcagacatctgtagtcccagctactcgggaggatgagacaggagaatcgcttgaacccaggaggcagaggttgcagtgagccgagctcacaccactacaccccagcccgggtgacagagcgagaatttgtctcaaaagaaagaactattcccgcacatcacttaagaagcttttgtaggacattgactatgtcttagtacctctgagaacccttgcatagagcccaacatagatat

SEQ ID NO: 20876 - DNA, 1032 bp, Homo sapiens
cgtggagaagtttccctgattaagccctggctccccacttctccacccattccctgcgcccggacccatgtcctgaggctgagtcactgtgccttcctcaaggctcatgaagcagaatggttacctcccttctacccggtttcccctccccgtcaagctctgccacagccgtgacttgttggagccctttcacttgcgcaggtcctgtgtcaccctccagaggaggccaagagtgggcaaggtcggtgcctgttcaggcacagcccgcaccagagcaaggggtgaaagggcatctcctgaggacttactgagcttagggatctgtgaccccattttttctggaaaaatctctctttgctgggtgtggtggtgggagtgcttgggcaccacccctgtgcagtccctccttctgccctaggggcaagacgtgctgtccctctgagtttcatctccctcaatttttctgtaggttggcaaggccacaggcttcctcaagaactttctgatcgagcccttcgtcccccacagtcaggtatgtgtgaggcggctccaggctgggtcttctccctcctggaaccttgggtttgtccaccgtaacctgaggaaagaagtcaagctgatgaggacagtcagagggaccagggtccctgaagctgcactgaggatctgagggtgctgcggactcgggagtccagaggggaaggaaagggcttggtctacagcagagaggagttaggactggtaacaaaggggacttccaagtgcagggatgagaacgacctgcaggcaggccccacccctcagctggggttggtcatactgattcagtctggaccaccagccagtggggtagaggcttcttcctcttgtcctcggggaaaagatggtggacaagtctctggatgaatggttttcactgggttttagaaaatgagaccgtggggattggtttcctctcccagtacatggtagaccatcttccccagttcagcgcccctcaccagcttcgcccccacaaccccaatcccactg

SEQ ID NO: 20877 - DNA, 2028 bp, Homo sapiens
cagccgtactctgcactggtcagagaacagaaaggtgtttcagtgtctgcccacctcagatgggaccagcactcagatttgggtcaaagcaccggttttcttggccttctagccagctgccttttgctccaggatgagtgtggttgtggatcagctagtttgcctagagggaatggggcagggtaaggcaagagtcccaggggaaatggcacttttgtttttctctatcttccctcacccattatctctggatcttcttcctctgctggcaaaagtgctgcttgatatctctcttccatccctcccgctgggacagcattttttccttcctcttgagaaaagctgagatctggttttattgtctgggggcaactgggagtgggtctgccctgctggggaagatagtgcctccacacgcctgcccccttctgaccagcttctctctcccagacaggtagagcaggtctctctgcagccatgtcggccaaggcaatttcagagcagacgggcaaagaactcctttacaagttcatctgtaccacctcagccatccagaatcggttcaagtatgctcgggtcactcctgacacagactgggcccgcttgctgcaggaccacccctggctgctcagccaggtgagccctgcctccactttgggcctttcttccaggcccggggtctgaggaagagaaagccattggtttgttggtgatgccgatagggtcatggggttggaggctgccagcagcagctgtgggaagcatgccatgggctgagcagggtttgtgttcatgctgagccctgcatgttgaggtaccccagcatggtataccctgccatgggcttgaaactggacaaactggtgtccaaatcaaagctgtgtttattaaccatgtggcctggggcaagccatttcacctcttttgagttttagattccccatctctccaatgggataatactcactttgagctgtaaagattagcaagaagcatttagcgtgcttggtgcctggcacatggtagatgctcagtaaaaagtagggatgtgccctctcctcccctaagtggagtatatcaggaatgtatcaaggcaattaggaagtgtgatgttgtactttgtgaagaatggccccgaccctggagggtcagcctggaatagagggctctgttcttgagatctttgcagggccattgttagaaagctcttagatttccttggcagggctcagagagtaagcctaggactagtggtggtgtttcttcccactaggaggcagctcaaccacaaagggatggagggagtttcctggccctggagatgtatgagcagtggttaggggctgcttattgggcctgttgtagacagggttcaagcacagggatggggttgaccagatgacctctaaggttccttgctgcctcaaggctctgtctctctgttttcctctttggaacacatgttctggtccatattctgaggggcttactgttgaatgaagaagctaatgtatcacatagggagggtagagaatcacttattcactcagcaggtatttgctgagcgcctactctgtgccaggctccatctgggcacaaatgcctctagatacctggttgtcaaaagcaagatattggctagggtaggtggaggaagcatccaggagttgactctgaaggatggttagggctggctttggagcagagtgaatgggaagtcaatccctgctgtcctctatttggatccccaaaatactacggtttatctaattcttcctcactctaaatacaaaccgcttttgttccagaacttggtagtcaagccagaccagctgatcaaacgtcgtggaaaacttggtctcgttggggtcaacctcactctggatggggtcaagtcctggctgaagccacggctgggacaggaagccacagtgagtgggcatggggtcaggatgaacgtgtgtggtaacagaagcaaatatggtcacctccaggtcagcagctctgtggatcacccccacagccagt

SEQ ID NO: 20878 - DNA, 1074 bp, Homo sapiens
ctcaggcaatcctcctgccttggcttcccaaaatgctggaattacaggcatgaaccatcatgcctggccagaagactccttttatttttttattttcatttatttatttattttgagacagagtttcgctctgtcgcccagggtggagggcagttgcaggatctcggctcgctgaacctccaccaccctgtgtggtggtgggcgcctgtaaccccagcttcttgggaggctgaggcaggagaatcgcttgaacccagaaggcagaggttgcagtgagcggagatcgcgccacttcactccagcctgggcaaaagagtgaaactccatctcaaaataataataataataataataaactcattcagagataagtttaaacgtgtcatatgtaaaagtcaagggtaagtgatttatgtgtgtgggaggggctgcacaggttcttcctgaaagaggagggaattttataggaacatacctggtggggaggaggcagtggcagtttttgagagagagtcagaatggagtgggggtgactctgggaaggggccagcctggacctggttgggctgcatggagaaactttattccctgagcacagatgctgcatccccagagagataactgctgcccaggagtggaactagccatccctccagcttccctggtggcaggcagcctctgtcgggttagagagaggggccctggctgcatctccctggagagccttccccaggacacacaggcccttagctctgatggaaggtttgtcagtactgggcaaaagtgagtggtgcggaagttagaatccttggctcttcacagggtggatgatgatggggctttgctggaagctcctgtcttgggctgttacaaggagagaggtgggtttagaactggatactctacataaacagaaaatgcatttgaaaaaaatagtagccgggcacggtggctcacgcatgtaatcctagcactttgggaggctgaggcgggcggatcacgaggtcaggagattgagaccatcctggctaacatggtgaaaccccatctctactaaaaataaaaaaaaaaatc

SEQ ID NO: 20879 - DNA, 1131 bp, Homo sapiens
gcgtgagccaccgcacccagccggaatttaaaataagaatgatggtactatatagataatgctgagtcctctccagttcagtgtgggggtatttgtgtttaataaacctaggttcaccacaataaacatgttcctctgcctagcagttaagaagatctataagcagtcaaaaactagtgaagaggttttgttttgttttgagacggagtctcactctgtcgcccaggctggagtgcagtggcgcgatctctgctcactgcaagctccgcctcccgggttcacgccattctcctgccttagcctcccaagtagctgggactacaggcacctgccaccacgcccggctaattttattttattttatttttatttttattttttttagtagagacggggtttcactttgttagccaggatgatctcgatctcctgacctcgtgatccacccaccttggcctcccaaagtgctgggattacaggcctgagccaccacggccagccgtgaagttttaagtaggggcactgtggaccagattttggctctggaaatatatttgtgataggggtgaggaggttggggttggagggagtaaggagaatggagatggaaggaagacacaaaaggtaggaaaggattggagggcacagtcagggagttagttagtggtagactcagcaggagttggttgctattcagatgtgttggggaaagtgacaggcatagctgactcggggtcattcactaagccaggagcccaggaagacacacagatgcaagcagagaaactcactctgggcacgaggtggctgtgggatcacctggtgggggtcagtccttctgtgaagcttgggcagtcagtcagggatggggccaccagacatgctgtggccttgcaaaagtgcacagagccagtcaggcaggagttggattttccagttctgctgctttcgctgccatgtgatcgtgggcaagttacttgaaccacctacatatgttttgttgagtattaattgggaatgatacttaccctgacaaaacattactaggattaagtaatgtaatgtatgcaaagtacctagtactttgcacctagtaggtgtttttgttggtttgttgttgttattaagaca

SEQ ID NO: 20880 - DNA, 1028 bp, Homo sapiens
agcttgattcctccgatcttgggccaagggcccctcctttcttttgtgctactgaaatagaagcaaacctgtgtttagagttcccttttctgtctcatttacctgcatctctcattgattggtcttagtggagggatttgccagcagctgccacgttgaacttgatccttttagtggctcactaatcccacctctattctggattgtagctagtcctgcatgtttatggcactataggtttcaaagctctttcatacccatttattcacttgataatttttctcttgtgtgtttcaacccaaagtaatcaagtagatcccttcacattgtcttttctaaggcagtccagtacctcttaggtggctgtgtgtcagaaggaactttttcctcttgattactttctgctcaaagctgaacatcactttgctggttggatgcaagtgccatgcgacctctctttttatttccttgaggacttgttagctaattttctctcactgctagattaagggctcctgtttctgaagcatcttaccagaagtgtgtgtctcttgcttgagccatgcctcttgccctagagtgatcctgagaaccactgctatttatgtcttagtgctgtattgccttgtatttccttctcagttacatggacacagaacagtatgaagaagcagtacgagactatgaaaaagtataccagacagagaaaacaaaaggtaagtttaaaagcatttgttttttagggaactgtgtggacttcgtaggccataaatctgtacacaaggtagtttgattcagggatcagggatctacctagaacttatttgatcaccagccagaaagaagtgaacaaaggctgggcgtggtggctcacgcctgtaatccccagcactttgggaggctgaggcaggcagatcacctgagatcaggagttggagaccagactggccaacatggtgaaaccccatctctactgaaaatacaaaaaattgtgggtatggtggtatacgcctgtaatcccagccact

SEQ ID NO: 20881 - DNA, 1090 bp, Homo sapiens
tgtgaagtatgattgctctctctctcctgaagcttaggaaactagatgatgcaatagaagactgcacaaatgcagtgaagcttgatgacacttacataaaagcctacttgagaagagctcagtggtaagtgcctctgatgggtagggggaagagggagttgccgctggcctcaggggaattgccttgtggatgacgaagcagacccagagatgttgtgaggtcatttggtccttccccctgcctctaggtgggattgttccagccctagactatctttatagacctccagcggaggagattgcacaagctccctcagtctcccatgcctgtgtctaacgcccctcacggtcagtaagtttcctctgatgcctgacccaaattccttttgttaaaaagtttaaatccatttcctttggagattttattttgtgttgtacacttatgctctaccctggcacagtgcttgacacataggtgctcactgaataaatgttttgttgaatgaatgtatggtgcttggaagagaaaacaactcttggagacagttgagagttgtacttcatcctgtttgttctgggcgagggaagacaatcttagagttggaagagatgtaatccggctcagcctcccaggataaaggaacttccttttgaaacaccctggatggctactctctgcttgagtgttttgagtggagggcactctgtgtctgacagggtgattatgagccaggatgtgcctacctctaatgctcacatttgccccagagtcagggtgctccctggcatggttgctcctcttactcttagacccaccagctggttttctccagataggaacagggctaggagaaatctttctcagaaatccatctcttctgatttcagattattctctaggcggagaaaaacttcccgtctttaaagttcttagagaagatgtatttattgtatactaatcctccagcacctgctccactccttattataaaatgtcatatccaaagaacagatgctgtcactgatgcctgatgagccagtagtttaagcttccttgtctcatcagtggtacagaatatctcatggacta

SEQ ID NO: 20882 - DNA, 1522 bp, Homo sapiens
ctttcttatggtaaacttgagggatttcaaattgttttcttttctttttgacggagtctcgctctgtcaccaggctggagtgcagtggtgtgatctcagctcactgcaaactccgcctcctgggttcaaatgattctcctgcctcagcctcccgagtagctgggactataggcgtgtgccaccacacccagctaatttttgtatttttaatagagacggagttttaccatgttggccaggatggtctcgatctcttaacctcatgatccgcccgccttgtcctcccaaagtgctgggattacaggcgtgggccactacacccaacctcaaattgtttttcaaagagaaaacacttacgtgtctcagcatatacctagtgtgactggacaacaagatctaaaagaatcaagggatccatagacttaagagtcaggacatccttacctgattccttgagctgataaacttaacttctctgtatgttttcctgatgggcacaaataagagcaattcttattaggcccttactacctaggtattgtacactctttgcgattaggattttgccttttatttctctattcagattgttaatgggaacaactgaactctcaattcatgtcccgggtttcctgtagttgctgttcgtttgctgcagctttgcatggtgtttttgagtttgtggcctcacttaactgaagagcttgtgggcatgcctccccagctttcttccttacctggttttaaattcttaggaatgtgtccttctaatcttcctcttgaagtttcagagcaagcacctagacatttcagtaagcctccaaactgagtgggaatttatctttgacctggaacccaaatcagtgagaaacactattttccttttgctgtgcactaagtgtagtcagatgtgaagaaatgggagatgggaggagaaataagttaaggaagggataaacctaggaatacagaattctcaataccggcaaattaattgaaccctgatactaacagatggcaaagtagataatcataactggagcaaaggtagagtacagagaaaggttctctcttagtgctttagttcagatccacatgttaactagtgccagagaaacaagaattttgagaaaatatagggccaagtgagtggcagttgcttagagtccagtccactcccaacaaacagaactctgattggccgaaagcccagccttattgtacattccagccaatcagggattagtttagtcattgaagtttgtattttaatggttttgaaaagctgagtactgggcacttgcttttttgttcttcgggactttagaagtttggagaacaatagtcagcagttgcctagttgctttgtggcctgatgcagagtccctctgagagcccatttctcccttactgcactagtctttggtcccctttctccagcactgagtgatgtggaagttactcagaggtctttccaggtattcttttaaacttttgaagtaagaacaaaattcaaagtgca

SEQ ID NO: 20883 - DNA, 1027 bp, Homo sapiens
agccaccatgcctggccctttcattcttttaaacaaccaacttttactgagaggtatctgtgtgcccagccccagacagggacttacgagatatgaaaatgaacaaacatggtcttggcttctaggaactcagtgcagagatatgtacagaatccctgtattcaccatattgtgtcatgaagactcacgcatagggagctgtggggaactagaggatggctaccagcccaggttgtggggatcagcatggcagaagggatatctgagctgctctcaggcaatgagtgggaattagtaaggaaagaggagggagagggaattctaggctcagaggatgaaggcagggacaaagtaacagcttggtgtctactgggaatgcaagccttcaggattgattgggcagacaggaatggcgggaggctctattaacagaagtattcagaggctggggagggccttgctggcttgtggttaggtgtgtagacttaggcagtgggatatcagtaaagaggtggaaactagggagtgacacagttggatctatgtgtgagcttgctgtctctggctgttgggtgagggatgagtctgggggaaatgaccatgcagagaccgaggcagctgcagtgatcgaggtgataccgtgagggcctgaactgggccaaggctaggcagctggagggagagagacagtacagaccagggtctcagtacagcctttggggtcaggaggtcactctgattgagcctcagctacttattgcttatgaatcctggagcaagccagttaaagtcacagacctcagttttgtcctctccaaaaggataatatctcagccacagagagtcatctgggtctgaccctggatcgttgtaaagcacttagcacagggcctcagttcacattccagaaatggtagttacatttaggcatgaagacgaggacacaggttggagagataattaaaaggtagagttaaggccaggcgcggtggcgcacgcctgtaatcccagcactttgggaggccga

SEQ ID NO: 20884 - DNA, 1170 bp, Homo sapiens
ccctctctcaggtccccagttccctaagagcagggtctgtctctgaccagcctccagtccctctgctgcctggcccaggctgcaccctggagaacagagttgtgggacagactgtgtcctccctacagattcctgtccatgctggaggaggagatctatggggcaaactctccaatctgggagtcaggcttcaccatgccaccctcagaggggacacagctggttccccggccaggtatgtgccatggtacgctctgtagggtgtctggcctgcctggctgagctaagcctcctgggtggaagagagctcacctgggccggaggccctggatcccactgagggacctgccaccggcttcagcccccccagtccctgccttctctctctctctcctcagcttcagcacccccgtccctgactctctctctcctcagcttcagcccccgtccctgacttctctctctctctcctcagcttcagccccccatccctgacgtctctctctctcctcagcttcagtcagtgcagcggttgttcccagcacccccatcttcagccccagcatgggtgggggcagcaacagctccctgagtctggattctgcaggggccgagcctatgccaggtggatacttgacccctgacctctgaccctcattcactccttcccaaaccttttttactgatcctgagcaaccttgcctgcctccccaataggcgagaagaggacgctcccagagaacctgaccctggaggatgccaagcggctccgtgtgatgggtgacatccccatggagctggtcaatgaggtcatgctgaccatcactgaccctgctgccatgctggggcctgaggtgggcagcccgacctgctgaccagttgggggacccccaccaacctgagaccccggctcaccacccctcttctgtgcccagacgagcctgctttcggccaatgcggcccgggatgagacagcccgcctggaggagcgccgcggcatcatcgagttccatgtcatcggcaactcactgacgcccaaggccaaccggcgggtgttgctgtggctcgtggggctgcagaatgtcttttcccaccagctgccgcgcatgcctaaggagtatatcgcccgcctcgtctttgacccgtgcgtcccccagagagcccctcccc

SEQ ID NO: 20885 - DNA, 1056 bp, Homo sapiens
gtaagagattccacatggtccgggccagtcagtgtcttttgctgcccttccaaaatggactgcccccatgggacggtttgtggctgttggcgggctcagggtaggctgtcactttgtgccgtgatcctgaatcattgaatagctgaaatccttccattgtactgtcatctctctgaaaatgtgtaacttgagccctgctggaaacactaacttgggatcttaacaggagttggtttacaagccttttgccttctattcatagctccatgtatgtccccttcaggtggctgtcagaggcatcccaggcatggaggagggcgtgggtggcctctctaaccctggctgctctcctagacatcagattgctctctgagctgctcagacagcgtggtgatgaatgacgccagtttccaaacctctagcatttgcagcctggtttttaaaaggaactctgctttctttgtcagctgctctattcctgtcccctagccctctcaacaactgaactgcttcttccctttcctgaaagaggctttgagatggaaggaagggcatttgggctttaagatgctttgtgggctgggcgcggtggctcatgcctgtaatctcagtactttgggaggccaaggcggggggattgcttgagcgcaggagtttgagatcagcctgggcaacatgatgaaaccccatctctaccaaaaaaaaacccaagatgctttgtgttaatggggctttttttttttttttaagaggttatggtttgcatggttggggccttcaccccatgcagatttattggatggtaatggtttctcccctccatttttgtggttttgggagctagtctctggaggatacaagattggggttgttgacaggacactgagtatcttctaggaaactgaggaaagacgtcctcttcagcattctctccaaatgagaggtgctgaagaatggagtcccgggaaactggaggtaagaggaatgtgtgaatgttgtctgacagatgaagtgaggagtccggctccttcacagggaagtgaaggcgcaggggct

SEQ ID NO: 20886 - DNA, 1049 bp, Homo sapiens
tctcagctcaccacaacctccgcctcccgagttaaagagattctcctgcctcagcttcccaagtagcagggattacaggcatgtgccaccacggccggctaattttttgtatttttattagagatggggtttctccatgttggtcaggctggtctcgaactcccaacctcaggtgatccacccgcctcggcctcccaaagtgctgggattacaggtgtaagccaccatgcctggccctcgcccacttcttttaacacacacttcccttcctttcttcacacactttggatgtcgtgaacctatgattcaaacttaaatccatctgatcccacagcttgagccatatctttggtccatcccccagaaagttgctcacagacaaatgggagagcaaacaggtcaataggatcaatgttacagtacggatgatgggaagcaagtcacaaactcagtttccagaagttaagactctccaaatctccatttctggtgaagggtttaatgggacaatgagggcgcggccctgactagccacagtccggctgactggcttctgccgtgtgtgtatctgatggcaggacagaacgaccgtgcttctgcagttgtgtgtggtgaggcagcaccgaccccagaccagtacttagcaaggatcagtggaagcaaatttgactctgcctgtggatactgttctgtatgtctgcacaaggctcgttcctgagtgaaggtggcttaaaaaagtggtggcagcagctgttcagaccagtggtatgagcagccctcacatgtgtattccacagatggggtctttaacattccctggtcctgtgcctgcagtacttggatatcctctgctcaccttgaggctggtctttctttctttctctctctctctctctctctctctctttctttctttctttctttctgtttctttctttctttctgtctttccttctttctttctttctttctttctttttctttctttctttctttttctgtctttctttctgtctttctgtctttctttctgtctttctttctttctt

SEQ ID NO: 20887 - DNA, 1046 bp, Homo sapiens
atgatccacccacctcagcctcccaaagtgctaggattacaggcatgagccactgcacccaacctgaaacgactttgaaggggaagctctgccatttagagagacgaggcaggccccagtgctttgggtcgttatgcagccacttctggcacctagaaattatagagtccaagcagaggtctgactctgcctggcagagagagcgatggctccgtgtgcgacagaacccctcctttctgatgctgttcctcccctgccctcttgcctctcacaattagagggctgttaaactgtagagggacagtaacactaatttttaaaaatcattttaaggttgcaaaattattttcatacatattcctcataggtgccttgggaaatagtggggcttgtttccccactttgtttttaatttttattattacttttttttttttgagtaagataaggcaagtgtccctgctttagaagggatgcagaaggaacttaagtagtttgcctaagatcgatcatacatttagaaagtagtagagctggggcttggatttggggtcagatgtgacctgatctaacagtgggcccttcttcggcctggtttgttcgttaaatgaatgaacatgcagactgagtgcgccacggcacaagggcagactcttaactctttagccctcctcatcactagcgctcctctgtttttttgtcttccccagcgtctacccgacctcctgtcttctctcttgacccctttcacctctgcctctgaggaccaaaacagttaggagtcccaagtcagtactcttcagggcctgagagtttgctgacatctacatgtcattaatttttctgggaacctgaaagtcctaatggctagaaaatgaaagttaaagtgagtaaactcaggggtcccactgggcagggttaagggggaagcaacagagcgggcctctggttagtcctctgtttctcctgtggtgctgcctgctgcttgcaagtgggaagaatgtggcttgccaccaggagctcctgtcactagaatttacatggaa

SEQ ID NO: 20888 - DNA, 1024 bp, Homo sapiens
cctcagcctcccaagtagctgggattataggcgccggccaccagaccctgctaatttttgtatttttagtagagacagtgttttgccatgttggccaggctggtcttgaactcctgacttcaggtgatccacctgccttggcctcccaaagtgctgggattataggtgtgagccaccacgcccagcctgagtttggggttttttattttattttattttattttattttattttattttattttattttatttaacgaattgggcagtctcctgaggcacagtaggctcagagagactctgcagggtttgtttttgaggtaaggaaaatgttattatctgtggtgttggttgcacatatctctggatatactagatcttgaattgtacactaaatgggtgatttgtatggtgtgtgaattatatctaataaagctgttactgggccaggtctagtggcttacacctgtaattccagcactttggaaggccaaggtaggaggatcgctgagaccgggagttccagaccagtctgggcaacatagtaagaccccctgtctctacaaaaaaaaaaaaaaaatgtttttaattagctgggtgtggtggcacatgcctgtagtcctagccactcagaggctggggtaggaggattgcttgatccccggagttcaaggttgcaatgagctgtgaccaggccactgaactccagcctggacaacagagcaagaccctgtctttaaataaataataaaagcaaatgcaagatctcagcgagaaaaaacgtgaaagtgaggtgagttagccagagtgagaacagacctgttgaaagaagctcagctgtgaagggaagagaggtgctcagcaagtagtagctctcttctcaaaggtatccagaggcaagtaaggggagaaagggagtggttttagtgttttgagagcctaggtcaagaacacaccagcctgggcaacatagggagctctctcgtctctacaaaaaataaaattagttgagcgtagtggtgcgta

SEQ ID NO: 20889 - DNA, 1778 bp, Homo sapiens
attggaatgatgggtgagaatcattatttcttaaggcgccgacagagtctgaaggtcttctctctggcatcgtaagtcacactctgcttctgtcctttgtccttggtgatccagggccattttggggtttgtaaacaagcaacaggcccatgacctactcattaacaagccagatgggaccttcctcctgagattcagtgactcagaaattggcggcatcaccattgcttggaagtttgattctcgtgagtgcccctcccttcttatgtccaaagttagctgctttcgttacaaaattattttaacaaataatttagtgggtacttactatttgttgaggtcagtactaattatgggaaacataaatgtatagccatgacatactcataataaggcagcctatgaaaaatactattatgggaaacacaattgctaatttggttatacatgaaagtatatggcagcatggttacacatgaacatttaaccatgacatggctacctatgatacaagagtccgtgcagaatctcagttgcttccctcttaaaatgtttgccttattgtactactctgcataaagcttatttcagtgaagaatttgatgatttggagttcttacagtagtaaaaatattcctttatcctaattaacatatggatattgccatcaaccatttctacccaagatgttagttcttttctttttttgaaacagggtctcactcttttgcccgggctggagtgcagcggcacaaacatggctcactgcagccttgacctcctggcctcaagcagtcctcctcccttagcctcccgattagctgggaccacagacgtgcaccaccacacccatctaatttttaaattttttgtatgttgcccaggctggtctcgaactcctgggctcaaacaatcccccactttggcttcccaaagtattgggattacgggcttgagccactgcaccagggcatcaggaaagttagttctctcctctgaccctcacaataagggtagcttgctggttcattttctgtgaattaaagtttttaataacttttggctgggtgcggtggctcatgcctgtaatcccagcactttgggagcctcaggcaggaggatctcttgaggccaggagttcaagcccagcttgggcaacatagtaagaccctgtctctaagtaaataaataaataaataagttaattaggtgggcatggtggtgctcatggtgtgcgcctgtagtcccagctactctggagggtgaggtgggatgatcacttgaccctgggagttcaaggttacagtgagtcatgatcacatcactgtactccagcctgggcaacagagtaagaccctgtctcttaaaagaaaaaaaaaaaaaggctgggtgcggtggctcacgcctgtaatcccagcactttgggaggccaaggcaggcggatcatgaggtcaggagatcgagaccatcctggccatcacagtgaaacccccgtctctactaaaaacacaaaaaaattagccgggtgtagttgtgggcacctgtagtcccagctacttgggaggctgaggcaggagaatggcgtgaacccgggaggcggagcttgcagtgagccgagatcgcgccactgcactccagcctgggcaacagagcaagactccatctcgaaaaaaaaaaaattcatcacttttaatagctcttatgctttctctggttgtgggcatgcttcctagcttttatatatctttgtatgggaaatcagggattgggggccagta

SEQ ID NO: 20890 - DNA, 1059 bp, Homo sapiens
tgtattttcttcccagaaatatctccaatagtcttttctctctcctgttctccatgtaactttgagaaactttatccttcagaaatatctaagcaacattgcttgtaaaatatttaaaatttctaagattgtgccagtatgaaaagtcatattattcctggggccatttagattctgtgtctgagaggaacattaactgaaacttggaaaataaaagtgttgttataataagaaaaaaaaaaaagagagaaggagaagaacttgaggctcgtgggcgctcagccttctcttgtgtctttttagaccctgtccctgccagtggtggtgatcgttcatggcagccaggacaacaatgcgacggccactgttctctgggacaatgcttttgcagagcctgtgagtgtattcctcgggcatgtgggtcccaaaatcaatgccggtgtcatgaatctcatttatgtattatccttttaaaaagcataggaaaaggccgggtgcagtgactcacacttgtaatcccagcactttgggaggccgaggcggttggatcacctgaggtcaggagttcgagaccagcctggccaacatagcaaaatcctgtttctattaaaaaataccgaaaaattagctgggtgtggtggcacatgcctgtagtcccagctacttgggaggctgaggcacgacaatcacttgaacccgagcggcagaggttgcagtgagccgagatcgcaccactgcactccagcctgggtgacagagtgagactccatctcaataataaaaaaaaagcataggaaaaaagacgctgttttctttagtgggaggcagaatagaaagaatgtggaaagtggaaagaacatgggcttgacatcgggccagggtttgaactgagactccaccatttcctcactccatgaccacatgggcagttcactttacctctctgagcctgagtttccagcaagtgtctgcagcacagggatactcttgctctacagcattgttaggaagattaaattagataacatagaaaatgcttgccacacagtcagtactcag

SEQ ID NO: 20891 - DNA, 1056 bp, Homo sapiens
ccagtttgtccttccctctctctctttcttccttttttctttctttttcattctcatttttctgagtagttgctgaagacacagcctgaccctaggggtccaaatatagatgaaacaatcatagctctctagcagttcacctggagggagagagaaaaagagagtaagagaaccaaaatgaaggggaaatattcttaatttttttttttttaaggacagaaactaacttgttgaggaaaaagagaaatatactgggagttctgactgataggaacaaagagaggacagcttcgaaggatgatttgaaaagtaatctatggaatttagctttaaagcaggatcttgggctgtagactactttattattattattttttaagagacagagtgcagtggtgcagtcatggctcactgtagcctcaaactcctgggctcaagccatcctcccacctcagccttctgagtagctaggattacaggtacataccagcacgcctggctaattttttaatttttattttgtagagatgaggtcttgctgtgttgcccaggctggtcttgaactcctggcctcaagtgatcctcctgcctcagcatcccaaagtgctgggatgttgtggactcctttagagcctcttgaaatagggctagtaaagtgattttctaccactgtatctgtgctcatttacattgggcagatcacttctgcttgacttcatagtttcaacctataacatgaggggtcaacaggtagattcggaaccatcagagtttaggccgaagcccatagaatatgaaagttatttttaaaatttatttttacaatgtctacaaatgcagttgttaaagtgccagagacagaagtattgacaatgagaaattatccaaaaccaggccaggcgcggtgactcacgcctgtaatcccagcactttgggaggcaaaggtggcaagatgacttgaggccaggagtcacaggctgcaatgagttgtgttcatgccactgctctccagtctgggccacagaacaagaccctgtctctaaaaataatcatcat

SEQ ID NO: 20892 - DNA, 1033 bp, Homo sapiens
gcttgtactcccagcagtttgggaggccgaggcgggcggatcacgaggtcaggagtttgagaccagcctggccaacatagtgaaaccccgtctctactaaaaatacaaaaattagccgggcgtggtggggcatgcctgtagtcccagctactcgggaggctgaggcaggagaatcgcttgaacctgggaggtggaggctgcagtgagccaagatcgccccactgcacaccagcccgggtgacagtatttcatctcaaaaaaaaaaaaaaaaaaaagaacacaattattgtactacttactagccctcctctgtccccagctaaaaataagaacagcaacaaccaaaaaatccttagttatgtactggaaatgaattagataattttcaataacttacacgtttttaggatatgttagtttgaaaatgcaaatattcatgcatgaccccagtgttaatctatgatggagcaggtatagtgggatgctgtttcatgatttaatttggaccttcagggagtagactgtgatgcctctgcatttgtatccaagacaaataattaaatagtctatttttggctgggcatgatgcctcatgcctgcagtcccagcactttgggaggctgaggtgggaggatcgcttgaggccaggagttcaagatcagtctgggcaacaaaatgagaccttgtctctacaaaaactacaaaaaattagctgaacattgtggcttgtgcccctagtcccagctactcaggtccctgagttaggaggattgcttgagcccaggagttggaggttacagtgatctatatttgccactgcactccagcctgggtgacagagagagaccctgtctcaaaaaataaagtctgtttttaaaattaattttaaacactggagtttattacaaaaagcagttggttctttttttaaatcatttttttttaggagaaccaccgctttttggctacattgtctagagtagcagtgttcaataaaaataagatccaagtcacatatgtaatgttaagtttt

SEQ ID NO: 20893 - DNA, 1044 bp, Homo sapiens
gcccgccactacgcctggctaattttttttttttttttaattagagacgaggtttctccatgttggtcaggctggtcttgaactccccgttctcaggtgatccgcctgcctcagcctcccaaagtgctgagattacaggtgtgagccaccgtgccccgcctgttttggcttttactgtgaagacgtgttagccgctgtgatgactagcaagtgtggccctccacccagtcgctctgggctcccagctcctgcatcctgctgcaaacttgacatcttccctcaagtaacttgtagttgtctcctgtctacttgcccaaaatataactcttaaacttttctctctgcaagtttgtgcctctctccctgtctgacttccccatctaaataaatggtagaccaccatctactcctttgtgcaagccagaaatctaggaatcatccttaaattccctgttctgtcttatctctgctttcattcaaagcatcagcaaatcctgttggttctacctctgaagttttctcaaatactgttacttgactcatcctgacttttgtttctgctttatgttaggctaaatgccctgaaaactcttttgtacaaaacacctagaaatactggataaactgggcttaacagggaggcccggtgtggtggctcacgcctgtaatcccagaactttgggaggccaaggtgggtggatcacctgaggtcaggagttccagaccagcctggccaatacgtagtgaaaccccacctctactaaaaaaaaaaaaaaaaattagctgggtgttgtggtgcacacctgtaggtggtgcatgcttgaacttgggaggcggaggttgcagcgagctgagatcgcgccactgcacttcagcctgggtgacagagcaggattctgtctcttaaaaaaaaaaacaaaaaaagaaaaacaggaaaatcttcagaagcaaaaaccaaacaatctcaccaaagaaatgagaagatggctgggcgcggtggctcacgcctgtaatcccagcactttgggaggccgaggcgggcag

SEQ ID NO: 20894 - DNA, 1046 bp, Homo sapiens
attatcttggccacctcaggttctctttggctgagtgattgactggaaaacgcaatgtgaattcatgcttcagactgggttcttttttttttttttttttgagatggagtttcactcttattgcccaggctggagtgcaatggcacgatctcagctcactgcaacctctgcctcccaggttcaagcgattctcctgcctcaggctcccgagtagctgggattacaggcatgcaccaccatgcctggctaatttttttgtatttttagtagagacggggtttcactgtgttggtcagactggtttcaaactcctgacctcaggtgatccacctgcttcagtctcccaaagtgctgggattacaggcatgagccaccgcacccagcccaggctaggttctatatgggtgtgctttttagaatttagatcatgggctatccccaacacaaactggataatgtttctttctagattctctctaagcgtgtattctctttctttcctaggcacagccaccacttcacttacattgtgggattataatttcatgagtagtggaatttccttaaccttctcttgtgtgggagctgaaggacaaaatgagatattctctgaagagtggttacatcatgcaaaactatgatgtgtaatgaggtcacttagttttctaagtacattatacattttgataagattttcatagaaaagcttgtctccttggggagatcactcatcttccatcttgactattatttaaactttatgggtcagatttatctttttaaaaacttaaccataaagctcaattaattttttttttttttttttgagacggagtctcgctctgttgcccaggctggagtgtagtggcgcgatctcggctcactgcaagctctgcctcccaggttcatgccattctcctgcctcagcctcctgactagatgggactacaggcgcccgccacgatgcccggctaattttttgtatttttagtagagacggggtttcaccgtgttaggatggtctcgatctcctgacctcgtgatcc

SEQ ID NO: 20895 - DNA, 1097 bp, Homo sapiens
tatgcccggctaatttttcttttggtatttttagtagaaatggggtttcaccatgttggccaggctggtctcaaactcctgacctcaagtgagctgactgccttggcctcccagagtgctgggattagtcgtcatcttttgttaaaccaggatttgatttttttcttttcttttcttttcttttttttttttttgagacagagtctctctctgttgcccaggctggagtgcagtggcacaatctcggctcactgcagcctccgcctgccgggtcaagcgattctcctacctcagcctcctcagtagctgagattacaggcatgcaccaccatgcccggctaatttttttgtgtttttagtagagatggggtttcaccgtgctggccaggctggtctagaactcctgactgcaaatgatcagcccgcctcagccacccaaagtgttgggattacaggtgtgagccactgtgcccagcgtgatttttttttttttttaaagcaaacttgtcctttggttttgcagaacaggcctgctccctctcatctagcccatcatttcttggggcctgaaccccagtggtccaaagtattgcttgtgaaatttaaaaaatgtgaatatgatgtggggatgggcctcttctacattaccttggcccagggggatcagctggctgggaggattagtgagcacctctgtattttgaggtctgagtcttctggagctgtgtagttaatcttcggtttctgataacccctgggtccatctggccatcagcctcagcagtgagcaaagcaataccatactcatttctatgttcctgttccttcctctgctcctcctttggagaagcaataattcatgggggatgatacagtagcactttacaaatggctccatgtcattcatcccaggggccataatctcttgcaccacctattcttacttcctgttcagctcctttacagcttttattttcaactgcttcccaacttggtggggcctcctttaaggatgagccaatagtaagaatgtggctgtaatcagcagagacccctctgaggggtatctgttctgcagcccctagtgaaatcatgtg

SEQ ID NO: 20896 - DNA, 1017 bp, Homo sapiens
ctgctgtggtttattttggttttgctttatttattttctttctaaggggcacatccaccatttcctcccccttagcagcagtggtgtcagtcagactatgctcacttttatccctggattgcaatcacagggaattggaatggtctgagtgcaaggaagaaaacgtttctaagcacaaagggccttggagctggggacaggtttacacacgtggattgggctgcttgctcatagggtggagttgtcagaacaagtttgtcctccttgtacctaaattcagatttcaacctggtgagccaagaagaaagtcatgcttcacctccaaagcacctgggcctagtcactccccaaaccccatttaaaaccggaagcactggctgcctgcacagcaagatggggggaccctcaacaccctcctttcacagctcccccttctctctcccatagctggggctttgtgcaccctcggttgctcagcgtgcccgagctctgccaccatgtagctgaagtctgggttagtgggaccattttcataaggaatgttttgcttttcaaaaagcaaaacccaggcaaggtaagactcttccctttttcactttcatctctggcctctcagttcagttcatgctaaactgaaacagctcctttactatgtgtcttcattcaagaaagtaaagactatgatgttcatagagacaaaaggaagctataggaaaggccttctgaccagccattaggactaacacaggagcttggtgactgctcatttggtgtggttgccacttagatgaggccgttttcttgcttcaagataggaaagaaagctttcttgtgtacattctgtgtcatattaaatatgtgataggttgttgtgtttttttgggttttgtgtgtgtttctgttgacttaaaaaaccaccaccaacattgctttcagagagaatttttggctaagtcctattcaaaccaatttcttggcaggaaaggtgcagccctatggggttagccatgtaaaagg

SEQ ID NO: 20897 - DNA, 1031 bp, Homo sapiens
tatgccaactttctgtgtgaccttaatcaaatatttttcaggcctcagttcctagatctgtaaaaagatatgtaattgaattaaatgctcttgagtgcatctctgtcagtttgttgccctacactagggtctaatttggtagaaagatgtttgctttcattataacaacttgttatcaaggatgaatttctccgtgaaattaatagagatatagactggaaagcagaaggagctttaagaggttatttgatttagtcctctgcctttacagcagcaaattattttctctgccccataggtagagtagttaaggtccagaaggtttaaatgatttaccctaggtgtataactagttaagtgtcagaacaaaaaaagctagacctcaagtctgtttaccacagagcccatcgtacacacgtggccttttctgaaattaggataactaggtaaatgatctttcttctgtttttcttcctctgtaggttttttgccctgacatctcttcgtcttgtgtttttacttgcatttggcttgatgatcattgtgtgtattgatcaatggaagaacaaaatctggcctgaaataaaaggtgagtttggtagcatttagaacaatctgaactgaagatggcctttcctataatttgtacctttagtattaggggtttatgaggaggtgtatggagctggggactgtcttttgaagtctgaatcatttgctttaggaggcacttgaagggcttgtgccccaattatggttccttagagctgggttctgcccttcccattgttactaagcacaggaaatctgtactcaccacctgagttatttttgccaacataatggcctgaggaataagtagtcctcaaatgaaaaataataaattatcgttattggacactgcatctttattgaggcagtacctctcaggaattccttttacattgctcatttgcaaaacactaggctaggcaattgtgacttatagaaagtaccatgatggccgggcgcagtggctaacgcctattagt

SEQ ID NO: 20898 - DNA, 1068 bp, Homo sapiens
ctgaggagcagtggacaaaagctctcaagttcatgctgacgaatcttaagtggggtcttgcttgggtgtcctcacaattttataacaaatgacttttttccttagggggaggtttgccttaaaggcttttaattttgttttgtttgcaaacatgttttaaattaaattcgggtaatattaaacagtacatgtttacaataccaaaaaagaaaaaatccacaaaagccactttattttaaaatatcatgtgacagatactttccagagctacaacatgccatctatagttgccagccctggtcagttttgattcttaaccccatggactcctttccctttcttctctgaaaaaaactaatttaaatttgcttttcttttttttaactgagttgaattgagattgatgtgttttcactggatttttatctctctcaacttcctgcacttaacaatatgaaatagaaacttttgtctttactgagatgaggatatgtttgagatgcacagttggataatgtgggaaaatgacatctaagctttacctggtcaccatgtgatgtgatcagatgcttgaaatttaacacttttcacttggttcttatactgaatgccgactctgctctgtgttagagatatgaaatggtgtttgatactgtttgagacattatggagagatttaattatttgtaataaaagatttgctgcagtctgaaaactgcccaggggtgcactgttgggtttttctttaaaatagagtactttgtattctgggagaatcaagttctaatgaatgcaggtatgtggaaattctgttgaaacttctttagagttagttttagttttaaaaaaagactctagtaaaaatagatagctgttgaggaagccttgtttgtgtagatctgaataatggaacagagatgttaaactaattttaaggggaaataaaggctacctccttgatgcttagtcaaggtcacccagatagtctgtatttgagcccctgattaatactgattgcaatgcctgatgttcctcttaatgaaattaagctaaaagtataaatacctt

SEQ ID NO: 20899 - DNA, 1032 bp, Homo sapiens
catctcaaaataaataaataaataaatacaaaaataaataaaaataaatatgtaaaatgaaataaattttatttaattttatttgttatttttatttttttttgagacagagtctcactttgttgcccaggctggagtgccgtggtgcaatcttggctcactgcaacttccacccctgggattcaagcaactcagcctcctgagtagctgggattacaggtgcatgccaccacacccggctaatttttgtatttttagtagagacgaggtttcaccacgttgtttcaggctggtctcaaactcttgacctcatgatccacttgccttggcctctcaaagtgctgggattacaggagtgagccaccgcgcctgactgaaataaattttaaaaaatgaaaatattatgtcactcctctgcttaaagctcttcagaggcttcctgtaggtcttcgtgtaaagccaaactttttaccatggcatacaagctgtatctgggtggctcttgtctactgctgtagcctcatctggtgtcccttgacctcttgctggctgcatcctggccttgcttgtcatctctggattcctttgacatgcgctacttctttcttccttaaggcctttggctgtcttgttccctcttccttgatagttcctcctctttctccttttcttcctcctcctcttcctcttctttctcctcatcatcactcttgtcaatcagggatgctgctgtatctcttatgtcaagccctgtgccttgcatttggtaggtactcaataaatacttgttgaatggatgaatgctgcatattggaacttaagttcactgggcacagtggctcacacctgtaatcccagcattttgggaggccaaggcaggtggatcacttgaggtcaagagttcaagaccagcttggccaacgtggtgaaaccccatctctactaaaagtagaaaaattagccgggcacggtgatgcacgtctataatcccagcaactcaggaggctgaggcacgagaattgcttgatcctg

SEQ ID NO: 20900 - DNA, 1115 bp, Homo sapiens
aaccagtcaggcgtggcggtgcgtgcctgcaatcgcaggcactcggcaggctgaggcaggagaatcaggcagggaggttgcagtgagccgagatggcagcagtacagtccagcttcggctccgcatgagagggagaccgtggaaagagagggagaccatggggagggggagggggagggggagagggagagggagagagagagggcataatgcctatgttgctttatgatacaattatctttccagatgtgttgtctcctcagtcaatcggctcctggagggtgggacttctttttttttttttttttttttttgagatgcagtcttgctctgtcacccaggctggggtgcagtggcacgatcttggctcactgcgacctccgcctcccaggctcaagcaattctcctgcctcagcctcccgagtagctgggactacaggtgcccgtcaccacgcccggataatttttgtatttttactagagacgaggtttcaccatattggccaggctggtctcgaactcctgaccttgtgatcctcctgcctcggccttccaaagtgctgagattacaggcatgagccaccacgcctggccggagggtaggacttctgagattttcagactctatcatgcctagctttgtgtgtagattggcaggttcctggtcaaaggagtgcagttgggaggactagggacctactgaccctcttttccccaggcgtgctcccatgcatatgcccacactctcccacacactcctgctcctgccctcctggcctgtgactcttggtgcctcttcttgcagccagtgtggctgtctgtggactttgataactggagagactgggaaggggatgaagagatggagctggctcatgtggaacattatgcagaggtgagagacaacacctactgtgttctgcccacttgatcattctttgtgtttctctgcacacatgtctctggaggattgtcactggggccaagcagagatatgcaagctctctaggcaggttactcattgatgctgatattctttacgtattttgtgcaatgtttatttaatagggatgagaggaaagaatattattgaaattatatacattgattcactt

SEQ ID NO: 20901 - DNA, 1034 bp, Homo sapiens
caagattgcgccactgcactctagcctggggacaagagggagacttcatctcaaaaaaaaaaaaaaaatcccagctgggcacagcggctcacttctgtaatcccagcactttaggaggccaaggcaggaggatcacttgagcccaggagttcaagactagcctgggcaacatagtaagaccctgtctctacaaaaaaatttaaaaattaattgggtgtcgtagcacactcttgtattcccagctactcaggaggctgaggtgagaagaatgcttgagtctgggaggtcgaggctgcagtgagccatgatggtgctactgcactccagcctggccaacattgtgagaccttgtctcaaaacaaaacaaaacatccttctactgagcactttctgtccctttatagaaacttaagagggaaccagtagaggtaatttcctaaggaaaactgctttgggacatgatcacaaatgaagcctggagttttgaactgctgaggtcagcctgtttttaccttctgagcctatcaagtaattgttccagatgccaagaaaagctgctggccttatttctgcttctgcctttaccacaggggagcgccatgtgagccagtcctctgtttttcctccactgtatgctaggcagtattagcaccagattcttcccctctttaaaaagaaattctagtgctttggattttttcctccatgcagaatagcaatgatggaaagtatgtggtcaaagtaatgacattctgaaaatactaaatgtcaccatagtatttttctctggaagagaaatgtatatgtagaggtgaaacttcaaatttctttttttttttttttaagacgaagctttgctcttcttgcccaggctgaagtacaatggcgtgatcttggctcaccgcaatctctgcctccagggttcaagtgattctcctgcctcagcctcctaagtagctaggattacaggcatgtgccaccacgcccagctgattttgtatttttagtagagatggggtttctccatgttggtc

SEQ ID NO: 20902 - DNA, 1022 bp, Homo sapiens
caggggaatattagagggttaggactccccaggtagacattctaggggtgaaaatttgtcattacattgacatttcagatttaggttttcaacaatactgttttcttctttcacatattgccatctagtaatatagatgttctccgtccacattaatcaaaactattgacatggataattcctaattccttgaacactataatggagatctatagctagccttggcgtctagaagatgggtgttgagaagagggagtggacagatatttcctctggtcttaacttcatatcagcctcccctagacttccaaatatccatacctgctggttataattagtggtgttttcagcctctgattctgtcaccaggggttttagaatcataaatccagattgatcttgggagtgtaaaaaactgaggctctttagcttcttaggacagcacttcctgattttgttttcaacttctaatcctttgagtgtttttcattctgcagatgctgagtttgtgtgtgaacggacactgaaatattttctaggaattgcgggaggaaaatgggtagttagctatttctgtaagtataatactatttctcccctcctccctttaacacctcagaattgcatttttacacctaacgtttaacacctaaggtttttgctgatgctgagtctgagttaccaaaaggtctttaattgtaatactaaactacttttatctttaatatcactttgttcagataagctggtgatgctgggaaaatgggtctcttttataactaataggacctaatctgctcctagcaatgttagcatatgagctagggatttatttaatagtcggcaggaatccatgtgcagcaggcaaacttataatgtttaaattaaacatcaactctgtctccagaaggaaactgctgctacaagccttattaaagggctgtggctttagagggaaggacctctcctctgtcattcttcctgtgctcttttgtgaatcgctgacctctctatctccgtga

SEQ ID NO: 20903 - DNA, 1103 bp, Homo sapiens
ttgtgcaacacgtaaatactggtgtgagtggctgtggctatggctagtaaatgatggcccttggtaaacaaagttatttatcagacaatacctaccagctaggtcaactgtgcccataattgatctggttaatttcttttgctgcctattgatttttatttggttgatagataatagctagaggactctaaatttctttggggaagaacatgaaccccttctaagccttcttacgagagaattgatcgcttttgcactgacctttagtaacatcctgatttcagtgttttgtaactatcagagggttgagtcttggttttaagccatgtatatctgtagcataactttctgtgtaggctagttacctctcagcttataaagtgtaggctgataaatttatagtacagtagagtgtcactatgcaaagaaacgatcttagggaatcgaatgatatctgctattaaagcaaaattaatatatattttttctttttacttttttttttttttaaagacatgaaatctcactgtattgcccaggctggtcttggtctcagactcttgagctcaagcagtcctcccacctcagcttcccaaagtgctgggattataggcatgagctgccgtgtctggcccagtatatattttttaagttttaagttttgtggtacgtagtaggtttataatattattttgaatccttagttgtaattttatgtctgctgatgtgtacataatttttattaaactatttatttgagacttcaggtatcttttttttttttttgagacggagtctcgcactctcgcccaggctagagtgcagtggcgccatctcggcttactgcaagctctgcttcctgggttcacgccattctcctgcctcagcctcctgagtagctgagactacaggtgcccgccaccacgcctggctaattttttgtatttttagtagagacagggtttcaccgtgttagccaggatggtctcgatctcctgaccttgtgatctgcccgcctcagcctcccaaagtgctgagattacaggcgtgagccaccgcgcccagccgagacttcaggtgtcttagaattttttaaatgtacc

SEQ ID NO: 20904 - DNA, 1035 bp, Homo sapiens
ttcctcctaaggtgcttttcatagaaaaaagtccttcacacagctaggacgtcatctttgactgaatgagctttaacatcctaattactggtggacttacttctggtttcattttataaaagcaaatccaggtgtcccaaagcaaggaatttaatcattttgtgtgacatgaaagtaaatccagtcctgccaatgagaagaaaaagacacagcaagttgcagcgtttatagtctgcttttacatctgaacctctgtttttgttatttaaggtgaagcagcatctgggtgtgagagtgaaacaagcgtctctgaagactgctcagggctatcctctcagagtgacattttaaccactcaggtaaaaagcgtgtgtgtgtgtgcacatgcgtgtgtgtggtgtcctttgcattcagtagtatgtatcccacattcttaggtttgctgacatcatctctttgaattaatggcacaattgtttgtggttcattgtctccttaaattagactgtaagcaccttgatggaactcatactaccttttatttcacacacacgcacacgcgcacacacagcctacacatacactgcctagctcattgtagcatactaaatactgattttaatgaataagctaaaccttcgaaacccatttgctaatcccagcactttgggaggccaaggtgggtggatcacctcaggtcagaagtttgagaccagcctggccaacatggtgaaaccccacatctactaaaaatacaaaaattagctgggcgtggtggccaatgccttgtaatcccagctattctggaggctgagacaggagaatcgcctgaacctgggaggcggaggttgcactgagctgggattgtaccactgcactccagcctgggtgacaaagtgagactccatctcaaaaacaaacaaacaaaaacacatcatttcccctatagcaaaaacatgacggcacttactgtatcaagagaggtgagaaaaaggagccacagcaggatgattcaagggactctgcatagctcca

SEQ ID NO: 20905 - DNA, 1018 bp, Homo sapiens
attgaagacaaaatatttgggaaaacctatcggaagaaggcaagcctccccaacttaagccatgtaactgaaaatctaattataggagcatttgttactgagccacagataatacaagagcgtcccctcacaaataaattaaagcgtaaaaggagacctacatcaggccttcatcctgaggattttatcaagaaagcagatttggcagttcaaaagactcctgaaatgataaatcagggaactaaccaaacggagcagaatggtcaagtgatgaatattactaatagtggtcatgagaataaaacaaaaggtgattctattcagaatgagaaaaatcctaacccaatagaatcactcgaaaaagaatctgctttcaaaacgaaagctgaacctataagcagcagtataagcaatatggaactcgaattaaatatccacaattcaaaagcacctaaaaagaataggctgaggaggaagtcttctaccaggcatattcatgcgcttgaactagtagtcagtagaaatctaagcccacctaattgtactgaattgcaaattgatagttgttctagcagtgaagagataaagaaaaaaaagtacaaccaaatgccagtcaggcacagcagaaacctacaactcatggaaggtaaagaacctgcaactggagccaagaagagtaacaagccaaatgaacagacaagtaaaagacatgacagcgatactttcccagagctgaagttaacaaatgcacctggttcttttactaagtgttcaaataccagtgaacttaaagaatttgtcaatcctagccttccaagagaagaaaaagaagagaaactagaaacagttaaagtgtctaataatgctgaagaccccaaagatctcatgttaagtggagaaagggttttgcaaactgaaagatctgtagagagtagcagtatttcattggtacctggtactgattatggcactcaggaaagtatctcgttactggaagttagcactctagggaaggcaa

SEQ ID NO: 20906 - DNA, 1030 bp, Homo sapiens
gagcaggactctgtacaccccccaaaacaaaaaaaaaagttatcagatgtgattggaatgtatatcaagtatcagcttcaaaatatgctatattaatacttcaaaaattacacaaataatacataatcaggtttgaaaaatttaagacaacagaaaaaaaaattcaaatcacacatatcccacacattttattattactactactattattttgtagagactgggtctcactctgttgcttatgctggtcttgaactcctggcctcaagcagtcctgctccagcctcccaaagtgctgggattataggcatgagctaccgctcccagccccagacattttagtgtgtaaattcctgggcattttttccaggcatcatacatgttagctgactgatgatggtcaatttattttgtccatggtgtcaagtttctcttcaggaggaaaagcacagaactggccaacaattgcttgactgttctttaccatactgtttagcaggaaaccagtctcagtgtccaactctctaaccttggaactgtgagaactctgaggacaaagcagcggatacaacctcaaaagacgtctgtctacattgaattgggtaagggtctcaggttttttaagtatttaataataattgctggattccttatcttatagttttgccaaaaatcttggtcataatttgtatttgtggtaggcagctttgggaagtgaattttatgagccctatggtgagttataaaaaatgtaaaagacgcagttcccaccttgaagaatcttactttaaaaagggagcaaaagaggccaggcatggtggctcacacctgtaatcccagcactttgggaggccaaagtgggtggatcacctgaggtcgggagttcgagaccagcctagccaacatggagaaactctgtctgtaccaaaaaataaaaaattagccaggtgtggtggcacataactgtaatcccagctactcgggaggctgaggcaggagaatcacttgaacccgggaggtggaggttgcg

SEQ ID NO: 20907 - DNA, 1056 bp, Homo sapiens
ttttgagatggattcttgctctgttgcccaggctggagtacagtggtgccgtcttggttcactgcaacttctacctcccaggttcaagtgcttctcctgcctgagcctcctgagtagctaggattacaggcgtgtgccaccatgcccagctaattttgtattcttagtagagacggggtttcaccatgttgtcaggatgttcttgatctcctgacctcgtgatctgcccacctcggcctcctaaagtgctgggattacaggcgtgagcctccgcgccaggccttaagattaatttttaatggttttttagactcatatgtatggaaacttctaggatggggaccatatttcacttccttttaatacagtacccagtatagcacaatttgcagttatgtcttaatatgtgattcctgatcatgactggaaacagtgttatttgtggtagctatagggtaggtaagtttttcagcctgttttaggtttcttgacctaaaattccttctgctggactctaagtcactattggcagctatttctgacgattggtagttctttgtaactttttacctatgactgtaacatttttgactttcagaagaatttgctaaaatgtgttccccggtgggttgttgtttttcaacctaaacctagctgctttttccagtcacttatccgtattggaagctcaaaatgcaaatatacagtaggcctaaaatattgcctggtttgaaaagtgtttaaaatatttgaatcatttttatagtaaacatttactctcatcaggacctagaaggggaacattttaatttttttccttttcccttttcacagtcttccttcaacattcattacctttttacatattggagttttcatctgttcacagtttatgtttacagtgtgtttatatagtgtagattataattaccatactgaaatataattatttcagaattgagtcagtggtgagaatgaaagccatctggtatgataactgaatccaatttttcttttacggagaatttctttgaaatgtagcttatctcagaaata

SEQ ID NO: 20908 - DNA, 1022 bp, Homo sapiens
tctgggtcctaaaagcctcaatcattagacaatactatatagcaagagtggagaaggacttcacccttcctgtaggaagactacatggtggagttcaaaccacacagagaaaaatccattcagtaaatttccaaagttgcagaccgtttaggcccacccagaatcccaccgggactggacagcccccactgggctatactggatatgtggacatagagcctacactaagctgcctgacaagtagttgtgttattggcactattaaaccatctttcttcctactgtccataaaaacaggagaactcctgggcttccctgtctatgcttcccgtgaaaagcatagctataagaaattgaaacaatgataaatggccccctgagagaatcatacagtattatgggcctgctacttaggcacaagatggctcgtggggataccggatccccatttatatgatcaactgaatcatacggttacaagctgtcttaaaaataatcactgcaaccggcagagccttgactattctggcccagcaagaaactcagatgagaaatgctatctatcaaaatagattagctctcgactacttgctagcagctgaaggagaggtctgtaggaaatttaaccttactaattgctgcctacacatagataaccaagggcaagtagttgaagacatagttagagatatgacaaaagtggcacatgtgcccgtgcaagtgtggcatggatttgatcctggggccatgtttagaaaatggttcccagcgctaggaggatttaaaactcttataataagagttataatagtaataggaacctacttactgctccctcgtttgctacctgtacttcttcaaatgataaaaagcttcatcgctaccttagtataccaaaatgcatcagcacaagtgtactatataaatcactattgatctgtctagcaagaagacatgggtagtaaacatgaaacaactcctgctattgagtgagagtctcaaagtgggggaataagggagga

SEQ ID NO: 20909 - DNA, 1028 bp, Homo sapiens
agagtgtccagtgtgtgcccacctgtgggatccaggccttggcttcccaagttttccagaaggttcctttcaagtggttatctggcccagctcacgggcccgcccatccccttgtgtccctgcagacgactaagctaccggagagccgcgggcaccctgccgagcccccagagcctcaggaagcccccctgtgagtagattgtcagggatggcactccagggagggcccggggttagggcgagggaggattcaggctgggaagaagtaggcagtgggctggagggggcatcaggggtcttgtctgagctcatggactccagaggaaggagggggtgggaagtaggaggtggggggcagctagtccctggagaggagcttgtatatttggagtccatagatgatgctggggggtatgttaacagctttcccaaaatgtgcagatgtgtgtgtgttcacacgcgtgtgcatgtgcgtgtgaggatccacagctttcgttagattcccaagggctctctgaccttgaaaatggaagaagcactggcgttggaagggaatggagaaggccatgtgtgacctggtgcctctggtagggctgccagattgccagactgggcaaatacaaataaaggatgcccagttgaagcttgaatttcagatagatgacagattggtttctagtataagtatgtttttatgtagtttttattatagtataagtatgtcctgtgcaatatttgaggcatacttatactaagaagttacttgttgtttatttgaaattcaagtttaagtgggtgtcctgcattttatctggcaactctacaccgtgtagcactttacactttagaaaacatgtccacctacttcttggaaccctgtgaagtcggtagagtcagctatcttttctaagctgggaatatgtagggtcacaaggttaagtgagcagagttggggtcacattttctgaaggcctgtgatcagagccccagggtagggccccgtgcagagaggaagcttttccagagca

SEQ ID NO: 20910 - DNA, 1077 bp, Homo sapiens
tagacttagagaaggtgagagagggagaagggaagagaccttgtaagatctataaaacctaagagatacgatgagtggaggtgattaattaatgggaaacagcaagcctgggaggaagctcttcatcatgtgtcccacatcttcctgtccccccccattggtcttaattctgtaaatggggggaagtgagtaccaactgggtttggcaggaagcacttttgactccttagttttagttgttaaatgatgtggaactttaaacagttcaggaggtggagttagtgtggttggaaaggcaggcagtgaggtgtggaataaagaacaagggctttgataacttcattcctcatgttgttcctggataagtcatttcatctttcttagccttaaatttcccaactgtaaatgtggaaataatgtccatctcctagggttgatatgaagggttaataagatattttaaaagcctaatacttagaaagtgctctgtaaatgttagtataaatgttagcttgatccttggacagttaaatctggaggtgagattggagtagatgatttctagaagttccatgtttgctttagaagccttagtttagaccaggtgcagtggcttatgcctgtagtcccagcactttgcgaggccaaggcaggagctcaagaccattctgggtggcatagtgagaccccccatctctacagaaaatacgtttaaaaaaaattaggcagatgcgatggtacatgcctgtagtcccaactacttgggagactgaggtgggaggatcacttgagccagggaggttgaggctgcagtgagttgtgatcgtaccactgcactccaggatgcactccaacctggtgacagcaagatactgtctctttaaaaaaaaaaaaaaaaaaaaaaatttgtttagatggtatttgaagggaggctaatatgtaaagcacctgggcagatctggttcaggcaggggtaggggtctcagagccctgccctgggtctcacagatctcaccccttaacccttccttggagtgcctaagaatgcttttgattataatttttttttgagatgaa

SEQ ID NO: 20911 - DNA, 1046 bp, Homo sapiens
tttagtagagacggggtttcaccatgttggccaggttggtctcaaactcctgacctcaggtgatccgcctgcctcggcctcacaaagtactgggattataggcgtgagccactgggcccagccagtgcctctttttatttaaggaactgatgtttggggacaaattgtgtgttctcgcgcgtgtttgcacatgtgctgcagcattgttagactcagctgttcatgttcatgggtctgaagagtctccagattatttgttggacttttaagatgcattgtttgcctttaatttgttttaactaccttgtctagcacatttgttttgtcttacactcaaacaaatttgtacctctggaatctctagcaaccagtagtgtggggtagggatcagaaatgtgctggagaggtgatagggattgacagggtagaagttacgagattgtagtagactaccagattttactagattttcttttgatcagtttgtggatggttccaccagagggcagtgaaggaacagacatgacgtagaattcagactcttcgtttttctcaaaagcaggacagggttgcctttagctaaagttaaaggtggacagcgtttatggttagatttacttgagtcctggctccctatgtgagcacagataatgttctgtaagagtttttagagtctcagattgtggtctgtgaaggtgtggtatgtattaatttttaaactggaggctctagcacaacagctgataaatcttaattttcgccttgaatggaaattctgtgtgtgtgtgtgtgtttgtgtgtgtgtgtgtgtgtgtgtgtgtgtgtgtgtgtgtgtgtttgttttttttttttttaaagagacagagtctcacttctttgcccaggctggagtacagtagcatgatctcggcacactgcaacatctgcctgctgtgttcaagtgattctgctgcctcagccttctgagtagctgggattacaggcacgcaccaccatgcccggctaatttttgtaattttagtagagacggggtttcaccatgttgg

SEQ ID NO: 20912 - DNA, 1064 bp, Homo sapiens
atgtaggtttagtttttctctttattcctggatgttatcagtagatcttaagaagtagcttaactcccaaataagttgagagcttgcttctgcctttatgaaagaggactttttaaatcttggagttcatgatgaactaatagtgctgctggggtttgggtggtggcgttacctatgaatgtcttcaaattgtgtatatgtggatgtgtgcatacgtgaatatatgcattttctgcttgaagatctaaagtgtttttcagattctcggagggtttcatgacttagaaaagtttgaaagccactgtcttaaaggttcttttttgtctttatgtttgaattttgagttctaacagttacatgcttagcatattttaatcttgcacataaaagttgatctctgggaacccccaagtcacttttgtgtgtgtatgtgtgagacagggtcttgctttgttgcccaggttgaacttgaacgcctgggctcaagtgaccctcctgcctcggccttctgagtagctgggattacatgcatgcgtcaccatgcctgcccaagtctttctttttattggagccactgcgcccggcgttttttttgagacagagtctctctgtgtcgcccaggctggagtgcagtgacgcgatctcggctcactgtaacctccgcctcccaggttaagtgattctcgtgcctcagcctctggagtagttgggactacaggtgtgtgccacgacgcctggccaaattttttttttttttggagacaggcacacactgtcacacccggctaatttgttttattttagtagagacggggtttcattctgttgcccaggctggtcttgaactcctgagctcaggcagtctgcttgcctcggcctcccaaagtggtaagattataggtgtgagccactgctcctggctcaatttttgtattattagtagagatggggtttcaccatgctggccaggctgatcttgaacttctgacctcaagtgatctgcctgcctcagcctcccaaagtgctgggattacaggtgtcagccaccatgcccggccctaagt

SEQ ID NO: 20913 - DNA, 1029 bp, Homo sapiens
gggagccacggaggcccatggtggtgttggtacctggggagtctgggctcctagtgggaggaccacactgatctgactgcccctccaggcagagcagaggtcagtggagtgagatctggaggcaggggtgagggcaggggcaatgtttgggactcccaggtggtgagaatagccctctccccaactctggtgccaggttggtggaggaccaggcgtggggtacaatgtgaacgtggcatggacaggaggtgtggacccccccattggagacgtggagtaccttacagccttcaggtagggactgaaaagggccatggtagtcagtgggagcccctctgggccctgcagtgggaggggcagaaggcactcagttcagtgtgggtagagggggttgtctctgggaggataacagtggggcgaggcctggcctggtcatctgccgggctcagcttgagccatccctttgcaggacagtggtgatgcccattgcccacgagttctcacctgatgtggtcctagtctccgccgggtttgatgctgttgaaggacatctgtctcctctgggtggctactctgtcaccgccagatgtaagcctgctgggggattgagggaggaagtgaaacagtgaggatatcgagtccagtgaggcatggggcagggaacagactgatattgcagcagacggggaaagcagggggcagggcctagacttggaatcatcttggtaactcccccaacttgtcctctgccaaccccggccttgaggggataggaggtggcagtggggtagcagaggatagaggatgtatcctgccggagctgtagagatgggcttgttggtccctggtgtttcagtgatgctccttgtcattggattggagtcttcagccagtctgttaatgttttgactgtgatagggcatttagttcactgatgctgtattttattatggatatatttgggtttatatctcccatcacattttgtgctatttgtcccacctcttgtgtttctttttctctcctttt

SEQ ID NO: 20914 - DNA, 1072 bp, Homo sapiens
agaagaaaatatgagatgggccatccctggtcctcacagtgaacatgttagcaagagagactgttttggtgaggggcagcaggtggagactgtgagtgatttccttctggggcccactgcccaggaaggtgggagctgatgacttccctctggctcgggctgcctaccagcctttgactttatttacctcttttgcagtcttggaatcacaggcggaggctattgatggggttgcctgcttccctgagaccattccctgatctctgccttttcttccggcaaaagggggtttgaggattaaggctgtctttatttttctggaactgtttgcttctgcatgttctcctcagtggggctgaaaggctgacagaactttccctcagctcagactcggcccaaccaggttggaggagctgcccaggggcctgggacccaggccagctctggttgtaccctctttgtgccattgcccagaagagcaggcaagagtgaggcccactgtgcaagccagtctgggtggcagcggggccatggaggaggcggccaggatccttctccccagtgtgggagggagacaagcttcatgacaacacctgcctgcccagcgcctcccagaaccttcacactttctctctttcccttttccaggatggagggcagcagccccccccccccacgcctgctctctgggtgaccagagaaactggggcatgggtgtggggtggagccaggaacctcggtgtcctgccttccagccttgggctctgcctccttcagagcccccagggaaggcaggcagtgagaaagtgggtcaatcctggcatggggctggggtctgagaagtagactcctggcctcccttctctactgagatgccccctggcacacctctgtgctcactgcagagcgggacctgcttctcccctcctcttccctgctctatcattccaaagagattgaaggcttagaatggaatggccagagaaggcagggtcaaccctgaggggaagtagaagatgccaaagtaggtgttcacatttttcctggacttggcttcaaatgagagggttca

SEQ ID NO: 20915 - DNA, 1030 bp, Homo sapiens
agttgtgacgctgacctgtccaggagccatctgcagtccctgcttcccatggggctggggtctaactcttggccaagggaattgaagctgcctagcggcatctgttggtggcttggaaaggatttttcccagctttggggtttctttcccttgcagggaaatgtgataatcaacccaggatagatgaagttattgggttacctttccagatgctggcggtccaagtttcccttgcagctacctctgtgggagctgacaagagtgttggaggagctggacgtgtccaccaacgcaggaggctggcagcttgagagccactgctgagccctggccaggaggggcgtcctgagtgggcctgtggaatgggccccgcgtcctgcctggctttccagctccccccagcagggggagatgctgtcttctctgtgttggggaaagaaggaaaaaaggagggggccagggattgggaacctcattttaggattgttgagaggctttggaactggggccactgcttggggatgtttgcttgaggcccttcctgcagagtgttcctggggttctggactggctttcccagttgtggggttccagctgccctgggccagggagatagtcagcctccccccagctcttcctttctgaggggcctagcgtctgctattcccagagcttgggctggcatctgggctagggctggggtgcccagcgcctggcagaagcctggaaaccacatgccttggaactcggcggaagtaaagtgagaccaccgattgaagccagagcacgcgggtgtccacttccctgtagagagccccaagaaggaaaggtatgggccatggggcaggagataagaggtgggaaggaaggaaatggttagtccccagggtctgctgcagcccctgagcgcctcccaccttttcctcacttccctgaacacttgctcctctttccccagagtaaaggacagtaggctttgtaaggggcagagcttctggttcccctcaagtcctctcagcgtaggagcttt

SEQ ID NO: 20916 - DNA, 1050 bp, Homo sapiens
cagtctctgctttgccttggaccttggtgctgggggtggggaggcctgggggggacactccccactcccattccccttcctttgtcctaatcctggaattaagtacaggggtttataggttctatttcttcccaagagccctgcaaagaaccccagtttcctatttggatgcccctacactgttgtgtttcagtggaatgtattttcatttaaaaacaactttgaatggggcactttttctttcctgttttaaaaattgaaaaattcttacagtacaaacaggactgtcagggtgggggtgttggtgctgtaagaggtcactcttgagtgcattttggcactgggatgggatggctggggtgggaagacccccatccccacccccaacttcttttctaatatttaaggagtgttttgtaggattcaacaaccaccacaacttgaatttgtatcatgggaggtgggagggagtggcttagaggtgtctgcctatgcttaaagccaactgtggaagttttgttttcccttttttgtataataaagtgaaaaacaaaggtttgactgctgtctggtcactggaatcaatgaaggttcacaggggtgacccaacaggtttgatctataaaaatgcttgaagccaatttgccttttcttcctagaactatcttcctcttccctaaagattccataggcaacctaccttcacattgttctgtgctactgttcttgcccttttctcaattccatttgttcaccttgggttgtgagaccactaaagattctgagaagttggagaacaaatgcattttcacccaaagtacatggtcttggggaattggaggtgatgagctactagggtcaagggttcgccctgggcatgcaagccttcctagtgtagggcttatcgtggggagttgagggagcacgctctcactttgagccttcagctccatcccaggttaaaggttaagggttaaggatgactttcctaggaccatctaggcctctgatgggaagcaggctgggctgggctgagatgactcactctct

SEQ ID NO: 20917 - DNA, 1073 bp, Homo sapiens
tataatgaatgataggatataagagattagtattttataaggtttatgaaatgtactcctaaacctgctttttgttttttatttttctaaatcatcatgtagtgcacctggaagtggtcccatgttcaaaccaaccacagtggctgtagatgaagaaggtggagaagatgataaagatgaatcagctacaaatagtggcacaggtgccactgcttcttgtggcctgggatctgaattctccacagataaaggaggccctttcactgcagtacaaatcactaataccactggactggcccaggctcctgggttagcctcccaaggcatcagctttggcattaagaataatctggggaccccattgcaaaaattgggagtgtcattttcttttgccaaaaaggctcctgtcaaactcgaatcaatagcatcagttttcaaggaccatgcggaggaagggacctctgaagatggaacaaaacccgatgagaagagttctgaccaaggactgcagaaggtaggagactctgatgggagcagtaatcttgatggtaaaaaagaggatgaagaccctcaggatggagggtcccttgcctcaacattatccaaattaaaaaggatgaaacgagaagaaggagctggggctacagagcctgagtattaccactacatccccccagcacactgcaaagtaaaacctaattttccctttctactttttatgagagccagtgaacaaatggatggtgataatactacacacccaaagaatgccccagagagtaaaaaaggcagttctcccaagcctaaaagctgcatcaaggcggcagcaagccaaggagcagaaaagacagttagtgaagtctctgagcagccgaaggaaaccagcatgaccgagccctcagaaccaggaagcaaagctgaggcaaagaaggccttaggaggggatgtaagtgatcagagtttagaaagtcatagtcagaaggtttcagagacccaaatgtgtgagtccaactcttctaaagaaacctctctggccaccccagcagggaaagaaagccaagaaggacccaaac

SEQ ID NO: 20918 - DNA, 1224 bp, Homo sapiens
ataagggctaatggaaacaggactgctttttaataccataatggtcttttccaaagttctggaaccatttttctggaagaaatacaggtagttccatttttctaggtgggattactgtgtcagtctgtgtgtatgtacacatatatatgttgtacaggtgcttcccttctccctagcccttttagagttgatggctttgtccctgattgttcagtataatagtttacagattcactaagagagctcgtgtagtaatgcttgctttattttttttttctcttccactcttgttttattttttacttttttttctttgtgatgtgacattttcagctgatgtattgaaagcaaatccttctaatttgggagcccagatcacaagagtgagtttttctactagtgtctttagctgtatatctttttttgtgtgtgtctttttacccttcccccctcccaatttaaaaagattcaaaacacatttcataaatattaggtaagaaaattcctctgtctgttgaacatcatgcctttctacaaagcaatgtccactttatactgggtcaaattccttttcccaatgctgttgtaaaagcataggttaatgtatatgtttcgttttgtttgtttcttgttattatctaatgtcttgaaaataattttagttctgtcttcattgcagatagatatgtctgggttctgtcaccagtgtgtcataacactgttcttttttggttgtagtttgttttgttttattttaaggaaaattatacagtagcttctgaaaataaaagacccattctgttacctggattttaagtaataaaatctttgacttatctctgctctccctcctcatcccctggatattcctctcagggccatgaaggaatgcaaagcctcacatactactttcagcaggctgaccagataaaagtggtcagactggtgagctctaaacatgctagcgctggaagacctgtcttgggtttatttaatagttataggaaacctctactcatgctgaaagaaaaaaaaaccacctttttatggtgaaataaaagtatgctttctatttgttctaatttaaataaccccccccccccatgtaagctgtacattgcttttcaagatcttacacctgggtaattttctgtactagcctaacccctttctgttctctttggcttgtgttattacaatttatctcatgttatgtttgtctag

SEQ ID NO: 20919 - DNA, 1065 bp, Homo sapiens
cacttcaggacctaatgttgccagggtaaaccaggcattctcttgttatgtatttctaactgttcttcattttggcactcaatcccagttgactaaaaatgattctgccttacttttgttctacagtttcaacctttctgccccttacacttaatttatcacagtgatgcactgtggtagagatgctgggattagactctttgttctattgtagtcagaaaagttaaagcaacctaagtaataagttctttagtgacagtactgtaaagagctctgaactgggttgttgttgtgccatttgctttggacccaggcagctcttatgacttatccgccttcagattttacctatggggcaaatctttgtccccagatatcttcttggagtgctatgtaaatacagattgagcatcccaaattcaaaaaattaaaatccaaaatgtttcaaaatctgaaagtttttgaatgccaacatgactctcaaaggaagtgtttattggagcattttgggttttcagatttgggatgctcaagcagtaaatatacaatgcaaatattctaaaatgtaaaaaagcccaatatctaaaacacttccagttctaagtatttcagatacgggatactcaacctgtatacttaaagctcattatctacaaaaccacaaaatttatgtataccatttcatacccactgggatggctaaaataaaaatggtactctaacaaagtgttggagaagatatcaagaagttagagccctcctgcattgctgatgagatagtgaaaagatagtggaaaagtttttgacacttcctcaaaacattaaatacaaagttaccatattactagtatatacccaagggaagtgtaaacatatgtccacacaagaacttgcctaaaaatgtttatagcagcattcttcataatagccaaaaagggaaataacccacatgtccatcaactggtaaatggataaaatgtggtacatctgtacaatggaatattattcagcaataaaaaggaaggacttactggtatatacaacatgcatgaatcttgaaaatag

SEQ ID NO: 20920 - DNA, 1050 bp, Homo sapiens
gtgacactgtcctcaacctgaatgtagtagaaattgttacatctttggttcatttgaatttgacatgtttattctcctgcacaccttgtgttacctcagctctcccaccacttttctctattgcatttgctctcaaactagggagattttgtcactctggaggcacttggcaatgcctctgtacatttttggttgtcccaactaagggtgtgatactactggcatctagtaggttgaggccagcaatgctggtaacatctacaatgcacagaaaagctccttgaaacaaagaggcaaaatggcagttaatagtgctgcagttgaaaaccctattctatcagaattaattaaaaactttcgtatatatatgatattgtggtgtcatttgaccttagtacaaacaaattattgtcattttaagtcccaagttatgttgtaaacatttataaagtgctcatctaggtgatccagaatattcacttattactcttctttagagtaccatcaaaataaaaatacaaaattaagggttacccatggagaactcatggactgcctgttcactaatacagaatatatatctgtgatccctggtctaggaaaaatctttagctggtatgatgaatgaatgcatgtgagtttatttcttcatcttaaaagctcatcttacgcattaaaaaaaaaaaaaaccatgtagtacaagtttggttttggttttggtttttggtgaaatgttcttcatttgcttgaaaggtaggctttttcacctttcttcatactgctgttctaatgcaaacagtaggatctcaaaacagaatgttataaatatataaacaaaagaagcacagcactaaatttttcatagttcgtctcttccctgaacttggaatgtctgaggaacccactgggtgcagtggctcatgcctataatcccagctactgaggaggctgaggcaggaagatctgttgaggccaggagttcaaggctgcagtgagctatgctcgtgccactgcacctcagcctgggtgacagagcaagactctgtctct

SEQ ID NO: 20921 - DNA, 1031 bp, Homo sapiens
tgctcagctggtttttgtttgtttgtttgtttgttgttttgtgtgtgtgtgtgtgtgtgtgtgtgtgtgtgtgtgtttagtagagacggggtttcaccatgttggccaggctggtctcgaactcctgacctcaggtgatccacctgccttggcctcccaaagtgctgggattacaggcgtgagccaccacgtggcctagttttacatgttttttaactttatataagtggaatcagttttcttgtatatatatatacacacaagattttctccagagtgtgacatttatttattttcttgtttccattgctgtaaggggttaaacctgtgttcaaggaatacacataggcttaacttcttaaagcaatatactttagcctctgtataatgttgtcattatccttttttaccttaaaattctgcagcttcagattcatggaagggtcttttaaacatttttgttaattcttagctgtattatactgtgttgatatatgttgtgcatattacttcttcatttctgactttattacagtttcttctatagcctataatgggctttttgtctgtgtaaatattctttttttttgagatggagtctctgtcgcccaggctggagtgcagtggcgccatctcggctcactgcaagctccgcctcccgggttcatgccattctcctgcctcagcctcccgagtagctgggactacaggtgcctgccaccacgcccggctaattttttgtatttttagtagagacagggtttcaccatgttagccaggatggtctcgatctcctgacctcgtgaaccgcccacctcggcctcccacagtgctgggattacaggcatgagccagcgtgcctggccttgtctgtgtaaatattctatgagtactgtttatttgagatagggtctcactctgtcacccagacaggatctcactctgtcacctagaagtgcggtggcagtgatcacagcttactgcagcctcgacctcctggactcaagcgatcctcccacctcagcttcccg

SEQ ID NO: 20922 - DNA, 1046 bp, Homo sapiens
tttagcaagacttgcatatataagagagcacttaggaatttctattattgcataagtaaaactgccttttaaaataggcaataggctgatgtgcagctcacacttgtaatcccagagctttgggaggctgaagcaagaggatcacttgagcctgaaaggtggaggctgcagtgagctgatcgtgctactgtactccagcctcagcgaccctgtctctaaaaaataaatgtgtaattccagttagtgaaacattatttaaggttttgatttagaaaatatgagtatcagttgttttccatcagattaatacattgatattggcatattcttgattttgcatgtgtttcctttcccttctccagttggccaagtaagtgtctgtagatcttttcctgaggaagacagtttcttttaaggagattatttagtgttctggttgaagttgcttcctttggagtgaaacaagcaacaaaaatgttctcactaatttaatatattttaaataatatttgctgtattttaaaagaaaccaagaagtagggaacctggattttatttttaaaagaagttgaggccgggcgaggtggttcacgcctgtaattccagcatttgggaggccgaggtgggcagatcacctgaggtcgggagtttgagaccagcctgaccaacatgaagaaaccccgtctttacgagaaatacagaattagccgggcacggtggtgcatgcctgtagccccagctacttgggaggctgaggcaggagaatcgcttgaacccaggaggtggaggctgtggtgagctgagattgcgccattgcactccagcctgggcaacaagagcgaaactccatctcaaaaaaaaaaaaaaaaagttgagttttctagagaatacatattagcagacactcttgctacctaccttttgaggtcatcactacaaattggtattcagatattgtaagtgatgttctttaggattatcattgatagcaactgaataaactgagggggttttttgttttgttttgttttgttttttaatgctgc

SEQ ID NO: 20923 - DNA, 2072 bp, Homo sapiens
ttttctccatctgtaaatggggttgtttcattaccatcaaattgtatgtaaaacatttggaaattatcacagattctgttttagagtatctttcattttaaggtatttactttcaaaaatgccaaatttaaattagccgggcttggtagtgggctcctgtaatcccagctactcaggaggctgagataggagaatcgcttgaacctgggaggcagaggttgcagtgagctgagatcacgccactgtactccagctggggcaacagagtgagtgagaccctgtctcacaaacaaacacccccaaaatgtctaatttggaaataaaaggaagactaatttctttattttctgaacccttgagcgttctgcatagtgatttaaagtttacaaaatatcttccatttgttgtctcttttggtctgtatgccagtcctaaaaagggggatggggtaggtgtggtgtgatggcttatgcctgtagccctagctacttgggaggttaaggcaggaggattgcttgagcccaggagtttgaggctgcaagtgagctatgattgtgtgactgcactctaatctccagcctgagccatagagctagaacctgtcttaaaaaaaaaaaaaaaaaggtggtgataatattttcattttgcagaggaggctgctgagactcaggctctgcttgccaaaagtcacacaagtgtctagctattatctcttattggagagctaagctttgcagcccagtcttttttagggattgcctagaaaaatataggaagaagtttattggctgggtgcggtggctcacacctgtaatcccagcactttgggaggctgaggcgggcagatcacgaggtcaggaattcaagaccagcctggccaatatagtgaaaccctgtctctactaaaaatacaaaaattagccaggcatggtggcacgtgcctgtagtcccagctattcaggaggctgactgaggcaggagaattgcttgaacccaggaggtagaggttgcagtgagccaagagtgtgccactgtactccagcttgggcaacagagtgagactgtcttaaaaaaaaaaaaatttttttttattaaacatgaaatggaggccaggtgcggtggatcacacctgtaatcccagcactttgggaggccaaggcgggcagatcacttgaggtcaggagttcgagaccagcttggccaacatggtgaaaccccatctctactaaaacacaaagaaattagctgggcatggtgatgcatgcctgtaatcccagctactcaggagactgaggcaggagagtcacttgaacctgcgaggcggaggttgcagtgagccaagattgtgacactgtgctccagcctgggtgacagagtgagactcagtctttaaggaaaaaaaaatagatgaaatggaggagttgcagtggaaagttaaatgaggctggaaagttttggggtaatggagtgatcctggaatagtaaaattttcagtgtagctatggaaaaacaatagtaagtttaagaaggcatttgattgttggcttattatagtatcacaagactggctgctgtctacataatccccccagatattttctactcaaatattttccactcttcaaactttagaattgtgaagtgaaccttatagatttgtctaactcctttatttttaagacagagtctcactctgtcgcccaggctggagtgcagtggtgtgaactcggcttcactgcaagctccacctcccgggttcacaccattctcctgtgtcagcctcccgagtagctgggactacaggcgcctgccacacgcctggctaattttttgtgtttttagtagagactgggtttcgccgtgttagccaggatggtctcgatctgctgacctcgtgatctgcccgcctcggcctcccaaagtgctgggattacaggcgtgagccactgcgcctggcctttaactcctctatttttggatcacgaaactaatataggcggcatggtgactcacacctgtaatcccagcactttgtgaggttgaggcagaaggataactcgaggctaggagtt

SEQ ID NO: 20924 - DNA, 1063 bp, Homo sapiens
acgcgcgcctgcacacacacacacacacacacacacacacacccctacctacctacctacctacaactagaagggagaaatgggaaatattaatataggcacaaatctcatatatgctaagcacttaacaaatatctcatttaaatcttataataagcccctgagagaattactgttgtcccattttgtggaagaaactgagtcttagagaagtccaatatgttgcccaagggtaagcaaccagtaaactatagaatcaggattcagatctcagtccttctgcctccaaagctcatgccacactgaatgtggaaggccttaatgctcctccaatctggaattgtattttgtaagccaaagacaccttgatcagagcagaggtatagacttacagccagaagagatactgaaggccgggtgtggtggctcacgcctgtaatccttgcactttggcaggccaatgtgggtggatgcttgagctcaggagttcgagaccagcctgggcaacatggcaaaaccccatctctacttaaaatgcaaagaaaaaattagctgggcgtgatggcatgtgcctgtagtcccagccacctgggagaatgaggtgggagaatcgcatgagcccagaaggtcgacgaggttgcagtgagctgagatcatgccactgcactccagcctgagtgacaaagtaagaccctatctcagaaaaaaaaaaaaagatattgaagataagttaaaactcactatacagttgagaaatttatttttagggttccaaaatgttttaatgatagggctgaaacccaaacccaaattctttgatttgccatcgaaatctcttttcattatcccagccaggcattggtgatggaaataaaataatagtctgctcaaagaatgtctgaggatggagatggaaaaccatttagaaagttgtctgggtatgagtatagataaggacttgaaagagtaatagtggaaatggaaaggaaggaataactatgaaggctgataaaacaggtcaactatgaagacaatatatagtcagtttatgcacatgtttgac

SEQ ID NO: 20925 - DNA, 1064 bp, Homo sapiens
gtttaaaataaataaataaataaaataaaattcaccctttccaaaacacataacataaaatttagcatcttaatcatttttaagtgtacagttgtgtatgtgaagtatatttacattgttggtgcaaagtccatctgttttaaatgattagtatctttattctccaaaaagaatggagccttattctgtttccaacattaagaattgagtttgtttcataactgactgtttacttcctagtgtcggattcagcagtgtacatgcaggcattgtgctggtttctctcacatacctctttctatagtacccacataatttaacctagaatatatccacatttattgcatattgaggcaatttatgacagatttctttgaccatactaaacctttgatataaataaccattcaaaaaagccctgtcactctagtgtaaacagtaggcatcgcatgtgatttctgggcttatgcttttgtaagttcttcacattgactagttcattgtcaactttccttttgatttgagtttaggactcttaacatatctcacatgcaaccatccactaaaattttaagcctggtccttttgggcttttttgtcaaagctttaaaaattattttgacccatgcaaggcttttgccaacaaaagttgcagttcttggtgctccagtgctgatgtcttgttactgaatagattggagaatagggcatgcagactctggaatgaagttatctgtggcaggatattaaattgtactttgtaaactgagtttatttttgtacccattttcttattcacatttcattctcctttagtatttgttaaaatatttcagaaattttaaaaaagttattatatatggccgataattattagtattaaaaaataaaagacctgaagaaaagataatgttgacaagatatctgaaggaaacaacacaaaaaaagcactactgatgagaaatattatgaacaattgtttattatagaaacagaggatatgtttaattcagaataaagcaagagtgaatgatagttgtattttgtagcatttagactggatt

SEQ ID NO: 20926 - DNA, 1034 bp, Homo sapiens
tcagttatttatttatttatttatttatttatttatttatattttgaagtggagtctcgctctgtcgcccaggctagagtgcagcggcgcgatctcggctcattgccagctccacctcccgggttcacgccattctcctgcctcagcctcccaagtagctgggactacaggcgcctgccaccacgcccagctaattatttgtatttttatagagacggggtttcaccgtgttagccaggatggtctcgatctcctgatctcgtgatccgcccgcctcggcctccaaaagtgctgggattataggtgtgagccaccgcgcctggccaggatgtttcagttattaaaacctttaattttaaaattctacttctacaaattctattgactggtgacacatgggagatgctcaataaatatgttttaatgaaatattcattactaagcattaacctattcttctggggaaatagaagatttaattacctttaaacttgttttccagtggcacaagaactctttacaaacaatacaaagaatactctgattaagagcaattcgtatgggatagaccacagattttgtaagagcccagaagagagaagataatcaggactgaaatggagatggctttttgatagaatttgtcccagtggtttgcatagttttaagtgttgggttgacttgaatggaggtgattgttttagaagaaggtcagaagactagatttgcttttctctccaatttgaaatacctcttctattcgaggacacccaggaacattgttgattgttattctctttgttcaggcacacaaggtggggctggttcatagtggctagcaaatctgtttgaatcccagaattttttatgttaagcatcagagactttaaagtacaactagaacctgcagagagaaaggagggagaagagatagataatgtgtttaagaaaggataggtaaatggctactcacctactttggatgatccaaagttattttcaatttttgtttttaaggagattttaggcagggt

SEQ ID NO: 20927 - DNA, 1037 bp, Homo sapiens
gaggtgggtggatcacagggtcaggagatagaccattctggctaacacggtgaaaccccatgtctactaaaaatacaaaacttagccgggtgtggtggcacacgcctgtagtcccagctactcaggaggctgaggcaggagaatcgcttgaacccaagatcgtgccactgcactccagcctgggtgacagagcgagactcgatctccaaaaacaaacaaacaaaaaaagatgagggatcagatgggagaatgactttaagctatatagaaggcagaatgcatgcatcatagacttaaaacatgttgttactgttgtggttggaagtgcaactacccatcagccgctagtcggtccttgctctacctgactgattaaaattctttctttatggttgtcaggatgacctaataggtttaaaaatgtagtgtaagcttcaaactccagttgctgatgtttagtttgcgcatcttaaggatttggaagtatatgtataattgggttttgtgatgttgcatatctgtctagatctgtggactccactagttccaaactgtaattctttataagactgctgatttgacatttagcagtgaccatatgtggactgcactagaaataatgtgcttcttggagctgaatggtgtagcattactatatggcttttctctctagtcttcattgtgtcatctgtagtgagctatagagtttttttgtttcgggaatttttacaacttgtttgcatgggttcacctagtagcattggttcttgcttatagtctttaatacacaatcagcaaagcttacaatccactcaagagacttactattttgtcactgttgaaaatgggctaaatgatgtaaattgaatgtggctgtcaactaaaacaaaattcagtatagaattagtattcatccagtcatggacatacctgtagcatggttttctcttgagacataataggccgtttcctactgtaaaaacttacagccagcttcatacaataaagtaaattttttcctgtgttttggcaggctc

SEQ ID NO: 20928 - DNA, 1028 bp, Homo sapiens
tcctcccacctcagcctcctgagtacctggggctacaggtgtgtcaccaagccctgctaatttttttcatttttgtagagatggggtttctccatgttgcccaggctggtctcaaactcctgagctcaagctatcctcccacctcggcccctcaaagtgttgagattacaggcatgtgccactgtacctggccaagattgccattttctgaaagcgtagcagaagttcatgagatcttaattatgaatcagaaacctatgtaaagttttcatttttgctcttgtgacttagtttctagtattttattaatgaaaatggtttctagcttgaagtagatagattccagttcgtgagttctattaaaattccttccctgaaacaacttggtacttttgcttgtaagtctggcattaattttcttttcatattagcattaccatttagcattaagtgaaagcagattcatggtaattaccaaaggaattacagatgaccaccacaaatactgaaagaagtcattgatttgatattgcagtgaataccagaagatgttgtaataattttccacttataaaaagtgaattgtccatttaactctggaggtctaagcaaatgtgcttaatgcatatcgtattagtcaatgcaaaaagttaaatatgcccaggctgaaagaaggtgtataatgtatggtcgttcttataccaaatgatttctttggaatttaaacaaatatgtttagtattttattcctaatttaggaagaaaaagcaactaaagttgttctgacattgtacacagatgagtagcacgtaactgttatttagtaagccccatagatagtaaggaataaaagttgttagtgagcaaaacaggagtatcctgccatttgctttaattcttcttgtgatagttttgaggtacaataattcctgtgtgcgtgtcactcaagcaaccagaaagtgtctttgtaatacgcatttggtctcatctcatgaagttccagttgtttgttgtcatccttgtgactc

SEQ ID NO: 20929 - DNA, 1163 bp, Homo sapiens
agtaatagttctggctgggtgtggtggcttatgcctgtaatcccaacactttgggaggccaaggcaggtggatcacatgaggtcaggagttcgagaccagcctggccaacatggcaaaactgtctctactaaaaatataaaaattaggtatggtggcacgtgcctgtacttacagctacttgggaggctgaggcatgagatgacaatctcttgaacccaggaggcggaggttgcagtgagctgagattgcaccactgcactccagcttgggtgatggagtgagactcaaataaaaaaggtactagttctgcatttcagagttggcttgttgaaccaggctatatgcttccaagatttaaatgtttttctgtattatactctcaattgtgttttaaaaaaatctcttacagaaatctctacctcaggcactaagtgttatgacatgggtagcatattgatattgaaaacttagctaggacttccagccttttaagataatttaaatgtaaaattaaatggttaaccagcaatctaatgtcatgtggtgtgcagtttggatattgcatgaacagctaaggaatcacctgttctagtgccaaagatcactcattgctaattttgttctgtacagcttatgtaatattttcatggtggagacggactctgtgtgctcagggccttgtctctaggaagattttgtcaattccaaatacagttttgaagattcatttgtggtttgtgtttcctttctcagaattcgaaaccaactgaaaatcagctgccaggtaatgtcatattgaggattttaccctatttatataagataatacccaagagcttagtgatatacacagaaaagctaatacgaaaatctcttcctcatacatttcacctgtaagttgatcttggtgggaatacttgagcagagaaatttccaactaaaggtttgggcttaaaagatgccttttttcatagctgatttgaagctcttctgggactactgtggctaaataggtcagcatattcgtggcgtcgcaatctggggaatataggtagcctggcgggggaggctggggtctaagctcaaaagctgggaatgcacccttgacttccctcggttctggaggcctttcctggagtgccttctgcaagggaccctttgc

SEQ ID NO: 20930 - DNA, 1050 bp, Homo sapiens
caacatggtgaaactccatctctactaaaaatacagaaattagccaggagtgctgggtggacgcctgcaatcccagctacttgggaggttgaggcaggagaattgcttgaacccaggaggcagaggttgcagtgagctgagatcataccattgcactccagcctgcaagacagagtgaaactcttgtctcaaaaaaaaaaaaagaaaaaaagaaagtgagcctgttgatgtctagctaacccattggtggagtctgcattgaatctgtaagaatattgttctggatcatgcaggtgggatttgtataaaaagcctgtccaacatttagttctcactcgcatcagaatcatactgttttgaattgccatataagacatgctccatcatgacacttgcttctcctccaaatacaagttgagtgcttagtccttcacctgctagaatcaggatacaatcaacatgattatgttccttaacacacttggatttatgcagatgtggtgtgtcctttgctcttttttttcttaagacagagtcttgctcttgtcgctcaggctggagtgcagtggtgtgatttcggctcactgcaacctccgcctcctgggttcaagcgattctcctgcctcagcctcccgagtagctgggattacaggcaccaccaccataccaggctgattttttttgtatttttaatatagacagggcttcatcatgttggccaggctggcaggctggtctcgaactcctcacctcgtgatccgcccacctcagcttcccaaagtgctgtgattacaggcgtgagccaccgcgcctggcctgctcttaaaacccgttattcagaagatttgtaaaagaaataggctttttttttttttttggttaattcaaacgaggggaaaattagatagcattttcccctaaagaaatgttaatgttcattttgtggctttgttttcaagtttcaggagccatgtacatctcagaagtgttacgaagtgattagaaaaggcctctggtaaaagaccttcaaggaccaaccattattattgg

SEQ ID NO: 20931 - DNA, 1065 bp, Homo sapiens
ctcctgagctgctgggattacaggtgcacaccaccgtgcccgggtaatttttgtatttttgtagagacggagtttcaccatgttgaccaggctggtctttaactcctgacctcaactaatctgcccgccttggcctcccaaagtgctgggattacaggcgtgagccaccctacccaactgagatgctgtttattctaacatttgttccactgtgaaccttgaggttagatttcaagtattcaaagcagtagttcctagagatatcataattagtaattaaattaagatttaatatttgttgattttattttggtatttttccacttttatcagggcataccaattcaatcaccatgagttggagcttcctgactcgcctgctagaggagattcacaaccattccacatttgtggggaagatctggctcactgttctgattgtcttccggatcgtccttacagctgtaggaggagaatccatctattacgatgagcaaagcaaatttgtgtgcaacacagaacagccgggctgtgagaatgtctgttatgatgcgtttgcacctctctcccatgtacgcttctgggtgttccagatcatcctggtggcaactccctctgtgatgtacctgggctatgctatccacaagattgccaaaatggagcacggtgaagcagacaagaaggcagctcggagcaagccctatgcaatgcgctggaaacaacaccgggctctggaagaaacggaggaggacaacgaagaggatcctatgatgtatccagagatggagttagaaagtgataaggaaaataaagagcagagccaacccaaacctaagcatgatggccgacgacggattcgggaagatgggctcatgaaaatctatgtgctgcagttgctggcaaggaccgtgtttgaggtgggttttctgatagggcagtattttctgtatggcttccaagtccacccgttttatgtgtgcagcagacttccttgtcctcataagatagactgctttatttctagacccactgaaaagaccatcttccttctgataatgtatggtg

SEQ ID NO: 20932 - DNA, 1046 bp, Homo sapiens
gttggccaggctggtcttgaactcctgaccttaggtgatccacctgccttggcctcccaaagtgctaggattacaggcgtgagccatcgctccggccctatgtcctgaattttaggcaccttttcaggtcccttatgtagaccatttcctcacatgtgcactgatcagttctgaagactgaggggcccctctgcagatctccagggttttttgtgtgtgagtgagtgaatccttttgaattatgtgcttccgtgaattgcagcattctttaaaaaaaaatttaagaagccattcaagaaaaaatagataaaatgttcagggctgggtgtggtggctcacgcctgtaatcccagcactttgggaggctgaggtgggtggatcacgaggtcaggagatcaagaccatcctggctaacatggtgaaaccccatctctactaaaaatgaaaaaaattagccgggcgtggtggcgggcacctgtagtcccagcttctcgggaggctgaggcgggagaatggcatgaacctgggaggtggagcttgtagtgagccaagatcaggccactgcactccagcctgggcgacggagcaagactctgtctcaaaaaataataataatggttcaggggaaaggaaacttcagtggagcaagaacccacttttctccacagtgagaccacaattggcagtgacatattctgcttagaaatgttaattccagaacctgccttctactcattctacttcttgaaatgatcttaatttctctggaggagtattgtactctgtaacattgtaagccaatccttaatgctttgttaatacatagctgccagggagggggcttgcctagagaatgagtgacccattacagaaatgaggactaatgttttcaaaatgttccccagactgcactcatctcccaggaattatttgacatttcactgagagtaagaatgggtaacttgtggccgggcgtggtgactcacgcctgtaatcttagcactttgggaggccgaggtgagcagatcacctgaggtcaggtgttg

SEQ ID NO: 20933 - DNA, 1038 bp, Homo sapiens
gaatattttagattgtttttattccgtcaaaaagaaacctgatacccgttagcagttactccctccttattccccccataatggttgtacaatattccattatggaggttataccataaattatatatgtttcttttttttttttttttttttttttttgagacggagtctcgatctgtctcccaggctggagtgcagtggcacgatcttggctcactgcaagctccgcctcccaggttcacaccattctcctgcctcagcctcccaagtagctgggactacaggcgcccgccaccatgcccggctaattttttgtatttttagcagagacaggatttcacagtgttagccaggatggtcttgatctcctgaccttgtgatccacctgcctcggcctcccaaagtgctaggattacaggtgttagccaccgcacccaacctaattatatgtgtttcttataataaatgccctgtatttgtttagggtaaattactaaatgtggaattattgatcaaaggatataagcactttaaagttcttgataactgttgccaagatgccttccagaaaagttgtaccagatgacaccattggtgtatgatggtatgggtgttggtgtttttttgttgttttttttttttttttttttttttttttgagacggagtttccctcttgttgcccaggctggagtgcaatggcgcgatcttggctcactgcagcctccacctcccaagttcaagtgattctcctgcatcagcctcccaagtagctgagattacaggcgtgtgccaccacgcccgctaattttgtatttttagtagagacaggatttcgccaatattggtcaggctggtctcgaactcctgacctcaggtgatccgcctgcctcagcctcccaaagtgctgggattacaggcatgagccaccgcacccagccgatggtatgggttgggtttttttaaagaaattttgtatcataaacgtagtcatattggaaaatcatacatttatttttgtcttagacatgttcgtttt

SEQ ID NO: 20934 - DNA, 1045 bp, Homo sapiens
tgcccagctaattttgtattttttagtagagacggggtttcaccatgttggtcaggctggtctccaactcttgacattaggtgatccgcctgcctctgccttccagagtgctgggattacaggtgtgagccaccgcactcgaccagattattagttttgtaagaccgttcctttgagaataggtatgagaagatagattttggctgatatcgttaacctgaaatttagacatagaaaacagttctgagctgttaatatcagctgaatggcaacagttgtttttcaacatactgctacagctgatgagttcagtttgtgttgaaataagaacctagtaaaatgtatttttaaaaatattttttaagatttaaatacaaataattttaaatacaaaaaactagctgggcgtttgagcattgctatttactgcaactctaaagagtgaatgacctgttagtcagtactggctggcatacagttatacattcttgaattttacaagtactgtagttggctgagagcagtccttggcaataaaggtttatctttcagacctgtggaatatattgcccaaagagttttcctaaaacaaggatatgatgatctctttgcagatagcattttactttttttttttttttttagacggagtctcgctccattgcccaggctggagtgcagtggcgtgatctctgctcaccacaagctccacctcccgagttcatgccattctcctgcctcagcctcctgtgtagctgggactacaggcgtccaccaccatgcccggctaattttttgtatttttagtagagactgtttcatcgtgttaaccaggatggtctcgatctcctgatctcatgatccggccacctcggcctcccaaaatgctggggttacagtcgtgagccaccgtgcccggccagcattttacttctaaagaaatgaaatggggccaggagtggtggctgatgcttataatcccagcactttgggaggccaaggcgggtggatcacctgaggtcaggagttcaagaccagcctagcc

SEQ ID NO: 20935 - DNA, 1032 bp, Homo sapiens
cctccgccttctgggttcaagtgattcccctgcctcaacctgagtagttgtgattacaggcatgtgccagcgcacgccaccacgcccagctaattttttgtattttagtagagatggggtttcaccatgttggccagggtaggctcgatcttctgaccttgtgatccgcccacctcggcctcccaaaatgccgggattacaggggtgagccaccgcgcctggctgtttgtttttaagaggcagtatgttgctgtatcacccagactggagtgcagtggtgtgagccatagctcactgcagcctcaaattcctgggtttcagtgatcctcctgccttggcctctcaaagtgctgggattacaggtctgaaccaccacgcttggcccctgtggctttcactgatgtcacttcctcagctgtccgtcttgttacccttttcttagtaatgcctcttctgctgttctgttagccgtccttaccacccatttccattctgaccaggaacaagatcaccatgattgctgagcctcttgagaagggcctggcagaggacatagagaatgaggtggtccagattacgtggaacaggtgagaacagggctctgacgccagggtcgaaaggaggcagggatgccacagtttaactgccgggtctctaagagcacacatctttctggggagcatttatgtctttgcctttgctcttgttctgggcacagtgggtaggatgaagtgactgtcttccaggaagggagggtctgtggctccaggaccagcaatcacagagctggctgacagctccattgtctcctcccttccccaggaagaagctgggagagttcttccagaccaagtacgattgggatctgctggctgcccgttccatctgggcttttggccctgatgcgactggccccaacattctggtggatgatactctgccctctgaggtacagcagaactgatgggaactgggtggcggtctcttacctctggagtggaagaaactacaaagtgttcttttcccaaaagt

SEQ ID NO: 20936 - DNA, 2098 bp, Homo sapiens
cctgacctcatgatccacctgcctcagcctcccaaagtgctgggattataggtgtgagccaccgctcccagcctttttttttttttttttttctctctgtcagccaggctggagtgcaatggcgtgattgcggctcactgcaacctctgcctcccgggttcaagcgattctcctgcctcagcctcccaagtagccagggttataggtgtgcaccaccatgtctggctaattttttgtatttttagtagagatagttttcaccatgttggccaggctggtctcaaactcctgacctcaggtgatccagccacccacctcagcctcccaaagcactgggattataagcgtgagccgccacacccggccttctttgatgcttttgctagccccttacagtcgacaccttgggcagctttttaccatgagcctgcaattggaataagattttcctcttatgtcctcacagaaataccttgtacttttctttcataatgcccatcagtttgtaaccacatacatgtgtggataatgattgtttactgtatctctcccctgctagaatgtatctgttttgctcacccctgctcttggcacgcagcaagtactcagtaaatttttgtggaataggctggatgtggtggctcacacctgtaatcctagcactttggaaggctgaggcaggaggattgcttgagctcaggagttcaagaccagcctagacaacatgaaaaaaccccgtctctacaaaaatacaaaaattagttgggcatgttagtgtgtgcctgtagtcccagctacttggggggctgacgcagaaggatcactggaaccttggaagttcgaggctgcagtgagccaagattgtgccactgcactccagcctggtaacaaagtgagatcctgtctcaaaaaaaaaaaaaaaaaaaaaattagggaatgctctgcctaagtttcactgctgcttattggacattgcttcaggtaccacatcgaggtgaaccgtgttcctgctggcaactgggttctgattgaaggtgttgatcaaccaattgtgaagacagcaaccataaccgaaccccgaggcaatgaggaggtagagtttctgaagagaccaactgggttggcttaagctagatggtcccagggacacacatgagcacaaacgggactaatccacagtcattgccatgtcctggtttcaggcttagccttctagatatgaccctgctggattctccctgtactcagttcagatgcgaggaattaggacgggtgccttttattattttcctcctctctttgttctgccagaatacctgggaagaaatggcccttcaggttacccccactcagcaccaggctcctggttggggaatacatagtctgatcctaagcaagtcctcttctcttctcatacctctgcactttctgtgcctgctcatgccagttgccctcagtcctttgtgctttggatctcaggctcagattttccgacccttgaagttcaataccacatctgttatcaagattgctgtggagccagtcaacccctcagagctgcccaagatgcttgatggcctgcgcaaggtcaacaagagctatccatccctcaccaccaaggtatgcccatggcctgcagcagccgccaagccccactatccccagctgaatgggcagagctgcacaccgcttcccatccatcaggtgttcatgatctgctgcttacaggaagctgtgtcaggagcaagcccagcctatggctgtcatgtcaaggcaggacaagacacgtgtgtgtgtgtatgtgtgtgtgttaaaacaagacctgtgtaggagggggcagtgatggggggtataggacaaggttgtgtgtgtgtgtgtgtgtgcgtatttgtgttccgcagatgtctttatctagacaaaaatacatttcttaatgagtatactttgaattgattttctcgagaagagaaggaaaagtgagttgttactctgatccttgtacactatgagcctgccagtgtacctttccaggtagcaggccaggagggctaaagggctagcttatgtccatgggtatagggtagagtttgacctaaat

SEQ ID NO: 20937 - DNA, 1070 bp, Homo sapiens
gatgctgaggagggaggattgcgtgagcttgagagatcgaggctacagtgaatggtgattgtaccactgtgctccagcctgggcaacaaggcaagaccctgtctcaaaagcaaaagaacctctaagcaagaaaaagtaacataaacatattacttagaaacctgaaggtaaatactctaaaagcagctttaaaagtgttgaaagcagttgcctctagggagcataacttgggggtagagtgcaatggggtagagggctgttctttataagccatacctttatttctatattgggacattccataagataatgtgccagtaaggctagggttgtggatttgatccccttgtacaactcgttttcttataaatgttagtgaactcagatgctcgtggtttctgcatggcttttaagattgaaagttttaacactgtaaaagccaaacacaaaagaataaagagtatggcagtgagggtaaagagcagagttgcttttcttcatttcctttcttttctcttttttaaatgatgtttatgtctgcttgtatttgtgaaattgaggtttttcgtcaaatgtatttctgtcttatcacattagattcatttcctgtgttctaaggtttttgtctctgtcctgtaggtttccccttgtctgtctggtgcagttaacttttccaagattgtgcagaatgttcccagctctgggaaatcaacttgttattgggaattaggggaacagctccatcatgtcactttcttggaccaggctgttggcaaaactgagtgtcttgcacaagtcccttccgagggctggagagtggctgtgataccgagttcctgcccttccccttggcagtgcgtccgggctgctgcagcctggcactgtgttcaccactgtctctgtttcagcatgtattccactgatgagaacctgatcctttccccactcctgggtaacgtctgcttctccagctcccagtacagcatctgcttcacgctgggctcctttgccaagatctatgccgacacctttggtaagcgctggctggcagtctgtctcaccagcttccc

SEQ ID NO: 20938 - DNA, 1035 bp, Homo sapiens
tggaacactttggctaaccttattcgtgttatcattggtgagacagccagcagagggagccagaattgtctttttttaaactgacttttcattttggaatagcagcaaactgaaaagcttcaagaattgttcaaagaacccaccctcatttacttcgtaattctctctctgtacacgttcagacacacacagagagacaggtgtgtacattttccccttgaactgtttgaaagtaaaatatttcagaatgtattttctaagaataaggacattcacctatgtaaccacagtacagttgccaaaatcagaaaatttgacattgatacagtcctgttgtacagatctttttttgcagaccttattcagttttattaatcataccaacaatttccgttatagaattttttcccctaatccagagtgatgcataacatttagttttcatgattttcaagtctctctgaattgaagctgttctttagcctctcttggtcttttatgacattgacacttttgaagagtacagggcacttattttgtagaatgtctttcaatttgggtttgtctaatacttcctcgtgattaagctctggttattagaatctggttattcttctccttatcaaactttatctactagttttgtcatctattgatgattcttggcttgttcctacaatagttgcaaatagtgagtcttctaactcttcttattccttctgttttgttttggttttgagatggagtcttgctctgttgcccaggctggagtgaagtggtgcgatctcagtttactgcaacctctgccttttgggttcaagcaattctcctgtctcagcctcccaaatagctgagattacaggtgcacgccaccacacctggataatttttgtatttttagtagagacagggtttcattcaccatgttggccaggctggtctcgaactcctgacctcaagtgatctgcccacctaggcctcccaaagtgtggagattacaggcgtgagccaccgcttccagccattgttgtttgt

SEQ ID NO: 20939 - DNA, 1050 bp, Homo sapiens
tcctgcctccagattgtcttgaatcccacagaactctacttactgctgattaggctaagctggtctgtgtgtgtggactcatgctctcctgggcatgagtcccaggagtccctctttttatgtagggagcctcccgtaggaaagcttaatgcaaggatatgacactaatgggggatatttttaccctgtggggggttatggcgaggaggaaaggggatattcggaggttcacgggctttgaagtgccccctcagttcaccctaccagttaattgtgctttatcctgcaccaagtgatgacttacttagtatttgcttttcaggacatgtgaatttctctgatgaggtcacagctggcttgcgcatctcagatggagtggtccttttcattgatgctgctgagggggtgagtcagactcagctcccagaatctcatccacctgttatgtttgcccccaccccgcaacaatacccagagcactgagtgagctgggagccagagaacttgaaactctctgggattaaggctcaaatttgctctaaaattaaagcagcaaatgtttcaaaattaattcttaccgggtgtggttgctcacacctgtaatcccagcactttgggaggctgaggtgggtggatcacctgaggtcaggagttcgagaccagcctggccaacgtggcgaaaccccgtctctaccaaaaatacaaaaattagccaggtgtggtgacccatgcctgtaatcccagctactcattaggctgaaacaggagaatcacttgagcctgggagttggaggttgcagtgagccgagattgcgccacttcactccagcctgggtgctagagtgagacattctctcaaaaaacgaagaaaaaaattatcaatgtgggtgcccttgcttcctgctcagtgaagctcaaaatgataagactcattgctattcagaaaacacaaagataaaatgacaaatgtaaataaaaggaagggaggagtgtatgttcttgtaagtggatttttaatattagttgtgtttttccaagagattggagtta

SEQ ID NO: 20940 - DNA, 1753 bp, Homo sapiens
cagtgagctgagataatgccactgcactccagcctgggcgacagagctagactctgtctcaaaaaaaaaaaaaagaagttcctctgtcttcagagagtctttgtgatagaagcgacacagtccccatccctgggtgggaagccaccagctgagaggggcaagatgttctccaaaaccaagggagacggcaggagggtggcctctcattggccagtggtctagttcagacttgtttttagcagtgggagcatattttcagcaaaacataaacaccaatatatgctttctgccacatctgcttgacccctctcttcctccctccccccagggagccctggctctcctgggaccactgcaagaacaccctaaccctggcaagaaggtcttagtcgtggagtcaggggtcttctgcccctcgctgtggtctcaggcatgatactgaccttctctgctgtgtctccccacttgcgagggtgggtcatggggacgtgggagagacctagtgcagtgcctggccatcggcggtggctgataaaagctgctttgaatgaacaaataaatctctctcctgttccccatctcagctgaagagcaatgtgaccagcctggactgtcacatcagccagtatgctaccatctgccaacagctccaggctgaggtgaggagcccgccttgggggcaggctggagggccgacagccagaggcaggagcttgagggtgtggcgggggctctgtctgcccctcccctcctgtgcttagctggggctctcaggggctgggctgcttctgttccaggtagccgctctgaggaagaagctccaagtgtatgaggggggaggccagcccccaccacaggacctcccaggatctcccaagtcgggaccaccaccagaacagtgagttccactgcccattcccgcccccaccctgcagctcagccaggatggggagccaggccctcttctccagtttctggaggactaggactccttgcttctgctccaatccctagggttaagggtttgcacccagtgcctgcccagcaactgactgtcacctagagtgctgtgtccaatgagtaaatggcaccccagcccgtaagagcagggcctactattcgagagaaggtgaacttaggggtgtgtgtcattgtctctcaaaccagaaaatccctgactcctcctaccctcagctactgcccatttgtcacctaagcatctgtcccttatggactctatacgacctgggtgccacagagatcccacccgctccctgctctcccacctggcccacatcctgcctctcaaaccctcctttcccgcttagccttcccagctcccccttgccaccccaccctcccagccagccctgcaccccagagctccctgcagggcctagagcccttcaagaggagagtctggggatggaggcccaggtggagagggccatggaagggaactcttcagaccaggagcagtccccagaggatgaggatgaaggcccagctgaggaggtaggacttgggggtgtgaggcctgggtatcgggagggcttggagctggtgggatattggaaaaattgcctctccctgactcagagtccctttagtcccgtctctatgtggatgtcttgcaccttagtcattaggaggatttcagattctgtgcaggaagaagaaatactcttatcagatccttgtgtgtttggaagtgaccaggacctggtcattctaggagctgtcatttccactc

SEQ ID NO: 20941 - DNA, 1050 bp, Homo sapiens
gtggaactgtacaggcgcctggaggcccgccagcaggagaagcacttcgaggtgctcatcagctaccaggaggtcggctgcccctgccctgggccttgttctcacaaccacccggggggaagtgagcccatggggtggagtgagctggtgtgggacagggtggcaggaaatggagagctggcacccctcaaggagatagatactgctcagtgagatgctgcactagagacacccgcctgttcaccctgctgtggtcatgtaacacagtcctgggaagcgccacttctgtgggtgtctcagatacatcccggcctcagctcccctgtccagccgctagggagaggtttcctgatgggccgctctccctcaggcctcttcctttcttcctttctcaggtgtataatgaacagatccatgacctcctggagcccaaggggccccttgccatccgcgaggaccccgacaagggggtggtggtgcaaggactttctttccaccaggtgtgggattgggctcgggtaggatgatcggccccatgggtccttggggttccctcacaaaactgtttggggatgccctgggtcctgtgatggtggtagcagtggtggtggtagcaagggggtgatgtagattctgaagagcagcccttcctgttaggggaaaagtcctgatccgggaacccacagccccgttcctgggcttctcctctgtagccagcctcagccgagcagctgctggagatactgaccagggggaaccgtaaccgcacgcagcaccccactgatgccaacgcgacttcctcccgctcccatgccatcttccaggtgaggtcatgggtcagagcctgaaaccagtgcccctgatgcccatctccccctcacccctgccatctgccttcagatctttgtgaagcagcaggaccgggttccaggactgacccaggctgtccaggtggccaagatgagcctgattgacctggctggctcagagcgggcatccagcacccatgcgaagggggagcggctgcgggagggggccaacatcaaccgc

SEQ ID NO: 20942 - DNA, 1016 bp, Homo sapiens
tataaattgtttttctacctggccacaaaacaaatctaaacaattatcagagtattgtataaaacataatctttttacataagcaattacgttataaataccacatttacaatttttttttttttttggaagtagagacaagttctccctatgttgcccaggctggtcttgaactcctgacctcaagctattctcctacctcagcttcccaaagccctagaattacaggcatgagccactgtgcccagcccatgtttggatttttttttttttttttttttctgagacagaatttccctcgttgcccaggctggagtgcaatggtaccacctcagctccctgcaacctccgcctccaagattcaagcgattctcctgcctcagcctccggagtagctggcattacaggcacccgccaccacacccggctaattttttgtatttttagtcgggatggggtttcaccgtgttggccaggctggtctcaaactcctgacgtcaggtgatccacccacctcggtctcccaaagtactgagattacaggcgtgagccaccatgcccggcctgaaattttttaaaaatacacttaagtaggtcaaataggaaatcataattgtaattaaaagataattaacatgaagcgattataaaaatactatttataaaacttgtgggatgcagttaaagcgatacttagagggcaacttatagtcttaaatgcttatattagaacattttgtttaagaagctgaaagttaatgaggcaaatatccaactttaataagacagaacagcagagaacatatgtagaatataaaagaagataagactgggcatggtggctcacgcctgtaatcccagcagtttgggaaaccaaggcgggtggacagcttgagcccaggagttcaagaccagcctgggcaatatggtgaaaccccatctctataaaaaaatttaaaattggggggtgtggtggcgtgtgcctgtgattcccagctactcaggagactgaggtg

SEQ ID NO: 20943 - DNA, 1034 bp, Homo sapiens
actccgtctcaaaaaaaagaaaaaatccaacgtgagcatgttaggaagactgagggtccaggtcagtgactgtcagttaatcacacatgtaaactgcagtcaggggcaggtttggttctggctgagccatttgggaaagcaagtttgtagactggaaattgggaagggaccaagatggccagggtgggtaggggaaggggagtatttgaaatcagaggcctggggccagttggcaagaaccttcttccaagctatatgccatggttcaagccctgttcttttttattttattttattttattttatttttagagatggggtctcactatgctggccaaagtggtctcaaactcctggcctcaagcaatcctcccaccttgtcctcccaaagtgctgggattacaggcatgagccaccacacctggcctaagccatgttcttcaggacagcattgcacaggggtggcctgatgcttactttacaggttggggtcagtcaccagaagtgggagggagaacagagggcggtggcttgggatctggcaagaggctggcctagggctgctggagatttgcatgccagcctttggcacatgtggcctccagcctgggcctccgagttgaaggcctggttgcctgtcaccccactctcagtcactacactgagactctccttccacgagggtataggggagcctttttttttttttgagatggagtctcgctctgtcaccaggctggagtgcagtggagcgatctcggctcactgcaacctcccttcccgggttcaagcgattcttctgccctcagcctcccgagtagctgggactacaggaacatgccaccaaacctggctaacttttgtatttttagtagagatcgggtttcactatattggccaggctggtctcaaactcctgacctcatgatatgcctgcctcgccctcccaaagtgctgggaatacaagcgtgagccactgtgcctggctgggggagccttttacactgtgaccatggccaagccccttattctgt

SEQ ID NO: 20944 - DNA, 1047 bp, Homo sapiens
agctggagtccagagtggcatgatctctgctcactgcaacctccgcttcccagattcaagcaattctcctgcctcagccttccgaataggtgggattacaggcatgcaccaccacgcccagctaatttttgtatttttagtagagatggggtttcgccatgttggccaggctggtctcgaactcctggcctcaagtgatccgcccaccttggccttacagccactgcgcctggccccaggggagcatttattcaccactcccaggagagctctgaaccactgaaggggaggaagaaatcaccagtgtgactctcagcctccctggggagctgcaccgttcttggcactgaaactccagcccctctcactcacaagtgtggggactgaggctcagaggagggaaggcacccggggctcagctgtttcttgtatggagtccttaccaccctgggccaggctggagagaagacttcctgcagtcacatgggtagttttatcacagaattcagagaccaggacccaggactttccacttccagtccacagcctttcattttagccatggttctgggcctagctgattcagattcagtgggctggggtagatggagcctgggtgtctgtaccttttgtaagtttcgcagtaaattcagattatagccaggtttagcacttgctgtgaggaatgtactgcctctgtgtaagcggcagtggaatgtgggaagccagatcggattctggagaatgatgacttgaccagagcagaaagagggtcatgaacacaggtgatcaaaggtggtcgtttgttcatgtgggcctgacagggagctgctggcaggtctaggtgtgacttggaggccgctgggtacctaagcctctatttcctccttgctgagctttgggagcaccgtgggctgcaacttcctccctggcagatcccagtagatctgtgcgcagccaagtgagtgggaaggcactcatacagcaggcccagggccagcaccacctgaccattcctgcttacctgtcagcgctctgttctcagat

SEQ ID NO: 20945 - DNA, 1041 bp, Homo sapiens
gtcattacagatcttttttttttttttggagacagagtctcactctgtcacccaggctggagtgcagtggcgcgatctcagctcactgcaacctctgcctcccaggttcaagcgcaaatcctattttatactcaaggaaagagaagctcaggatgctgaattaaattgcctacagccatacagctagttaagggacagagctaatcccaaccaaggtccctttgactctgaaccctctgagaatgtgcagtccctgtgatcctttttttgcataaatggcaacaaagtagtccagtccaaacagcctccctgctcattcatgaaagctggagtgatggtttgtgcttggagagtgctcaagtagagaagagagacctgtcccctccctgcccttggtgttggcaaagggagcagggaggacacagagggaggcagacgccagctcctttccttgtggctctctccaggtaactggcagcctggaggaggtggcggcttaatgggcctagcccacgaagagaacttggacttgaaggtttaaacagcaacctctcaccaataatgaaagattaggagtggggaagccgtatacaaaaatagcacttaatagttaactggaaaacaatatatttttgcaaccactggttcctcgagaaataattgggtcccaaggcaggaaatgactcgttttcatgaatgattatattgatcattggtgcaaaacagatacacccccttaggaaagcagttctgtctggctagtcaggcggccccagtgtgaaatcctgagaggcggcaaggggaggaggacaggggctgcaagccgagggagccaggtcctggcctggcacacgcaggggcgggtctgttgaatgggggatgagaaggaacagaatttgcctccaacataagtcctgagctgtcccaagggaagaaggtgacagagtgagaccctgtctcaaagaagaaaaaaaaagtcacatgaacagaaatgaaagtccaaagcatgacgagtccaaaggagggaaagtaaagggagtg

SEQ ID NO: 20946 - DNA, 1043 bp, Homo sapiens
cctcccaaagtgctgggattacaggcaggcgtgagccgccgtgcccagccagaacttcttttaacttccatttcctcactttgagaaagtgctgctcttacactctagttccgcctgctgggaagctcaccttcctaggcactctctcccacattttcctcatcttttagcccaatatattgtcagtccaggaatgtggaggtgggaagtaatgtggaaaggttttgtgattctcattttaaaatagttgatgttgccaggcacagtggctcacgcctgtaatcctagcacttgtgggaggccgaggcaagcggatcacttgaggtcaggagttcgaaaccagcctggccaacgtggtgaaatcccgtctctactaaaaatacaaaaaaaattagctgggcgtggtggcagtggctgtaatccagctactcgggaggctgaggcaggagaatcgctttaacccaggaggtagaggttgcagtaagccaaaaccgcaccattgcattccagcctgggcaacagagcaaggctccgtctcaaaaacaaaaacaaaaaaagttaatgttgagttccagcttgcccatgagctaaatattttgctgcatggtttatgtattaattcaacaagtatcttttttttttttttttttgagacagagtcttgctctgttgctcaggctggagcgcagtggtgcgatctctgctcactgcaacctccccctcccgggttcaagtgattctccttcttcagcttcccaagtagctgggactacaggcacacgccaccacgcccggctaacttttgtatttttaatagagacagggtttcaccatattggccaggatggtcttgaactcctgacctcaagtgatccatctgcctcagcctcccaaagtgctgggattacagatgtgagccactgtgcctggctaacaagtatcttttaagggcctatttgtcaggccctgtttttggcaccttggatacagcagtacccagatttagagagaggcagattgcaagatatcaacacaaagccaag

SEQ ID NO: 20947 - DNA, 1049 bp, Homo sapiens
cgggaagaaacagttcccatctgactcagggaaagaaaacacaaataaaacacagaactaaatatagtcaactctttctttcttttttttttctgagacggagtctcgctctcttgctctgtcgcccaggctggattgcagtggcgcgattttggctcactgcaagctctgcctcccgggttcacgccattctcctacctcagcctcccaagtagctgggactacaggtgcccgccacctcacccggctaattttttgtatttttagtagagacggggtttcaccgtgttagccagggtgggctcgatctcctgacctcgtgatctgcccgcctcggcctcccaaagtgctgggattacaggcgtgagccaccgcgcccggccaactcaactctgtttttatatcaatggcataagcataagtaattatgatccaaagcagcagataatcctcagtcatttatatttgactttggaaggcagtcaaagatgcccactcagtctgagagctgtcaccacactcaactctccggggtctaagactgctgttcaacgcgattgccctatttgcagctgcagggaaggggggggtcagaggtaagaagaagaataataaagccaggccaggcgctggggcttatgccagtaatcccagcactttgggaagccgaggtgggtggatcacctgaggtcaggagttcgagaccagcctggccaacgtggcgaaaccccgtctctactgaaaatacaaaaaaattagctgggcttagtggtgggcgcctataatcccagctacttgggaggctgagacgcgagaatcttttgaacctgggaggcggaggttgcagtaagccaagattctgccactgcactccagcctgggtgacaaagtgggactctgtctcaaaaaaaataaaaagtaggctgggcgtggtggctcatgcctgtaatcccagcactttgggattacaataataaaataaaagataaaaagatattttgtgtgttatttttatttattattatttttgagactgtctcgctctgtcg

SEQ ID NO: 20948 - DNA, 1067 bp, Homo sapiens
gcccgcagactgtgcccggcaggagactgactacgtgctcaacaatggtgggcagccactggcggaagtggggttgggggagactgcagagagcgaagggtggtgcagggtgggtcctggggcccctgggctctgactgccatccctgtgccctaggcttcaacccccgctgggggcagaccctgcagttccagctgcgggctccggagctggcactggtccggtttgtggtggaagattatgacgccacctcccccaatgactttgtgggccagtttacactgcctcttagcagcctaaagcaaggttggtggaggctggtggggatggagagggatgtgggtccaggtcctgcagaccctgttcacctttgtgcctcgaatttcctgccctgaagcaggcccgggctgggccagacccccagggtgcacagaggacctgaggcctggctgtcctccctacagggtaccgccacatacacctgctttccaaggacggggcctcactgtcaccagccacgctcttcatccaaatccgcatccagcgctcctgagggcccacctcactcgccttggggttctgcgagtgccagtccacatcccctgcagagccctctcctcctctggagtcaggtggtgggagtaccagccccccagcccacccacttggcccactcagcccattcaccaggcgctggtctcacctgggtgctgagggctgcctgggcccctcctgaagaacagaaaggtgttcatgtgacttcagtgagctccaaccctggggccctgagatggccccagctcctcttgtcctcagcccacccctcattgtgacttatgaggagcaagcctgttgctgccaggagacttggggagcaggacacttgtgggccctcagttcccctctgtcctcccgtgggccatcccagcctccttcccccagaggagcgcagtcactccacttggccccgaccccgagcttagcccctaagccctcctttaccccaggccttcctggactcctccctccagctccggaacctgagctccccttcccttctcaaagca

SEQ ID NO: 20949 - DNA, 1117 bp, Homo sapiens
gaaggagggagatggggtacgggttggggggcgtttagggctccaaagcctaaagccaaacccagtgcaggaggcttcttacaatcggggaggaggggagtcctgtgagggggagggaagcttactgtgggatgaaggcctgggtttggagaggctggaggatggggcagcaggtcctagcgggggagggcaggggagcctctgggcaggtacggcctgacgccccgggtcctcccgccccgccaggcctgacggaggacgaggacgtgcgcgccatgctgcggggctcccggctccgcaagatccgctcgcgcacgtggcacaaggagcggctgtaccggctgcaggaggacggcctgagcgtgtggttccagcggcgcatcccgcgtgcgccatcgcagcacatctgtgagaggccggggagcgccgggcggacagggaggtggggacaggcccggtcctccgccctgacccggccctcctctcagtcttcgtgcagcacatcgaggcggtccgcgagggccaccagtccgagggcctgcggcgcttcgggggtgccttcgcgccagcgcgctgcctcaccatcgccttcaagggccgccgcaagaacctggacctggcggcgcccacggctgaggaagcgcagcgctgggtgcgcggtctgaccaagctccgcgcgcgcctggacgccatgagccagcgcgagcggctagaccaatatcctgccggggctgggagggagggccccatccttggagagccctaaccttggagagccccatccttggagagcccccacgcccagggaaggcagggccctgtcctgagggcgcacggtctgggtcggagcccttggtcttcgaaactgagggtggggacacgcgccctggctaggcccaagctcccaccaggaggggtggcgcggcgcctccttcagggaggcctgaggccttctgagggtgaagacagggcctcctgtctttggtaagccccagtcctgcggaggagacactgctaccgtgctcggggagtgcacaggccaaggggaaagtacagcccctaaactggggatcccccagacccaggtgggggtgacttaccagccagttacctgagg

SEQ ID NO: 20950 - DNA, 1472 bp, Homo sapiens
aaatgaggcttcagctctgcactgtaaagccagagggcactgttgctgcctttccaagcagctgtttttctggggctgctgcatgacgtcatagcagaagaaaaaaacacgaagaaaactatttcaaaataaatgtttaatataatttttagaccaaagaaaaactcaatcatacattgtctccagtggaccatatgtgccagaacaggaccaactcagtccagctttgaaggccctgattcagtcctactggtataatctcccttgatttattgatttgtgtatgcttcttatgcaatacaaggtgcattttactcttgaagtccctatcacctccaccatcgccatttaactgcaaaagcatgcttcctaatgggagggttttcttcccccttccctgcagaggttctgaaccttcaaggagtttgacaatcttatgaatctcttgaaccttctccccagaaaaatgtacatacaagtctacaaataatttcatggggttcatggaccccaaggcccacaatggtttctaaggccccaaattaaggaacctctgtgctagtgatttgagcaacgcaattgccctcagaagacactgacacagggcaggtgaaggactgggttaaccaaaatgacaggaggcaatctcataatttctgtttttattttggggcaaaatttagttctcagggcctccctacgtttaagagcagaactactcaagaacctaagcagctatcagcatagtttaagcgatttagaatagggctgtgcaaggggatgtacagggttcctcattcagctgaggacctcatttagctccttaactggaagctttacatttgatctgcagtgaggggacatttctaattttagtttgacccacatggaaaggtggatagctttttttttttgttttggtatagagagcacgtagaattggacaattaggtaaatccttggaatcccccaaacagccatttgctttataaatccagtatttcttacctctgaacgtcttaaagagctgcctcacaaattaatctaaccattgcttgcactaagaagtttgccaagagcctcttccagccttactggggggaaggaagagattactgaaaaccaacttgtaggaatgaaatgaggctgtcagttgtctaacctaacaaactgccaaattaggtttacattttttgttattagacttttgaatggccgaggcagagttaaatttaaaattttggattgtagccactttccactcgcctaaacactcaataccggtttgtttatttttccagcatcaagaaagaaaaccaaggcactagaaagcaagcacacttaagtattgaagataattacatcttaaattttgcctgaactgtatattgtagcatacttaaacccattcaaggaaaaaattggcaaattgaaaattctcccattaaagattgatatttttgcaaactgac

SEQ ID NO: 20951 - DNA, 1050 bp, Homo sapiens
aggcatcacagaagaaagaaccaacagtgtctgtgcatcaggcctcaaagaatatggagtgaattctgctcctttcctttcctcttctgatttcttgggcttatgggtgagccatgtgggtttggctgttgccactgctcgtgtcctcaactcttatgcagagagtagagggcccaatgcctttggggcgtgaataagctgaggagagtgtctaggctgaggaatgaatcaggagtttgacttgccttcaaaggcagagacataactggctcccacttcgtcctccccacacgctgcaggagggagaaggggcaaagtgttagggccatgagctggggtgacagccagagaccaaagtccagggctgggaaggccccctggccagtagtcctggacttagtacagaaccatgatttttgtagaccagagtccagatagaattaggaaaggagggagggagcaagtgcatccgtatgtgtgtgtgtctgtgtgtgcatgtgtgtgtgtgcatgtgtgtctgtgtgggaggtggtgtttggggagagccactgtcaggccaaagtgtcccaagaatagcctcttgaacttggaggctgtcggtgagggtctgagtcatggtgatgtggcacagaaaagccagccacaggaggagctttacagctcccaggccgtgatttgtgcccctgagaggtgagggtcagcctgttttccccatgtccttcacaagttcagctgccatctgctgggtcagcttctcaacagcctccttgttactgtctgcctgccaggctgttggatgagtcatcggggaactgcaaaggagtctctgagcgtggctgcctcagcctcagcttccacttctctgggaagaggggagcctggtgtgctcacagaggggcgctggacagctgcctacctaacaccaatatgaaaggacaactctgggactcgggatgccctgcaccccctctggaggagttctagctcaggatgacctatccagaagcctccgttgggccatgccaggcggagacaggctatcagagcccc

SEQ ID NO: 20952 - DNA, 1030 bp, Homo sapiens
caaaaattagccggatgtggtggctgacgcctgtaactcggaaggttgaggcaggaggatcacttgaactcgggagacggaggttgcagtgagccaagaatgggctgctgcgctccagcctgggcgacagagcgagactccgtctcaaaaaaaaaaaaaaaaaaaagaaaagaaaagaaataaatctaaatgtgctgagatggaatagtattcatagtatcttaagtgaaagatacaatttgtatgacattacatgtgtataatccatgtttcttttaaaaatagtcccaaactaggccaggcacggtggctcacgcctgtaatcccagcactttgggaggccgaggcggctggatcacgaggtcaggagatcaagaccatcctagctaacacggtgaaaccccgtctctactaaaaatacaaaaaaaaaaaaaagtcccaaactatatgtttatatatgtatagtaattggaactagaaggatttacatgaaacttaagtgttttttatgttgcagagaggacgggacggtgccgggattttttttctatatacaattttgttttgtttacatttttacaatgaacaattattttggtattggaaaaaaatttttgagatggagtctcactctgttgcccaagctggggtgcagtggtgcaatctcggctcattacaacctctacctcctgggctcaagtgattctcctgcgttagcctccaaagtagctgggattacaggtgcccaccaccacacccagctaatttttgtatttttagtagagacgagatttccccatgttggccaggctggtcttgaactcctgacctcaagtgatccacccacctcggcctcccaaggtgatgggattacagtcatgagccactgcacctggcctgaaaaaaaatttttaagcaaggttaaagatcacatataagaaaggcaggagaggctagctaggaaaactgtcctcccttgggtttcccagactaggactaaccctgcgattcccacccctttgcgcaagca

SEQ ID NO: 20953 - DNA, 1023 bp, Homo sapiens
atcagaaaagtgaagcctcataaggagaaacagacaggattgctcagaatctaaacccccttttcttgatatctaggtcactgctttttctactaccttgctcatgaaacgataaggattttcttcccccaaacatgtcaattttgaacataacgaaaccagggtagcagctttatttatttattgtaccaatcaattattaattgatattgatttttaattaataaaaggccaaaagatgaatagcctgctgcctggacaggtgtgcttgtgcccattttccagatgtagaaacaaaggcagagagcccgtgatttgtccagagcaacagaacaagtccttggtgtctccgtgtcacatgtggtggctgaggctgtcaggtcagagagacctgggtcaggtcgaggtctgccacggcctgcctgtgtgcccgcaagcaaatcacttcacttctctaatcatcaggtgcctcatctgtgaatgggatcagaaatacttcatggggctgttttgagtagaaaatgagaggagatatgtaaagtgctgagcccagtgcccagcacagaacatagaggctgtaactgttgttgttgttgttgttgttcttgttggtggtgtttggtggtggtagtaatagtagtagtagtagtagtagtaatagtagcagtagtagttgccaattactgcattgtgactaaacctgttttctgtaagatgatgtcaagaagggtcagactgcctgacaggccagagtcattttctcagtaggacctttagggggacagtccttcagtctaaaagcttcagctctcgggttctccctgtcttacactatatactgccctcaccatactccaaatgaggctacaaaggtccaggctctgcccagttgacaatcctaactctgagctggagacacagctaggcctgtctaggggcttcctgtgtcccacacgtgatcaagtaggttcctgcattaatcctggaggtgaggaaagggaaaatactgtatggcatgtagat

SEQ ID NO: 20954 - DNA, 1056 bp, Homo sapiens
cacgtatgtggacacgcaagtgagagtgggcacatgtgggcatgcaggcgtgggagggcatatgcatcttggtgaccgagtctggaggagacagacccaggtggtcaggcgggcagatagtgatgtggtcagaatccttcctgtcctcctcggggctggcacagtccagatgccagctccctgtgatatcacatctgcccagaccccttcctctttgggaactcttcccctcccccccacaagcttcctctttcccattacaccctccctgggcctagagggagtggacaaccactcattgtcctgtttccgccccaggagccactccaggccagcccaggcccccagcactcagcgccccctctgcccaccctgtctgtgcaagcgcgcccctcccccacaggctcagccgtgattctctctgtgcagttcatgctgtggctgggtctggccgtgatcttcctctgtgcagcccacaccatggctatgtctgggcctcggatgcggctcactggtcattagagcactgagtggggcagccagcagtgtttctagaagcataaaaataccctcaacctgaggcccctccaccccacccgccccaactcaggcagcacttccgcagccctgacaggaaatgggctggagtctcagcctcccgccatctcggcaacttcttgtttccctgttgccctgtgccagcactggggtagtgcccctgggctctacccccaaaaccttcccagggctctgtcccggcagttcagaggggccaggatggtggacataatcgccaaagtgaccaggaggcagagtcgagccttgccggcacaggtaggggatgctggggtcaaggggtgcccggtgggcctctaccacaagccctgttaggagctgggtgagctggggcttagagcagggagcctcttggaagttggggctcatacttccttttctctttccttctcggaggccctgcccatccaagaggtggtcagcttggggcaagagtggcagggctgccacctgcttgtggacaggggagggaactggaga

SEQ ID NO: 20955 - DNA, 1033 bp, Homo sapiens
gtgctgggattacaggtgtgagccaccacgcctggccggaaaaatgcatattttctatttaagggatataaggtactatctgcatcaaatcatgtttattgattgtattattcaaactttcatttcctttgtatcctttgcttgggggcaggggtcttttactctaattctgatagagatgtgttatgttaaaccttcctctcacattttctctataaagctcttctggggcttttcctagtttttgctttttatatttaactacgacgctgtcaggaggatgcagatttcgagcgttctttcgttacaaattgtgcttttctatcattacgtggtgtccctctttatcctattctagtgcttaaccttaaatttcacccttctattgtttatatgaccactccttattttactttatcttttttttgtacttgcttagcattcttttatttcctactattatcattttttgaaactactaatttcttgtatatgtcacatcactgttttgttttgtttgagatagggtctccctctgttgcccaggttggagtgcagtggtgtgatcatggctctctgcagcctcagcctccctggctgaggcaattctcctgcctcagcaccttgagaacgtgggaccacatggcccacgtgccaccatgcccagctaattttttttttttttggtattttttgtagtgatggggtttcttcgtgttgcccgccaccactgtatttttattattttcatggatttttgtttgttttttgagatggagtctcgctgtgtcactcaggctggtgtgcagtggtgcgatcttggctcactgcaacctccgcctgccagattcaactgattctcctgccccaacctcctgattaactgggattacaggcacacgccaccacatccaactaatttttgtatttttagtagagatagggtttcaccacattggtcaggctggtctcaaactcctgacctcaagtgatccacctgcctcaccctcccaaagtgctgggattacaggta

SEQ ID NO: 20956 - DNA, 1034 bp, Homo sapiens
ccacctcaggcctcctgcaaaaacacatagcataaacaataccatcagaaagaaaagcaggactgaagccagcggcccacacatccacagaggcagcgggcagagcaagcacagggccatcgttcctgcccttgtttcccagtctaattagtcacccagacctgaaaacatatcctcagggggtggagattttacaattaccattgtttttggtgccctctcccttgcttcatcaagcatcagtcatataataccacagatttgaactcctgcccacaggggacctcccatctcctggcccctatcataggatcactgggcctacctgcactgtggggccaagccctgtctttttcccaagccctcaagcacacgcatgagtgttcatcccgacttggtagggggcttttcacccttacaagatggcaaaagattcacattgcttttttaaaaatttgtttttctttttaaaaatcccaacccttggatagcagggaggtgctggaggggtagagtcaagaagagtgtgagaacagtaatttcccaagactgccctctgtgggactgtatttcagaaaacacactggtggggctacctctcaattcacatgtactgccctagcctctccccatccccggctgacgctcatccataactgcactgttccataacagcagtagaatgttgcagaaagtgctaggattcctccactccatcttcaaagaaaaagtcgctaataaatcacatttggtaggttagtgaatgttaaacacattagtgagcaaaagaaaataggaatgaacaagaattggtcatctacctaactgaacacaaatgaactctggcagttcagtaataggaggtaaagaaccacgctaattgcagaacagcagcccccctaccttcccaggagcagtgtgactgggaagcagccccgtgtgtatgctggtgcaggttctaagcaaagtgagctgcccatcagttccgatgagtttgctgatgctagacatatgacatctgttctcttgctgcc

SEQ ID NO: 20957 - DNA, 1039 bp, Homo sapiens
cagttaaagcactacagagtagccatcttttacaaaaattgttggccacatttttaagttcgcaggcgagggggaacgtctcatactctagccctcctgagcctagaccctctgtgagatgtgtcaccatttcttggacaccacgtgagacattccccctcagattagagatgctcagcctgcatcaacttatctaaagcctacatctggctactctggggcaagtcctgtttacagtgcccattcctggagcttgcctctgtttgtcttttgttcgattacatgatatattacttttcccaacaggccagtgctagcatattggaagagtgatttaataaagctggcaaccttgacgctatgccaccagtccaaccttatttgcctcatttaccatttccattattgtggcagccctccattccagccacagcagcccctcaccataccccagtcacaccacccacatttctgcttttgtctgtgtgtttgtccatctaaaatgcccttatttcactctgcctgtgggagtcctatgcatctcccaccagaaactgctatcataccagagattcactgtgtatttaacaacataggcatacaatctggcaaatttgaaaaactcttaacatacaccccaaatccctgcccaaatttaagaactagggtggacacagtgcttttttccatgtcgcatcttctgtgatggggctacgatatgtgggagcagagaatggggagggtggagcgcatgccagatgaggatctatcagcaatgggagggggcctccactttagcatctccaccctgctcctctcagaggaccgcctttcattgcattcagctgtgatggtagcaagaacacaggcgcaccgaggacgaggagagcgggagccttgtgctctctctgcatctgaggcaggacagcacagggtatggagcagtctgcagagaggccagctcatcagctcatcagggaagcacttgtcttccaccttgggctttgactgagcactgggcaattggaccctggggatc

SEQ ID NO: 20958 - DNA, 1076 bp, Homo sapiens
gccattcagtcaagaaattcactcccttaacctagactgtgctggaaattcattgacaaattttgttctttggttctccatttttcttcagaattcatgcagaccacttgacttccttagcattttcttttgtgggcgtatattaatgtctttggttaagcttcagcttccgtttgcatcaatcctgttgtaatcgtgcctcctgaggcatctttttgcttcccttgcatcagtttccaaaatcctactttctgcttggtaaggggagtatccattttctttaaagcagtggttttcaaacttgcctgcacatcagaattatttggggagaaggataaaaatacagattactgagcttcacctgggattctgtagatttgagttgcatttgggattactttaaacaatttaccagatgatttttgcggcacctccacttcagttttaggaaggactgtttcaaggcagcttttcaaactttaatgaccatagaaatcacctgaagattgtgagaaactgcagttcctaatttagtaggcctgcgtttaggcctgaggttctgaatttctctgaaacgtgataatagcaaatccctcgttgagtagcaaggttgttttttgtttttttcttttttttccaatatcttcatgacattcaatgagtagcagagttcgaagataacttctggaatttcatctaatgtgtattaatttttactcatctggatcttaggggaaataacctatcaggttatagggaagtgtttctcaaagtatggttccccaaacagcacaatctgggaattgttagaaatgcaagttctcggctgggcactgtggctcatgcctgtaatcccagcactttgggaggctgaagcgggtggatcacctgaggtgaggagtttgagaccagcctggctaacatggtgagaccccgtctctattaaaaatacaaaaaaaattagctgggcatggtggtggtacttcttaaaatttttttagagacagagtatccctgtgttgcccaggctggtctctaaatcctgacctcaagcaatcctcctgcctcagcctctt

SEQ ID NO: 20959 - DNA, 1033 bp, Homo sapiens
tggcaacattcagtaggtgcagtttatatgatttactagaaataatggcttcttgctcaatttcactatgttcatagtgcctcttttgaggtctgtgtgtatattctatttatggaagttaaaaagtatttcagaaatgcatatattaatctgtgtggaatttctcttatcctttttcctctctaattcttgcttggatatttgtctcaagagatggtccaacatttaaaatagcgaataatatcttagcccatccaaaaacaatccttcctaaaggtttatgaacttaataacagagcctcaaaatacatgaggactcatagaactccaaggagaaacagacacatccttaacaatattgtagacttcaacactcttctcacagtaatcaagagaacaactagaaagaaagtgcagttttccctgtttttgtagacatgaaaactatttcacacacttctgaaagtctcattcagtaagttactcatttctccaccttatgactgtactgtgctttcaaagtgctgcacaaagaataaaaagttttaaagtggctttactgtaatttcagataaatatttgaacttttgagtctgaattatccaggtgaaatgcattggatttctgatcctctgtaacttggaagattaccgtcttccaggtatattggttgtccttaactgccttaatggcatgagttgtgaatcttctctgtctcggaagaaacctaacagtggaaattgtttatggcaagggtcacaaatttacatgcgcagaaggtcaggaccctctgtaaggtaaaggcatgaagtgcccccttctttattaacacataactgcatttgctgataatatttatttgcctagaattcaggccctttttgcttttacagacagtgctgtcttaaatatgctagagatgtatctttagtcacttaagctggtgtttctgtagggtaggttcctaggagtgggattggattgttgggttacagtgtgtgctatttaaaagactgaaccagattatactctc

SEQ ID NO: 20960 - DNA, 1045 bp, Homo sapiens
aaggtagggttaggactacttaacctctattcccactcccctgcaaactgggggttgtgggaagtgagcagccatctccctgtgtgattttttttttttttccctctgattcactttgccatgtttccttcacatccagatccctgtcggtgttagttccactcttggtctttcacgctccccttgcctgtggaacattgtctggtcctagctgtggttcccattgttcccccttcacccttctctgttaaccttgtgcctgtctcctgtatgatcacatcaccaaaaagggggaggggggagaagactctttttttttggccattttgtaatcgtataaaaatagtagacaactgcttaatggttggggttttttcacaattttcaacattagtgatttttttttctgtttgcaagttaaagggtttgtcattgtttctttaaaaaaaaatacaataatgcaccatatccctatgcataaagtgcttcttctatttataaggttgaaaattctgaataacccttttagcattgaaaaaaaaaacaaaaacaaaaaatggaaaaaaaaaaccttgtattttgtaaatattttcttttcctgctttggagctgtgtaatggcagcgaaacatgtagctgtctttgttctatagaaatgcttttcttcagagaagctgatctttgttaatgtcttgattctgttcgcaaagcacagactagtgcttaaaaaaaaaaaagaaggaaaaattgaaaaaaataaaaaaaaaagttacagaatgctgtgtaccaggcctttcttgacttactgaactgtgtatgcatggtagtgttggcagtttcggagctggctctctgccgccgttctttggggtactctgacttgctctataccttggaaaatctccattctgtcttgtgggaacgccgcaggttgatctgatggccaccagagagagaatggtggtggcttttcactgagggtaagggctgccaggaggagaggggatctgcattgatcatctcttttttctttttgttgagtgaaa

SEQ ID NO: 20961 - DNA, 1292 bp, Homo sapiens
ccacctcccttcccatacctgtacctctcccacttgacaaaagaagagcattccttttggccatattgagtcccactatgggtcttgccccagagtgtaaaaatcttgaggctcggtgtcgtggcccacgtctttaatcccgtcactttgggagaccaaggcaggcagatcacttgaggtcaggagttcgagaccaggtgtggtggctcacgcttgtaatcccagcactttgggaggccaagacgggcggatcatgagatcaggagttcgagaccagcctggccaacatggtgaaaccccttctctactaaaaatacaaaaattagcagggcgtggtggcatatgtctgtaatcccagttatttgggaggagaatcgcttgaacctggaggccagaggtcgcagtgagtcaagatcatgccactgcactccagctcgggcgacagagcaagactgtctcaaaaaaaaaaaaaaaaaaaaaaaaaggtcttggatggtggggacaacaaataaagagatcatttctaagagttctcagcacctgaaggagaatctcccaggtattaagcaaaaaagttttgaattttaaaaataaaatagagataactcaggaactcctatcaaccaagtcttctcttagaattctccaaaaagactgcaacagatctaccaaaccagagggtaccactaaaagattgcaactaagagatttccctctaactcttcgagtggctgggatgggtctgagctcagttacatggtcctattccttgtctgtcttagaataaatactgagttaatatctaaagtctgattagctaaataagtttaaaagaagttttttttttcaattaatgaagctaaatatatttacatgccaaagttttgataaaaatgtttttaaagcattatgtagtattcaaatataatctttacaactatctgaaattatgattttttaaaaatcacatatcaaatgggggtgcatgagcaaagacattttgaaaccactattctagatggaagccagcgctttcataatctggattggtttcattgaattttcacgtaatctcatgatctgtgcccagcctacagaaggtaggaatttcctctcaaatcactggtgggtttttgtttttgttgttgttttgttttgagacagagtctcgcttttgttgcccaggctgtagtgcagtggtgtgatgttggctcactgcagcccccacctcctgggttcaagcagttttgtctcagcctcccaagtagctgggactacagtcgtatgccacc

SEQ ID NO: 20962 - DNA, 1037 bp, Homo sapiens
ccatctaaaaaaaaaaaaaaaaaaaaaaagctgttgttatatcacttgtacttcttaaaatcaatgactaaaacaaagtgttcagtaagttaaactcgttgggaataaagagaaatgagatctatcagtaaataaataggaagccttgaatgcccaaactgatgatttgggtttcagtctataagttttaaatttttgagcagagaagtgttgtaagctattttgggggaggtaaatctgctgtaacatgttttttttttttttttgtttgtttgttttttttttttttttttgagtcggagtcttgatctgtcacccaggctggagtgcaatggcacaatctcagctcactgcagcctccgcctcccgggttcaagcaattttcctgcctcagcctcctgagtagctgggatcacaggcacccacgacgacgcctggctaatatttgtatttttagtagagacaaggtttcaccatgttggccaggctggtctcgaactcctgacttcagctgatccatccgccttggcctcccaaagtgctgggattacaggcgtgagccaccgcgcccggccaatctgtaactattatgtttgggatggattggcacaagagactggaggtggaaagacagactaacagtagtaatcctggaggagataatagtctaaggcctctacaactctgaatgtggaatattttaaatgtaatctaaggaataaccactagggtgtggtaagtgaatatcagagtaaggctcatggagaacatggagtacttcctaaatcataattttattataaaatgacggaattactagttgtaattactgaatagcctatattgctatttattgtgtgtttcatcactttaggggtctagtatggtggatgttagtaattatctaagtgaatgaagaagcactccagtggaaagttcttatatgccattatgttcttttcctggcccagtgcctaagtgaagtaggtgtttataacttaacctaaacgtactaagatttcagatcaataaagtta

SEQ ID NO: 20963 - DNA, 1033 bp, Homo sapiens
ggcttgtaaaaggcagagctaaatttaaactcaggactttttatctgattccaaagcattttttttctaacatactttgctgttgtgtccttttcatcatttcactgaaacatgtttgttgaaatttcacacctggtaaatgaggggaaagaatagggactaagcagtttttaagaggcagggtcttgctctgttgcccaggctgaggtgcaatggccagatcatagttctttgtaacctgaaactcctgggctcaagctatcctcctaccttagccttgcaagtacaagtagctgggaccataggcaagtcccaccatgcttagctaattgttaaagggttttttttattttaaaggatggggtctcgctgtgttgtccaggctggtctcaaactcttgacctcaagtgatcctccttgccttggcctcccagaagcactggcttgactcttacgttgttttttaaaatctcctcttctgactactctttgagattacacagctgtagctgaggatggaaatgttattgaggatgggaggtggaagagcattgaaacttttgaatagggaaggagttgaatgggaactgcagaagcttataacacctttctcttcaaaattttcataaagctgttgaagttctcatcttaatagggttttttaaagcactttagacaacttatcttttccaggtagcccagggtgattcttgtggaactggtctgcagtggggtcactggtttgtcttgagatgcatagggaagattgacctgatagagtgatgtaaggaagtatgtgaaattgcctgttagctgtattgcaaatacagttgagagagggttcatccacagaggagtcacttaggaggtattaaggctgcatgtaactgtgacccattccagttcctttggtccttgtgtaaagcagaagcttgcttcactcttggagttttctaggcctgtgcagcctaagcatgatcctggctctgactcgggacatggcgaaggaaaaggagactcttgacctttttct

SEQ ID NO: 20964 - DNA, 1069 bp, Homo sapiens
tttgtgccctcagtcattctttaactgaaaactagctcaacctttgaggtctatgtcattaaaaattatttcttaagggtttttttttggtgggggtgtggtttttgagggaggcaaatttatataatatataatgatgaacatgacagaatatttttcaatttgatgtggcagaatcgaaatctgccaataaaacttaactatcttacacgtatcatataattcacgattctgttagtaagtggtttgcaaaagcatagaaattgagatgtgagaattttgtattttaccatgtgtaaaagcggaaacgtttttactctggaacatctatagtaccctcagcaagtttccattcaagttgtgtatggttgggattagactgggtgcagtggctcacacctgtaatcccaacattttggaaggctgaggcaggagaatcacctgagcctaggagtttgagaccagcctgggcaacatcgtgaggctccatttctatgaaaaaataaaattagctgggcgtggtggtgcacatctgaggtcccagctactgcagagactgaggtgagagtggttgcttgagctcaggtgattgaggctatagtgagctatgattgcatcactgcccttcagcccgggtgacagtgcaagatcctatctccaaaaaaagaagagctctcaaatatcttgttagtagttttcactttgtaatatagctttattttccctggtttgtgtatacttggactaagagtgtggactataattgcttgactcgctttcagcattagaggccagagttagttttatgaggaggccagagttagttttatgaggtctgttggcaccagatgagaaaaggggttagcttcagtctggaattactttggttttaatcttttgtaaggaaaagttaggatcatagttccagcctgttaccctcattccctctctcttcctgcttccttccttccctttgaacaaatatttgagtacctgccatttgctaggcattgttccaagcacccagagatattatggtgaacaagacaaaaatctctgttttccggat

SEQ ID NO: 20965 - DNA, 2035 bp, Homo sapiens
tggtgccatctcggctcactgcaagctccgtgtcccgagttcacaccattctcctgcctcagcatgcctagtagatgggagtacaggcacgcaccaccacgcccggctaattttttgtgtttttagtagagacggggtttcaccgtgttagccaggatggtcttgatcctctgacctcgtgatccgcctgccttggcctcccaaagtgctgggattacaggcgtgagccactgcgccccgcagtaatggttttttttgactgtatgtctgtttcctttgaggactttacgtgctgagctatttctaataaaatctaaataactaactttaatttttgtgaagtataaaatcctatctcagtttgaagttgggtctagttttcactctgtcgtaagtttttcaggtcagttgacttatttataagaggcttggttccggggattcttctcgtctatgattctatagttagtaacatgagttataaaaccaatcagaaaatgtgccataaatggaaacgtttccaccgtagtttccaactctgaatgctccttatcctctgctttgtcacattggtaactactgtggtgataacttactgtccagcagttatgtggcatttgcctgatgtctgtatgcagcttaagcattttgtggttaccctctgtgatgagcctagagatctctggggtaaatgttaaaagcggtctgggtatgttttttaaatgccttagtatttctgcctgattgcaaagatttatcggttggctttcctaaagttgttggattgtttaagcatactttttgagtagagtcaaagtatcctataaataaactgtttttcattcataatgtcatagtaaagccttgtttttaatttagtttgaaatcacatatagttcactgaaaacccgtatatgcatcatgtaatacatatctaaagttatcttcgttccttgaatgtatactttccttgggatttctgtttagctttcaggagcagtacagtgggggtggggacgggggtaatatagaactgttgacactcgatagctttatactattttctcatctgtagtaaggagacagaaaatctgcactttctttttgctctttaaaaattcttgctttacaggctggacacggtggctcacgtctgtagtcccagtactatgggaggctgagatgggtggatcacctgaggtcagcagtgtgagaccagcctggccaacatggcaaaatcccatctctactaaaaataaaaaaattagctgggtgtggtggcaggcgcgtgtaatcccagctacacgggaggctgaggcaggagaatcgcttgaactcaggaggtggaggttgcagtgagccaagattgtgcattgcactcctgcctgcatgacaagagcgaaactccatctcaaaataaataaataaataaaacttgggtttacaaaaatacctgtttgccaaagaaaaaatgaaaaaaattcgtggactttagtacaaaatttcagtgaaatggacctaaatctggacagatctttagagagtgtctaaatcaaaaggagaaactgttaaaaagaaaaattgttctaaacctcatctaaacagaatccgtgtgatataattcataacctccttctgagaagaaatgaacatttctgttatacacttgtctgataaaccttaatgggattaaggcttctgctggggaactagttacctccccactcagatgactgtcatagtctaataactttaaacaagatattgtcattttttaaaaatctagtttacgaattagccattgccatttcctaatatagctctatcaagagtgtatatgtctttaaattagtatatcagagaccttctttcttgcttgaaagattgtaataaaatactgacatgtggtcttaactaaactgggaaaaatattgtaagctgttatcagcaatgtagaagtcctagggagaatttgatagtagtctaagaacattagaataaagtttttctagttttagttctgcatgttagggaa

SEQ ID NO: 20966 - DNA, 1047 bp, Homo sapiens
ggtggaaggtcctatctccatgttgatggctgctgactagccagggtagtggctgctgaaggttagggaagctgtggcaatttctttccctccctccctccctccctctctccctccctccctctctccctccctccctcctccctccctcctccctccctcctccctccctccctacctcccctcccttcccttcccttccctttctttccttccctttctttccttctaattctcgatttctaattctagttatcttgctgtttcttcctcatctgcagttactttttcgacctgtgtcttgaacctctcagttatccatgagagtcagagtcaacttaactttgcatctgtttcagttttatcacgagattgcagttcagtcacatcttcaggctctatttctaattctggttatcttgctgtgtttttcacatctgcagttactttttcgagcaatgtcttgaacctctcgattatccatgagagtcggagtcaacttcttccaaactcctgttggggttgatattttgaactcctcccatgaatcatgagtgactcaatagaatggtgaatcctttccagaataattttcaatttactttgcccagattcatcagaagaatcactatctatggcagctatagccttacagaatgtattttttaaattataaggcttagaagtggaaattattgcttgatctgtgggctgcacaatggatgttgtgttaacaggcatgataacaggatttatatccttgtacatctctttcagacctctccggcaatggtgcattgtcagtgagcagcagtattttgaaaggaatctttctgagcatgaggtctcaatggtggacttaaaatattcagtaaaacatgctgtcaacagatgttctgacatcctggctttgttgtttcatttatagagcataggcagagtaaatgtagcataatttgtttttattttattttatagagacggggtcttgccgtgttgcccaggctggtctccaactactgggctcaagcagttctccctccttgg

SEQ ID NO: 20967 - DNA, 3217 bp, Homo sapiens
tgagccgccgtgcctagcctactcattttactttttacttacttggcttggcaagggtggtggtggtggtgttgctatctatgtctgagactgcaagctgggaactggtattcaaaacttagtttgtactgcatgatttaggcccttattatgtgttttattgctatcttgcctatcagccctatctcctcagtcaaatttataagcttcttgaggatgtggagcttgtcttttgattactgtatagtgctcagcagaatactgttcacattgcagtaattcatgtgatgaagatgatgggttgtcattgtaatcattttggcaggttcacagtaggcactcaggtttcaggcatagggtgtaccagttatttttgaataatcatgccatggcattcaagttttttaccagtttgcagcttttgcacaattaaggtatgacaaatgtaattttattgagggaaatgcttaatcagtgagctgaactttaatgtaaatttgaaatgaaaaggtcctgtgttctgatttcagattttcagaaactggatgttagatggacatcatgttagccttaataccatgccttaaaatgctacccatattttatttgtattcccattcacccattgatttgaacaaccatttttattcattgtagaagggacttaaataaatgtaaaaaccaggcaaaatttcttctcttttataatacatccttgatcatagatagaattttgtcacttctctgatatttaaaaataagacgggtggcagtttgagtatctataatgaggtgaagatcagcttgtgcttgaaaaccaggacagagggtttcaaagtgtaattgaaaaagactgtggcagtcttcttcatgtgctgggagaatgggaacatttgtcagtttactaaggttttgctttcctcttgtgctttatagaatttcttaaagaaatgtgtttattttacagtgaggactggtaatttcattcctctgtacccctgtaagtggtacagtgaaccacagatgtgttcaaagttagctgttgatatgtgatgagggaggggaaagaggagggacaaactgggatgttattttctatcttctatgtctagatttccttggctggagatgtatttagctgtgcagcagtgactgctgttctgtagagttctaaggcagcattacagggagaagccgtcttgaactgactctctaggtttgttgctattgtagtgttcggttaaaaaattcaagcccttgggaaggaatgtggtggggttaatcaaggtttcttgtttttgttttcgttctatcctttcctgaactgtttgtatgtatgaaacagccttttacaattccaaagcaggtccttttatctgtgctccaaaatgcccactgtgacccccacgtgttaacatgaaggctcaagtttgttgacttctgaaagtgttgtttctttaaaagacttttatttaaatcctctactttaaactttattgctgtaaattggtgattctcaacttgggctgcacattcagatcacgtgggaaacacttaaagggaaaatcccaggacccacccccgattaaattttgatttaatttatctggtgtgggtctccagcattcatgttttaaaagcctccctagttgattcctttttttttttttttttttttggagacaggatctcattcttttgcccaggcatgagttcagtggcaccatctcagctcactgcaccctctacctttctgggcacaagtgattctcccgtctcagcctcctgagcatctgggactacaggcacatgccaccatacctggctaatttttgtatttttagtagagatgggatttcaccatgttgcccgggctggtcttgatgtcctgggctcaaatgatctgcctgtgtcggcctcccaaagtgctagaattacaggtgtgagccactgtgcccagccctccctagatgattctaatgtatggtcactattaaggagtactgccctaagttctgtttttggagagtcctataaatttcttagtagaaaacaggtccacccccacccctaccctctcccacaagggagagttgagactgtccaatctgaatcttattcaaaagcacagaaatataatcttacaattttgcaaatacttagagtaggctttgaattatttttaaagtgatctccaatcttccctttaacagactttgcttgctaaatatattttgtctgtgttttaaaaacactccacactctgactgatttatcagattcctgataccagtaccacaaggacccaaggacctctagctgtgtttggtgaggcaggtctttgtcaatttaagtaatcctgtcagatggtgtagccaatcttgtaactcacgacaaagcactgttgctgagatactgtgatttattttccttaatgagcagtttttttatatatatacgttccattttcagacaggtggtgctttgagttgaatttgcaagttcagtgaaacatggatctcttttttatttaactcccttttcttctcctaaggtgcttaatttccatgcttgacatcgtaccagtatttgccagccaaaataaatgccaatattgtgattctgtagggaaagaagcaggtcatttattaattcaactagaacatactgcactgttcctttgttcaaggacctgaataggacaaacatggcccttgctttcatggtggtcaggtacattctctgaggggatgcagagatgaatagatttttttttcttttcatctctacattctattccattggcaaatcttggctccaccttcagattacattctgaaaataaataacattcctcatttgactgctaccatcaccctagtctaagctattatcatcctttgcctggacaaccttcgcagcctcccagttggcctccttgcttctgaagttactggtcatttatagtgtgtcgataacacatccgtgtccctcctcaaagttcttcaaaggcttcctgtcacacgtagactaaaattcaaactccatatcgtgagctgcaggctctagaggatccaagttctgtctgcttttatttacctcattggtgttgtctttatcacctctcttttggctctctgtgctccagccatgctgtttgccttgctcaacaagctaagtatattcccgcctattttcgattccttctgcctggaaa

SEQ ID NO: 20968 - DNA, 1411 bp, Homo sapiens
tatgtgcatgtttctgtagtttcccaagctaatgggagagatcttcaaaatgatgaaattttattgaaatcaaatagatacattaagaaatggaaatgctgaatagagcctagtttgctctacatgctctttggcaaattgttgggtcactgagacattttaagatagcaatataggccaggtgcagtggctcacacctataatccagcacttttgggaggctgaggcttgagcccaggaggttgagaccagcctgggcaacatagcaggcccctgtcgctaccaaaaaaaaaaaaaaaaaaaaaaaaaagccaggcatggtggggcatgcctgtagtcccagctacttgggaggctcgcttgagccagtaaagtcaaggctgaaatgagccatgattatggctccgtactccagtctgggcaacagagttgagactctgtctcaaaaaaaaaaaaaaaaaaatgtatagttgaggggaaaaaaatctgtcacctttaaagtcttggtataattgaatcttttagaatgtctgcatcaaacctgtggatccttggttgtatctctcgttaatctgggtaagatggagagatttctcatggacttgtgtttgccaaccttccatactatgttttatgttttattgtgaaatattcagagagaccagtgcagtgaaccttcccatgtgtgcattgcccaactgtaacaggcatctactcagagctgttctttttttttttatctagaccaccccttacttggactattttgaagccaattctgtacaacatattatttcatctgtaaatatttcagaatctatttctaaaagataggcttttttttttccccaagttatttctccctgtgcttcttcaaaaaagatttgtagtagaggctgtatagagggcacaaaagagtagaaattaagcacaagtgataccgacttccagaagagactatcaggtagacccagacccataaggggacagcaacgagaattcattattggaagatgtcatactccaacccctactggtctctacaagatttccagacccccctacactttgaatactaaaagtacctcagggtttagttctcaacatcctcctctttcctatctctattcttccgccccatcttctgcccttttttttttggagaccgagtctcactctgttgcccaggctggagtgcagtggcaccaccttagctcactgcagcttccgccttccagattgaagtgattctcctgcctcagcctcctgagtagctgggctgacaggtgcatgccaccgtgctcgattaatttttgtattttttttttggtagaggtggggtttcgccatgttggccaggctggtcttgaactcctgacctcaagtgatccacctgcctcggcctcccaaa

SEQ ID NO: 20969 - DNA, 1048 bp, Homo sapiens
ccattacaggtggagtctctctgatgtgaaatgtttgggaccagaggtgttttggattttggaatctttgcattatacagttatccttcagtattcttggatgacttgttccacgaacttccgtggataccaaatctgacagtgctcaaatccctgatataagatgggatagtatttgtgtataacctatgcacatcctcctgtatgctttgtcatctctagattacttataacacctaatacagtgtaaatgctatgtaaatagttgttacactgtattgcttagggaataatgagaagaaaaagtctgtacatattcagtacagacattgttttttaaatatttttgctgtttgattgattgaatccatgaatacagagggtcagctgtacttaccagttgaacatcccaaatctggaaacccaaaatgcttcaataaacattacctttgagtgtcatgttgacactcagaaagtttcctattttgggaactttttggatcttgggtttgggatgctgaacttgtatttgcatgtgtggaaagagatcaggagtcaaggcaggagtcaggaaatgtggcttctattcttggctaacttgatggtgtagggcagatcacttcactagcctaagctgcagtttgccactgttcactcctgagggtagctggagaggcttgagaacaaattttaacacactacatagtgcagacaccttttcatctgaatttttcctttgaaggatgagtcattcttatgaaacaattttcttttttttttttttttgagacagagtctcgctgtgtcgcccagacctgagtgcagtggcgtgattttggctcactgcaagctccacctcctgggttcacgccattctcctgcctcagcctcctgagtagctgggactacaggcgcccgccaccacgcctggccaattttttgtatttttttttagtagagacggggtttcaccatgatctcgatctcctgaccttgtgatcagcctgccttggcctcccaaagtgctgggattacaggcatgagctac

SEQ ID NO: 20970 - DNA, 1109 bp, Homo sapiens
gcttgctgcagcttcaacctccaggactcaagtggtcctcacaagtagctgggaccacaggagtgcacccttatgccccccttattaaaaaatttttttttctttgtagagatggggttttgctctgttgcccaggctggtctcaaactcctggactcaagcagtcctcctgccttggcctcccaaagtgctgtgattacaggcatgagccactgtgccaggctgttgtaatgtttttatgattctttgaagcagagatatttatcctttggtaaaaatattggagtcaaacttggataagttagaaattataaattgtttaaatttttgtctgttgatcttttgcctttagctttctttctcaacctaaaatagtagaaattcttcatccttccagacactaataggagaattttaaatttccttgtacatgtttttatttttggaaactacccttttaccaatatagtgaaaccttggctctactaaaatacaaaaaaattagccaggtgtgatggcacacacctgtaatcccagctgctcgggaggctgaggctggagaatcgcttgaacctggtaggtggaggttgcagtgagccaaggtcatgccactgcactccagcctgggcacgcagagtgagacttgtctgaaaaaaagagaaataaagaaagaaactacccttttaattcatcagagcgttttttgtttcataatacaaggaagtaagtcctctctaaccctctttccgaaaaagctgactagtatctcaaaaccacttaattttgtattactttctttgggactttggaagttgcataagacatacaggttaacttgtaaagaatatctttccagaatatgggttgccaaatttttactagattcatttagggtattttttgtgaggatactgtattcttgggcattttgttctttttaattccttttatgagtatacactctctgattgtcttttcttatttcgcacccagattttctgcagtagctcagtggaatattttgagcttagtgtaagatagaccgtttgtaaataaatgtaaagtattgcatagaagaatttatttgtcttagacccttaagcagcccc

SEQ ID NO: 20971 - DNA, 1022 bp, Homo sapiens
atataaaaaggaaagagcctaaggagattgaaagtgatggttatgggagagagatgtctatattaatagggtggtcagggaaagcctctctgaggaggtgacagtttgaatgagatctgtatgaagtgtgtgagcaagacctgtgaagatcttgaggaagagcattcaaggtgtagagaacacttgcaaaggccctaagatgggactgagcccggtttgttggattttcatcagtaagcccggggtggcaggagcatgcatgctgatccaggtatagaatgagtggtagaaggtgagatcaggagccctgtaagctgttgtaagcatcgttgttttaatttggtagaaactcagttataactcattcttaaatatttagctttatgcttaaaataatttagaaataaccttggacttccatctttttagaaatagctggaaggttagcactcagtatgttgtattacttctctgtgaaaggatctacagtagactgaacttgtctatgttatgagactgctcatgtctttattctttatattcataatgctgaacacaagatactcgtgttttttttttttttttttgacagaatagggatcttgcagttaacttagctgttcttaaatttctgtttataaaagccataatgcataataatttactgtagtcgttattcctagttttcccaggtaggcagtggtaacatctgtttcacaagataaggaagcagaaatttaacaacaatggcagaatcaggatgtcaatcttgtccttttttccttttcccactttgccatgctgccctctgggtaataagatggagactaatttttgaaggcttaatttgttgagccagtgtcattagtttttaggtaacattttaatacagaataagtgtgtcttggtcttattaacagtgctatgttatgtaaaggaatttagttgtaggaatattttctttgaaacaataatacctgtttttttatctcttgattgtaaagtgctgtgggaaatacaga

SEQ ID NO: 20972 - DNA, 1035 bp, Homo sapiens
ctgcctcagcctcaggagtaactgggactacaggcatgcaccaaacacccggctatcatttttctactctttatcatttcataaagtggtgggttgggaggaacatcagccaggatacccaagtcttctcagctaaacccttcttctgctaaaaactagctataggactaatgtaaccatttttctaattaaagtgagggagctgaccctacgtgacctttaggtctcaaactactttgaaatgtgactgtttatctttaaataacatgaatgaaactattctcatcaccatttttttgcattgggggaagctgaggcaaagaacccagcaaagcactggtataagttgaaacaaaacaggtttcttgacttgtgacttaaagctttggttcttctaatgccttcattcatttctttggttgatttacttttcatagtccattaaagtgattatcttatttcttgatgtatgggatagaaatgtgggaataatttcattgtattcttacagaatttacttcagagctgagtaaactttcatttgttgaacacctttgatttaatgccccttggcttttctcctaatctgcacatgacgtcaagtggcagaagtaggaacttgtgtttttttcttctattctcttctcatttttttcctgagaagaaacgtaggtagtgaaaatcattcttagtgcttgttgtgggattctgaagaaaggaacttaggcatcaggaatttgggtgttacccatttaccgtagatatagttgctatagtgttttctgccaccttgtgattgttgtttttgttctctgaagtgaacgtactcttttatggtagtgttaaagtcatataataagtacttatggagtaagtaaatgtgtaagacacaagagataacagatgaataagctaagtttgtatcctcaagaagtttaaagagtgaagggagtgaagaacttagtaagacaaagatgaatgtttagaacagtgcctggcacttagtgatgttagaaatgaaccttgaaggttggc

SEQ ID NO: 20973 - DNA, 1048 bp, Homo sapiens
ttgtaggaaattacagttgcttttgattgaactttcagcagagagcacacccagtcttcaattttaacacttgagattttcttacattttaaggactgacaattagaaaatgcttcagaatatttaatacatcgcctccaagcacagtctagtttcacaacctgactctcttcctattaaaaaaaaaaaaaagcccattttaagcagatttgttaagctgagttaaatgtattgatgtatttggaataaattcttactgggttgttttttttgttgttttttgttttgttttgttttgagacagttccgctctgtcgcccaggctggagtgcaggagtgcagtagtgcgatctcagctcactgaagcctctggctcctgggttcaggtgattctcgggcctcagcctccctaagtagctgggattacaggtacccgccaccaagtcaggctaatttttttcttttttcttttcttaagtagagactgagtttcaccgtgtcgaccaggctggcctcaaactcctgacctcgtgatccgcccacctcatcttactggtttttctaaatctgttggtttgagaaaattttacataagctttttatgggtggcactccaaattggcatggtggagacagagacgtttcattcctgtcactcccaattcagcatctatgtacttaattaaataaagcagtactatattataacatacttaaagatacatgttaaataagtgcatttatctccttaggaatatcagatttgagagagagcatgaggagttggaaaagaggggcaggataattgactagcagatctttcattttctctttgctagaggctggcttactagagaaggctgaaaaagatgaatatgtgggaagaattggtgtttccttgactgtattaaaaggtgatgaagattttcactggagtgtttggttgttgagacagctatgatttttaaaagtaaattttctggtttcccaattttgtttatattatctgcatggatattgtatctgaaatgaaactttttttttctat

SEQ ID NO: 20974 - DNA, 1287 bp, Homo sapiens
ggcagtttagacaacagcctcaagtagtgcttttgttaaaaatatacatgtttttaaaagtgcttgtatttctaatattcttttctcctttctcttctagtctgttctctggggaggcagtaaggggccgtggagctggcctcggcctcggcatcgggagaggctggacttcctgtctctctgtgctgaatggctgcgatggcgcccgctctcactgacgcagcagctgaagcacaccatatccggttcaaactggctcccccatcctctaccttgtcccctggcagtgccgaaaataacggcaacgccaacatccttattgctgccaacggaaccaaaagaaaagccattgctgcagaggatcccagcctagatttccgaaataatcctaccaaggaagacttgggaaagctgcaaccactggtggcatcttatctctgctctgatgtaacatctgttccctcaaaggagtctttgaagttgcaaggggtcttcagcaagcagacagtccttaaatctcatcctctcttatctcagtcctatgaactccgagctgagctgttggggagacagccagttttggagttttccttagaaaatcttagaaccatgaatacgagtggtcagacagctctgccacaagcacctgtaaatgggttggctaagaaattgactaaaagttcaacacattctgatcatgacaattccacttccctcaatgggggaaaacgggctctcacttcatctgctcttcatgggggtgaaatgggaggatctgaatctggggacttgaaggggggtatgaccaattgcactcttccacatagaagccttgatgtagaacacacaactttgtatagcaataatagcactgcaaacaaatcctctgtcaattccatggaacagccggcacttcaaggaagcagtagattatcacctggtacagactccagctctaacttggggggtgtcaaattggagggtaaaaagtctcccctgtcttccattcttttcagtgctttagattctgacacaaggataacagctttactgcggcgacaggctgacattgagagccgtgcccgcagattacaaaagcgcttacaggttgtgcaagccaagcaggttgagaggcatatacaacatcagctgggtggatttttggagaagactttgagcaaactgccaaacttggaatccttgagaccacggagccagttgatgctgactcgaaaggctgaagctgccttgagaaaagctgccagtgagaccaccacttcagaggga

SEQ ID NO: 20975 - DNA, 1050 bp, Homo sapiens
cgaatgtggcagcttaggcctgtaatcccagcactttggaaggccgaggtgggcggatcatgaggtcaggagattgtgaccatcctggccaacatggtgaaaccctgtctctactaaaaatacaaaaattagccaggcgtggtggcacgtgcctgtagtcccagctacacgggaggctgaggcaggagaatcacttgaacccaggaggcagaggttacagtgagctgagatcataccactgcactccagcgtggcgacagagcaagactctgttaaacacacacacacacatccacacccaccaaataaaatattgggaaaatgtttaagttcatgattgttgatacaagttttcaaaaacactaatctttgcctaaaaaattcagattttattattggcagcaaatatcgtcagtggtcttccttgaagtgacaggttcactttgttcatttgcaaggaaatgtctgctagtgaagcaggtttcaaataatgtttgtcagtagttctgccaagtaaaaatcgtgttccatgaacaaagctctagttcattttgcaactcagttgtactgtgctttttcctgagaattcataaagcagcagagtgctttatgcatactttccctttcatcacaaagaatatttttaaaaaatgcactaaaggctcaagataattcataatttttgctgttcatcaaggacatcttaagtggaactcccttaaaaaaagaaaaactgagtggagagtataatgactattagtatagtttggtgcctcttccttgatttgtgctaataatgtaccagcagttttgttcacctttgtttttgtactctgattgcaaatgtcaacacagtgtaaaaggcagataatattctagtattgctatgaaaatacctttgatttcacgaacctccaaaatagcctgtgagatccccagaagtccagagaccacactttaaagaacaactggcttagttctttacgtatgtttcctttggctcccagaccacatagatcaagggggatcaaacagaggcaaatgactgag

SEQ ID NO: 20976 - DNA, 1100 bp, Homo sapiens
gaagtaatacatgtttatggtggagactttacataagccaagaaacaaaagacaaaagaatcttaaccaatgactttttaaagcaaaattgagatgatactgtgttttgttttgtaactttttttcatttaataatgaagcaagcacttttctatgttagtaaatatagctctgccacacttagggttgcacagtattccattgtatggatatttaataatttaaccgagtttttggcattcagttttctttttattataaacaacatcatgaaatattaaaagtaagtctagacataacagggaaaagattaaagtactaaacttaggtggtggtttatggcaattgtagctaattgcaaactaggtgcattaaaaagccatggaaattcattccttctatgtttcctttttgtttccagtgtaataaaagtgcaaataatactgggtggttgctccaggtacgtggccaagtaattgaaagtatcttatttcatcatcatagcatccttgtcgggaaggctctgttacttgtagatgaggagacttaaagaacagaatagttaagtaacctacaggaggtggagccaggatgggaactgagatttgctcacttgagtcagtgctcctcttacttatgaatatctttgggagtaatgttgaatcttagcatagtatttcgagtcaataaaggtatgtcaagtcaataaatggtatttctttggtatagaaatctcaagatttaggaattaggaatgggaattttttcggaaaaagtggtcactttttcctgttctctgcactctctctcctcccccacccccttacttagatgattgttttagtaactacactatgctgtgtatcctatggggatattgagaccaaggataaagtgcaaatcaaataaactattgtctttgaagtgtatatgttaatgtcaagttcatagacatcatttcagagaagtcttggagtagatgggatttttttttttttttttaagatggagtcttgctcttgttgccccggctggagtgcagtggtgcaatcttggctaattgcaacctctgctgcctgggttcaggtgattctcatgtc

SEQ ID NO: 20977 - DNA, 1061 bp, Homo sapiens
agcaggaggaagttttggatttggtgttggggcagggaatgggttttgaatatgggatgcttgaagtagttgtataggcaatgctgaattctactcatttctttctttttgtttttttggagacagtctcattctgtcgcctacgctggagtgcagtggtgccatctcagctcactgcagccgctgcctcccagattcaggtgattcttgtacctcagccttctgaatagctgggattacaggcaaagacggggtttcgctgtgttggccaggctggtctcaaactcctgacctcaagtgatcttcctgccttggcctcccaaagtgctggaattacaggcgtgagccacctctcccggccctactccttcccttccttccctccctccttccttctttccctccttttcttctctcacctcctctcccctctcccctgtctcctctctcctctctcctctctcctcccctctcctcttttccttcttttgagacagaatcttgctctgtaacccaggctggagtgcagtggcgtgataacagctcactgcgacctccacccgccaggctcaagtgaccctcccactatgcccagctaattattatttttttagagactgggtctcagtgtgttgtctaggctagtctcaaactcctcctgggctcaggcgatcctcctgccttggcctcccaaggtgctgggcttataagtgtgagctaccatggtaggccatcatttaaaaaaaaaaaattagtgtttttgtttgggtggcttttttagatgggggctatgttgcctaggctggccttgaactccttgcctgaagccatcctcctgcctcctgagtaactggaaatacaggcgcctgccactgcacccagctcctactcattctttaggtttcagcctggatgttcttttttctgaaaagcattttctgactccgcctacttctcagcctgtatgaggattgcctccatcccccaaatcacacagtagtgtctctctttactgctgcttgtcatccttgtatgtacttactgtggtgctttgaatactc

SEQ ID NO: 20978 - DNA, 1051 bp, Homo sapiens
cccccgcccggaaagtcagggcggctccgggcgtcggggggaggagagcggcgggcccgggccggagccgccgtcgcgcgcccccgcccgccgctggccctcggcgcccaggccggggggctgtttgcaaactgcgcccattttgtggggctgaatccgcccgggctacgctcctccatcacgtggtaggtgctgctgctgctcctctcctcctcctcctgctgccctttctccttctcctcgctctccctgtggctcccatttctctctctctttgttagttgtaactagaaaggcagggcagggtagaaaaatcccccggaactttaaatggcctctccgggcttccctgctgcgggtccgggctgggagtcgccccaagggcgggggtgtgcgggggcccttccccaggagctgccgcctcgttcgccagcttttcctttggcgttctatttaaaaaggcggcctgaagaacatgatttattcccgtaaaagaaccccccaaacaaactctggctctcgccttgaacttctcttgactgcaaaaggcctttctctgctcgaaacacacatcttggcgcgttgcacggtttgtatcacaactctgattgtttcatttattatttttgttgcctgtaaattcaggtcacttacgttttcagatgtagtctccctcaggcggactttttttttttttaaactaaagaggaagagggatttatttgcttttaagtgagttggaatcttaactgcctttttgggggcctgttttccggctgacggtcttttgattcttagcaaatagtttgttttccatacgataaacagcgctactcccgtgtcttacttaaaaatcctcgttttccaatgttggaatcccaatgtggatttatagagaaacgtgctacttaactattgcttactgattgctttaggggagaaggggtgacatgatggcgccactttaaattgctctctttccttttcctcggtcccccccacccccctttatcctggaggtcactggagcattttctgtgacttattaata

SEQ ID NO: 20979 - DNA, 1044 bp, Homo sapiens
agtgctagtattagagatgtgagccaccacgtctggcctgaaggacttcttataccaaagaagatacagtttcatttaactattttattttattttttctgatgctggttaaagttggttcatttgggacacatttcattagataaaattgtgtttaaatgtgatagtgagaatttggaatatggtggaaaatattgaatattatattctataatttttgtcagtctaattcagaaacaaaaaagattgcagttgagaaaatcatacatgatttctttgtaaatgagttacagagataagacaggacctttagcatttcctgaattccagtcatgttctcggtaacttatggtctcttttataatattgtacccatgacaatttatacgttagatttcaggttttatcttctgcctggaaggattacattcaggggttttagccatgcatatttatctataaatggtctaaaccagtacctctttatctttccttaaagtacttttcagggtctagggctgtttggagctgtttgttacaagcaggacatatctctctgaggactccttttctatcttgaaacagtgagaattctgccttttgctctgtatacattgaatatcccttatccgaaatgcttgggaccagaagttttttggatttcagatttttcagattttgggatgtttgcatgtacataatgtactatcttggagatgggatccaaatctaaacatgaaattctatgtttcatgtacacattatgcacatagcctgaagataatttcttttttttacctttttctttaagagatgatgtctcatactgttgcccaggctggagtgcagtaatgtgatcctagctcacagcagcctagaactcctgggctcaagtcattctcctgcctcagcctcccaggtagctggtactaactggtacagatgcacggtgccaagcccagctaatttttttgtttgtttgagatggggtctgattctgttactcaggttggagtgcagtagcgccatctctgctcactgtag

SEQ ID NO: 20980 - DNA, 1409 bp, Homo sapiens
agatcacgccactactctccagcctgggccacagagcgagactccgtctcaaaaaacaacaacaacaacaacaacaacaaaaaacaaataaaacgcttgtcccccttgccttctccatcacagctctgttaagtatgagtttagatacacagtattttcttttttattaccgtgtataatttgtatttgtagcagcagcccagaagacaggcaagcgtatggttctagctcacttttttttactgggcacttgatggtggtggtaatttatctgtcagcagggggagctgcagttgctgatatttaaatgattccatctcagctggttttccacagaaagtttgtcggccaagagaaagaaaagttttgctggcaaagaacatgatcagagttcataaggaagaaatacaaatgaccaagaagcatatgagaaacatttttatcctgataagtaatcaaaggaatgcagattaaatgacatactctttttttaacctatcagatttacagttgactgtgctgtcgaaggtggtgaggggacaatctctgaaactgctagtggagtgtgcattgggcctagtttttttgaaagatattttggcaacatatattggcaaaattaaaaacgttctttaattcagtaattgcacatctaggaatttatcctaaaggggaaaaattaagatacatagaaagatttgtgaacaaagatgttcattgtaacattattcatattagtgagaattgagaataaacctaaatgagcagcaagatttataggaaaataaatcatggtatatttaaggatggacatttacaaccatggaatagtatttgaaagaatttttctggccgggtgcggtggctcatgcccgtaattccagcacttcaggaggccgaggtgggcggattatgaggtcaggagatcgagaccatcctggccaacatggtgaaaccccatctctactaaaaatacaaaaattagctgggcgtggtggcacgtgcctgaaatcccagctactcaggaggctgaggcaggagaattgcttggaccagggagttggaggttgcagtgagctgagatggtgccactgcactccagcctgttgacagagcaagtctctgtctaaaaaaaaaaaaagaatttttaatgtcttaggatgttgagtaaatgataaatgaaaaattcagggtgcagagctatataaggagcattctaagtgtataaagataaggaatgtatatatgttctagtataatatgtatgtatatattacacacacatacatactgaggtaaaagaatggaaggaagtctataccaaccagcctccttgagtctgtctgtccggggtctgtccaaccaattgttctgtctaaattggcaccaagtgatgttttcaggtgaaa

SEQ ID NO: 20981 - DNA, 1034 bp, Homo sapiens
aagtgttgagcaccagtgttggtggcctctgtcctctttaggaagcaggcaaggggattgagatcaatacattggatttcattttatagtttcctaggttttaacgaatgtatttggtacacaaagccctacttttaaagatatttccagtgtttaaggttttacctctaaatctctctgaacctgggttgtaatacagtaacctcagaagttctactagaggtctctggcatggcaggaatagagaaaggaaatcagctccatatcgtgagttaccacctgttactacttaagaatgcagttaggtggttgccttaatattatgttccttaccaatcctttgctcagtgggaaacatcttctaagtgtaaaccaattttggggggtaatgttttcttcctatttttattacttagaaaccttaaaaattacagtgttcgtctggtcagaaaaaaaggtcctttttgcggggaggatagcattgagtttgtgggctggaaaataaaagtggggagagggaactttattctctttttcattggtgaatatccttaaaacatttctaagatgtagtttcagattggagctacttaatttaagtaaaaagaaatgataggttaattaaagtgcatattttggagcccaaatgtttattttatatagatcttatattttgtttccaattatcttattgtagaatgaactctgtcgttctgtcaggcattgcgtaaatgttagactgagtatgtgcttgtttccatgcgtatagaaaatagcgtcacactcactcagtcttcacaaatgaaaatgccagaggaggcaagtaacaaggaagaataactccaagccaaaactcctcaatttaaggcactctcgttaattagaagttctcatggaaattattatttatccctttttctctgtgttaggggtctgtacctttttaaagcctgaatatttctagccacgactaagcaatgtcagtgatgttactagggtctagttgtcagggttagggctaaggagtgggtgag

SEQ ID NO: 20982 - DNA, 1057 bp, Homo sapiens
atccccctctccgagaaacacccaagaatgatcaataaatatgaagggaactcagaggccggcagcatcctccatatgctgaacgcaggtaccctgggcccccttatttctttgtctgtactttgtctctgtgtctttttcttttccaagtctctcgttccacttaacgagaaacacccacaggtgtggaggggcaacccaccccttcaccacaccaaggtcttccgaccaagctttgagtaccattattgcagaggaagctcatcttaggtaacttattactagagcagaaatcacctaatataaagtatttcatgtatcgcatttaaaactgacttttgggttcattgatgtagtgactcaactgggaatcttaaatggaattagtgttttcactgacaataagaatgcctactttttcattataggcccataagatggcccagcctttccttgaaccagtagaccctaatgatgcaccagattattatggtgttattaaggaacctgtgggtacacatgagttgaatttgaagttttttcagaagtctcagtgtatattttattaaccataaaattaatatcttagaatacttttagcaaggctggtgggggtataaattggtatggtcactttggagggtaaattgatagtatctattacagttgaattgtgcatactcggttattttattttatttttttgagatggagtctcaccctgttgccaggctggagtgcagtggtgtgatctcacctcaatacaacctctgcctcccaggttcaagcgattctcctgcctcagcctcccgcgtagttgggactacaggcacgtgccatcacacccgactaattttggtagttttagtagagatgaggtttcactgtgttggccaggatggtctcaaactcctgacctcaggtgatccgctcgcttcggcctcccaaaatgctgggataacaggcatgagccaccgcgcccagcccccacagtgatcttcctttgaggaaaagccacggggtgctttctctcttctgtagcaaggaagatggtttc

SEQ ID NO: 20983 - DNA, 1076 bp, Homo sapiens
acctcaggcctaaacccaggcctactaaatcaggatctgcagtttctcacaatcttcaggtgatttctatggtcattaaagtttgaaaagctgcctcgaaacagtccttcctaaaactgaagtggaggtgccacaaaaatcatctggtaaattgtttaaagtaatcccaaatgcaactcaaatctacagaatcccaggtgaagctcagtaatctgtatttttatccttctccccaaataattctgatgtgcaggcaagtttgaaaaccactgctttaaagaaaatggatactccccttaccaagcagaaagtaggattttggaaactgatgcaagggaagcaaaaagatgcctcaggaggcacgattacaacaggattgatgcaaacggaagctgaagcttaaccaaagacattaatatacgcccacaaaagaaaatgctaaggaagtcaagtggtctgcatgaattctgaagaaaaatggagaaccaaagaacaaaatttgtcaatgaacttccagcacagtctaggttaagggagtgaatttcttgactgaatggcacagactctgtaccacctgattggctgttaccttaatggaggaattatattacaatgtataggtactttaattagaatgacctggcagttactgaggcaaaattttccgctcctttgtattctgtaatacaagaaggatctacatggatgttctgttctctgaactgtctggatgaaccggtcaacggcactcatcataccttagtttttaaatctgcattgtggtcataatctgttatttaattaatttctcgtatttttataaaaactttgcctatatattttagacagaaattgccttactttgctgaaatgctgagaaatcctagacagttttcaaggctgggctcaaatgtcacctctactaccctttgctgtgcctcctggcactgtgcttctgacactttgtacggtcctccatgacagcgtgagcacaattatattacaggcaattactcatgcccccctggctcatctgttgactcctttagagcacagatcatgttttatttattgta

SEQ ID NO: 20984 - DNA, 1050 bp, Homo sapiens
tttacactcactgggatggctatgagaagagacagacaacgacagtgttgacaaagacccggggaaattgaaaccctcaaacactgcagatggaagtgtaaaatggagcagccactgtggaaatcagcctgacaggtcctcaaaaagttaaacataagagttgccatatgatctagcaattctgctagggatgcaccctagaattaaaaacatgtccacacaaaaagtagtacatgcatgtccatagcagcattattcataaaagccaaaataaagtagaaacaaccaaatgtccactaagtgatgaatggatgaacggatatagtgatggctccatacaatggaatatcactcagccttgcaaaggaatgatccatgctgcagcatgggaggaccttagaaacaacatgcttcgtgaaaagaaactagacacaaaaggccacatactgtatgattcgtttatatgaaagatctagaataggcaaatccatagggactcaaagtagattagtagttacctgggcctgagggaagacagcactggggagtgatggctaatgggtaccatgtttttttgggggatgatgaaaatgttctggggttagataatggtgattgtttgctatacaaccttgagaatatactaaccaccactgaattgtacactttataatactgcgttgatggtatgtggatcaagtctcaatttaacacaaagaagcatgttgtgctgtatagaacaccaggtgccagaagaccaaacatgctggcagatggaaagaagaggagtgaagattcactctcccttgaccaagatcagagtgagtcagtggcgaggctgggagccacacagcttgtcctgccttgtgatccccctcctcttcctattccagatggtttttcagtgccattaacttgttttgtaacactaatattcaataagatgatgttacaaagagaaagaatgtgagtgccacatgactggttaagtatggattctcaaactagggctttaaatatccttcgtgatttttttttggcatgaaaagt

SEQ ID NO: 20985 - DNA, 1030 bp, Homo sapiens
catccccttgtcttctggtaatagaatttccttcttgtttttcttttgggatgagccaccttcgctccctgggattcctctgggattgagttaccgcctcaagcgatcctcccacctcagcctcccaagtcgctaagaccacaggtgcatgccactatgcctggctaatgttttgtattttctgtagagccggcgttttgccctgttgcccaggagtttttcctttaatgttctcctgctacttactaatttgctttgtcaccctctgagctcataagagcagagagatagcaacaggacctaagtagctctaagctgtgaaaaaatattaaatatgaaatcatggtagctattagcttaatttgttttaggcaaattgcaaagtaattttttgggaaccactgtcccactgcagtgattccatatggggattcctaatttccagtttgtttttaaaataatttgtgaacacctaatacaaacacatgatatgaaattcaagaggtacaaaaggacatacagccctgcaccctcccaatttccctccccgaaggcaaccaccattaccagtttctcgtgtgtgcttccagaagtattctgtgccagttttgtccaacagaacttcaatgatgaaaacagtcacccgtgctgcccagtttggtagccattagccacatggggcagttgagcacttgatatgtggctagtgtgtcttaggagctaactttaaaaaaagttttttttttttttttaagacacaggtcttgctctgtttaccaggctggagtgcagaggtgtgaacatggcctcaaactcctatttatttattttttgagacagggcctcactctgttgtccaggctggagtgtagtggtgcagtcatggctcactacaaccttgacctcctgggttcaagaaatcctcccacctcagcctcctaagttgctgggactacagatgcatgccaccatgtttggctgatttttacatttttaaattttttggccaagtgcggtggctcacacctgt

SEQ ID NO: 20986 - DNA, 1794 bp, Homo sapiens
acctgttggctttatcggactacgtgttttcccatccagatttgaaacagcatcttaatgttttacctaatatttacattttaactaaattttaatgagatgacacatttctatatatttattaattatttgccttttatgtgaattttctatttctattaagattgtcattttttcttttgacctgtttcttttttttttgagacagagttttgctcttcttgcccaggctggagtgcaatggcatgatgttggctcaccacaacctccacttcctgggttcaagtgattctcctgcctcagcctcctgtgtagctgggattacaggcatgctccaccacgaccgactaattttgcatttttagtagagacgggatttctccatgttgttcatgttggtttcgaactcccaacctcaggtgatctgcctgcctccgcctcccaaagtgctgggattacaggttgtgagccactatgcccggcctctcttaatctatttctgagagttctgttacatattctgatgtttaatcttcagttatatgtattagatatcttccaccaaagtacagtttgccttttaattttattagattttctattgcatgttgaaaagtaggtgatatttttgtgtcttatctaagaaatacttcctgctctaagtcccgaagatgttcttttaagtttggctgttcatgtttagcaatttgaagtgccaaaattttgtaattatatcatgaagaagggaactaattttactttttccttctaaagaactggccagtttagtactattgaatagtttcattttttccccactgatctgattaaaagaaaatttcccggtatcttttatgtatctagttctacgttttgaggctctctacagttttgcagcaaatctggctatctggtaatgtgtatttgcatcatgccttcttccaaatttcttgctgttggtcctttatgtcatgtgaacttttggatctgtttctcagctttcattaaaaatactgtaggcaatttgactggaatttctttgaatttatagatgttcatgagaatcaccatccttaaaaaatgtatcctaccatttgtatagagcttcatgctttcaggcattactgttttctctataaagattttaaatatatcattagttttgtcgttgttatgaatgatacttaaaaaatgaatattttctacttttttattagttttcaaatattctttactgaacacttttgctaaattctttattagttttaatagttcttattgtcagttggatttcctgtatagattattcttaatatatgttttattttaacatggacaatatttttatctctagagaaattaatgcaatttcagagaaaccgtgtgccgcaggatcaggatggtagaaggcagttccacttaatttgggaaatacctatttgaaagtttatatccatgtgcatcctgaggagtggggggtatctgtctctgtctgttttgggtttttcttgacactagagttagtctctgcaagggcctttagaagttaaattccaccctccacccccaagtctggtatagatattactactactcttggacttcactcaatttatttctttttaggagacacaggtcagaatggagatgggctgcagaccgggcagctattgtcagctgctggaactggcttcaggctcatgtttctgacttggaatatcaaattcgtcagcaaacagacatttacaaacagatatgtgctaataagggataggtgtctggtgttttttagta

SEQ ID NO: 20987 - DNA, 1035 bp, Homo sapiens
ccatgtttaaatttaattagaattaatttttgtgtatagtgtgagatacagtggtccaacttcattctaccgcatgtgaatattcagttgtcccagcatggtttgttgaaaagaccattgtttgtttcttgtagagatggggtcttgctttgttgcccaggctagtctcgaactcctggcctcaagcagtcctcttgcttcggcctcccaaagtgctgggactacaggtgtcagccacagcacttggcttaaaaagaccattctttcctccactgaattctcttggcattcttgtcaaaaaaatcaattgactgtcagtgtaagggtttatttctgaacccacaattatattccattgatctgcatgtttatccttataccactaccacactgtcttgatttccgtagctttgaattatgttttcaaatcaggaagtgtgagtcctccagctttgtttttccttttcaagattcttttgggtatactgggatcccattggtggttctgtagatcaatttagggaatattgccattttaacagtgttacatcttctaatccattctcatccatgaacataggatgtctttccttttttttttttttttttttgagacacagttttgctctgtcatccaggctggagtgaagtacagtagtgcaatcacagctcactgcagccttaagtaggttcaagtgatcttccctcctcagccccccaagcagctaggactacaggtgcatgccaccacacctagctcatttttgtattttttgtagagacgaggtcttgccatgttgcctagtctggtcttgaacttctgggctcaagcagtccacccacttcagtctaccaaagtgccaggattgcaggtgtgagccatcacacctggcctttccgtttagttaggatttctttaacttcttttggcaatttttatatatttcagagtataagattgtcactgcttttgttaaatttatttctgattattctttttttgttttgagacagagtctcattctgtcacccagg

SEQ ID NO: 20988 - DNA, 1124 bp, Homo sapiens
taagtctgttactttgttatttctaagtgtttcttatattacttttcctcttcattgtagattatattttcctgctgttttctatgcctagtgtttttttttttgtttgtttgtttgtttgtttgtttgtttttgagacggagtttcgctctgtcgcccaggctggagtgcagtggcgcgatctcgactcactgcaagctccgcctcccgggttcacgccattctcctgcctcagcctcccgtgtagctgggactacaggcgcgcgccaccatgcccagctaatttttgtatttttagtagagacggggtttcaccgtgttagccaggatggtctcgatctcctgacctcgtgatccgcccgtctcggcctcccaaagtgctgggattacaggcgtgagccaccgcgcccggctgcctagtgttttttaattggatgtcagttattataaattttactttttttctttgagacagggtcttttactctgatgcccaggctagagtacagtggtgtgattatagctcagtgcagcctcaaactcctgggctcaagaagtcctcccacttcaggctcctgggtagctggaactataggcacgtgccacatatggctaatttttttttagttttgcagagatggggtcttgctgtgttgctcaggctgttctcaaactcctggcctcaagcaatcctcccacctcacccacccgagttgttgggattacaggtgtgagccactgtgcctggctataaattttacattgttgattactggatatttttgcattcctttaggtattttaaagttttattctgagatgcagtaaagttgcttggaaacagcttgatcccttcaggtcttaccttttaaattttgtccagacaaaagtagccttagtctggactaatcttgtcccaccattgaggaagtaccctttgagtactctcctcaaaaacctgtttagtatgaggtttcttcactctgcctattgaaagtatgagctattcccagcttggagtgagatccagtaattattctgtctgcttcttttcagtaatactttccccagctttgggtagtttcttcactatagtactataatgtaattctgatgctaactac

SEQ ID NO: 20989 - DNA, 1034 bp, Homo sapiens
ctgtctgcccaactcttgcacaacacaagtacctaatcatagtttatctcacagacagcctgagacagttcttacggaaacaccccaggacacaattgtaagtgtcttatattctagtgttcaaaatattatgaaaactacaaagaatgatctgaactaaataatatattgtgaatgacttggtagaaattttctgtttcaggaattaaacagattgaatttagaatcttccaattcaaagtactccttgaatacagattcctcagtgtcttatattgattcagctgtaatttcacctgatactgtcccactgggaacaggaacttccatattatctaaacaggttcaaaataaaccaaaaactggtcgaagtttattaggaggaccagcagctcttagtccattaaccccaaggtaagtcaaacaagatactttcaaatgtgctataataccaaatgatcttatgataactcatattgttagtaatgcagattattacaacagcaacttctaaatcactgtggaaacaggggcattctgttttcagaaaatgaagtaaaaactggcaaatagtgatgttgccaggtgcggtggctcatgcctgtaatcccagcaccttgggaggccaaggcaggcagatcacctgaggtcaggagttcaagaacagcctggccaacatggtgaaaccctgtctctactaaaaatacaaaaattagctgggcatggtggcgggcgcctgtaatcccagctactcaggaggctgagacaggagaattgcttgaacccgggaggcggaggttgtagtgagccgagatggagccactacactccatcctgggcgacagaccaagactccaactcaaaaaaaattgatattgaatattggactggccaggcgcagtggctcacgcctgtaatcccagcactttgggagaccaaggtgggcagatcacgaggtcaggagatcgagaccatcctggccaacatggcgaaaccccgtctctactaaaaatacaaaaaactagccgggtgtg

SEQ ID NO: 20990 - DNA, 1084 bp, Homo sapiens
ggggcctctctcaagcacaaggttttgaagattatgccggtgcagaagcagacccgtgccagccagggcaccaggttcgaggcgtttgttgccatcgaggactacaatggccacgtcggtctgggtgttaaatgctccaaggaggtggccactgccatctgcagggccatcaacatcctggccaaactctcgattgtccccgtgcgcagaggctactgggggaacaagattggcaagccctacgccgtcccttgcaaggtgacaggccactgcggctctgtgctggtgcgcctcgtcgcacccccaggagcacgggcatcgtcttggcacgtgtgcccaagaagctgctcatgatgactggtatcgatgactgctacacctcagccaggggctgcactgccaccctgggcaacttcaccaaggccacctttgatgccatctctaagacctacaactacctgaccccggacctctggaaggagactgtattcaccaagtctccctatcgggaattcactgaccacctcgtcaagacccacactagagtctccgtacagaggacccgggctccagctgtggctacaacatagggtttttacacaagaaaaataaagtgaattaagcctggaaaaaaaacaacaacaaataaaaacctggtcatttatgctatatttaaagcatttaaatcactttcagaattaccactgggaatgttgtattaaaaattaaggccaagcgtggtggatcacgcctgtaattccagcattttgggaggctgtggtgggcagatcacttgagctcatgagttcgagacctgcctgggcaatatggcaaaaccccatctcgacgaaaatacaaaaaggccaggtgcggtggctcacacctgtaatcccagcattttggaaggccaagacaggtaaatcaccagagctcatgagttcaagacccgcctgggcatcaatggtgaagcctggtctctacaaaatatgcaaaaattagccggatatggtggtgcgcacctatagtctcagctgttcaggaggctgaggtaggaggatggctttagcgtaggaagtaggggttg

SEQ ID NO: 20991 - DNA, 1031 bp, Homo sapiens
gaaaccttgtctctactaaaaataaaaaagttagccgggcatggtggtgcacgtctgtaatctcagctacttgggagtctgaggcacgagaattgcttgaacctgggaggcagaggttacagtgagtcgagatcacaccattgcactccaacctgggtgacagagtgagactccatctcaaaaaaattaaataaataaataattcatgggttgaagaggaagtctcacaggagattttaaaaatatattgaactgaatgaaagggataataaatatgacatattaaaaactatgatgttgctaaagtcttacagcgaaatttatagcactaaatgtttgttataaaagaacagtttcaactctgctatctaagctttcactgtaagaaactagaaaaagaagagcacagtaaatccaagcaaacagaaagaaggaaataataaaaagtagaaatcagtgaaattgcaaacagaaaaacaatagagaaaatcatagaaaccaaagctggtccttggaaagattggtaaaactgccgaaagtgaccccaaaaaagaaagagagagaacaccattacttatatcaggaatgaaagaaggaatatcactacctaccctgaggacagtgaaaggatgtgtatgctgaaaacttaaaacaactctatgcacatgaatttaacaacttagatgaaatgggccaatttcttaataagccacactaccaaaactcacctaagaaatagaaatctgaataatcctaaaattatgaaagaaactttaatttgtagttaaaagtcttccctaatgctacataatctcttccagaaaacagaacaagaagaaatactcctctactcatgaggccacatttccttgattccaaaatgaaatactgttctaaaaaggaaaactataggccactattccttaagaatacatgtatacacaaaaatcttcaaaaaaaattaggaaatcagatgtatcagtgatatataaaaataatactatttctcagaaaattgaaactagaattac

SEQ ID NO: 20992 - DNA, 1113 bp, Homo sapiens
ttctatcctcccgaaagatttattagaaaaatattacctaaaaacaagatcctttactggtagtctgtttaaaggcaggggtgtttctgtgtgtgtatgcttttcttaaatatttacagagaataccatgattgtcttcattgtattatttccttggtttcttgtagagaaaagtaatcaagatctaaggaactgactttgctataagcaaaccgtttctccataattcaaatttgaattaataagtgattgttttgtgttaaaatagcaagcctaatttttttttttgctaaacttgtttattgcatgataaactgattatcattcaatatactgaacaatagcctttttaaaaaatgtctgtttttagtacactcagaagaagccttgtttttactggcaacctgttattaccgctcaggaaaggcatataaagcatatagactcttgaaaggacacagttgtactacaccgcaatgcaaatacctgcttgcaaaatgttgtgttgatctcagcaagtaagttttaaaatattttctagctattttgttttacttacactgttgaattttggataaaattcctttcagattaaactctgattccctttcttccctgttttccatctatttcagtaacattcgaaatgtttacactgttgcctatggcattatttatattatggagatttcattgttatggtaataaataatagagtttaactctggagaaacttaagttataaccgattcttattggtttcttaaatgatcacaaatatttcgttttctttgctttcagtgttagaccaatttgagtaagcctgaaaacccaccagctcacttgagattaaggctcccttgtgtttaggtgattgtatagtttcctttcaagatcattttattgagtacttcttttgcacattacagttaaaccaagtcagctgtccctataccaaatttggaggcatttagagatacagatagttaggttctattcaattcttttctgtactgtaagagatggaataatggtaaaagggactaaacggtcacatgtgtaaacggtgttagatatttgtaaaagcctgtatgtataattggcttgtaggtt

SEQ ID NO: 20993 - DNA, 1004 bp, Homo sapiens
ttttttacccttattagatatgatacactctaatattttccattgagtggttttgttgttgttgttttaacgtaggctgataaccactaaattgacatcacagtccactagtgagttgagatttgctgttttggaaaaactgtcctaattttaccatctccctccaataaattcccttcccccattgtaagcatgtatttttctttcccaccaccaatacctgatccccttgaccaaggtttttctcttttgttaattaactgttaagaatgaatagaaataagtgctatacaacaaatagaaatagtgttagactatgaggaaaaaaatacattaatgcaactactatgatagctctttggagatatgtgtgtgtgtgtgtgtgtgtgtacacacacatataaaataagagttatgttcagaaaatcaaccagacataagttttgtgtgcatttttttcataagtaattgctacctatggaactctatgagactaagaggattgtaactagtgaaaggaaaagaaagagaaacagctgaaaaccttgtgtcaacatgtattcctaggttattttgagggtcctagcccagagttcaaaattgcttaaggtctactgttttatcttaaattaatgtgggttttacatcccacactgcaaaatgtttttgtttgtttgtttcagatagggtctccctctgtcacccaggctgcagtgcagtggcccaatctcggctgactgcctcccaggttcaggcaattctcctgcatcagcctcctgagtagctgggattataagcgcctgcggccacgcccacctaatttttgtatttttagtagagatggagtttcaccatgttggctaagctggactcaaactcctagcctcaagtgatctgtccacctcggcctcccaaagtgctgggaatacaggcgggagccactgtatccggtctttattttttaatattagtactttttaaacatttttttttaagtcaagatc

SEQ ID NO: 20994 - DNA, 1034 bp, Homo sapiens
aaggaatggaaggcttagaaagaagattatacaatagattaatctactccattcacttatgcaaaagtgatgtttattgtgaataatctatttaaaaatattttcattgatacctaggcaggccccatattttgctgtatttttaaaaatttttgttgagtcagaatctcactctgtcgcccaggctagagtacagtggcacaatcatagctcactgcagccttgaactcctggactgaagtgatcctcctgcctcagcctcccaaagagctggagttacagatgtgagccactgtactcggccactgtcttctatttctagtatttcctttttgtttttgtttattattaaagaataggcagtttctagtttattatagttaggctcttaaaaattgtaaattcatggtttagaattcaattagattttcccatagaattggtggcaagattcccagattagtccacataaagctgtttaatccacgttatttatgtacctgatacaatgcttggcacttggaaagttgctcagtaaatgttagtttctttcaatatagaacctcaccattcggtttaaccatatttatatgaggaaagattttagaattaagtgtagtaagagcagatactatcctggctcagtaataataacaataattctatcacttattgatttcttactgtatactaggtactctaagtatttaatattagttactaatttaatcttcaataatcctatcaaatagacattgctattgccattttctggatgaagaactgagactaatgtccacaggcggtaactagtaatctgtctgattccgctttcccaagagtagcaattaccacttctctgatttgcaaccatagtaggcatcactaatccattacagtactcattcccactgaaccaacctcagaattcttggcaacagttttcttggtggacaatatcagttgatatgctagatgtaacctgtttgctcaggggcctcctatgtcactagtagcagtttctatatttggag

SEQ ID NO: 20995 - DNA, 1049 bp, Homo sapiens
cacactagcctaagtgacttcagtgagagctttttgaatatttataaaagtcacctggtgaaattggtttttaaaaaagaagcaaagagattttatatagatttagcaattattcctaggggtaagacttcacagaagtgttggatgaagttgtaaataagcctttcgaaaattaatttaataagcaatatagcaattgggtactatatacatgatactgttttagagatcattagatggtgaaggagtactcttggctggggataaaatgttcagggacagcatctaacatggattcaaagagtaacatattttggctactcaatgagaaatttagatttaatgtgcattggtaatgaataaccattatatgagcagaagagtttttgagcagaggaattatgtaataaaagcaccactttgggaatatttatctggtgctgttggaaagggaggaagagacaagagttagacatacagactagtagaataatccaactgcatgatcatgtagaccagggctgcttaatctgagcactattgacatttggggcaagctaatactttgttggaagctgtgcattgtagaatgttttgtagcatccctggcttctaaccactggatgacccctccatttgtgacaaccaaaaataccctctagacattgctaaatgttggggcattaattgggagtaagaaggcaaaattgcccagagtaagaaccactgacgtgcatctaaactaaatcagtatcctagaaattcaattataatgtataatatgaaatttcaacagtgatttttttctttgtatcttcttacattgtctgaagcctttattatccatttattttatggtttttaaaaaagggcagctgactgggcacagtggctcacgcttgtaatcccagcactttcagaggctgaggcagacagatcacttgagccaaggagttcaagaccaacaaataaaataaaataaagacagcttttttgacaaaaacaagaacacaaaatgtataaaaaatttaacaaaaacaagtaaacaa

SEQ ID NO: 20996 - DNA, 1101 bp, Homo sapiens
attcccagcacaagacacttaccccataagcatcaacaatgagctggaggacattgctggaatccatggacagaaccccaactgtggtccctgggatgagctcactatagttctagaaaggaaaacaaagatgtccagagcttaccaaaggaagctggtggtctccaaaagccctccccaaatcccactgagagtcctgagatgaagattggaggaaggtacgggatatttcaattgtcactgccaggaatatatctagcagtttttcagccctgagcaaaagtagaggaaacctctcacacccctcaccacctcccctccaccaccacaaacaccaacacatacctagtaagttcaagattgcaggaaaaaggcccagagtgcaatctttagctcctggggagtggattaggggagactctttcctgattggggactgtatccaatgctagcacaggctggctacctggggcacccaccatcacagggcccactccaggaagcccgaaggcacagtcacctgatagagattgactacattttcagtcactgcaaagatcaaattgatgtttttctgggatagcttctcagtcatcagccccaaagagggataatcctaggaaaatgaaggatgtagaggttaatgacgtctcatgtacatctctagggtctaaagcttagaacttatcttgcttgggctgtggctcagagtgtggtggtgcttaaaccatttcacttcatgctgaaagtgagacaagagcctgggcaacatagcaagaccccatctctacaaaaaaattttttttatttgccagatgtggtggtaagtgcctatagtcctagctactggggaggctgaggcaggatcacttcagcccaggagttggaggttacagtgagctatgattgcaccactgcactccagcctgggcagcagagcaagactctgtctctaaaaaaaaaaggggggtgacagtgagataagaagggtaagtagcacagaagtctacttgtgaactccagggatagacgaagaggtacaggccagtggtgtcaaaactaagcacctctttcttcctgcttgaatttaatgcactaata

SEQ ID NO: 20997 - DNA, 1138 bp, Homo sapiens
aagcacagcaaatactaagacagaggggaaaaaaggatatatacctctaagtatatcatagtgagtgactacacaaaaagatattccatgttctaatatctgaaacctgtgaatgtcaccttatttggagaaaatgtatttgcagatgtaatcaagttaagatcttgaaatgaaatatacaatgacagacgtgcttgtaagagaaaggaaggagatgagatacagacacaggaaaagaggccatgtgaagactcatgggaagatggaggcagagattggagttatgctgccacaaaccaaagaacacctagggttcctgttaaaaaagcaaaaatgttagcagagagcacagtaaaaaagacaaaaaataagtttaatagggaaaaaacacaaatttttcataaattcctgaaaagattccttgttctattttttttttaaggagaagaaaaaggagaattaagaacagaagaggagaagcaagaccaggtagtgatatttaagactgtgacatttcaacacttggactaaaaaatttaagggaatgtttgagggctaaggaaaatatttgaaggtaaaagaaaaatttccaaatctttatttacctcagttcttttactgtgctgttgtacttgtaaactctttctcccaacttttttttctcctgaaaaatcagaggacttttcttctccacaaaagattattgatgtttcaaatctaaatgacacagaaattggaatcattcttgaatttctttttacttattcttttcaacttttaattatggaaattttctaacatatacaaaagtatacagaatcccatcacccagtttcaacagtggtcaatcctattccatctatatcccatccctgttcccatcccttattatttttgaaataaatcacagtatattatttccatctgtaaagattttaatagaaatctctacaaggtgtctttttttgtagagattgggctgggtacggaggtgcacacctgtaatcccagaactttgggaggccaaggtgggcagattgcttgaggtcagaagttcaagacgagcctggcaaacatggtgaaaaaccccatctctactaaaaataccaaaaaaatagacagacgttgtgacacatgc

SEQ ID NO: 20998 - DNA, 1050 bp, Homo sapiens
actcaagaggctgaggcaggagaatcgcttgaacccaggacgcagaggttgcagtgagctgagatcacgccactgcactccagcctgggtgacagagcgtgactctgtctcaaaaaaaatggacacagagagcaatggaacagaataaagaacccagaaataaagtcacatatttacacccaactgatcaactgttggtttacacccaacaaagcaacaaagccaacaaagcagtcaagaatatacactgaggaaaggataccctcttcaataaatggtgctgggaaaagtggataaccatatgcagaagaatgaaactaaacccctatctctcatcatatacaaaaaacaactcaagctggattaaagacttaaacataagacctgaaactaaaaaactgtttgatgataacatagggagaagtctacaggacattggtctaggcaaagattttatgactaagatctcaaaagcaccagcaacaaaaacaaacatagacaaatgagactatattaaactaaaaagcttctgcacagccaaagaaataacagattgaagagacaacatcttgaatgggagaaaatatttgcaaactattcatctgagaagggattaatatccagaatttataaggaattcaaggaattcaaacaacagtaaaaaaaaaaaaaaaaaaaaacaaccattaaaaactgggcaaagagccagacgcggtggctcacgcttgtaatctcagcactctgggaggctgaggcaggtggatcacctgaggtcaggagttcaagaccagcctgaccaacatggtgaaccctctctctactaaaaatacaaaactagctgggcatggtggcatatgcctgtaatcccagctacttgggaggctgaggcaggagaatcacttgagcccaggaggcagaggttgcagtgagccaagatcgcaccactgcactccagcctgggcaacaagagcaaaactccgcctcaaaaaaaaaaaaaaaaaaaacaaacaacaacaacaacaaaaaactgggcaaagaatatgcataaac

SEQ ID NO: 20999 - DNA, 1036 bp, Homo sapiens
tacacttctttatggtgaacttctgagtggcaaaactatcttttccatattaccacacttacagcttaacataaagcctagtacatattaatggttcataaatgttactgaatacattggaagatagaaagaaatggggacagatgtaaccagaaattctcatattagtactcaggcactagaaggcatcatttttcctaagttgaaagacattttaaatcttttccccaaaacgaatgctatacatggttctagccctctataagtgcgctaatgaaaaataaaattatgatagcttttaattcacttgcatgtagaagacattctagaattaggggtcattagaggagattaaagccaaatatagcagcaggaagccaggcatttatttgtcggatgacctgcaggataactagctctataagagactaaaagagtgtttacgctcttctaaaatctgtcaaactatttggtccacaaaaagcagaagacatgatattcttacgtacctaatttttcagagaagcattccgtgttgctcatcatagtatcaatgaattctttaaaattcactttttttgtttctacaggaaaaagaaacacatttttttggcatcttttaagtattattatgaaaaatattgaattatataaaatacgttatatattcagaaatatataattatatccatcaggtaatactaaccaataaaaatatatgggtataaaggggaaaagcaaatcaatttacagtagagaagtaaacgctgaaaaacaccaagaaaacgggtcaaaattcttccagtccctctcaagcatacataatatttttaacttttatttatttttatttttatttatttatttatttatttatttatttatttatttttgagaaagagtctcactctgtcacccacgctagagtgcagcggtgcaatctcagctcactgcaacctccacctcccaggttcaagcgattctcccacctcagcctcccaagcagctgggattacaggcacgtcaccatgcccag

SEQ ID NO: 21000 - DNA, 1095 bp, Homo sapiens
ttagatttgaagcctctttcctgaaatctgcaaatttagagagagacattacacaatgaggaatggcatcctgatcttaccctgtttgaaaggaaaccaatggatagattgaatacttcttttcccactaacatttatcattgataaccattcccttcttctcaaaagttgttccctggctcccaaaatatccattctctcctcactctttgcttactacttgggctccttcatggttatcttccaccaactccttaaatgtggcagtttctaatgtcacagatgcttcctttctccctaaggggagaagttaatccccagccggtctattcaataaaatccttaattattagtctaaattgtccttcttgatctcttacctacctatatactatctagtcccagaatttttcctaagaacattatacccattacttaattaaatgtaattaatgaatgggtattacattatacccattcactccacatacttcctacagagatgcaagttggtgtagagatctgaggaacaaacgatagaaataaaatctgtccatttgcatagatggactctattgtattaaagaacagtttagaataactcacagctagcccaggtattaccctgaaacaaacagaggttagaatacacataaattatatttgccttaatttgtatttttgttttaagcaggataaacaaaacaaataacctataaaaagtactttcaaaataataggtttgggcaattttacatgataactctaaacaggattgctgaacctaggcactattaatatttttggccagataattattggggggggcaagggtattatcctgtaaattgtaggatgtttagcagcaacccttgcctctattcactagatgccagtagtcctctcccatcagttgtgataaccaacactgtctctagatattgccaaatattctctggtgtgaggtggggggcaatgggggatttgattatactttttattttgtatttatttatttacttgagatggagtcttgttctgtcgccccgactggagtgcaatgacgtgatcttggctcactgtaacctctgcccc

SEQ ID NO: 21001 - DNA, 1026 bp, Homo sapiens
tcatctaattctcaaacccattcacattctgctatttgtcctggtaataccatttttagcaaaatgatacatattttgtgaatgctataaagaaggcaccaagattaactttttaataaatgaatattcaattgaaataacatcatttatttaaaaggccatcctttccttgctccattgcagtggtacctttgttgtaaaggcgatgggcatattatgtgtagatctctttctggactctgtattctactctattggtttttgtgtcaataccacactgtcttaattacagtaactttgttatgataacatgataagcactatgttagagacttaccatttaatacctggccaaataatcaaagacaataaaggtaaaatatggatattgggaagcattcaaagactcaaaaattatatctcccatgctgttttactttggaacctaatgcaaaatgtgcttcagtaaaataaagagtaaatcatgacagggattcagtaaacatgtgagccatagaacactactaaagagaaatcctgggatgacagctgtttagcgggtgtaggggagaaacaatccaaatcagaacatctaaagtacataaaactgtgtttgagtgttttgaaaatgttaatattcaaacattttttattatgatttcaaaaatcatagtcaatgtttgactaacatttcaaacatgactgtgtcagaaatgtttaaagtccaagaagtgaaattacctatgcaacatcatacaaccggtcagtaggaaaaaaaaaattcaggtacctaaaatatgactacaatgttgtttttcatatacacacaccaccaatttgcaacccttttttaaagcttttaaacattttttttatttctaaacaaactcaaactctcagaaaagttgcaagtaccgtacaaaaattttttgtctgaaacatgggaaaaagtaataggtctataggaaaacatatgttttttaaaaagataattgttaactccagaagaaaggggaagggagagat

SEQ ID NO: 21002 - DNA, 1048 bp, Homo sapiens
catgcagaaaaagcatttgacaaatccagcatctctttatgattaaaaccctcagcaaaataggcatacaagggacataccttaatgtaataaaagccatctatgacaaacccacagccgacataatactgaatggcaaaaagctgaaagcattccctctgagaactggaacaagacaaggatgcccactctcaccactcctcttcaacatagtactggaagtcctagccagagtaatatggcaagagaaagaaaggcatcgaaactggtaaagaggaagtcaaacggtcactatttgcagatgatgattgtttacctcaaaaaccctaaggactcctcctgaaggttcctagaactgataaaagaatcagcaaagcttccagatacaagattactgtacacaaatcagtagttcttctatacaccaacagtgaccaagtggagaaccaaatcaagaactcaaccccttttacaatagctgcaaaaaaaacaaaaacaaaaacaaaaaaatcttaggaatatactgaaccaaggagtcaaaagacctacttgtagttttttaaggaatctccatgttgttttccatagtggttttattagtttacactcccaccagtagcgtaaaagtgttcccttttcaccacatccatgccgacatcaatttaattatggccattcttgtaggagtaaggtggtatctcactgtggttttaatttgcatttccctgacaaatagtgatgttgtgcatttttttcatatgtttgttggccatttgtatatcttcttttgagaactgtctattcatatcctttgcccactttttgatggttttgtttttttcttgctgacttgtttgagttctttgtagattcttgatattagccctttgtcagatgtagagtttgtgaatattttctctcattctgtgggttgtctgtttgctgattatttcttttgctttgcagaaactttttagtttaattaagtcccatctatttatttttgttttggttgcatttgcttttgggttcttggtcatgaactctt

SEQ ID NO: 21003 - DNA, 1035 bp, Homo sapiens
cccatatgactccaatctcggttcaagaagagttcacaagctttaagcttccttccacgcagcgactctctctctccctccctccctccctccctccctccctctctctctctctctctctctctctctccctctctctctcccctctctcttcctgcttctctcctcttttctcctctctctcttttctttcagcagccagatccagggctgaattttctccgcggctgctaagaaagtctcaacctttctctgtcttcctttcttgttatttttctttctcccattaatttttttaagtcctggaagatggcctatcccctctctcggggcttccccagctattgttactctcctggctctccctggggtgtgcttggcaaggtggggttcttgcggggggctcatctcccttctccagcgagaccctggggggaagccggcagccaccgtctccctccctccctcccgaggagccatatggaacctgaatttttccaacatggaggcaagggaaatagatctgtttggcttggtagagttgttccccaccccctcttgttctggatcccagatcttgggtccccttagcacctttctctcttcccactgtcccgtccgccaggcctcggcgccctccaacccggagccctgctgagcaaagtcccgaagcggagtttctaaggcgccttttaattcggttacctccagctcccaaaacttgctgccgcccgcggggctcggccctcggccggctggtgtgctgggaacctgcctccgataaccgttttggtgtcctgatcgcttgctcttcttcgcctccttgggccatcgtaggtggctggtagcttgtcgccagtcgccgcggcagcagcgaccggctgaggcagcctggcagcagcagccagggactacccgggtgcacaaaccttcccagccctgtctgcaccaccggcggagtctccattctttcctatcgcgtctctggctccttcgctttccacactcgcctggcctccgtcccgcgatggtttg

SEQ ID NO: 21004 - DNA, 1575 bp, Homo sapiens
gaactttcacctccattccacatctcctccctcaaactcccagccttaacaagcggatgcttcccctactaatctccttcctcccccatcttacaggaaagaacaagaaaaggaaaaagagaaagcaagttcctaccagcctaagcagctttagaaaactcgagggaaaaggggagatgcaaatctttctcgcccgtctgatccttcctattgccccctcgccattgctctgttccctccattgccgccctccctgtccccactcctgtcctgcccagaactctctcccttcccctcccttctctgccgggtcggacatatggaacccatttcgctggtgacattgaagagtcgccggtgtgcccgccttccgccatggcgcccccggcgctccctacgcctcgccgtgcccctgtcagttgccgctcctctcgcctggcaacttggcccgctctcaaagcccgagttcagctcggtgccagacgagcccggggttcccgcagccctgcgcggcccggacggagtgggagcttctcaggaaactggcgtctgccgcgcccggagtgccagatccgcgcgctcctggggccctggaggccgaacaaagccgggggcgggggcgggggcggggtgggggcgagcgcatccgggcctctcccccagctcggcgggacgctcgggggttgctgggggttgctgcgggttgagcgactaggatgcggctggctgcggcggcggagccccagcctgggccgagggtccggggcctggcagtcggcccccgcgcgcacccagcgcccggccgcccgccgttgcccgcgccctagcggaagaccgcacaggtaagtgtggggtgcggagccggggcgctcggggcctggcgggggtgcagaggtgggtggctgagacccccgcccccaggcctctctcctgggacaggccgggatccgaattgaagacgaagatgagagcaactttgaaaggcagggtgggggcttcaagggggtaaagggacctgggggtggaggacgagtgtggaggaatgtggagctgtttgggtgggcgtgtggacatgatcttgttaggggatgggagagccctcccgctcagaaagggcgttgaggcccaggagggttttccagggcagttgggggctgtgggtactgagggaaatgtgaggggcatctgttaggggcagtggggttggggggcgaccgctgggtcagcttccacaacccagctgccaccattgcccaaccctttagcacctagcgggttatttgaaggcaaaactacaagggattgcactgaggctgagtgttaagcccagaaggtaggaaagggggtgatttatggcttcagagaagctgtgtttactcctgcctgctctggaaaccaaaaaccaaacagagcagaggccagagaagcccctctccttggagtgggaagcgatgccagcctgacgcactgggatttattttcccagatgagggagaatagtgggaactgtccctttgcaggcgcacagtgtggtgggtgtatgcaaagggagcatgtaagcaggcacatgtgtag

SEQ ID NO: 21005 - DNA, 1455 bp, Homo sapiens
ttgctgttctttttcttgtccttaaaaattatttctccgttttagagattgctgtcttcccacatccagcatttctctctcctctctctgctctctctctattttcattttagactttagcagagtgtttttctctggaggaccatttttaatggatttgtggccagaacgtttcagggagttgccctcgctggagccgggagcagggcccacatcgggatcaggctgaattcaataccagtctgtgttttgtatctggacaatcaaagctgaccacctcccctacagagtccaggcctggccggcgcccccaccccatgaggccagagcagattccagtgctcttagctggggcagaagctgtgcagctgccactgtagctggaacctccgaggccgacaccggggtggctgtttctttggggcttgttaagacaaccgggtcctcaaccttctctccactgagttgcttttggtttagaccccttcgaacaagccgggggaggcccctcagacccctgctcccgtaccctgaagctcattcttcctggattccctgcctgccccggaggctgtggtcctggctgcctccagagctgctgaggacagataaggctgcgacttcttcaggaatgtcttttctgcttccctttgcatccccaccccccatcccatgccccggccgagaactctgattctagttgcacgtaactggtcaagtttggatggggggttgtttttgttttattttgtttatatttgagttgaaggggtctgtgtgtgtctctctctttaggcctggggaatagatagtccctggtatttaaccctttaacaggcatagccatcccccatctttttcccactgatcagcctccattgtttgttgattggaagctcggggtgctaacacctgggaaatagggatcctggggctgccaggctgacttcaaagcttttcttttcttttccctcctctcctgttcaaatctccagctgtcttcactggtgggtttgggaagggggggaaatgagacagggtgtgacataggtagagagaggctgacagtccgattcttttgtgtagaaaccttagtcccagtctttgtctctagaatctattttcaaacggtcagtcgcatttgatttcctatagtagtaacaacacaacagggaaaaaagtcccccttgcggttattctcaactctggaagctccagagtaatctcttcaccctgtcccttttttgccccttcaaaaggtaccagaaaagatcaaaacgagaataaagccagaagccccattatttatccacttataccatggacttatgaagtgtttattttcaaagtggctccttcagaaattttgtccattatttaggaagagagggagtgggtctcactcaagtaaatatccccaggagttggggaaaaaatggagttggggagggaacc

SEQ ID NO: 21006 - DNA, 1026 bp, Homo sapiens
gagctctctatccactgcccaagcctgacttacaggaaatccttaacaggctttaagagcagagtcaccctggtttgaagacatatcatcccaagaatgatgagggcatttgtatcccttagaaaggagacacaggtcatctcccaaaggatccccagcaccactgaaaatataaagaagtgctggaggcacagcttccacagtcttccactctacaaggcaacggagttgacagacatgcagacaaagagctctgcaagggagagtctgacctgggtctccaggggaaccccattcctattgtgcccctggcctcactctaatatacttccctttctgaaagcccttctggaagctagaaccccagatagtaaggcctgctcctgaaaaattgtttctttgccccctctcatgtcagttctgtaggctctaacatctactaggcatatctggtcggattttccaggatggcaaagagcaaattggggtgcccacttccacctcagtgaacaaactcttgaagggtctcctccagctctaagcaggtcctggagaagatgccctaggctgggctttcctcttctccacttcaggctccctgagctgaaccccagtcctgtctgaaccccagtcaggacaagctgcgggaggcaatgagaggtgtgaagggatttctgatgccaagaactctctcctctgccccagacctctgtcctctcctcctgccctcccaggctgtctccctctaagagagctgctctactctctccagggctttgctctccctcctctcccacctgctttctctccctgccagtccaggcttcaacctcttgagctataagccaagccggtaccctctggccaaatcttcaacctggggcaggccccaggaggtgacagctggagattaaggctgcagtttctcttttccctctgaggccagcctggccaccactcggtggacaattcaattttgattttttttgttttgttttatttggttatttgttttgttttgtttct

SEQ ID NO: 21007 - DNA, 1251 bp, Homo sapiens
tagaggagctgacgaggttaaggggcctggtggtgctggggacaaacactgtggctgcagccctcaccctctttcggcgcctctggagcagctctttatagctttcctgcggcgaggtgactttctggtggctataaggcccgactcaaggagctgctctataggaggccctgagggagccagccctagaaggtccttggcccctctgagattttgcttttgggcaatccaaaggacatgtagagaagtcaagctggtacatggtattgaaacacttcagggccctcaggttgtcccctggacctgcgggtaggaaaccgggagagtgggttcagcactactgctcactcccctaaagatcaaagaggatgccgctcctttgcataatgaaaatgaagtctttgtactttgatttggaggggccgattttagggcaaagtgtctcatctaaacagcctccctcaacctatgggagtgatcactcagtacccctgggaacatttatttatgttccccaaacccagagaaacagagtccaggacgagaattgagttgaaatattttcatcccaccccaccccagccaaagttgggggtggtgggagaaggtgctcatcacctcaaagagctgagggagagggctttatagcttagaggaaattggaagcctggacaatgtctcagcaccctcccacacacaccacaccacaccacacacacacacacacacacacacacacgcaaatatccctcctgaggttacctatcaagaattttactcccgaactgaacacaacttaggaaacattttcctgggagctggaatgtgttagcttgcccacaggactgcagactcacagcatagaaaattacaattataaatcctgcctgtggggtatctgtacaatccctctgttatgtactcaagaattggtacacacttctatccatctctctgaacacacacttcctcattgaggcagggagagacaccccagactggcggatggctgagcccgctgtgtatttacatattcccccaaggagacagacagagggcggtggaccgaaccacagacagattcgtagggatctggctccagaaaggagtcggtctctggcctgccctgcccgcctgctctttttcccaaacaaacggatcagacgaataaacgctcataaatacctctgggcttagataagagcgatgaggcgctattttctttcatgcccgactccaggcgcccaggcc

SEQ ID NO: 21008 - DNA, 1001 bp, Homo sapiens
ggtgtgtgatggttataaaaatgtacacacaaccttttgggtaactgatcttcttacacgagcagaatcagaaacctccatcactcacagaggttatgcatgcatccacatatgcacgattagatcctgcatacacgaacgcccaagcacagcaagtttcatagttgggcagatttatttattacatattctatatacagtatagagcagagtgcatttgcacactgggttccccatacagaaatattgatttgaaatatacatataggacacacacatctatttacattaaacacgcgtaaatttcagctaagcttattaattaaaaacaaactatttttccccattctcacttattgtttttctttcttctcccatttccttcccttcctctagattttctctctcttcttactgacaaggacccttccaaaagtcacccccacagcataggcactcaccggctggtcggcctctgctcttcaaacctcggcctcactgttggctgctctgggccccagtgtggccaggagctgcgcttttttccctgcttgcccttctccaagctaccagctactggccccagctgtgttcaggcgaggctccagtgcagggaatggcaaaaggctgcaagggaaggcagggttttccttctttctgtttaggattgggggtggggtatggagcagttttgctctcttaggataaggtgacccccactgaagcaacccctttactaagtgtctttggaagctgggctccaggagccacaatcctgtttgctatcctccttcatggtgggtaccattgtctggggagaaaacaaggcttttttggtgggagggagtccacagtctctcagctgaccctttaatcatttgcctgagctggagttgaactccagtttggggcagcagtgctttccagaaagcttggctggggtgggactccttgcttggtgcatttacctggacggcaaagagctgggatgcagactacag

SEQ ID NO: 21009 - DNA, 1058 bp, Homo sapiens
agcggatggggccttgattagctgtggatttctgtcccagcgcactcatttaaccgtgtttctcttggttggcagagggcgccaaaggcgacgtgccggccgccagctccaggccgagccccgagcgcctgcaggaacacgccccttcacccggcgcgggacgcagagctgcgagagaatcttgttcagcgcggactcaacgccagggcgccgcctagaggttggtctctgtctcggcctcacccgccgggagaccacagagctgcttccccagccgcccgccgccagaaattggaaaaaaaaaaaaaaaaaaaaaaaaaatccagctggggtctaggaactcggcttctggcacctctgaattctccgagactgtctcctccctccccgcctgtaatgaaccctgtgaagggagacaggccaggaagtcccagaaatatttattcttgtgactctcacaaaatggaaaagggtctcaatttttgtttctttaaggaacttgtgttctgcgtctgtgtctacactgcctcctctcaccaaccaaattgtctagcccccctccagttacgctagaactctgctttatcttcaaggaagaaagggagtggggagaagttacctctaaaccctccagcatggccatcaattttctgaataatttggaggtcaacatgcttttggaaaagtgtttggaaaacgtttgggggtgaaaagaaatgttgcctaactggcctttactcacggagtgaccatcatctcagctagttagtgtatgagcggcaccagcaccccggccatgggtgtctgtgctgagcctctgaaagttgacttatcctttggggagccctcggaaagacacagctggtatctatgggaatggctttggggtgtcctttggcaccatacagataattttgtttttttaattggaatccatggcctgggttcttgggatgggggtagggggaagccacaaagcccctggaaatgtatgcaaaacatatgggtgtgcaggtgcatcatcctaaggctatggcctcttcagtttttccaaagag

SEQ ID NO: 21010 - DNA, 1042 bp, Homo sapiens
ctgcgggagttagccagataatgctctccctgtcctacccgtccccaccaatttgccttttacctgccgcagagcttgcttgaaccaaaggggtttgcggtcttctcctcctcaacttgcgatccccaggccttcgcggcccgggaaagaatccagccaacccttctgcctttgtctgaccttcggggaaaagaggcgtgggcgcctgggtcaagttcacggacctggtctgtgtcttttaggacaagcgggggcaccgttcccattctgacgaggagggttctaagcatttgggacagtgtgggggcgaaaatgaagctgcgagaaaggactttcaatcttaatctgttgccctagtctcacatcccctccccctcccgcagccctgtagaggagaaataattagatccgaagggaagcctttgatttggaaaaatgcgaaggtctcatggaatgagcttcccagaaatggtctttggcacttgggtagttttgcgttgagttcggtgccggcgtttatgaaagttaaggatttgcagtattcggcacagcggtttctgtggaattcgattcagagcaaacgagatcacatctacattgctttccaaaaagcttcagactcaacacattgaaataattttccccaacatcctggttcctacccaccccccccccctttttttttttacagggcctgatgcaaaatgatgttcctgccccttaaaaaaaaaaaaaaagagcctcaaagtggaaaaaaaaactatcccgatcgcagcaagtagaacacgggtcttaaaacacagagctacttttaaaacttttttataaacagccccttttaaattaaaaaaattgtttcaacgtgtatgttttataatttttaaccactgttaatagttactttttgttccccttcccctcaacctagttatacacaacctaatttggtttgaaaacatactgtacattttctgtgtcctaagcaattcctcaagttattgcagtcttctaagtgctatttttagattgcataatatgcaat

SEQ ID NO: 21011 - DNA, 1132 bp, Homo sapiens
ggctcaagcagtccttccgccttggcctcctaaagtgctcgggattacaggcgtcagccaccgtgcttggcctaaaaaattatttttttagcagacatttattgagtgtttaatatgtggcaggcattttgtatactttggctttattcctttcaacactcagtgaagtagtaggtactattatttatttatttttattttttttttggtttggagtcttgctctgtcgcccaggctggagtgcagtggcgcgatctcggctcactgcaagctccacctccaaggtttacaccattctcctgccctagcctcccaagtagctggactacaggcgcccaccaccacgcctggctaattttttatattttttgtagagatggggtttcactgtgttagccaggatggtcttgaactcctgaccttatgatccatccgccttggcctcccaaagtgctgggattacaggcgtaagccaccgcacctggccttaggtactattattaatctggtctgatagatggaaaaacagacttacagaggttcagtgaattacatggggtcatgctgagagcaagtcgcataattgggactgtaaaccaaatctgacttctgagaacaagtgctaaccactacgtgacactcccacacttatattttaccttgtactaattatggtcccttggtacctgttgcccccaccccccccccttttttttttctgtgagagggagtcttgctctgtcacccagactggagtgcggtggcctgatctcagctcactgcaaccctgcctcccagtttcaagggattcttgtgcctcagcctcctgagtagttgggactacaccacgtccggctaattttgtattttcagtaattcctacctctcaaagtttcccagaggattaactatgacatttccagaagtttttgtaaagtgtgggccaccatgcccagctgctttttatatttttaatagagactgggtttcgccctgttggccatgctggtctcgaactcctaatctcaagtgatccaccccactcagcctcccaagtgctgggattacaggtataagcatccccatcccctcttaacacacatacgcacacaacgtgtacacccttggggct

SEQ ID NO: 21012 - DNA, 1052 bp, Homo sapiens
ccttatccaaacaattcaactgtctaaacctttcatctgtaaaatggggataacataattatttacctaatgatattggacagaaaccacccattttgagcatattatttccagctctaggaactgagtctattcttgcataagtatggtcaatcatgtttgctacccggaataacttaattcaaaggtagctaaacagtgatctctgtttaacagtttctgggaaaatggaggcagtgatttgctgaaggccacacagcaaatatttctgtagctatgttctttccactatattccactatgctaggctttacccctcttccccagcagcacaagttaaatgacttcgtagcatttttcaaattcaggcaaaggccaaggccaaacagctcgtttagttggttgtgtaaaggtttgaaggcacttagtagatttagtttgaaaacctcactgaagccaaaataggtgtgggggttgcttacctaccctttgtctatggaacctccctgttctcaaactgctcttcttcccttttccctccaggaacacctgctgaaggaagggttggcgtggctggacttacaggccccaggggaggcccactactggctgccagctctcttcactgacctctactcccaggagattacagctgaggaggccagagaagccctcccctgactgcatgtggaagggcacacagcagcaggcagggaggaggcggaggtggcaaataaacctgggcaattttgtttatacaaaaaatagaaaaaaagttccaagtttttctttcttccctcattcttttatttttgaaaagtgccttcacgttgcatttttattggaggaaaacctcgctcgttcagtaagcataatctgattaacacagagaacggcaagcacatataaaatgatttttgtaggtcatctgcaagttcatggaagagctgggcctagaatgtgggttgtttcctggcctgtctagtctttgtagctgtgagacatagattacagcctatgctaattcaaaccttttaaataaaatgttcctt

SEQ ID NO: 21013 - DNA, 1035 bp, Homo sapiens
cgccagcacgcccggctaagttttgtatttttggcagagatggggtttcaccatattggccaggctggtctcaaactcctgaccttgtgatccgcccacctcagcctccgaaagtgctgggattacaggcgtgagccaccacgtccaactgccttattttgttctgaataaatttacagtattgggcagcaattctggattctagacttgagaccacagaatcaaccatttcatgaggttgtactgtaattatacactggaatattcaggtagtcatctttgatttttcattcaagtaaatatagccataagaaaatatctgctatacaggaaaaccagtattaagcaaataccaccatccttaacagaaacaaaaatatatatatatattatttttaaaaattagcattgtcatacagtacaattcttagtgaagtgtattgtggaacaatttagaaacttcctttttttcccctagattaaggatactttccttgacttgagacttgtggtcttcaggaaaactactcagaatataatgactcctcatcagtatcatattgtatataaataatgaaatgcattaagaatattcacaacattgaacccaggaggcggagcttgcagtgagccgagattgcgccactgcgctccagcctgggcaacagagcgagactccatctcaaaaaaaaaaaaaaaaagaatattcacaacattaatgcttctgaatagaagaactgcaggattaagccttaaacatatatgtgcaacacgtttaacatgcttaagactcaaactcagggttgaaaatttggttggggtcctctttgtaagataaaagttgcattatgtggtatgttctcttccatatatgctacagcaccccatgaattcttcaaaactttttacctacttgttatctgtttatgaaaaaaagaattatggagaagtttgagttctcagcccttatctgtacatgtctgttaaagacaacaaaggctgcatttaagcattatatagataacaaattgaggc

SEQ ID NO: 21014 - DNA, 1021 bp, Homo sapiens
caccctcaccacccacaccaccttcccatccctccagtccctcacctcccgccacctccagctctctttaagagtgagcctttaaatcatagaggccagagtgaggacaactttctgcggcacctggcagagaagaacagttcagcacagcatcattaacatccgtctccttagtgtgttctccaggagacacgtccccatgtgtgagcgtgcacagagggagtcggtgagcatttccttagttctcagactctcctccgcctctaccaagagcttcgccagtgtcactgaatcaacagatccaagggaatgaacaagaagactaccttgagctcacagagggactgtcatctaaaccaggggaaccactgaactaaagcccaatttgcttgcattttctgatgacttttataagtttcaaatactcagacttgtggaattttataatttcatatcagctgatgaggtatgcttgcttttatatcccagacttctcctcaaagaggggataggcctggtttcctttgtactaatcgggaaggctgtgagattaatccagagcattaattgtatcactgtgtatggtaaggaattcttttcagcttttggtgccagctacagagttgagctggccatgtttcacagtatatcaagcattatagagaaagacagaaattttcttctttgtgtagctctcctaacgcactctttattttactacagaaattattttagagtttttgtatagacttctttggtagtctgtttctaaaatgaaatgtatttcaataagcagtgtaattttttcagtgtagctgaacctatgttgtaaaatagaaaaaaatttttataatcatcaaaatgtgattcttaaagatgcatataacttctataattcaaagctattcttacatccgtacaactcaaaaggtgcttcagagactagatgtatctgagagggtctccagaccaggttactgcaaaaatgaggttttgctttcaggatttggcgtaaatactt

SEQ ID NO: 21015 - DNA, 1067 bp, Homo sapiens
atctcaaaataataataattattattatttaagccctgtttcttgtgatttaaatgcatgctctaaaaaggaaatagtggtattacctgatttttttcctctttgcttttctttgtagataagatgctcccaagtcccttgcagctctcttcagaagaaaaatcactagtgctctgctcttgccataataccaaacctttttgactcatgctttggtgctgcaacactggaagaattgcacacagtttccaggaatatctttttttcatttgagtgattctttgtggatgagaaaagatttgagtcttaataattaccttgttttaaagctatttctttatagtctgaactgtttaataaattgggccacttaccaatgagccacacagccagttcttgtcaggagctggttgaaaactgtgctgtgcatgtagcaggaatggcacaagaagatagccgtcgtggtcaagtgccatcttccttttatcatggtgccaaccaagaacttgacctgtccaccaaagtgtacaaaagggaatcaggaagtccttattctgtgttagtggacaccaagatgagcaaaccgcatctccatgaaacagaagaacagccatatttcagggagacaagagcagtgtctgacgtgcatgctgttaaggaagaccgggagaattctgatgacacagaggaggaagaggaagaagtctcttacaaaagggagcagatcatagtggaggtaaaccttaataatcaaacattaaatgtatctaaaggggaaaagggtgtctcttctcagtccaaagagactcctgttcttaagacaagcagtgaggaggaagaggaagagagtgaggaagaggccacagatgacagcaatgactatggagagaatgaaaagcagaagaaaaaggagaagatagtagagaaagtcagcgttacacaaaggagaaccaggagagctgcctctgttgccgcagctaccacttcccctactcccagaactacaagaggtcgtaggaagagtgtagagccacctaagcgtaagaagcgggccacaaaggagccca

SEQ ID NO: 21016 - DNA, 1034 bp, Homo sapiens
tattcacaagattgtgcaaccatcacctatgtctaattccagaacattttcattgcccccaaaagaaacctggagcccatcagcagtcactcccccctcctccctactcccagctcctgttaatgacgatttactttctgtctctatttgcttattctggctgtttcatataaatagagtcatacaactaggtagcctgttatgtctggcttctttcacttagcataatgctttcggggtttttccatcttgtaccacatatcagtactacattcccttttttttttttttggagatcgagtcttgctctgtctcccaagctggagtgcagtggcaagatctcagctcactgcaacctctgcctcctgagttcaagcaattctcctgcttcagcctctcaagtagttggaaccacaggtgcatgccaccactctcagctaaattttgtatttttggtagagatggggtttcaccatgttgcccacgctggtctcgaactcctgaactctagcaattcacctgccttagcctcccgtagttctgggattacaggcctaagtcaccatgcccggccatttcttctttttgagacagggtctcactctgttgcccagactggagtgtagtggaatgatcatggctcactgcagcctcaacctcccaggctcaagcaatattcccaccttagcctcctgagtggctaggactacaaatgtgcaccgctacacccagctaatttttgaaaaactttttgtagagacgaggtcttgctatgttgaccaggctggttgcaaactcctgggctcaagtgatcatcccaccacagcctcccaaagtgctgggattacaggcatgagccactacacctgacttcttcattcctttttatagcagataatattccattgtatgattatatattttgtttatccactcatcagttgatgtatatttggattgccttttggctattataaataatgcttctgtgaacatttgtttacaagttttcgtatgaacatgtttttggttct

SEQ ID NO: 21017 - DNA, 1084 bp, Homo sapiens
caagaagacgagagatttgtttgcttgtgaaaaaaaaaaaatatattgactgatcttctcaactaaagtacaaacactattagtagtatatatatttacaaatggaatttatatgaaataacttgatattttaaattacagtttgtccattggagttaaacagtattgtgatggtgtatgttatatctgtaagctaaaattatatagctaatattgcagttaacattgacaacctgtgaacttagggtcttttggctgatggctaactttttgtttgtttttttgtttttgagacagtcctgcgctgtcacccaggctggagtggtgtgatcacagtggtgtgatcctaactcactgcagccttgaactcctgggctcaagtgatcctcctgcctcagccccctgagtagctgggcttacagacatgtgccatggcacctggctaatttttgtactttttcctgtataggtgggctctcactatgttgcccaggctggcctcaaaactcctgagctcaagcaatcctcccatctcagcctcccaaagtgctgggattacaggcatgagtcactacatcagactacatgcttattttaaaactaaggattctagaaaaatatgaagaaaaaaaaatatggccttttccacctttacttctatcctgagacatctctcaatatgagcgcacatatatatatatgtatgtccgtggttttgagtagtgaaattgcatgacaccatcctcacatgttctttaatcttttttatatggtcatatttctatgtcagttattataaatctgcatcataattcagatggttatacagtatgcctgtgtctgtatgtaccattatttatgttataataaataatgctataatgaatgttcttgtatacactttttttatacttaccatcttctggtggtgaattcttcaatggctacatccaaaaatatgcacgtttcacggttaggaaaatagtgctgaattcccatagtgttatgatctgtaatcagccatgccagttaatgtcagaagtcagtcaggttttcttggtattagccagtttgggatttgtgc

SEQ ID NO: 21018 - DNA, 1032 bp, Homo sapiens
tgtctcatgggcgcttggtccatattgttgacatctgtaagcaagccgtgacagtgctttggctccaggcaggcctgaattgtccaggggaaagtataattctctccctggatcctttaaatggtccaagtaatgagaagcagaacataggatcagtctgttaaccccttatatgtgttacacatttgacagagtgcttttacgtctgttttctccttcaattttccccaacatttccgcaaggcccagaaagcaaatgaaattgtccccattctcatagacagggaaataagctcaggttggctaaggcttagagaggccacatcattagtaaatagcccagatctttggactgatagtctaacaccgtttccaccagacccgaactaacctctccaaggctgactcctgacttggccacaatcaccagagcatgtaaaggcctcaccctacaattcttagcattgccctgtctattgtcttaaaatgttcagtgttgcaaactttgcatggcacctgttagacatataatctgaattatgtatatctgagggcattcaggggataccaaaaagctgctatcactgaagcctcttaagaaattataaactctttatgatgctctattgggttctctgccaaggaaaccaggcatacctgcaccttgccctctgggatcttataatcagcagatttgcttataaattgtagcaaatttggagccaggcacagtggtgcgtgtcagctactcaagaggctgaggcaggagaaatgcttaagctcaggagcttgagtctagcctgggccacatagcaagaccttgtctctaaaaataaaaaataaaaattgccaggcgtaatggctcacacctgtaattctagcattttgggaggctgaggcagttggatcacttgagcccaggagtttgagaccagcctgggaaatatggcgaaaccccagctctacaaaaagtacagagattagctgggcgtggtggtctgtgcctgtgtagtcccagctacttggaaggtg

SEQ ID NO: 21019 - DNA, 1072 bp, Homo sapiens
acctaagaaatacctgtaaactgggaaaatcttaaaagtactgacttgaacacataatactatgcttgtttctaggttttccttatatacaacagttacaaagtagttcagctcttaattagagaaatatttggctatgccagaaatgtgttctacatcttagcctggtatagaaaaaatttagttatatgcctagtcatgtttttacatatgtacatatttacactggtctgtatttaataaatgttagttatcttttctccatacatccagaatccaacccagtgtcagatacaaaaacaatagatcaaatataagtagatgctaaggatttccctcacttaatatattggaattttattataatatatagtatttaacttgaggcaaggcgtagtggctcacgcctgtaatttgggaggccaaggtgggtgaggagttcgagaccagcctgaccaacacagtgaaaccccgtctctactaaaaatacaaaaattacctgggcatgttggtgggcgcctgtaatcccagctacttgggaggctaaggcgggagaattgcttgaacccgggaggtggaggttgcagtgagccgagaccatgccattgcactccagcctgggcaacaagaatgaaactctgtctggaaaaaaaaaaaaagaagaatttaacttgaaataacttaagagtttagcttgggttcctgacagctgctgtaatggtacttctataaccaggattgacttattctgggaaatgtacttttctcactattgtcttgtggattcaggaactccccccatagctctgtacgtttcccttttcttccgttttcttggatttgaaaagatttttaatcagggaagggtataaatagttttgtaatgtactcaataaattcttaaagttggagtgacttgatagttttctttttaaaatgttttattgttttaaaagtatgcctggattcctatagctacattcattcaacaactcctaaactttaatttattaactagaactcattagggaaaaatgatcccaaaagagaaggagtctaattgctcaaccaa

SEQ ID NO: 21020 - DNA, 1051 bp, Homo sapiens
gtttggattttcagccagatagtctttcaagtatataataatcttaggggaaaccattttaatgaagcttatggaatttgtctcatgtagtagtacatacagcttaacatttttttcaagcacttgaatatattttgaaaatctgtcacaatctgaggggggcaaaaatctgagctttaaaaattgcatttgggcaggtcctgcctttctagaaaaggcatagaagagaaagttcatactgagaattctccattctagctttgtatcttttggtcattaaagggtctctctaaagaggaagagacctccctacccccaaaaatttaaatttttttttttttttttttttttgagacggagtttcactcttgttgcccaggctggagtgcactggcatgatttcggctcaccgcaacctccgccttcccagttcaagtgattctcctgcctcagcctccaaagtagctgggattacaggcatgcaccacaatgcccggctaattttgtacttttagtagaggcggggtttctcaatgttggtcaggctggtcttgaactcccgacttcaggtgatttgcctgcctcagcctcccaaactgctgggattacaggcatgagccaccgcacccggccttaaatatgttttatggtagagaagggaagggaatagtgttaactgacttttctttttaacaaatacctgctgagtgactataagcaaaagcatagtagaaagacagggaggggtatgttccaaaatgagtgggggattaaagcagtattatatgtttggtgcttagaagaggaagagttctttggggaagctggggtgagattcaggactgtcttcgtgaaggttacctttgagctgggctttgaagggtgggtattttgaaggttggatttccattggcagagatggggaagggaattgaggcagaaggaatgtcatgagtgaaaatgtggaggtggggaagctcagtgttagtatagggtgtgtactgaaaatgatgaagagcatagcatggctgaagcagaagatgggataatg

SEQ ID NO: 21021 - DNA, 1032 bp, Homo sapiens
atactctcctcagtcccatttcctacacccggattacgtggcctgcgaatgccagagccgaatcagccgtcccttctccctatctcaagcattcagaagacacaaacgcgccccctgccttcagcccccccatcatttcccagccccatcccccttgccaaatactgagctgtcgcctgcggcgagatgggtgactgcgcatgcgcgagtgtgaacgcgctcgggctgcttcttcgctgccccgggggcgcatgcgcatcgcggtgttgcagggacctgcgggataaagagccggtggagcacgagtccgccttcttcccaggctgtgggctagacttgctgccagataatgagcctgttgctcctgtccaaaggggagaatttaaattatgtgaaagacttaacggacaaagcactattctcatctggtgttgccctagagactcccaggctacaaacgcctcgcagagccagcgtgtcccacactgacccttcttttgaaactgtcactgtatcttctagttctaggattacttttccattcctatactcccatcgttgtgcttgtaccttttagtaccaacttaccctaaatttaggagtgggtgctccatcccatcacttattctggcaggggattttggaagccttgctaaagaagactaagggtcataaatggaactaagtgaggcatttcattttagtaaaattcttaattcgcagaactagataagagagataaagggcaccggccttcttactttgtgtgacctatttgccttttttttggtcaaagatcttccttagcacttttcattttatctgtaccttattggtgctctgtaacatgaaaacaaatcggaaagcaatctgaaactgttggtggacaataacttattcagtggaggttttaagtaatgtgatgtttctttcacgttggcagataacaaaaagaaatgtaaataacgaactttgaagtacaatagtatttcagtgatctaggacctgggttttcagttagcgattatatgt

SEQ ID NO: 21022 - DNA, 1055 bp, Homo sapiens
ttggaaagggccctgttggccacttcactgcaggctgcaccctttctttcccagctattatcgctgaccctggatggactgactggtgtttcccaggaccacatgcgggctcattaccaaacaggctccaaccacatgatgctgaacatcaacctttggtcgacattgctgctgggaatgggtgagagccagttctgctgttcttcccatgtatcaccagagggcaggctgccctcatccttttgatccctctagctgttagttgcccagaccaagggcctgaattagttccaagatgcccttttgttcaagcccttgagaaaccttcctggaaaaacctgcaccagcaggatttgtttgctacttgttactggcacaatgaaggagagtcgtgtgtcagttgtcatgggaagacactcagtagtaaaacacagggaggtacctgggaactttccctttcatgagggaaatgagacacacgtagtgctcacaggaaacagagttagctgtacactgaagacagttcaaatgtgaatgatttgctttgaaatcagtgcttcctaacttttcaaatttgggcacatgtagaaagtattttttatacagcacactggggttaatggtggaggctgctgatggctgaaggtgactaatgcgaggggcttccttgagctaaggatgtgtgggtcagcatctctacagcatctgaggatttctgcttgtaatcactttggtagaagtaactcattaactttcaagcctttctcacaaaattctctttagtttctctaatcagagaaaaatatgagaagaatcaatgatgagacgatgcaaacccacaccatacactttcccgcgtcccacctcccttgcagttctttaacaggccatgtgcaggagtgtctgtgtgtgtgtgtgtgtgtgtgtgtgtgcgcacattttgtgtgcacaaaatgcgccgtacatttgttgacatgtcttctcaggaatcctgttcactggggagctctgggagttcttgagctttgctgaaaggtaccctgccatcatctata

SEQ ID NO: 21023 - DNA, 1029 bp, Homo sapiens
gtgtgtgtgtgtgtgtgtgtgtgtgtgtgtgtgtagcgggggggagacctgggcagttttgccccctacctttctttctactccctccacccctctacccaccaaggctgttttgtccggggcattgcagccaacgtggcagtggggtgagggctacagtcaagtgcatggtggcaagtaccccactttctgaacagcactgaaatgggttcttaataacagcttgatgtggtggctgtggggaaactagggagaagcaaacttaaccttgctttgatactcaaatctgtgaggatcccacaaatgcaagtacttaggaaggggaaaaggaacctacttgcatgaggaggttggcaataagttgaaagtgaggcttgcatttgattcacaccagatgtgaaaagatcattgcacacttccaaagccggagcctctaccaaatgtacaaaaatcatgattcctgccgtcttaacggttaatgacattctctaaaccagagtctcttgagcttctgatgattaccaagcctagttactgcacatctccttcctgcttctgcagggctattacagaagtagtagctactacagggctactccttgctaggtaggaatgggcttaagaggatctctgagatagaaagcccccaagtctttctggacttttcactgtatatgttagcatcacatcttgggatgcagaaacttggtcaaatctggtagcaagatggtgaccaagtagtaaaagtatgtttagaatccggtggtgtagagtaaggcaatgcccagactaactcatgcctatcatgagttataaagcaaaccacaagactacaaacctgttggttttgtttgggcttccttgaaaccccgggaagttggtagaacaagaaccggaaccttagtcacttttagtggaaaacaacagaaagcctacctgtatagtagctggaaactgattagcaatcattttaagatcagttattttgtgtctattatagaactaatattaaaaggacaattgctggtg

SEQ ID NO: 21024 - DNA, 1033 bp, Homo sapiens
tggggtcgatgctgccgatgtgtttgggatgggctgggttggtgctgccatcaaagatgagggctgcaggcaggaagggaggatgctgttggctgggctgcagtctgtcccagcgctccctcttcccccgggctttcctcctctttctactttcacctccaatgcctctgtaggctccagtcctaaagctgccccactcccccgcttctgtcctcccttccctgacccctgacccctccagccctggcttaggccgtttttaaacctttgcaaacctgaaacagacgtcttttcagaggtctctccccacatcacatctccacattgcatttattcttttctttgactataacattctaagagaactcttaccaccttgctttggaaattatttgagcatgaggaacttgtttaatttatgactggctacaacttctcaaaaatcatagtgaatcctcctggaataagaaactctaaacaacaaattgtttttgaacataatgagagtttttataaatactaaattaaacattcttttaaagatgtgacataattttacattttgcaaacactgaaaacaaaacgttttgaaatggaaaatcaatgagaaagaaaaattttatttttccatgttggagccattaactccatagttactggagtaactattcaaagactccctttgtggggttctgaagagtggtctaggtcccctcagcagcccggccctgggccccagcaccgccccccccaccgcccgctccccgccgctgtggccggcacccactgtgctggttgatgagcatgcggatggagatgcggctgaggtagaagcggtccaggaagtactggatgttctggttggagacggggtcatcgccgtaggtgtccttgtactcaagcacgccttgtgccatggtgggcaccacgtcgttgtgccggttccggatggtgaccagggcgtcagtgaacctgtggggcagggcagatgttcacatgggacacccccagactcttctccgcttctgactcc

SEQ ID NO: 21025 - DNA, 1028 bp, Homo sapiens
ggggtcccctccggagcgcctccccgcaccgcagcgcctacgaggcgggcatccaggcgctgaagccgcccgacgcgcccgggcccgacgaggcacccaagggggcccaccacaagaaatatggctccaacgtccaccgcatcaaaagtatgttcctgcagatgggcacgacggcggggccctcgggcgaggcgggcggcggcgcgggcctggccgaggccccacgggcgtccgagcgcggcgtgcgcctgtcgctgccgcgggccagcagcctgaacgagaacgtggaccacagcgccctgctgaagctgggcaccagcgtgtcggagcgcgtgagccgcttcgactccaagcccgcgccctccgcgcagcctgcgccgccgccgcacccgccgtcccggctgcaggagacgcggaagctgttcgaacggagcgccccagcgcgcaggcggcgacaaggagcgcggcgcggcggctgctgaggcaggagcgcgccggcctgcaggaccggaagctggacgtcgtggtgcgcttcaacggcagcaccgaggcgctggacaagctggacgctgacgccgtgtcccccacggtcagccagctcagcgccgtcttcgagaaggccgactcgaggaccggcctccaccgcgggcccgggctccccagggccgcaggggttccccaggtcaactcgaagctggtcagcaagcggtcccgggtgttccagcccccgccgccgccgccgcccgccccgtcgggggatgccccggccgagaaagagcgatgccccgcagggcagcagcccccgcagcaccgagtggcccctgcccggccgccccccaagccccgggaggtgcgcaagattaagccggtggaggtggaggagagcggggagtcggaggccgagtcggcgcccggggaggtgatccaggccgaggttacggtccacgcggccctggagaatggcagcaccgtggcaactgcagccagccccgcgcccgaggagccaaaggcccaagcggccccggaga

SEQ ID NO: 21026 - DNA, 1029 bp, Homo sapiens
taaatgacttaatgtgtattaaagggcttacatgggtattagctaatgcagtagtatgattgttttattagcatatgcattatccatatagctttggtttatattttccatagagcctaaactttatagatcactatctaaatgaaaatttacatcaaactagtgttttaatatgacagttctagtgttgtttaagtctaagtgaagatttagggcatcttcctgggttttgggatttgtgcagtgtggcttctgaccagctgcatagacatggctccaggtaacagtccctgggactgagcagtggcccatgttggctgttggagctttcttttccctcatttgttatgagtcaataaagaagcagaaggtttggacgtgctagccagtgggaaagggaacctgagatggagctctctgatcaccctttcagccccagggcccggctctgtgtgagaagtctgtcccaaaattctgggacggaccacctcgctgaccagctgaccagctgaccaggtctgtgtgttgcaggtgggtgttgggaagaataaatgtctgtatgccctggaagaggggatagtccgctacactaaggaggtctacgtgcctcatcccagaaacacggaggctgtggatctgatcaccaggctgcccaagggtgctgtgctctacaagacttttgtccacgtggttcctgccaagcctgagggcaccttcaaactggtagctatgctttgatgtcctgttgaggccatcggacagagactggagcccaggtgacaggagatggtgataccagaagtcaagggttggggtggcgacacggcctcccgaggaagaggtctgcttgatggtgactctgcaggagactctgaagtgactgctgggaaaccctttgggagacctgacctggggccaaaaataaagtgagccagcgtcatgaacgcatgctatttagggacacacctggatggaactgcctggtgatctgttggtccttacccaggttctctagtgcacaccaacggg

SEQ ID NO: 21027 - DNA, 1058 bp, Homo sapiens
atgcacaggcggcacttagggcccctgaccaggttcctgaagcaggacttgaacccaggtgccctgactccagctcttggacttccagatggaccctgtcctggcttgggggcaagggaggtgcaaggataggaggttctagtccaacgaggtcacaacctcaaagccctcagcaaactgtcaagggctttatggaaggcgggccattctgagtattcctcagatcctggaagcccccatgactgggggcaggagagtcagggactgtctagccgctgccctcaggtagggggatgaaggggaatgccatgtgtctgggtgcagggtagaggacgttcctgaacctggtctcatttcattctcagatcaaacaatggaggtaggtgagcttatccccactgtacagatgaggaaactgaggttcagagaactggttgcccaggtcacacagcttggaggaagcagaatatagaatgctatctgactccaaacccatgcttccactatcgcgccatcctatcaggcagctaacgaatgataatgaatctataacaacgttattatctgagctaacttgttgagcacctcctatgtgccgggtgttgcgccttgcgtgttacattccttatgtctgaatcttcataacacccctcggaggtaggtattatgaaccatggcttggattgcagagccaggaatggaagtcgggccacctccccatcccagccacacaccggggcttactcacagttgtaggaggacggggagccccgggagcggctgtagtcctcgccgtagcggcggctgaagcccagctgcccactgccaatgccgatgccctccagtgccatgcgctccttggtcttgagggcgtgggttcgctcctgccgcagccgctcctcatccttgagcagggccatcacctgcttgaccttctcgcgcacgttgacgccctggtccttgccgtcgcggtcgatgtactggaagtccttgagtgtctggatggtgtagaggttctcgcggcactggtgggccacccgctcggagcccgtcttgag

SEQ ID NO: 21028 - DNA, 1046 bp, Homo sapiens
attaatgttaaaagagcagccactgttttgttgaaacaaacagcttaacttcagaaataagaactagcacacttagacaaacaggagagcaggggtttgaagccagctgtcgaagagcatccctgctgtcttaagaagctttttccccatagtgcctatagtttccaaagaaactcaacttcctaactgtgttaacttaattttattagaacactacagttgagtgagaacgtgcagaagatgtcaacagaagagaatgttgtgctaagataatggcctcctgctgctgcctaaatgctgaaatgaggttgagatgtttttcaaggctaacttcatggactcactctgtttagtgacttaattgtatcccaccaattactgctggtgacttactcacccttgtacagtgtttgcatagcagagtgaaggttacttattaccctctttctctcaagtgctttaaagaagaaacctccctggtgtttcttttctttttttttttgagacggagtcttgctttgttgcccaggctgaagtgcagtggcataatctcagctcactgaaacctctgcctcccgggttcaaacgattctcctgcctcagcctcccaagtagctgggattacaagcatgtgccaccatgcccagctaatttctgtattttagtagagacaaggtttcaccatgttggccaggctggtctcgaactcctggcctcaagtgatccacctgccttggcctcccaaagtgctccgattacaggtgtgagccacccggcccagcccctcccttgtgtttcaaccaatcggaagtgaatttaactagatgtagtaaccttttttttctttacttctaaaacagttacagtttactaataaagttaagtctggttctgtcctagaggaaataaattcactattaattcatgtcttaagttacttgggttaaaacactttcagccacccagattaattaaagtggagcagtggagcccctggctgggagatggcctccagaggagcagctgcagggcatgttctgggctta

SEQ ID NO: 21029 - DNA, 1035 bp, Homo sapiens
gcacattgaggggcatactgaagcatgaaagagtggtaaatttcacattttcagatgtcctcaaaacatttattcagtatctgttgctcataatgctttatgacaataattaaactcacagtcactgcatataagtgggtagagcagataaaaaggaccaaataagatattagcatcatcagatgtacaatggtgtggaacagtggcaaggatggtcgtatgcttctctacatgattaaaaagcttagcatcactccttctaagcaagaatgcaaaattctggctcatatatcacaccagaggggtctttgggagaaagggctgtcaccttggggttcctgaaacatggctttaatgtgaagtgggattaagattttttgtaggacgtctcaggtacagagatacccaaagagactggaatggtgtttcagaaacttggatttcctcatcagttgtattgtcatgatggtctctcattcacaggattgttggaaagaaccaatgagatcacataaagatgtagtactcgacagttaacagatacttgtatgcttcccccacagaggcctcgatttattttcctgctattctttctcatcaagctgactttcccctgcgtttggccagccccagacaagtgacagtgggtttgagttccaaattcaggagagcattttcagctgtttgcctgttggtgcattttggcctgataggcttctgagcaagcaggcttttactatgtatgccgtctacatttctgtcttggagagtttgcctggggctgttcataaggaactaggagcagaaatctggcatgtgattcttacagacatctcaaacgttgatccttcctgaaggagcctagctggagaagagcagaaacggggcagatgcctctaggcaggccttgactgatttaaagtcccagtcctgggcttcactcgattaagggtttatcagaccttcccacccatattaaagccatgtttctgggaccccgcagtgacagccgtttcttcccaaagacccctctgg

SEQ ID NO: 21030 - DNA, 1092 bp, Homo sapiens
gaaataaggaatacttgaaggtttctcctttttttacacttgagtcatgtgcaaggttgaaccatatgaaattgccagtgttcaaccattgctgatctgcaaaagcgacaatatcatatgcctcaacctaacacttactcttaaatgcaggttaaaatctctgtgaggcaaagggataatattctctaggaactcacttttgagagtatttttctctaacccatgtggatctaaattttaaaaataggaatgaatctcttaattgcagcttgtggagagtataaaacattttgagcacaatatgcagcacataacttttcagattgtgtttgcatagaaaaggttaaaatcaattctttcagttactgtattgttcatttcttgtaaaggtcttcctacatttgagacgagaccctttaacataggctgccttagtaacaaaataaaacagatgtgtcataatattaactgtcctaaagaacatgtgtcttgcaaatgccatggaactgaatatttatttccttgtgagtattatgaccgttaccaaaggactcaaccagatttagggctcttcttaattgatcatgttcagaaagggactcatttggtcccactttgtaacatgggaagagtagaagagaaaattaaatgtggaaatcataaatgcttttctaacagggttatgctattctgtaacactaaatgtctgtcttttctcttaaaagattaagttttattaattttgtcatacatttctctatttgaatatatcttaaccattttatgttccaaattcgttttttgtccaagacattctatcagaattttacttgcctctataatctgaaaaatgggttctagaatgtcccacttgctgtctcttagaggctgagcttcatttctatgagcaaagagctcatttagcaatgtagttatttcagtatttatttctattatggaatccctggggttcagaatgtaactttgtacatgagatatatataaatatgtatatgaacatgtatgaggtctagtgtgttttgttttgtttttaccgttcctggggatctgaacttggtttttatttgcaag

SEQ ID NO: 21031 - DNA, 1071 bp, Homo sapiens
agttttgggcatcttgttcatggactaaccacgagcattacatctgactcacatcattctatattttatgtgttcagcctaacttgagtcttcttatcattcactaggtgatgaaggtggagaatcagaacttcttggagaggatcttccacttgaaccttctgtcaccaaagcagaaaggagtcacttgatagtgtggcaagtgatgtatggcaatgagtgagcccatgggaaacaggtggagatggggaagccgtctcttctgcatggtttattttccctctatccttttatttaatgctcttttgtgagataagtttcaccacataatgtgtgagcattttttcctgttaactttatattacaaaatccgttctaccataacaatacagaggaactagctgtgttactgcaccagtgttataggtaacttcagtatattatgaacaaatcaaagaatgtttacttcctgcaaactggtgaattatagaaagcaatccagatgtggtttactctgccacagtctaatgtcattcacttcatttgatggggtcacttgttagctgtcactaataatggaattaatgggaaacacttgataaatgaaactgtaccgttaaatacaatagctgagttttccccagtgtattgtaaaattgacacacactaatacaagatggattatcaggatgtatctaaatgtcccgagagggttaaaagctaactgtaaattactttaactttcactttcaaatctgacaaatcttgtttatatggtatataaaactttgttttcatcagatttgggggggttttatattaaagaaattaagactacactatttaaataaacgtttcctgtttctgacttattagagctctaaagtttatgaggcctacttctctgaatattctgatgggttttttttgagaccagtctcattttcatactgacatgtctgaaagatttattatttataaagcttaggacatactctgggaagcttagaagatacttcagcactgggaggattttttaaaggaaatgtgttttgtatttcttgtaccaga

SEQ ID NO: 21032 - DNA, 1063 bp, Homo sapiens
tttaccaaccccctcaagggaaatattcttactgtgagggagaaaaatcagaagataaactataaagaaagactttatttgcaaatatacccatttactttaaactgtataatggttagttttctaacatgtgcattaaaaacaaaacaagaaacaactaagattcaaatttgttttttttttaactaaaattattttttaaatgaatagatgtgtttaaaaaataagcttacttattgctagactggcaaaatcccctactccatttactgaggtacttaaaaataactagcatgctgtatctctttttttcccagctttgtcttgaattggcattgccatccttgttttatctcaactggctgtagcttttagataatatcataaggattaaccagtaacctcttacattcattactgttttctaggggaaaatatttggtatttggtttttctgttgcagcaaataaaacctcaggtgtaccaggaaatcgtcctggaagtgtaatccgtgtatatggtgatgaaaacagtgataaagtgactccagggacatttataccctattgttcaatggcacatgcacagctttgcttccatgggcaccgggatgctgtgaaattctttgtggcagtcccaggtatgttagattattctgttgagatgttccatgtaattgtctctcttctgtcatctcttggttccactacctaatagtctaaggctaagtactcgaattgcaggtaatttcaatatatacgaaggaagttctgtaatggaggtgtgactaaggtgctatagggatacttgaatgaagttactttggaatatctctcccacccccaaagataaatttgttgatttttctttaggagacttgcttacttttgaaaagcagtagtattattttatcatcgtggattgccaaaaatggtcttgacctaataagagaaatcactagaaagaagcttctatcatcaaggctgcatggaggaagagagaatgcactctggtacctttagcagcttaataggaaaaagcagtgaactaggaggcctggggg

SEQ ID NO: 21033 - DNA, 1035 bp, Homo sapiens
agaaaatccagccatgcaggaaaaaaaaaggtcaagcatttggcagttgtaagtattgaaaaacaaagatgttagacagcacatgagacaagaaaattacagtcaaaatttatttccaagaatgattttatgtccattttctttccttcattttttttttttaaactaggggtaatggttaagtagctaaactgaactttttttttttttttaatatatagtgtgccaactcggtaaggctcttctcaaggacaaaaaatatgatatcgtaagctgcatcatgttgactgtgcatttgttgcaatcctctgccaaatttaaataatggggaattatttagagacttgaaaatgacctggatccccattaaataagtttctgattggctggttttgtgattgtaagaaactttacaaagtgaagatgagaaatttagtgcttgtagggtttgagtaatattgtgtatgtattgagcttgagttatgtttgtgctagaagtactatgtgtttactgtgattaaaacttacccttttttggtgaatctgctatttaatggaagtgtcaattaaaaaagaaatagacccgaaagtagttgtttaaattgagcttaatcagaaaatgtataaaatgtgtgttaacatggtaatatgtgttccagtacttgattataataagctgtttttagaactggcatactaagcttccattcacatcacacagccataaccttgcggtttaacaatcgctcttaccttgcaccaagtaggagctagcaaaaaaaccaaaatatatttattcagtaggagaagtttcctctatttaagagcttcttgctttcattatacaaattgctagttaaagaacaggcacccgccattctaagcaatagtttctcttcactgaatgtctgagtttggctacgagttactgctaaggctacagcgtatgactacaaaaactgtttttgccaatttctaactcattgccttgtaaaagtactctgaaattttcttcaacattaaagtttgtggaaa

SEQ ID NO: 21034 - DNA, 1093 bp, Homo sapiens
agagtaagctctgtacattgccagttaatcttttaatgataattttaaaatgttgttgctgttgtatcattgatgcaaaaagaccaacaatagaagtacaatacaaggaaattcacaacatattatagtgggacagactgagtcacatttaggtgatggtgaggacgcagtagcagtatattcatgcacccaaagacgtgcaagccaagtaggataatatatggatcatacggtgaattttctaagcccactgaggactttgtaccttttcaaaaatgtcctgtataccctccagtttacagaattatctgtcttgtctactggcttcatggctaatgtaaactttagaaactatattataggatttgtttttcctgtagcacacatttcaatttttttcctttttataaatatttacacttcattgtgtttagttaatggtttctctacatcttgtcaatttctttgtttcctctctctcattttaaagtaaatgagtttagttcttgctttctgaaaacaatctaattgagattctcattcatttttctcttgggctgcttacgtaggggaatattctggtgtgtatgattttgaatattttaatattactgctttttaagctaggtgttcttggctgctgttctcatctaatgctttctcatcatttttttctgctcaactatttttttgcctttcatatattttcagcttccacgcttatctaactgcttgagagtttatagcaaacatagttactatataaactgttttcaaccagtctacattcttatttcttctgtctctataactttgttaaaaagttaacattcccagccattgtatctacaaaggaataaaaatttagcattagtgtttaaagcaaatatcttgccgaagatcattttggagttagaatttggaaacttttttgggacttttattttgttttgtttggtttcagtttgtagataatacataggtagatgattaatctatttctgatatttaattctttctggtgtaagtaccctgatctttgagaaaattagaatatagacaaaatatgagtccaggtacacagaatatgtag

SEQ ID NO: 21035 - DNA, 1055 bp, Homo sapiens
ccggccgggcgcagtggctcacatctctaaacccagcactttgggaggctgaggcaggcggatcacctgaggtcaggagttcgagaccagcctgaccaacatggagaaacctcgtctctactaaaaatacaaaattagctgggcatggtggcgcatgcctgtaatcccagctactcgggaggctgaggcaggagaatcacttgaacctgggaggcagaggttgcggtgagccaagattgcgccattgcactacagcctggggcaacaagagcgaaacttcgtctcaaaaaaaaaaaaaaaaaagaaaagaaaaagaaaagggctcaacccctaaaatcagagcttttcccttctcagctctcatgctgtatctctgggatctagttgtcagaaatatagcccacacattgggctattttaaagagtgtaaaatatttttatgtggtaagtataaaagggaagtaagttacatataagtaaatttcattttatttggatagcctaggataaatttaaaacataattttcttctaagtagatctaaattaaccacttccttgtagcctgaaaccttgggattgctgaggtatcatggtccctttcctgttttaggttcagctctctcctggttatttttttttttttttttttttttttctcttttcaccccatgatatctagactgtctcctggttattttatttcatgctcccagatccacaaatgaatttggaaagtaggcctttgccacacttcatatgttgtgaacttttaaattactaaatacaattttttctgaggtgaaaataacctgccttttgtggggagtgggggactggaataataaggaggaagaagaaataatttctctatatttaagaggtaaatgagaattccaagattgacctcaaattatttatttttgacatagtttcaaaggcatatcactttctcatatagatgaactcaatattctctagggctttctgaatccgccgtcttaatgggttttaagtgctttcatcaacactgtttatcagaaatacagactgttt

SEQ ID NO: 21036 - DNA, 1064 bp, Homo sapiens
tcgcaaacttagatttggtgttaaaatttaccctcttggccaggtgtggtggctcacacctgtaatcctagcactttgggaggccgaagcaggcagatcatgtgaggtcaggagttcaagaccagcctggccaacatggtgaaaccttgtctctactacaaatacaaaaattagccagacgtggtggtaatgcctgtaatcccagctacttgggaggctgaggcaggagaattgcttgaacctgggaggcagagcttgcagtgagccgagatcgtcccactgtacttcagtctgggcaacacagcaagacacaaacaaacaaaaactaccctcttattgtactgccttcctgcttttgaattttccccctaaatcaaagttctgtttttaaattttatttccttgtgcatacaactttgactaaatgtagtctctcaacccctttgcttcacctcatttttaagaaggcattgggatagttttactagtccttttagattgttaggaatggaagaacacaccctttgtattaagtgaagacacatttcaaaagtggctgaagtttcttggaataaaaatgaactacagaattaaagacttacttagcaaaactgaaattttcccactttaattaatgagctcattgtttttattctaacttacattcttaccagtagaggtaggaattccaggaggcaccaaacctttagtgtatcatttctttctagtttctacacttttgagttaatgacccaggatgacccgttagtaggcttgtttccaccctctaaaagctcttcgatttggaatcttgtgtgcatcaacaaaggatgtgtttctcgttgaaattctgttagtattaaaattgtaactcttgttcattgaaacttctcacaaagcattggaaattcagtaatcttttatagaattatttgaccttcttatttggaaaaaaccgacaatggttttctcatatgtactgtgcttgaaaggaactcatatagtggttctgtagaaaaacagagctttcttacttgggtggtggggagaaagatattttgagt

SEQ ID NO: 21037 - DNA, 1080 bp, Homo sapiens
acaaaacaaaaaaacacactacacctttagttccactagacatttttcttttccctccctccctcccttctttctttttctttttgttttttttttatttttaaattctctttcttcctttcttttctttctttccttccttccctttcctccctcccttcgttctttcctttcttccttcctctctttttctctctctcttcagttgtttattgctgaattgactcctgaatgtgtgaattaatatgcatacctgagaaaattgagaattgcagttctgagaccagaagcaatggacctggtggacccaagaatagattatctgaagcgtgtcctattttactttctcacttctcttttctgtctaacaacactggtgctccctcccactcactttttttttttttaacctgagtgatactgtgaggccttattaatatttaaattgttatgtataatttttgttcttttttgtgtgtttatagactatagtgcatatcattttattccagacatcaggaaatgctttagggtatgggattttcttgtgggtatgaggaagaaaggacaatgggctcattgcctgctcagagaattaagtacaaaggcggcctgagtcctgtaattcttaataactcagatgactgagtcaggcaggccagagttctggccccaaagctagtgacaacttgaaaagttagtcattgaccagacaatcaacttggagtttacctatgaaatcatgatatggtgaggattaaatggagaaaaaatggctgtaactgcactgactgacttataattggtgctcaataaataatagctgccattttgttgttattgttctctcttttcttttccccctcagtcatttttggttgtcagttctttcctttaaagtgctagtttggttgagttagaattgatttcattatatagataattttggaatgtcagaatactatatctgtaattacattggactagtcattaaaagaaagtttagaataagataatagagaatcagtctgtagaatggctattgggggagaactatttttgcattttgcttgtcattct

SEQ ID NO: 21038 - DNA, 1161 bp, Homo sapiens
atcattgattgccaaggtttgggagatggtagggagggatgaataggtggagcacaggatttttaaggcagtgaacttattttgtttgatactataatggtggtcacatgtcatatttttgtcaaaagctgtagagtatacaacaccacgagtgtaccctaatgtaattgatatattttgggtgataagcatgtgtcagtgtaggttcatcgattgtaaaaggtataccactctgattctggatgttgatggtaggggaggttgcgtgtgtagggggctgcaaatacatggaaattctctgtactttcattcaattttgctgtgaccctaaaacggctctaaaaataaagtctattaaaaattaaaagggacaagtcatctgtaactccaggtagtttgcatgtgctaaatgccctttttctgtgataaatggttgctattaaataaaaaaatatagatatgtatgtatattatttatatgagattagtaaatataaccatttcaccttttgaaagagatggttagagaatggattgatagtttatcaaatgttatttctgaggtgaaagtaagactgtgttgccaaatggaagtaaatttagcaaaaagtaaccctgatgggttagaaagctgtgaatggaggctgaaggaattaatgatagaaataattcaaaatgcttaaggagaacaaaatgattactagaactttaaggaatttttatggatgaacctaagcttatgtgaacaatggtcatattcatttagataaatattggaaatctcccaaaattaatggtatattctgttatatgtctccttcccacaagcctttttttttttttttttttttttttggagacagagctttcgctcttgttgcccagactagagtgcaatgttgtgatctcacctcactgcaacctccacctcccaggttaaagtgattctcctgcctcagccttctgagtagctaggattacaggcgtgcaccaccatgcccagctaatttttgtagtattagtagaggggtttcaccatgttggccaggctggtctcgaactgctgacctcaggtgatcagcccgccttggcctcccacagtgctgggattacaagtttgagccaccgctcctggcctaatctcactattaagtggtgtac

SEQ ID NO: 21039 - DNA, 1032 bp, Homo sapiens
tgctctgtagcccaggctggagtgcagtggtgcgatctcggctcactgcaacttccacctcccgggtcccggttcaagcaactctccttccttagcctcccaagtggctgggattacaggaacgtgccaccatgcccagctaatttttgtatttttagtggagacagggtttcagcatgttggccaggttggtcttgaactcctgaccttgtgatctgctctcctcagcctcgcaaagtgctaggattacaggcgtgagccaccacacccagccttaagatgctttttaaacatccaattgaagttttctagtaggcagttggacatacaaatctggaattcaggtctgggctagagatagaaattcagaagttgtcagcatatagttcgtacttaacgccatgaaactggacgcgatcactagggaataagtgtaaacaaggaagagaagatgtgtccaaggacggagcatgccaatgttaagaagttggggagaaaaggaggtactaccaaagaagaccaagaacgagcagcaaacaagaaaacatcctggtagccaaattaaaaaaaaaaaaaaaaagttttaaggagagcggatcacttgtcagatgttgctgatacaacaatcaagatgaagactgagatttaatgattgcacttagtgttactatccttgatgagaacaggtttggtaagttagatttgagtggtggagttattcctaggacatgtccttttcttaggaatttaaactccatggttcaggtgaatctatgactattaatcacacaaccatttaacaaatatttattgattattccatcattcttttgttctctattgtacatgttatagatttttaagttgtctggaagtcaagatgcatatgcaagtatacaaaagggtttatatatttgtagtaagatatgtatatcatatggaatgcctataacatgaagtggaaacaattattttgttatttttttcttctatatttgggagttttttaaacttaatttttatagaaaaact

SEQ ID NO: 21040 - DNA, 1029 bp, Homo sapiens
aatttttgtatttttagtagagaccgggtttcagcatattggccaggatggtcttgatctcctgaccttgtgatccgcccgccttggcctcccaaattgctgggattactggcgtgagccactgtgcccggcccaaagtaaccaattctttaaacccatccggctgggcacagtggctcatgcctatagtcccagcactttgggaggccgaggggggcggatcacctgaggtcagaagttcagaccagcctgacaacacagagaaaccccgtctctactaaaaatacagaaaattagtctggcgtggtggcagatgcctgtaatctcagctactggggaggctgagttaggagaatcggttgaaccctggaggcagacgttgcagtgagccgagatcacaccactgcactccaacctgggcaacaagagcgaaactccgtctcaaataaataaataaataagtaaaaacccatttacccccacaggcttgtgagactggttggaagaagtgctgctaggcagggcctgtgtgtttggaaaaaaaaatcactcagggtgtttgtgattataactgtctcacccttccctctaattcagaaaccattgcttaagagtggaaaaaaaaaaccacgaactgtctgtcttctgctctcacaccaaaaacaatcagcccgctgtatttgtagttcatgagcatggtgattgggtgttcatgcaggtgtgtgagatatgccacccttgaaccttgttacaacactggcacattctcagacctgaaaaaaaaaacacacataacacagaagacttctgtgaccaaatatgtggggtagggcaggtgcagtggctcatgcctataatcccagtgctttgggaggctgaggcaggtggattgcttgagcccaggagtttgaaaccagcctgagcaacatgatgaaaccctgtctctacagaaaaatacaaaaattagctgagcatggtggcatgtgcctgtagtcccaactacttggaaggctgaggcaggaggattgc

SEQ ID NO: 21041 - DNA, 1062 bp, Homo sapiens
atccgcccgcctcggccttccaaagtgctgggattacaggcgtgagccaccgcacccggcctatttatttatttttgagatggcgttttgctcttgttacccaggctggagtgcaatggtgtgaactcgcctcgccatcacctccacctcccgggttcaagcgattctcctgtctcagcctctggagtagctgggattacaggcaagcgccaccacacctggctaattttgtagttttagtagagatggtgtttcttcatgttggtcagactggtcttgatctcgcgaccttgggtgatccgtccaccttggactcccaaagtgctagaattacaggtgtaagccaccacgcctggccttacagatactttcattgagtgccaactatgtgcatgatactgtgctcattgggcatacagtggtgagtaaaacagacaaggtccttctctcatggaactgatagcctactttaaggccagatctctctctggagtttcagattcatcttatgattgtttattgggtgtgaatatctcccagcgtgtccaaaactgaacttatttcccaaacctggttctcttttcttccctatcttcatgaaggataccaccatctacctggccagaaatcaggttaccatccctaactcttcctcattcccattgctgctttcttttgttttcaacttttaaatattgctggaatctcattactttctaaatccatttatactactgtggtacaggacaccaatatcgctcaccctgaatgcaaactccatagacctggaagtttgtcattcaccactatatcccagtagctagcacgttgaaagtgccagggaaatttttctgaatagatgaatggacaactgaaactagtccataactgatttttctgcttccagtatggccaacctataaaccgcccatctctccaaaatggaaatctgatcagatcattccacaagcccttagtggctttttctcaaattcctgggctcaagtggtcctctcacttcagcttctcaaaatgctgagaatacagatgtgaggcaccgtg

SEQ ID NO: 21042 - DNA, 1039 bp, Homo sapiens
aggctggtctcgaatttgtgagctcaagtgatctgcctgcctcggcctcccaaagtgctgggattacaagcgtgagccaccacgtccagctagggttttttttttttttttgtaaggttagtaaactttttcagtaaatccaccaccacccctcccagctttttattaggtaaactttcaaacatatagaaaaatggaaagtacatttgtcatttgtatacccactatatagattcagtagttgttgttttatttatctgtctgtatatgtggatgtgtgggtgtggatacacatatacacacatacacatatttaattgctgaaccattttaaattgcagacatactttgcccctcagtacttaacatatttaaattacagacattatgatactttgcctctcagtacttaacatatttatctcctaaaaaatgagaatattctgccatataaccaccatattatttacgtttgagaacatttccaaggccgagtgtagtagctaatgcctgtaatcccagcactttgggaggctgaggtgggcggaacacttgagctcatgagttgaagatcagcctgggtaacatagcaaaaccttgtctctacaaaaaatataaaaattagcgtggtgtggtggtgtgtgcctatagtcccagctacttggggggccgaggcaggaggatcgcaccagcctaggaagtcaaggctgaggtaagatgtgttcatgccactgtgctccagcctgggcaacacagtgagactctgtcaaaaagaaaagaaaagaaaaaaaagaacctttgtaatatcatctaatattaatttgaattaatttttaagagcacagtatgtgtcagttattatatagctaactagcttcttaatatgtttataatgaattaatgaaactcatctgggaggaagtgtttgcattttagttacttttctataagaaatttaaatttgaggccggacgcagtggctcacgcctgtaatcccagcactttggaaggccgaggtgggcagatcacgaggtcaaga

SEQ ID NO: 21043 - DNA, 1057 bp, Homo sapiens
aaaatcacaaaagaacgctacgcatggtggctcatgcctgtaatttcagcactttgggaggccgaggtggtggattgcctgaggtcaggagttcaagaccagccctgaccaacatggtgaaaccccgtctctactaaaaatacaaaaattaactgggcatggtggcggacgcctgtaatccaagctactccggaggcagaggaaggaaaatcacttgtacctgggaggcggaggttgtagtgagccaatatcttgccattgaactccagcctgagctacagagtgagactgtgtcttcaaaagaaaaaacaaaacaaaaaaaaatcacaaaagaggacaccaaactgggtatagtaccaaactggttcagagggtagattagtagattgactattcactggattgctgaagtgtgtgccataggtcacacatccagttctgtgcttgagagagtacaggattcctgcttcttgaaatctttaccttacctttaactacatgctgcttacttatgttgtactgaactttgcttctcaggagaactgatgttagaacctacccaagttattttgctctgctctgcactcaatgaatacagctgttatctaaataagttattaggttgtggtcagaaatatctgcatagaccagtttaataatgtatgtaatgttatatatatttaaaaagctgttatttggaaatgggtatatataagttctgttttttactttgaaatcttgaccagtgatatttgattattgctttgaacatagcactgtgttttcttttctttttttttttgagacggagtcttgctctgtcaccctggctggagtgcagtggcgggatctcggctcactgcaacctccgcctcctggattcaagcgattctcctgcctcagcctcccgtgtagctgggactacaggcgcccgccaccacacccggctaattttttgtatttttagtagagatggggtttcactgcgttagccaggatggtctcaatctgacctcgtgatctgcccgcctcggcctcccaaagtggtgggattaca

SEQ ID NO: 21044 - DNA, 1064 bp, Homo sapiens
tccacctgccttggcctcccaaagtgctgggattacaggtgtgagacactgtgcccggccaacctatttgctttttcttttctttcttttttttttttttttttgatatggcatttcacacttgttgcccaggctggagcgcaatggtgcgatctcagctcactgcaacctccgcctcccagatacaaaggattctcctgcctcagcctcctgagtagctgggattacaggcatgtgccaccatggccagctaattttgtatttgtagtaaagatggggtttctccatgttggtcaggctggtctcgaactcccaacctcaggtgatccgccggcctcggcctcccaaagtgctgggattatgggtgtgagccaccacgcccggcagcggccaacattttttcatatttttaaaaataccattttttttttctgaactgtttgtttttgtgatttttttttcctttggttgggtttttttttttttcttttttttagagatgaggttcaggctggagtgcagttgtgcaatcatggcccacagcagccttgacctccagggctcaagtagatcccacttcctcagcctctgagcagctgtgactacaggcatgcgccaccatgcctggctaatttttaattttttttgtagaaacagggtctcgttatgttatgcaagctgaactcactatgttgcccagtctggtctggaactcctgggctcaagtggatcctcctgccttgtggatcctgccaaagttttttttttttttttttttttttttttgttgagacagagtctggctctgtcgccagtctggagtgcagtggagtgtcttggcttgctgcaacctccaccacctgggttcaagcgattctcttgcttcagcctcctgagtagctgggactacaggcgcgcgccatcacacccagctaatttttgtatttttagtggagatggggtttcaccatgttggccaggatggtcttgatctcgacctcaagtcatctgcctgccccagcctcccaaagtgctaggattacaggtgtgagccactgcgcctg

SEQ ID NO: 21045 - DNA, 1029 bp, Homo sapiens
ctgtgagtgctttgtttgcgccttttttttttttttttttttttttgagacggagtcttgctctgtcacccaggctggagtgcagtggcacaatcttgactcactgcagcctccgcctcccgggttcaagcgattctgcctcagcctcttgagtagctgggattacaagcacgtgccaccacgcctggctaatttttttgtatttttggtagagacggggtttcaccattttagccaggatagtctcaatctcctgacctcgtgatctgcccgcctcagcctcccaaagtgctgggattacaggcatgagccaccgtgccggcctgtttgtgtctttaatgcggagaccaagagtcttttataccaaagtaagtgcctcagggtatttacagcaaaagtgatttgaaagcatggaaattatccatcaccagagagagtaaagtaaattctgagcacctctgtggaaacttaggtgggtatgtagatagaatgttttaggaatgtgtgaggtgctatgatctcttgcttgcaggaattctcagcaaggcatcaaaaatttaatctttatattgataggacatattttgaataccttctgactttttcctttgcttttatttgaatttctagtgtggagctagtctgctgttttagggattctttaaaaacaacctaaagaagggctaattttagatagatttggaccggtttcagatgctaatcaagaaatctgtcatcttatcgcccatcactctctcctttgggctgcctgtgacacacctctccattctttaaccaagacccgtctgatgcctttgcccatgctctagaatgctctccttagaattttacatagctagctcctcactttctactctgtttcaatttcactttttcagccagaacatcctgttgactctatccagaataagccctgtgaacctattgaataatttattttaaaatcagtgacttttaaatttaaattctttttggagacagagtctcaatcgcctaggctggggtgta

SEQ ID NO: 21046 - DNA, 1046 bp, Homo sapiens
agaactaactgcacagtcttgtttgctgtacctttgaacagtctgatgggtgtttgctatgattatatgcataacgtattcacttttctgtctttggtctgttaaatttttgatcaccagtaccaaaaccagtaccaaataaaataaattgccatctctcaaaagattattcttggccaggcgcagtggcttacgcctgtaatcccagcactttgggaggttatcccatgtggggaatcacctgaggcaggtgaatcacctgagatcaggagtttgaaaccagctggccaaaatgaggaaaccacatctctactgaaaatacaaaaattagccaggtgtggtggtgcacgcctgtaaatcccagctacttgggaggctgaggcaggagaatcacttgaacctgggaggtggaggttgcagtgagccgaaattgtgccactgcactccagtctaggtgacagagcgagactatcttaaaaaaaaaaaaaaaaaaaaaaaagattattctttaaattagcaagtaagatgtcagcagccattatttttaaactaattgcttgtaactaaaatcaagacatgggccaggcacggtggctcacgcctgtaatcccagcactttgggaggctaaggtgggagggtcacgaggtcaggagttcaagaccagcctgaccaacatggtgaaaccccatctctactaaaaaaataaagacatgaattatttttctgactgtactatttgactttaaaagttgtagcaattttaatattgttccacatgatgacactgccattgcttcatgaaaaacttaagtggcatactacctatccagatactctgctgagttctcattctcatcagttgatttttttctctgtatgagcagtttccaatttacaccccatatatgtgtatcctctccatttattaatgaaaagatacataatagagaaaaatgaagaacttttacccttgatctggagccagatgcctgcaggggctggtggttacctgtgtgagtattgtgggcaacctgggcagtgagct

SEQ ID NO: 21047 - DNA, 1016 bp, Homo sapiens
taaaaactctgtatgtgataaatcagaaagaaagaagtcaaagtgttaccaagtaggatttggagcctagctgaaactagataggtaaatagtaagcactcagcccagtttcatgatgccgtgacagcaggcagctatagctatggtcaaacgcactgcttttcccagacctctgaggtcagttataggtaatcctgcttttgtttctggaacacactagaatttacatagatttttttcattagaacttctgttatttaacataactcaatagagaagcatgtttcactttgaagagacctttatataatagattttcctttcttttagaatgtcaaagtattatttttataatagtggtatctaatttcaagtacttagaattctcttcattgaaaaggtgctagctgacggattcctgatgattgggatcgatggctcagaagcagcagacggatctgactggttctgttaccatgcaacctctccttctattttccctgtcggtttctgtgaaattaacatgattgaacttactccacccagaggtacttcatcctaatataaacactgggttttaattgttgctttcttcttacatggtttttgtttacaacatttaacacagccctagatttcctgagtacgtatataatgtgtgtggataaacatatacatacaggagctgtaggttgctctaaaaatataaagtactgtattctagcgtactttaataaattacagtagtatagaatttttcctgagcatctgtgtattttataatatgaattggtattctcaaactctgttgagtcagtaatgtaggctcaacaggctatggcatacatgatttttttctttttttcccaataaagacagggtcttgctctgttgcccaggctggagtgcagtggcacaatcatagctcacggtaacttcaactcctgggcccaaggaatcctcccacctcagcctccctagtagctgaaactacagctgaaaggcacaaccatgtc

SEQ ID NO: 21048 - DNA, 1050 bp, Homo sapiens
ctcaaaaaaaaaatttttttaaaacagtgattcctgaaacaccttgatcatgttaaaaagaaaaaaaaaggctgggccctttttttattacaattacaggtggctcacacctgtaattccagcactttagaagggcagatcatgaggtcaggagttcaagaccagcctggtcaacatgatgaaactaaaaatacaaaaaaattagctgggcctggggccaggcacctgtaatcccagttcttgggaggctgaggcaggagaatgcttgaacccaagacacagaggttgcagtgagctgagattgtgctattgcactccagcctgggcaacaagagcaaaactctgtctcaaaaaaaagaaaaaaataaagactgcgtgcagtgcctcatgcctgtaatcccagcactttgggactccaaggcaggtggatcacttgaggtcaggagttcaagaccagcctggccaacatgataaaaccccatctccatacaaaaattagccaggtgtggtggtgtgtacctataatcccagctactcgaaaggctaaggcaagagaatcacttgaacctgggaggtggaggttgcagtgagctgagatcgagccactgcacttcggcctaggcatagagcgagactccatctcaaacaacaacaacaaaaatcacgtggattcccatgatcgactccatgtctacatgaccggaatcacagtcaaggccaggcttggtggctcatgcctgcagttccagcactttgggacgctgagctgggaggatcctttcagttccagatcccacccatgtgacaacagtctctgtgtctgttaattctgattactgagaaagagtctgaatagctgagctaagcctttggtttggttccatatgtgatacatacaagtccctagtctagtcacctgtatttagaagaatgaagaaaggaatcccatgtaagtggggtagttctgtccagaggtcttaggcaaagctctcaagcttgagagtagtaaatttagtgtacatgtttaccatatagaaataacgagagaaa

SEQ ID NO: 21049 - DNA, 1035 bp, Homo sapiens
ctttcatctaaaagatatttgggacatttcctacaaaaagactgtgacaataagtatttcagatatctttttgaactaagattaaaaccaatagtagggacctagagaatagtacataaacattatacattctgacaaagcagaaagaatgcaactaaaatataatgggatggaaaataaaaggaaaaactaaggccatgtgtggtggctcacacctgtaatcccagcactttgggaggcttaggtgggtggattacttgagcccaggacttctagaccagcctgggcaacatagtgagacccagtctctacaaaaaaaaaaaaaaaagtgtttaattagccaggcatggtggctcatgcctgtagtcccaactactcaggaggctgaagtaggaggatcatttgagcccaggaggtcaaggctgcagagagctgtgtttgcctaactgcactccagcctgggcaacagaatgagaccctgtctagaactgttctttttcagaactagaataagaataattactgtaattgaagtaatatgagggagtcagaggctaccatctaaaactgaaagaccaaatagaaaagattaggtaagaaaaaaaatacagtgtactgtaaaagctattaatataaaggtaagcgtgacgaagactttccaaaatactgagagaaatttttaaagggacaaagaaaaccatgatggaacagaaaaaaaagtatacagtacataatgcataccctaatgataaaatatgtggagaattgagagcaaacataaaggccaggacaaatatgtaccaggcaaatagaaaccccaagaatacaagactgaaaatgctgatagcaaagtagaattcaaaccaaaaaaagcattaaatcagacaaaagagaacagtttataatgctaaaaaccatgattcacaacaaagaattcacagttaaatatgtaccacataacacagcaacaatctgtataaagcaaaatctatatgaagtataagaagaaataaaaaactaaaattaggggacttt

SEQ ID NO: 21050 - DNA, 1053 bp, Homo sapiens
tttaaaagccagcaaataaatttcaccttaagccccagtctcctatttaaaaggttagactcaatttttctctcctcctcttataacttagagactgttgctttgctcttgtggacttagactgttattttatttttcatttgtttacctcaacaccagagtgtttagaaagaaaatagctgtactttttttttttttttgcaccacctccttctctgaataacaagtagcttctatctatctaaaaccccatactgattgcttgtgagtaccttgcaaattatggcaacatctgtcttgaataagtatttattcatagtgccttacgttgttgcgtcatgctttttaaccatccagtttctaactttatgtaatgtttgacataaaatatttcctctaaatctactcattagaattcagcttgtgaaaaagaatcagtagaggtgtaataatagtgtttttaacattttaattaataaggagttccaagtttttttcctgcttactttaaacatgaactgtcatgacttaagttgactgactttggagacatctgcattctaaacatactagacaggaacaactggttttatttttaagacgctgccatattctttaaagctggttatatgttgaccttattatctaaacctttctagatgttctagtgctgcttttggtccctcaataatgttgaaaattaaaacaacattttaaattgttttcaaatgtaacatagtgatcaaaggaaaatataagctatagtttaaaagtgaaaacaacatattaggataaatactaaaccactgaattactaaaagccaagagtgctcagtagtctgagtaaccacattctaaaattagacaagtgacattctttgggttgctctttgtttctcagcttttcatctttaaaatgtttgctaaataagatataacctttcacacttatgtatcattagtctgagggtttcaaaattcaagaaagaataaaaacatcaggacaataaaagagaaaggacttacaatagttaaaacaagctaagatatttc

SEQ ID NO: 21051 - DNA, 1060 bp, Homo sapiens
aaagagaataaaatacctaggaatccaacttacaagggatgtgaaggacctcttcaaggagaactacaaaccactgctcaaggaaataaaagaggatacaaacaaatggaagaacattccatgctcatgggtaggaagaatcaatatcgtgaaaatggccatactgcccaaagtaatttatagattcaatgccatccccatcaagctcccaatgactttcttcacagaattggaaaaaactaaagttcatatggaaccaaaaaagagcccgcatcaccaagtcaatcctaagccaaaagaacaaagctggaggcatcacactacctgacttcaaactatactacaaggctacagtaaccaaaacagcatggtactcataccaaaacagagatatagatcaatggaacagaacagagccctcagaaataatgcctcatatctacaactatctgatctttgacaaatctgagaaaaacaagcaatggggaaaggattccctatttaataaatggtgctgggaaaactggctagccatgtagaaagctgaaactggatcccttccttacaccttatacaaaaatcaattcaagatggattaaagacttaaatgttagacctaaaaccataaaaaccctagaagaaaacctaggcattaccattcaggacataggcatgggcaaggacttcatgtctaaaacaccaaaagcaatggcaacaaaagacaaaattgacaaatgggatctaattaaactaaagagcttctgcacagcaaaagaaactaccatcagagtgatcaggcaacctagaaaatgggagaaaattttcgcaacctactcatctgacaaagggctaatatccagaatctaaaatgaactcaaacaaatttacaagaaaaaaacaaccccatcaaaaagtgagcgaaggacatgaacagacacttctcaaaagaagacatttatacagccaaaaaacacatgaaaaaatgctcatcatcactggccatcagagaaatgcaattcaaaaccacaatgagataccatctcacaccagttagaatggc

SEQ ID NO: 21052 - DNA, 1030 bp, Homo sapiens
agttatatcctggctcagtggagtgatatttatgtattatttttacttttctctcagtgtcttatattaagattaacatgttgttaatagttgctttgttgattaatctctcttgttggtgttttaataaatgaaataggcttgcctttagatcgggtgctgatattgcctgtttcctagtaatgggctgatcaaatgatcagtggaattcttggtttgatgataaccttattaattgaaattttttactgatgtggctttaaaagaggtttattttgtatatgtttagaactctctgattttgatgaattatatgggaatgagaaacagaagaagtggtatttgctggcgagttaaataggcaaggtacccagtgataacaccaaccaaaccactcctatctgcatgattctgaacatctggatgcctgttgttttactgtgtatattttatttttaatatattaactttgtggattcatttaaggtctactcaaaagtaacactgtcaaaaccactaatatgtatgtaaaaattgtgctgtatactacaataaagttgttacttggatttgttccactgtctctaaattagatgactgtgaagaaaaatgaatacaccctgtcacttagaactttctagtctactttttaataattgaaatgccagagtcagctcaaacattaatcaacagacattttcagtttaaaatacactagtcaggacctaatgatttcaagttttttagatgatgcatccttaccaaggtaagccttttggtttagcatatttaatattctataggactgaggtgacagtcttttatgttaccaaccagacaagtagcagattataaatcttaacaactctcctagtgttagatgccattctacctcttctgtagtgtgggaaaccagggccagagaagttcaactgcttcatcctaaatcagggagctggaacagcaaccagctctatctgattccgaagcctcccattgactataccactgcatttctagagtcagcaga

SEQ ID NO: 21053 - DNA, 1026 bp, Homo sapiens
ataagagactttttttatgtttggttcatgtttacagatcaggattgtgttcacacagcttcttcattgtctagaaaatcaagagccttagagagaattacagttatctgtagcttgccatgcagagtaacatcaaaccctttttatttttttttctctgttgacagaacaacaccgatggacttcaggaacttgcctgtgggggcttaatttattgcttgggagttgtgttcttcaagagtgatggcatcattccatttgcccacgccatctggcacctgtttgtggccacggcagctgcagtgcattactacgccatttggaaatacctttaccgaagtcctacggactttatgcggcatttatgaccaatctgtactaattctccaaaccagtattatttcaattatggcacttgggagtggggtgagagctaaacattgcacagggaaagaaaaaaaataactgcactgactttatatcttttgaatataattactgtgaaagtataaaggctgtgttctggaattttctgcctcacagcaaataaataaggtagtgaattaattattcattccattccactatcatgaaggactctgaatagacttggccaactgatgtttacaaaccagacttttatattttaattttacagattttactacatgatttttctaaattactatgtcaggttgtaaaagtcagtgcaataacaaaccttcctttttaagaagaaaattgtttctattactttcccattcactaggtaaagaatcatggacagaacttacactactttttaccatgtttcatcttggcataacatggttcttttttaaatagaaactttagttttttgtaaatttttaaaaaaatatttcattgatatgcatctctgcaggtcctcattcatgttgtaaatttttgcagcaagcagtcaacattccacaaacgaacaaacattatacctcttctgatagttttattaagcatggagaaattgccaatttttaaaaactgcag

SEQ ID NO: 21054 - DNA, 1033 bp, Homo sapiens
gaatgagtaaaaaaactctgcctaactagtagctttattaagtgcagctcccactcccaggactgaatcaccttccttcaaaccctctagagcttgttggttactcaagcattgagtaaccattagggccactccgctttaaatagagatgtcttccataaatggatgctgttttccataaccagcacttgaacctttcccattcttttttcggggaagagatgaaggccagagtgtgggagttgatttacattttacatctgcttttccatttaggttttaggagtgatttcttcaggaggctgtggaggaggcttgattgcaccctggcaggttagagagaaatgggaaaattgtattgtactttcccagcagaacaattatgctgtctatcctactgagccccagatttagagaattgcttccaggatagttacccttatctttccctattgcccgtgtcttaccctgtgcatcaggatagagtgccttaagtcaccatgggtgggatatttttctgtataactttctacttttattttttaatgtgaattattccaggtgatcagggactaagctgtcacaaacatggccatccagtttatttgtttttaggagaaaatgtgaaagtctatccctgttgctgggtaatggcttgactatttttagattgggctgccagagatataaattgctattttagtctgcagcctggtggtgggtagacaaatcctacttactgcaccctacacagagcacattcaatttcatctaactacagccatcttggggccttgctctttagccttgaaaattcctaatagggtatgctacttatagctctgttgttatgtctcaggacaatgatgtggtatatcctccaattcttgggacacttttaaagcattcttcccaagagtgtaattattttcttttttgctaataagagctgtatagcaacactcttgtctcttaggaaattagtaaaattatttaaaatattatcaggggagaaaagatgatgcttaataat

SEQ ID NO: 21055 - DNA, 1028 bp, Homo sapiens
tttgagctgttatttcttgagcttaatatttttttagagttaactctttaaggagataatcatggctgtagacaaggccagggctggctgacgtgccttagaaggtttgaatgcaataaagcggtgtttggcgttctcctgcattgtagtgcgggtacaaaatgctatttgttcgtcatactgttgtcagcagatgagccgcccactacagacggctactgcccagggacctgcccaggccccacccaagggctcccaagggttgagatttctgcagacctatagccagcacacttagtcctgccctatatagagttcctcttcgggaagcttttgataaggaattctcagaccgataggatgtctgtctgggctttgctgcgggacagtctaactgtgggggctaggggaaagcaggagagtatcgatcaaagagtaagccacacacggataatcagttactagggatggaggtgtgagggttcattatattattcattttactgttgtatatgtttgaaaatgtctataataaaaagctttaaaaaaaaaaaagaaacaaaaatagttcaggccagcaatgggccctccatgttcagtggattttatccttgtttcaattggggtaggagttccaggaggtgtggattggaggttgtctaaagaattgaactggcctttgtccctgcttcctgggagggagactttcagtccttgacatttccagggtaataggagtgtctttgttatttgtgaggccatgggatcacacctgagcttatgctaaaaggtgggatgactcagagctggggctggtcaccagacagactgaccatgtgattagaggtttgaggctttgagtcagcctgacctatggggcgggggactggaggctgagtttaatcatctggccagtgctttaatcagtacatcatgaaaccctaataaaaactctggacactaaagctcagcatagcttcctgggtggtgaagctgtggctatgccggcagggcagtgtgccctaatt

SEQ ID NO: 21056 - DNA, 1049 bp, Homo sapiens
tgggtcccttgctttttcagggctggccttcttgtagccctccgctgtccctgccccccaagagaggcccagaccagccctgggctgcagctaactcttgcccaagctgctagcggcggtgctgagccacgtctttcaggagctgctgtgcactctgtggcagccgcataaacagggaaagtaaaattctatcaacttagggccttttccacccccagcttattcattttgccttgggggaaactcgggctccagtgaaaagtgtcatgccctgagccacctagcaaatgagtgcctcgcttggctccctgctgcccaccagttaaagtctagcctcctaagcccttccctttctagccccaacatgtttcccttctcctgctgcatctgtgttcccagccacccagcttccccgatcccagcacatgcgaatccccttggcactccgtggcttcactctcactgttccctctgtctggaacagcttttctctctctgttctcctctgtctagttctcatcttctgttacttggctccaattccagcctgccagtgaaatgttccccaactgtagcatcagttgccttgtctctgtgtccctacagtgtgtgcttacccttttggcagagtgtgagtctcatggtgttgttactgatggacttgccttgcttgttggagtgtgaactccatgaggcccggcaccttgtctctctggttcatggttgtgcatcttgtgccagaatctggtgtcagtcaggtgcctggtaaatggttttggatggatgaatggacagacatacggatgactgatagatgatagatggctggctggctggacagaatggatggatgaatggatggatagatgagctgatgaataatggatgggtggatagatgggtggatggataaatggacagatggatagataagtggatagattaatgaatgaatgaatggataaatggaaaggcagaaggatggatagataagtggatagatggatgaatggaagaatggatagataggtagatagatgggtatatgg

SEQ ID NO: 21057 - DNA, 1053 bp, Homo sapiens
tattaatggccaggcacagtggctcatgcctgtaatcccagcactttgggaggccaaggtaggtgaatcacttgaggtcaggagttcgagaccagcctggccaacatggcaaaaccccatctctactaaaaatataaaaatgagcctggcatggtggcgtgcacctgtagccccagctactcaggagactgaggcacaagaatcacttgaacgcagtaggtgggggttgcagtgagctgagatcatgccactgcactccagcctgggtgacaaaacgagactcttaaaaaaaattgcatattaaattggtattagttgtcatagttattaatgttggaaggtgttttgcctactttagttggcaaaattttttgaagatttttgaaattgctttcaaaaacattttaagaatgaaaattggtcctacttttttgctttgacctcaaacgcagttatccagcttgatcatctgctttattcattaaccttgtctccaaaaattaaattggttcaattctgtactaaaaaatgtagtctcccaagcccctgattccctgttgagtctggttttaaaaaaaactgttgactgtgctcagaaattccaggtagaggcaggaggaactggttgcttggcctctcagtatatacccccggaggctaccatgtgtctccccatcgcccacgtgcatgggcagtgcatcctcttgatgcattagaaaatcagctcccacagctggagacctgggagaaggagaattgggatcttaacagtgataaagtgccttctggtttctcctggggggttgtgatcactgttttagaagggttctaaaagcatcaggaaccgaggctgcaccattaggatatatctagtctctcctgatgaatgctgtgatggtcagtgctcacttgaatatatcagcctggtgtgatttttttctccttttcccttattcagtcacttttggttccctggtgtaatctttactttcatcgagttatttaagatagtgtctgccatttatgatttaaatgttttattttgcctctaaa

SEQ ID NO: 21058 - DNA, 1053 bp, Homo sapiens
agcatttggaggcacctgcagaccagtcgaaaggtctcttgcctccctgaaggacctgtatactgtgtatgctggcattcacactctactcactggctgaatgttgagctatttttaaacagttgaactgtgtaaatgtttcttgatctctaaggtattatgtttgccttctcttagttatttctgggttgtcacaaagctcagtatcatggtttgacagaagcagttatgtgaacttttatgttaggacattactaaataaagaattccctagctgcttataaagtaaatttactttgaattgtaaataacatgaagaaacctttataaagattgttcaaatgggactcaatctgactaggcttgctttgatgtttgttagtatgtgggctggctacatctgattcccgggtacatatttcttctgatccatcagacttatacgtgtacacatgttgtggaaccttggctagctggttttgtctgcagagaatctttgtacttcttgctatagaacgattatctctccacttgagaggccaagctgacttgcgctttgtggtaagagtgaggacctgtcattgctgatacacaaagaccaaaactgtaactttaatgtcatggattgagtgtgctggagacagttaacataggcctgcacagactaggctgttcagtaaatacttgttgaatgaatgagtgaacgaatggttatatccagctaaagactggattcatatggtgtagataacaggattgccaagaaaggaggcagctaatttaggtgatgctctccaccagcatccacctgcctccctggggccaaagtgtgcctacaagtccttatcaacttccctgccttcctcgtttccccaggttttactaaatacatgaaatatccctctgagattgcagcctttgtatatgtggtcaagccagtggtttttagctgttagtagtaagctgcttcagaaattccctattttaaaactcatgtagattttctacccagtgattctttgtgtatgctctcatctctcctggtacactgtg

SEQ ID NO: 21059 - DNA, 1720 bp, Homo sapiens
tttatataatttattgaacctttatctttgtggccctctttttttttggtggttttgatatttaaaaaagcttatagagtggttgtgcatgcctgtagttccagctacttgggaggctgaggaaggaggaccattggagtctaggagttcaaggttgtagtacactatgattgtatctgtgaatagccactgcactcacaacagcctggcaacatggcaagaccccatctcttaaaaaaaaaaaaaagaaaaaggaacttacaacaaaataaataaaacaaacaaaaaagatgtattaaaatctaagtgtaaaaagtgagatcataacagtactggaagaaaacatgggagaattaaaaaaataatctgagtgataaaggtctttttaagcatgatataaaactcagaagccataaaaagaaaatattaaaattttctgtataaaaaagtactgtaagcaaaatcaaaagacagccaacaaactgggaaagatctttgcaatgttatgacaaaggactaattttctatgtatatggctacaaagtttgcttagaaatcattaagaaagagaccactgtgtaacgaattaccatagaccaggtggcttataaacaaatgaaatttctttctcatagttctggaggctaggaagtctgagatcagggtgccagcagggtcaggttctggggaggactgtcttcctgattcctcacattgaggggagcagagagtggtagcaagctctcttctatctcttataggggcactaatcccatcatgagggctgattaccatgacctgattacctcccaaagcctccatctctaaataccatcacaatggggattaggatttcaacatagtaattttggtgggacacgtttagtccatagcaaccaccaaatagaaaagcggacaaagaacttggacagttcacagaaaaggaaattcagtttgcttttaaacttgaaaagatgtccagtctctttaaaaagaaaagcaaattaaaactataaagagttctggtttcttacctattaggttggctaagatcaaaaagttggagaacatgtgtgtgtgtgtttgtgtattttttttttttttttgaggcaggatctaacccagactgggatgcagtggtgcctatcatggcttactgcagccttgacctcctggactcaagtgatcctcccacctcagcctcctgagtagctgggactacaggtgtatgccaccattcctggctaatttttaattttttttgtagagatggtgtcccactatattgcccaggctggtcttgaactcctggcctcaagtgatcctcctgccttggccttccaaagtgctgggattacaggcatcagccagcacgcctggtctaaatatatatatatatttttgctgggattacaggtgtgagccactgcacctgcctcgtgtgtgtgtgtgtgtgtgtgtgtgtgtgtgtgtgtgtgtgtgtatatatatatattttttttttttttttagagacagggtctcaggtctcaccatgttgcccaagctggtggtgagctcctggcctcaaaagatcctcatgcctcagcttcccaagcaggtgggattatatgcgtgagcctctatgctcagctggagaatgtcatttggtcagggtgtggggagataggtgctcgtatattacctatgtgaatgtaaattggtacagccactttggaaa

SEQ ID NO: 21060 - DNA, 1033 bp, Homo sapiens
tgagctgagtgaggacaagataaagtggctgctgcctcctgggcttttgatctggcatgggagcacattgttctcccccttggtgaactctgagtagagctaagtagcggtgtgggtttcagagaagggtcaggttttctggattctgtagcacccttgccagggtgaggcaggaactgggcagtgtggtcagctttcctgatgcctttgtggtttttaacagctgagaaacactgccacctcttgtaatgcctgcagtgaacatggtgaagaagacataaaagtcccttaagagtcattgctcagaacacagtgattcactcttgtctctctgcacttagaaccagaggcaaatgaatttaaactacagagggaggattcaagtaaggtatgaggaagacattccagataggatgtgagatgtaagaaaagtgactcataggcacagaggggaatggcctcccctgaaggtcttcagaaatgggaacaagtttcatttgtctttgtggtttaagaggtttcatctggagacaggaagatgaagtagaggcccctagaggtccatgtcagctcggtgatcggaggataaaaggagctggaatttttgagctagaagattacttaaatttggcctaacccctcctttgactgttggagtgattgaagaatgcccgataacactgagcagctcatccatgaatgagtgagccaaggcacaaacagagtctgcccaacagctctgggccaggtgaccctggcccgcaatgttcctggtcagcatcacccgggggtgctcactgggagggacctacagctctcggggatggagtccaagccgtgtgaggagagctcaggaaacctggaagtagtggagcatttgtcttggtattggaatacagaaagcatcagcccccatacacacagtgtttctgagaatggcactctcagttggagctagtgggttatctcctagatgcacctagaagagttttaggcatatatatgaggccctcagtaaactttgttggatgaa

SEQ ID NO: 21061 - DNA, 1057 bp, Homo sapiens
actataaccagtccattatccatgacctctcctttaacactcactaccccagtcaacctccccacccccgtcactgccccagtgaatatagcacaccctgtcaccatcacatctccaatgaatctacccacacctatgacattagccgcccctctcaatatagcaatgagacctgtagagagcatgcctttcttgccccaagctttgcctacatcaccgccttggtaaacagtattataaaatcaaaatatgggtaaaagtaaatatttaccagcaacttaacttttagttgattaaagcaaaaagtaaaccatgaaattgggagattttattacattagttaataagagtgtggtagcatttttctccaatttggctgggattattcaaagtagggtgtgtatgtaacttatcactggaccactttagtttaatcagaaattccttttagctgacaacattgcttaaacaggatagtagttggcaagatgaaatgccagaattaaaaccaatcataagtagaacccacttcaaaataaaaaaacagcattactatttctaatcccaaggaatcactttattgtaaacactagcagaactcttctccctatacaaggtggatggctgattttaacctgaaattttaaatccacagattgagagctagtgtagaattgtctgtgtttattgtttttatgagtaaatacatgcattgtcataataaaatgcatttcagagaatatgcattttacctttgggaatatgttaatttcaggcagcattccctatgggaaaggtgataccagctctgatatgcaaagcatatgataatttatcattctaacttcaacgtataatagggattgtgacctgatatttggagatgtaaatattgctcagcatattaatcccgatggaatatagcattgtagttgactttttaaaaaaaaaaaaaatttaaaaaaaatctacaaattgtgttttgctaagaaaagcctcaactgacagaggagaagtcaagtgtgtggacaggcaagctcctaataaacagagtcca

SEQ ID NO: 21062 - DNA, 1109 bp, Homo sapiens
tgggatgttggtcttcgcttttttgcaagaaacttgaaagtgactgtagccgatgtgttttggcaattctcttgcccgcccactttagatgggggacccctgtttggcagatctaggctggaacttatttttttcctacttcgtttctgtttgcaaaacgaagcattcagtgggcagtagcgatgagctcacggggaaacttcggaactggaggaggttaggaagctcgtcacttttaagtgcgttcttcccgcctctctgagttattttcctttgaatacttcgtgaaatcccaaacgcgtagctggggcgcttgataccttttgaaactaacaggaacggatgcagaattttcaaaaaattattctcccagccactggattcatcctagtggagttaatatagagaattggataactcagaaattacctactgtgtagactggcctgttgttttaagacatattttttcaaatgtgggcaatttgatctttaagtagttatggaaatatatttgggcttcttaaaatctaaaatacccaacattatggaattcatgaacttcccccttttctcattctgatcagtgttgttttattgtactttgatgagcttgctaataatgtgataaaccaacttgaaaatgcattggaaaagaaatgatatataactagcatgcatccaggttggtgtaaaggtggcaaatactttccccagaaaaaagctcaaatggttattttaaaatatgggattgatgtgccactgaagtgattttcgtgtgattaaaaaccatattaagcatggtgtctatagagattgaaaaaaaaaagtgttcttcatgtaaaggaaaaacccataacacatctttggaaagctggttgaaaaatcttttgaaatacttttttaaagattatttttctcctgggtaaaacaaatgccaagcgtttattgatcaactttttaattagattttatattatttaatttttttcagctattaaaatctttttttccacctgatggagaagtgtgaaaacaaatatttaatcctgggcttggcaatgtgtgcagtgaaatttgttggaaaacttaaaatttagagccgagagc

SEQ ID NO: 21063 - DNA, 1050 bp, Homo sapiens
tagctggggacaggtaattgacaacggcagagatactttcttttcctaggattctaagtctgtaatccacatcctcaatgtattcacaggactttaaaattctctccaaatgaggaaggaaatatcctgttgctttctaatgtttactaaaagttgtgtttagaacaacagattttaataggcatcttcctttgttatgtgtcattagccctttgcccgtttaccttagggctctttgaaggagaaatggatgggagaaaacctgtcacttggcgaaagtaaaagggataattaactggctcagagcttatgtgcagagttccaagccccaaagttaatctagaaccactcgataacaccaataaaaatatttatttcacatctgttatatatctggaaaatgttctaagcatcttacacatatttctcattaaatccacaggtgaccattgtgaggtagatattttgttctaattttccagatgaggaagctgagaccctaaaaggttaggtgacaggttatacaacttggagtgtgggaggaggagagaggaacctgaacagggcaagttggggatctgacttttgtttgggtagatgtaggcacattgtatttttggcttagatgctttattcatcatggctgaaggtaataccatttactcactcaccgaaaattgtttacaataatctagatgaatttgctgtctttggacatctgtcttttgactggaccccagtatatagtctgtggaagctcacttaaggagagagctcctttttgtttggttagagaaattttctgtcctaaaagtagaaatagccccttctaggtaaggatggagcatttgatcatactggtttcattatattcctctaacagttggaaccgattgtttttgagtacttgtttcaaacttctgagtattttccttctggaaaatagctcagtgtttaaaatttacatgaacttaaaaggttaatttttttttaaagaatgtttgaggagcaatcaattctgattttgtcttatggatagaaatagaatta

SEQ ID NO: 21064 - DNA, 1028 bp, Homo sapiens
gacatccacaacttaaggctagaaatgtaaaatgttggttcgcagtgtaacaagcacattccaaagaaaactcaaatggctcctttgtactctaaaaatagtaaatttgcagcaaggtgatagtcaagttctgtgtcttcagggtgccaccgcatctatgatttagattaacctagagatgtgtttacttgccaaatagagttcttcaagatgctgtttggatttgtcttcccatctccagttgccatatcagcatttttgtctgtacccaaattcatattactgaagtgttaaagctggtttcagtgactccagatccttaaaacatgtcactcccttaatatgagttaacaatgggttatattctacctttccaatttatcctgttctcaatcacatcttcccctaccctggttgatttggtaaatacatgtattttttaactctacagacccaggaactgaatatatttatatttcccaatgagctaaatgcagtgctgacagttttaatattgatgggcgagatgggaagaatttagtattccctaaaagcaaagcactgtagaagtctgtttcacaagctattcgttaactgggtggattattggagaaggtattttaatactaataactcctcagatgtgaagccagaaaatttgaattaatctaaatgctagcctaagtccaagtataattggataagtaaatgttgctcccagaattggtcttgcaaagtaagaccaattgtaagaccaaagtaagtggttttgatgtaagctgtgcacactttcagtacagatcaccaagaattgatgacattgtctccaaaaagactaaatagttgcctcctaggtatcctttttcagtcattctcttttaagcttcttacagaggaagctttaagttgcctcagaatttagtggtattgcctcaatgagaattcctgcatatttctctttgggatggaatcattttggttgtttttttgttgttggtaactattcataaagagattaatacataacg

SEQ ID NO: 21065 - DNA, 1026 bp, Homo sapiens
ctgaaaattactgaaaatttaacacttttagtatctgtcattcccatcaccgctttctccccaggtttcttttataaaaaatggaaaggacacaaacttgtctcctgtttacagtataaattgtcattgagaatactaaaccttttaggcccatatgatgggatttagtcatccagaagacaggtgtgggacaactggccttaaaatgttaattttagaaaatcagtctgtttcaaagaataaagcactaaaagtggacaaagtggacttcttgtggggggaaaagtaatcaagtttacacagtagagatttccctgcctgctaaggtaacactaagtagcaaggaaagctacagaaggtagttactgttaactagtagtcttgctgcaaattggattgacagctgaaagggcactaactagattgaagcctgtctttaatcctgtaaatgttagctctggtgtccctttgataatttttaaataacttttgaagatgcactctgaagccacaaattaggcaaatgaaaattcagaattctccttgtagaaagaaaagtgctaaacctggagattgtaaagtgctaagaaaaaccatggtagaattgttccctcaggtgctgtgtattagaggaggagtctttatatgtcattttgggataagctttcaacaattattaaggcttaatacataagattataggatcagtcaagcaaaagggaaggtataacctttagataggactgggaagtgctgggtgaatgtcttctacccttaacggtggtagaaatttgaactataaaataacaccaagagtgacattcacattttttttgtctttgtttttgacacagggtctcactctgtcacccaggctggagtgtagtggcacaatctcggctcactgcaacctccgcctcccgggttcaagcgattctcctgcctcccaagtagctggtattacaggtgcccatcaccacacctggctaatttttgtatttttcatagagacagggtttcactatg

SEQ ID NO: 21066 - DNA, 1215 bp, Homo sapiens
gattatagtatacttaaaccagtacttattcctgttattgagaccttcacggtgcttcttggtagctttgaaagctaatgcctaacaaccctgagggttcttgtgagcttgtagtgattaaaggaaggattttttaattattataaaaatcactccgtgcttcattaatgcacagaataaaaattgaataaatgactctgtcatatagaagttaatttaggcaaatataacatttgtaatttacaacattttaataggtgctaggctgggatttcagggggtgaaaagtcattcatgacttttcataagaagtttactgtttaggtaagcaaaacaacacttagttcagcttgatactcaagcatcgggttaaaaagcatcagacttctgttaccagacaacttataagtgccaactattggtagaactgtggacatgaagatagtggaaacagcttctctaggatgctatactcatctccaccaaatgcactttgaacaaaaacaacttgtagaaataggtcttaattttttttgtttgtttgtttggtttttttacaacatgctgtactgctctccattggtaagtgctagggaaaatcacttagccactagagggagctataacacaaaattaagcaggaaataatccccattatagatacatagaacaaagtagagaccagctaactaccttgatcctctgtatcagctctaaagttagatggtttgggtaagttttcttgcaactttacctttgtcttcccatcttttgtgtaaaattcttccccttttcagcttttgcatccatttaggttttcagagtttaccttacaggcactcattttgtaacaaatctaggttctgggactaagaaaatactgaagacataagtctgcttgtttttctgcctaccttgtacatcaggtatggaataataaggccatgaatgtgagaattgggaacaggagttaggtgtgctggggaaaactagacataacaatttggttatgaactagaagaaatgaatatgcttttagagacctgcagtttgcttttatggagtgacagtttcaggtgtgatgatcttctcagtattactaagaggttcttaaagtttgtcttaaaatcctacttatgtgtcagcttagctgttttctattttctaggcctcacttaagtagcaggttgtcttgtgatcaaaaagtcagtagac

SEQ ID NO: 21067 - DNA, 1239 bp, Homo sapiens
ttgtagttaagatgaccagacagctaaaagctgtgatgggaagtatggactgctcctatttatagtctcagaaaatggacctttaggtctctatccgtattggcaattattagaagaaagttacacccttttgaaactacaaaagctgtcttggaatttccccctcttctccctatttatgtccccttagaatattttagggagcctataattattttctaaccaaggaaaaacttaagtctctttaagaagcaattacttttcataacatcagattgaataacccaccttgctgttcagcccacatcctactggaaacaaaaggtaagaaacccattttctggttcttgattgtttgggtctgaattttgtttttaaaactaagctaagtttaatgttttttaaaatgctgtttggaatatgaatagattccccgtaaaatgatttttcctaagttttatgctttagtaaatattcagtgctcacgtctgtgcatcatagtgcttgcgtttaatatgatttattgtagaatctcaacttttcttggtgtttgttgtctttgaaacattgtcttggtcattagggctggtgttttcacatttctgtggtcaaggtggatttcttatgtgtgcctttttgcttactttgtatatgaattttgtaatttaaattgcaagtaagttatatatatgtatttaccataaatagtattaaaagatgagaaactgttagactgaagttctgttgtaacataaccattatttccatcacagtatgaagactgcaaacgcagaaaacagattacagtctcttatccattttttgaaatccaaaaactacgaaaacaaaagattttctgttgttgagctaattaaatgtgaaccctgaccagaattgctgccttcattttgcacttagtgtgactaaactgtttcctgttgaacttcattattcattgcacagttgccacagactttgctgagggttttatgtaatacagggtatatatgtacctcataaagtgcatacagctctgaatcccagatatgtctgtctccaaagagttcatataagggattgtaggaactgtactagcatacacaggcctaatgcttttgtctgtaactggggtgtcttgactgaaaaacctgttattgtgaatcctttgttgattgaattttaagttcccccatctttttaggctgaagcagccacaagaaaaaaaggtatggcccacat

SEQ ID NO: 21068 - DNA, 2920 bp, Homo sapiens
cggtctgaaaacagagtggttgtctctggtgagtgtactggttgtgtggattgatgtgaagggacgaaaactacctaaaatttttctcttgcgtgacaggtttaataattgcaaatttttcatgctaggtcttaaattgctttagtttttgggtgaatttaataaacgaggattgctgctgtggtgatttaccaaattaggttgcggtactagatacgaagatcgttacaaataattttggactctggattccagaatcttaccagctctctttacctggtatcacttaagtacacctattaagtactttaaagtactctttgtcctaatgtaccttaccagcttaacgtgaaatttaagataattggtactaagaaaaaaaaaatcactttttcaggactgcctccaagtggaagttggcaggatttaaaggatcacatgcgtgaagcaggtgatgtatgttatgctgatgtttaccgagatggcactggtgtcgtggagtttgtacggaaagaagatatgacctatgcagttcgaaaactggataacactaagtttagatctcatgaggtaggttatacacgtattcttttctttgaccagaattggatacagtggtcttaacagtggaatttcaaggtaaggattcaggcaaggttgtccaagtaaattgccagatttctggttttagttacattgtattcattcagcatgtctgaagatagatgaaagcttagatctttcaatggaaagttctgtctatccaatagggagaaactgcctacatccgggttaaagttgatgggcccagaagtccaagttatggaagatctcgatctcgaagccgtagtcgtagcagaagccgtagcagaagcaacagcaggagtcgcagttactccccaaggagaagcagaggatcaccacgctattctccccgtcatagcagatctcgctctcgtacataagatgattggtgacactttttgtagaacccatgttgtatacagttttcctttattcagtacaatcttttcattttttaattcaaactgttttgttcagaatgggctaaagtgttgaattgcattcttgtaatatccccttgctcctaacatctacattcccttcgtgtctttgataaattgtattttaagtgatgtcatagacaggattgtttaaatttagttaactccatactcttcagactgtgatattgtgtaaatgtctatctgccctggtttgtgtgaactgggatgttgggggtgtttgtggttatcttacctggggaagttcttatgtttatcttgcttttcatgtgtctttctgtagacatatctgaagagatggattaagaatgctttggattaaggattgtggagcacatttcaatcattttaggattgtcaaaaggaggattgaggaggatcagatcaataatggaggcaatggtatgactccaagtgctattgtcacagatgaaattggcagtattgaccttatactaaaaggcaggggttaaaaatgattatatacattttccttaaaacacttgcaaacattttattcagttgtctttagctacaattgctttgctttttaaaccttggcaattgtggcaaaattatattgcccattttgtagcaacttattttgctcccttccccccatttttgttttaatagggactaatgtgggaagaactggctaatttgtcacagtgcttagttacaactgttaatgtgtgacctgctgttggtgtacatgtgggtacagggtgtttttaaatccaacaagatagagtataatatcaatactgctaaatctgcatgtcctctgtgtgactgatagagcgttgctatttcatttttttaagacaaaatgaaagcaaaatatagagttccaatgtattggtgtagataatctagttgggaatacttttaagtctcaccttcccctttaaactaatattcataattggttcatatgtttaaaagactttaatttacaaattaaattgcaaatgggagcattagatttagttttagacttaggtgggtagcaatgccagtaaacttaaattacgtaacttcttgcaaccacgaaacctgtaatacgctgtacagtaacaagtgttggcattatcagttgaactgtaaatacaaaatgcttcttccaattagtctctatgatgattaagtttctaaaatttatctgaacaccattcagaaacttgttttggggaatttgatagttattgatgtgcatctgttaaactgatgacagacataactcatcattccccagaaaccttttttgattacagtatctaacattttgcctcctcttttttggttttgctggttataaaggtttggattggagagggctcactggatcccaatccttggagctggatcattggattcaaatcataatgtggataggatagggaggatgaattaccaggattcatggagcgggatcagattaccaggaacataggagtggattcctgccccaaccaaaccgcattcgtgtggatttttttattcaacttaattggctattccaaagattttttttttcctatttttgacgattggagcccttaagatgcacgatggaattgtgttttgcgttttttggtaaaaggagcaaagcgaggacctggagataaacgctggagcaatctccttggaaggattcagcacgagtagatggtaaacatttaaaggggaaagggggggtttgtttaaaatagtaaatcagtaagtcacttctaaatttaaagaaaacaaaattggagttgaagaataagtaggtttccaattggctattgccgttttctttgaaaaaataaacattttttaaaaaactatgcatggttgtcctttttcctcttcatgtaagattctaactg

SEQ ID NO: 21069 - DNA, 1072 bp, Homo sapiens
ccaagtgctttgaaggcgccgagttgctttcaaagatcctcattcctggagaaatcgaccatccttcaagacccgacctggatgactagctcctttaacgaaagttcgttatttaacttttaccaaacggctggtcactctgttcgcaaaccaccccaagctgggaacgcgggggacttttttacccccttcgtggggagggtgacgtcgcgcgtgcgtgcgcgtgcgctgaacgtagccctcgcagcacccgttgcgctcccgcgcgtgcgtgttgggatcgaatcgctgtttccttccgcttctcttcctctgtctcccccccatatccgtgcgccgagctgataaaggcgccattttggaggggccgcgggagacgtggtgccgctgcgggctcgctctgccgtgcgctaggcttggtgggaaggcctgttctcgagtccgcgcttttcgtcaccgccatgtcgggaggtggtgtgattcgtggccccgcagggaacaacgattgccgcatctacgtgggtaacttacctccagacatccgaaccaaggacattgaggacgtgttctacaaatacggcgctatccgcgacatcgacctcaagaatcgccgcgggggaccgcccttcgccttcgttgagttcgaggacccgcggtgaggcggcatggggcttgcagccttgaggaaataggtccgagtagttggggaaggctccaaggccttaacatagagaacggggaagcgggggctcttagagaggttggggcgagactgtatcgcccatgcaggagtcgagtaaggagctgagttgatgtggcttctctggcgcctcgccttggacgtccccggagcccattcgcaggctggagcgggaaactgaggcgctgagggctggtgtagtggttgggagcctggcgtgtttctgggtgggggaggggccattcctattatgcggcgcatgtgggctcttccacgttgggtgcgcatgtgcggggggtttgctggttcccaactgagcgagcttctcctcctggtgtttctcatcccttttactttctgcgatcccgcaga

SEQ ID NO: 21070 - DNA, 1031 bp, Homo sapiens
agggctgagaacaggagggaagtgactgtggataatgagctgtcccagaatgcgccttgcagaacactggcattcagaagcactgttgattaccaaagaacgggggaggggttcagaaaaggccttgtcccttccaggaataagaagggactttattatagatgcagtaataaaaacagctgccattaagtgagcacttactaagtgtcaggctttttgctaggcactgatatccattatctcctgtctacacaaagcattcttgttcccattccaaagacgagcaatatgaggctcagaaagattaacatgcccaaggtcacacaggtaaatgatggggtcagaatctgaactctaggtctgtcttgggagggaggggaaaaaatcagaacaaataagttaaggaggacacagggagaatagactcaggaatatgaaatacaacacacaccaccgaaggacagttcacatgtctttacacagggggtataaaatatgtatgcaaagctgaattctgagtcagaatgacccaactcgtgcttgaaagcaagtgcctcttaatttgcccctcatggcagcctgtgagacagtggtgtcctaactcctggcctttgaggaagtcaaattcaccaagtttccatgagccctccacagccacacccttctcaaatcaggcaagctcatttctcttgaccctcccctggtgtcactgaggggacaggtggcccactgtagaaatcgtgtttgcatcttcatgattaggagaccttgcattccaaggagacagatgtatttgcatctgttttctcaagagcccgcttcctggctgaaaattccttggaggaagggcaaagacagcccctgtgttatacccagggaatgccaatgctgtctttcttgctaggtgctgaactgagtcctagttcaaatggctattatttgtttttaatttgagaatatttgaaaagctctcattgtaaaagagtcaagccatacaaaagtataatgagtatgattgtcataccacagat

SEQ ID NO: 21071 - DNA, 1026 bp, Homo sapiens
gttgcctttgaaaatggcaaatgttaggtattattattaatagtaattaaacttgagctattccttattcacctaattactatcagaaatattactaagtgtgaaggttattgatttagactccgttaacctatttgcgttcaatttggcatcagcttaacataactaagcaagactgtttgtatttttaatgtagccgaaaggacaaggctttagcttcaaaattttgtgggttaagggtgctgattaaatattaccataatgtagtacaggtagccttagtggtttaaagaatgactaatagtatgtgagttctggggtgggaacttaatacctgttacttgtggtacggtgaatcacttatctgccctggacctttgtatgtgtgcctgttccgtactggtaaccccattagcttccttccatgatcaatgaggtgatcactgacacaaagcagctgttttctaagttttgacttatcagagtctgagggatcctagaaccacattatatatcactcttccatcttccctttttgaaaatttagagtatttttttaaattgctgctattggctgggtgcggtggctcacgcctgtaatcctagtactttgggaggctgaggcgggtggatcatgaagtcaggagttcaagaccagtctgaacagcatggtgaaacccagtctctactaaaaatacaaaaattagccaggcgtggtggtacgcaactgtaatcccagctacttgggaggctgaggcaggagaatcacttgaacctgggaggtggaggttgcagtgagctgagatggcaccactgcactccagcctgggtgacagagtgagactttgtctcaaaaaaaaaaaaaaaattgctgctactctgggacagttgctcagaatgctggcgcttcagcttctggtgtgtagcttgcagccatgtttctaaggaccagaagggaaggagttcaggattgtgaaggggactactttccccagttcattatactgtgctggtcccaacatgttt

SEQ ID NO: 21072 - DNA, 1059 bp, Homo sapiens
ttagataccctaaagcacagtttttaatcttgtttgtgtgtgccacaggcccctttgagaatgtgatcattgttattgaccataggcacaaaatacacacaaatacttaacatacacaattttgcataaaatctcagtgagttgactctctaagacatatctagagatctaaggactccagatgaaaagcaactatcctaacataatcccaattatttcaagaaattaaaccaaattctcaaaacaaatttaccttcagtttacttaatttgaaaagtacttgtatgtattacttaaagtcagacagacaacaatattgtgatgcagttataagaaagtggcctgaccttaggtgaaggaactccagaagtaaaaattgatgtctgacaaagatcttcttatgtgtagtaaatgaattctgctctccaaatatgaagtgaaactgcatcaattcaagaaatgcctacaatcccttcagcatggtggttccactgaaaggcccttaagaataacggatattttactcacatgttttgagattagtagaaccgtcgtggctttatgtgtctatttagttactacattcagaaaactgagggtataaaacaaactttaactttgttttcttcccgtgtctttagtttccagtctttaagctccattgctttccctagggcagtgttctttaggcccttaaatttctatttgctctaatggaaaactttatatattttttaaagccaagatttgttgttgcttgcttgttttgaataacagataagctactttacatactctttttatctgggttctaaacttacagttcatggataaattttattttgttctatactttttaatatattggaatctgtgtttaatttacaaatttggaaacaccagagtaaccaaaatgatttaaaaactaaggtttttttaaaattgtaagcacaaaggcctggtgcattattcctcaagataagaagttagactacaatatttagaaattcttgtctctaggctgggtgtggtggctcacgcctgtaatcccagcacttt

SEQ ID NO: 21073 - DNA, 1079 bp, Homo sapiens
tcactttgtcagcaggtagagagcgtgattgcagtcccaggggagggagtcagagctagaacaccaattacaaaccacaggcttcctgctctagggagttgatccagaattgtctttctgaaaggaagcactcggaatccttccgaactttccaagtccatccatgattcagagatactgccttctctctctctgggattttatgtgtttctgatagtgaattgttgatgtatttgctactttgcttcttttctctttcaagacttgatcattttatatgctgtttggagaaaaaaagaacttttgttagcaaggaggtttcagaaatgattttggattttctgtaagtgtttaatttagttctaggggacagcatctctcatcccggagtaaatttctgcctttgacctgcatggattattttttcaggctgcggaatttctcggcacctacctgtagtatggggcacttggtttggttgcagagtaagaaggtggaagaatgagctgtacttggttaagcagttgaaaccttttttgagcaggatctgtaaaagcataattgaatttgtttcacccccgtggattccagtgggcccgacagcgcaacaggtttgcagatttcttttgaaattcctttttcccccctccctctgcctcagcaaaagaaaagaatccatataacaggttcatgttcaattgcttggcttttcagcacttattctgaagactttataatatttttaaacttgaccttggaacacagagggctttgtgggtgaggtgtatttatatttacttaagggtgcacattttaaaaatcttattctgtgtttgtacaaagacgcaaattttcatagtgcctagaaatagcacagatctattctactcaagattatttgtattttttcagggtattctacctagagcctgtggttaatcgcctccctgctccccctaccttttattccctaccccctcagggaatttggatacatgtgaggaatagtcctttgtttttcttatgaacctagaaaattacagatcataaaatctggatattaaagtagtttccaaaag

SEQ ID NO: 21074 - DNA, 1064 bp, Homo sapiens
ttttttttttaaaaaaaaaagaagttctgtggctggcaggggttgagaaggggctattttaaggaatagtggaaatataggacaggtcattgagggcattgaaggctttaaacattacagtgaagagtttattttgattcagttgtcaataggaagtcattgtaggaagttactgtggtctgctgacagtgggatccttggagaactaatcagtgagtacagggtagctggaggcacagagaccagccagcactgctgtagtagttcagatatgaggggaagagtccctggcaaagagaaaggattaaattcagaagcactgtagagaaccattggcaggctacagaattgaaagttggagagtagaagtgaaaagtactttgggtcccaagtatctgagcttaaaaagtaggagaatattagtaccactaatagacattgaaaggtcgagaagaccagccagtttggggagaaagcggagatacagggaaattgggattgaaatattagttgacagcaaagaaggaggtgtgttgtaggcagctcaagatggagagtagatttcgagaaataattggtataaagattttaaaggaaatggtctctgtaacaactgacctgacttacctttgattctacctttccctagatcaaaaatgtccttcttcttctccttcttctccccctcctccccctcctcccccctcctcccccctcctcccccgcttctccttctccttctcctcctccttcttcttcttcttccattaaagtcataaacacattcttctatacccatctcaaatcctaccctctctctgtagccttccttgacctcctagctggatgagctctctctccttgttgtaaactcaggtattattatctctgtcaacattgctgactaacctttggtacacatagaatgagttgtggaggatggcagaatgttgttatttgaatttggatgaagagcacatggaagttaattatattcttctttttgttgttgtttgagacagagtcttgctctgtcacccaggctggaatatagtggtgcgatc

SEQ ID NO: 21075 - DNA, 1045 bp, Homo sapiens
aaaactcaaatggccgaagttcgatgtatgaaaactgatgtaaagaatacactttcagaaataaaaagcagcagtgctgcttctggagacatgcagacaagccttttttctgctgaccaggcagctctggctgcatgtggaactgaaaactctggcagattgcaggatttgggaatggaactcctggcaaagtcatcagttgccaattgttacatacgaaactgtaagtaatatgttcccagtgtcatttctccacacgttatttgggaaactagatgactggttttttcaaaagaataatatttaaataccactcttccagtgagttaagactacaaattacatgtgacttttttcttcatccaaaattgattccgtatatttttactatataatagaactaacatttcttgattgcttactctgtatttggcaataaacaagacaaaattcttaacatcatagatcttgtattctagtagtgggaatcagacattaaaaagtgtagacaagtaagtaaagatcatttcagtgggtaaaaggtgctgtgaaggaaacaaccgaggagtgggatgggaggagcagatgagacatgttctattggggtagtcagagaaagtctctgtgaggaggcagcacttgacctgagacctgaagtttaggaaggtggcagctatttatagatctagggcaagcagtgttctgggtaaacagaacagaaactgcaaagtcactgacacaggatttattttgcgtatttgaaggattgaaggaagaccagtatggcaaagaaagcagagagaggagactagcaggagacgaagtcagagagaggtaggcagaatttagatcagggagagtcttgcaaaacctcaaaaaggagttcgagttttattatgatgtaaggaggaagcctctagagaataaaaataaggggtgtttataatctgatttacactttacaaagatgactttgcttgttgtgtggagaagggtctgaaaagggttgaggacaggaattgtgagaccagtaacagcctattac

SEQ ID NO: 21076 - DNA, 1052 bp, Homo sapiens
aatctctagacagaatcttatatggaattctaatattaaaatcatatagaaattatatttaattactttcagcatagggtattacctttttgtatgttggtcttaaaaattaatttttggtttaaaatttttttttgcttcactcatttctaatgaaattatttttcccattagggtcttgtttttttattaaggttgatttgtaagagttctatatatgttaaaactcttaacctttgttgtggttgttgatatttcccttcatttttgtgccttaatagtttcactttttttttaatgcacaaaagtttaaagttgttaagaactcaaatctattggtgtttttaattatttcttccattgctttgaggcttagaagtacttctcaatctagatatcagatattatctgcattttgttttattgtggcttaatttttttacactcaaactgattattcttcttttaggatggaaatggagttgtgcgaggttactacttatctgtgtttctggagctctcagctggcttgcctgaaacttctaagtaagaagtgtaattaaataacaaccttaatgtgcatttacataccttccccctagcaatttttgttaatttttatttttgttaattactgtattggtatgtctgttaagatgtagaataatatgttcttggcatcataggatggtatttttctaaaaacaaaatatttttaagaaaacttgtattgctttgcgtttttagaaatctctttactatctggcttagaagaagactactggattctcatgtctgcttttatattcaatttttttaaaatatcattttgattgaaatacatgtatgaaatctgtctgcagagttctacaaccatcaccaacatctaattttataacattctatttactccacaaggaatccctgtactccttagcagtcacttcccattccccgtttccctcagtccctgagaaccacaaatgtactttttgacaaggaggaatattttttaaagtggttttagataattgtggatcttctttgatatt

SEQ ID NO: 21077 - DNA, 1061 bp, Homo sapiens
cgattattactctaaaatttagcatttttatttattgaggaaatattaagtcctaaatagatagcaggcatcattgtagatattggtgatacagcagtgaacaaaatggtaaaattctgtcctcatagagtttatattttagattagggtgggtgaatatgaagcatatagtaaatgagtaaataaaatatgtagtgttgcataaatatctgatacattcacttgtctggaatttgctttttgtaatttctctctatgccttatacacagctgtctcctgagatttttatcttaatcattctgggaattcccttcacatctttcttgtattgaatctcatgtttcctgattcctatggtttccactttcttggtttacttgttttgttttaacatcacacttccctcagtagctttccaggaagggtagtcagaacacatttttcttgactgcattgtctgaaaatatttttattttatctttgtacttgattgacaatttggcttgtaggattcagcacataaatatttactaaatactcttatttttcttcattatccccattcttttttccttttctttttacatacacacatatatatctgtagggcattggccccaggaccttaatggataccaaaatccgcagatactcaagtcccttatataaaatggcatagtattctcatataacctatacacatctcccatatacaaacatgtgtcaaattatgaccttttggtcaatgacagactgcatatgtgacagtggtcccacaagattaaaatggagctgaaatacttctgttgcctagtagtgatgtctaatgacatcatagccattgtaatgtagtagcacaaagcattaatcatgtgtttattgtgatgctagtgtaaacacacatactgcactgctagttgtataaaaatataacacattattatgtatggtatataatacttgataagcataataaacaactgtgttactggtttatgtatttactataccataccattcattattctagaatatattctagagtttactcctacttttt

SEQ ID NO: 21078 - DNA, 1052 bp, Homo sapiens
ttgattctccaagattttagccatgtctttgtgtcatccaaaataatgattttatccattttatttttaactttttaaaaatgagatgcaaatatctttgagtttgtatatttgtatatcatttcatgaattgcttttctattataatcctatactatttaatatctgatttttagtttttttcccacagaccaagtagcaaatagtcttaaacaatcattcttctagtagttagattggaaagcacagttcatccacccagtggagcaattagacaaaacctgtaggtattgattgtactggtcacaatgccacttatatatttcatgtaaatgaaaatcgtaattgttcttagatcctcagttgcagtcatacatataggtgatcttagtttttcagaactctagataatatttgagatctctttaagttcattaagccatgtagagtactggatgttgatacgtattaggactttaaaattgaggggatcttgactgttgatgtgatcttcagtcgtagccaaataaacatttgcatgtggtcttgtttttcttgagtgagtttgttcattgcttcatttatttaattgaatcaactaaaagtcaaataataccacagtacagatctcttaagtttattaattttactacctgtataactgtgaaataacttccctttctaataactgaacttgccctgcttttgtggctttcaaattatttttcattatgaaaaattataatttgtgatttccaaggtagcttttatgattaaataggattctttctaaggataagaggtggggaaaaggatattttcagggttagtttatctttagaatagtcttataagcctcagatttttaattcataccataatatctgccactaatttattattattattattattatttgagatggagtctcgctctgtcattcaggctggagtgcagtggcactatctcggctcattgcaccctccgcctcctgggttcaagcaattctcctgcctcagcctcctgagtagctgggactacaggcacgtgc

SEQ ID NO: 21079 - DNA, 1050 bp, Homo sapiens
attagtgtatgtgtatggattttctccccagtgctccactccagctacgagaactagtaaattgtcgttgggcagaagaagtaacacaacagcttgatactcttcaactctgcagtctcaccaaacatgaagaaaatgaaaaggacaagtatgtcctcaatttctttgttcaatattgaatggattttgcctttgtattgtttaatgacactatattggtagttgccttttagttatttatgaataagtagtgttatatttcttgtttttaattctttcagtcatgcgctgttactgttaagtaacatattcttattgtgtttatttaacaacagttatttcatgccatgtatacacagatacctctcgccctcccctccccccacacagaaagtactttgctagatgataggcatacaaaggtaaatgagacatgatttctgttaactgtttaatggggacacagtgataatacagtgttaagtcatttaagggacaagaatgaataaatggtcttatgttccatgattgaagaattttgaacatatctggagagttgttatggggagcaggtaaagaaaggaaagagtgatgtggcagtgattggtttttatagatgaagaagctacaacatggttaattgtaaggcttcactgtccagcaataataaaataacttgaattaggtgagattccaggacccctgaatgtttagaaataaagccttgtcactttctgtagagtcacaacatggtaaagcaagaggttgaaacctcacaggtcattagaaaaaaatttatctgtttcttcattatactgaggaaatagaaccatagaaataagagaacagggtgtggtggtgtgcatctgtagtcccagatacttgggaggctcaggcaggaggatctcttgagcccagaggatggcttaggtaacatagcaagaacccatctcttaaaaaaagaaaaaaaaaaaaaaaaagaaagaggcttaattatggtagtataacacattaatgcataatcagaattaaaacctactattcgggcgg

SEQ ID NO: 21080 - DNA, 1061 bp, Homo sapiens
ggagcttttactttggatcaagttatggcaaacaagaagaatgatttaaaagttataaaacttgaaagaggtggtcatattttagaatcaatgatgaccaaattgggaaatgttggatatagtgagtcttgtacctactgctttaaaaatgaggtagtatgctgggcacagtggctcatgcctataatcttggcactttgggaggccaaggcaggaggatcagttgaggccaggagtttgagattagcctggacaacatagtgagaacctatctctaccaaaaaaaaaaagaaaaaaaagaaaaagaagaagaaaaaaatattttaaatttactgggcatgggagtgcatgctggtagttccaactatttggggcagaaggatcctttgaccccagaagtttgaggctgcagtgagctatgattgcaccactgaattccagcctgggtgacagggtgagactgtcccccaaaaattttaaaataaactaaaataaaaatgagatagtagtagaaagttcagagggaatacagatatgaaacttaatcttctgagagatgtttaaaagggtagcttaataaacaaaccattatattgataaatttttatgatccaaatgtgaatgggaatgacatctgtagagctgataaccaaaaacagttatatgagcccagagtttaaaggacttgcaaggtacaatttgtaaataaatttcaaatattaaaaggtcacagggacaaacctgtgaaattagttaggaaagccaaagaggccgggtgcggtggctcacacctgtaatcccagcactttgggaggccgaggagggaggattacgaggccaggagatcgagaccatcctggctgacatggtgaaaccccatctctactaaaataacaaaacattagctgggcatggtgttgcacgcctgtagtaccagctactcgggaggctgagacgggaatcgcttgaacctgggaggcggaggttgcagtgagccaaaatcttgccactgcacttcagcctggcaacagagcgagactctgtctcaaaaaaaaaaaaaa

SEQ ID NO: 21081 - DNA, 2734 bp, Homo sapiens
cagattgggaactgatgaacctgaagcccttgctcacttttatcccctctggttgccaattgcctgaaataacatgtctgtgacctggtgttagggcatgttactgcttatctgttttggacaagcatagtcatgcatttgttctgtttggaagagagaatgggtaatagtcaatactttctccagcagaaaaaggcaaaaaccaattttgattgtggagacatgatataagtggtccttagcttgctgggaacttgaaatatttcccttaaaacgtgttttaaagggtagttgggttcccaggtggtttgttctttcaaatgaatgaatgtttgttctttcatctattcccttttgtcactgcacattaggctgtatattaaaaactaaggatacaaaaaagcgatctcttgccaggaagatgtttgaaaccatgtggcgacattaccatgtaaacatagattaaaatataatacagtagatggtaaaccaaagccatgaacaaagtaaaaggagagtagataaaggtgtttctaaatgtacattgaagagaagaaaatgtacaaaaagtagattctggccgggtgcagtggctgacacctgtaatcctagcactttgggaggccaaggcgggcagattacgtgagctcaggatttcgagactagcctgggcaacatagtgagcactcatctcaaaaacaaaaaaaatttaaaaataaaaataaaagtaggttttttgattatagccaaactagttccattaagatacttaattctcccttaaaatgtttctatggaaaatgcatttcttttttttttttttttttttttgagacggagtcttgctctgttgcccaggctggagtgcagtggcgccatctcggctctctgcaacctctgcctcccaggtttatgccattctcctgctccagcctcccgagtatctggaactataggcatccaccaccatgcccagctaattttttgaatttttagtagagacggggtttcaccgtgttagccaggatggtctcaatctcctgacctcgtgctccgcccgcctcagcctcccaaagtgctgggattacaggcgtgagccactgcgcccagccggaaaatgcatttctaagcctgtttagtaagtccagaacacacctgtctaccaactcttctctatgcctagcccaccataggtgagactgaaatactttttttcactttatgtaatttaatgctgttgagataaggtctctcataagaggatgtgtttagagctttaagggcactggtcctttgtaggagagcatacggtggcaatgagaatctaggggttgtttgtaaaaagcaagtgttttaaaactgaggaccacacagtatattgtgacaaccgcaatatattcttttctccttgctgcctaatagttgagtagtatggaataccttgtgccacttacttaaagccttaaactggtcatattgaaaactagactagaacaggctgggcgcggtggctcatgcctgtaatcccagcacttcaggaggccgaggcgggcagatcacttgagctcgggaggtcaagactagtctgggcaaaatggtgaaaccccatctctaccaaaaatacaaaaaatttactaggcgttgtggcgtgtgcctgtagtcccagctagtcgggaggctgaggcatgagaattgcttgagcctggaggcagaggttgcagtgagctgagattgcgccactgccctccagcctaggcaacagagtgagacgctgtctcaaaaaataacaaacaaacaaaacaactggttgagcatccctaatccaaaattccaaaatctgaaatgctccaaaatccaaaattcattggaccatttcagattttgaattttcagattagggatgctcaaccagtaattattatgcaaatattccaaaataggaggaaaaaatcagaaatctaactggcagaatgtaacctggtttcccttggggtgctttcatgatgatttccatagacttttttcacctaattttgtattttatataccacttttcagatcagtataaaacttttcccctttatttttattactgattttagagaaaactggtttctgaaatacgaatatcttgggctttacaaaaatcactagttttattttaaatattccattgcccctaaaaagttaaacaataacctcactgatttccaaggcttccaggaggctgatttgtaactgaaagggctgtgaatgatgtttatcagaatcaaatttgcgcgatttatcagacactaatgagttttagattatcataattgcttagtgaatttctgccatctaactaaaaaaaattctgtttatcaccagatcctagaaccctatcaatattgtctctgctgtgtaaatagttctgagtagtgcaatattgcttatagggttttggtgtttggaaagaacaatgggcaggctgcagaaagtatgtagcagaaacaagcaaaagtcatctttaggaagaaaacaaggaactagatttcactataaacattaaaatctgaggcttaaatgtaaatttttaatttattagaagaaggtaacttttctttttgacaaatgggtttatttgtagtataaagaaataatggaattttagtattgaaaaggatcttagattccaactcatttgataggagagacccaaagaaatgagggacttaacctagggacacatagc

SEQ ID NO: 21082 - DNA, 1024 bp, Homo sapiens
cccagccctgtctctctttttttttaatattaaaatataaaaattaaaaaaatacatacataggctgggcacggtgactcacgcctgtaatcctagcactttgggaggctgagatgggtggatcacctgaggtcgagagttcgagagcagcctgaccaacatagagaaaccccatctctactaaatatacaaaattagctggatgtggtggtgcatgcctgtaatcccagctacttgggaggctgaggcaggagaatcgcttgaacccaggaggcagaggttgcggtgagccgagatcacatcattgcactccagcctgggcaacaagagcgaaacgccatctcaaaaaaaaaaaaaaaacccaccatatataaactaaagaatttatctgaatattcgtgcaataacaccatccctgtcacttacatgtactaccatgacctactctgattgttctcaaagaaaatagaagaattgtggtaaagtgaataattcaccccatttcttcacttctgcctgtatccacatgtttgtcatgacttcatgatgggcagagtacatttttctcctcttgatgtgctttggtcaatggcatgtgggtagaattgacagtgtgcagctttgaacttgggcctttaagagaccttgaatctttctgcttactcttatgtttcctctagctccatgagaatatctcatgggttcaaagaggatgagagacaccagtagcaaaggtcctaccaggcatcctccagaattgctgtgtgaagcaaagccaccaaactcagcctagcctagagtacctgaaccgggtcaatgtgcaggtccatgaaaataaatgatcagtttttaagccactgagtttcttggtatcacgtgccataattttgaagtatgcctaggctctcttttttttttttttttttttgagacaaggtctcgttctgtcatgcaggttggagtgcagtgatgtgatcaccactcaatccagcctggacctcccgggctcaagcctatttcagcc

SEQ ID NO: 21083 - DNA, 1050 bp, Homo sapiens
atgtagagattgagaaacttattattttacttttcatttgttttctttgatacttttattcaaagggcttgttttacatggcgtttaatcagtaaattgccttgaagaaggagctaaccaacatctctgcagagaacaaaaatatttttcacaactttgccttagtagtaattataactggttttgttaataccaatcctaaagtattaacaatacccattctaattactattaaggcttagggcatatttacaaaattcctttctacatctatgcatgtttctgttcgaatgttaatttgtatattagtcatcaataagcaacatcactttgatatttaagtcttatccttttttaaaaaaacattgatataaatgttttttggttttggatgtttttctgtccaaaatggcaaccctactttaaattcgtttctcactgaagcttcaaccgatgcaagatgcttttgtgttcctttcctacttattactgctaacgaatgctctgactttattgcactactgtactttacagctagcagtgcaatagtattgtcaaagcatctgaaagcaggatgcacgccagaattttgattcttaccttacatctttcttcggtatcagtaaataatttaccacaacctttgttgctgagaactataatgttgttactaacagtatatcttttagaaagtcataatttgaaaaaaaaaaaccttttaactaattaaaaacaatattttactgcattatgaaacacgtctggagaatattttttatatctaagttgttatggtttgtctaaatgagtaatactttataatttgttgctttctgttacatatttggataggttctgtcaaactttaggttttatttgagttttatgatgaattggtagtgatggaaacaatttctgctgtatatttttcctgcagttacttgccccaagtcatttttttttctccagagacagagtctttctctgttgcccaggctggagtgcagtggcccagttacacctcactgcagccttgtactcccgggctta

SEQ ID NO: 21084 - DNA, 1034 bp, Homo sapiens
ttgcggcttaagcgccgccgcggtctgcggaatgtcaactattcaacatggaggcggaggtcgataagctggaactgatggtgagtgcaaagtgaaggagatctactgggtagtttatttttcccccatggcctcggaggtggggcacaatttggagtcgccggaaactccgggcggcggaggctggaccagagtcgagttccctcctcctgcaccaaagggagccgccaccgtctggtgtctaaaccgcctcgggtaaggggttacatccgggaaactcgtcagggaaatggcgggagatgctgagggtgcggggcctttggaattccttgttccttgccctcacctttacaccccttacgaaactgcgccgggtgcagaccgcattctgtgtttgtaccaaaaaagatgtgaatggaacggtccctaagcgtcccaagaagggagaggtggttcacactccaagaaaggggaacggagggtggggtggggaataaactgacgggggcgaggagaaatccctgtagggccaacccgctcacgttctaaaaggcgggccgagaaagtctgagaaaggatgctagacttgtatgcacaacttcctaacggccaaggaacccgtttctgtttgatccggaggtggcaaaccgtgggtgagggaagaggtgtgagcgaaggggatcgtaaccacgagctccgctcccggagcgcgggcgggattgagacaggaaaggcatcctgctctggagttgtgcactttcattcatctgtgaaagtagaaaacgggggcgaagaattggaaagcactcccgttgttgctggcgtgtttggcctgctcggggggcgcccagctggggggctgtcctagttttctttaaggatccgtccctcacttgttctctttattccctccctcccatccttagattaccagcttgatcgcccgcgcttttttcctcttagtgtccttgttctgtcttcagcccttttcgttcagcattatcttttttttcttttcttttcttttttttttt

SEQ ID NO: 21085 - DNA, 1035 bp, Homo sapiens
cctcagcctctcaaagtactgggattacaggcgtgagacactgtgcccagcccctgtctttttttttatttttttaattaattaagagtttaaaaaaaaaagcccctggcttcacaacttcatgattattaaattatcactaatctagttcaccaaaagaccaatatattcttgattttccttctttttttttttttttttgagacagagtcttgctctgtcatccaggctagagtacagtggcgcgatctcagctcatagaaacctccgcctcccaggttcaagtgattcttttgcctcagcctcccgagtagctagcattacaggcatgcaccaccacagccggctaactttttgtatttttagtagagacagggtttcaccatgttggccaggctggtcttgaactcctgagctcaggcaatctgcccgcatcggcctcccaaagtgctgggattacaggtatgagccactgagcctagccttattcttgatttttctaagcaagacactcataactgaatatctgaaagctactgaatttttaaaactgcttttgtcccagacactgactggtgctagaaatataatttactaaagacaatccctttttctaatgatgaatagtgactgcaacagcttagcgagcaattttaataagtatggtaaatgttatgaggagaaagccctaagttctaggagtacagagcaaaagcacctaaccaggtctggagttaaggtggggcatgggtaggtagggatgcactccctttccctagaggaattgtctcttcatatacataacatttttcaaaaattaactgaatgaaggagaaacaaaatctatctacttcctttgcttattatctgggaaaaatactaatttggaagaaaatgagtaaaaggcaagaccagtaacagtatttttaaaatgtttagccatttttcagaaaattaacatagctcctggtaaaatattcttattaatattaaaataggctgtgcgccgtgactcacgcctgtaatcccagcact

SEQ ID NO: 21086 - DNA, 1033 bp, Homo sapiens
tgtggaaaacccagcgggcctttagcaaatatgagaagtctgcagtgttggtcagcaacagccagttcttagtaaaaccacttgatatgattgttgggaaggcatggaatatgtttgcttcaaagtaagtataaaataagtctacaaacctttctttttttttttttttttgagacagagtctcactctgttgcccaggctggagtgcagtggcacgatcttggctcactggctcactgcaacctccgcctcccgggtttaagtgattctcctgctgcagcctcccaagtagctgggattacaggcgcctaccaccacacccagctaatttttgtatttttagtagaggcagggtttcaccatgttgctcaggctggtctcgaacttctgacctcgggatctgcccacctcagcctcccaaagtgctggcattacaggcgtaagccaccatgcactgcagcctttctaacttataagcagatactgtagcgttaaagcatgaggtccgatctgcaggaagcatagttactactttgtaggtgtgaaggtatgaagccttgggcacgtgacttcaggcttcattgcctcatctgtataagtgggtcctaactgaggacatttctcacgaggattagataagataatcttgtaaaacagctagtacagtgcctggctagtaaatgctcagtaattgtttgacattattaaagtagaattttattatgaagcagggacaataagatagttttcaaaaataacatcagccgggcatggtggctcacacctgtaatcccagcactttgggaggctgaggcgagcagatcagctgaggtcaggatttcaagaccatcctggctaacacggtgaaaccccgtctctactaaaaatacaaaaaattagccgggcgtggtagcgggcgcctgtagtcccagctactcgggaggctgaggcaggagaatggcgtgaacccgggaggcggagcttgcagtgagccgagatcgcgccactgcactccagcctgggcgacagagcg

SEQ ID NO: 21087 - DNA, 1032 bp, Homo sapiens
tcgccactgcactccagcctgggaaatagagcgagatgccgtctcaaaaaaaaaaaaaaaaaaaaaaagccaggcatggtggctcatccctgtaatcccaacactttgggaggccgaggtgggtgaatcacctgaggtcaggagttcgagaccagcctggccaacgtggtgaaaccccatctgtactaaaaatacaaaaattagccgagcgtagtggtgcgtgcctgtaatcccagctacttgggaggctgaggcaggagaatcgcttgaacccgggagtcggagagtgtgccattgtactccagcctaggtgacaagagcgaaactccgtctcaaaaaagaaaaaaaaaagacaaaaaacaactctctccttgaacctccttctcctagtcaccccacttttcttctccagttgttgcatctcccctgtcctcacttgcatagttctctctgggcaacttcactgtcatagtttgctacatttattacacctgtgactttcagacctctagcccagcctctcttaaaagctctagacagattagtggatatctccacccacatctctcatatgaacctgaaactcaacatctctattcccaaggcattcattattgttccttgtgctcttgctgcatacataccatcaaacaagatctgcttatttgacctcctatatactccttgaaactgttcttccctttccaccttcactgacttgctttagtctggcttttgttctttcttacctggactgtctcaagacactccttttaggattccttgcctggagtctactgtctatcacatccatcctccgtactgctgtgtttaaaaagacatcggccgggtgcagtggctcatgcctataatcccagcactttgggaggtcgaggcgggcgaatcatgaggtcaggagatcgagaccatcctggctaacacagtaaaatcccgtctctactaaaaatacaaaaaaattagccaggcgtggtggcgggtgcctgtagtcccagctacttgggatgctgaggc

SEQ ID NO: 21088 - DNA, 1051 bp, Homo sapiens
gaagaaaccagcagtgaaatatgagaaatagaaaagtgttgtgttaaaagtctagaaagaaaattattcagggagggaagatggaaaaagagagtgaccttgaaatttagccatacagagggagttgatgatcttgacaagcaattcattgaaaggaagagatggaatcctgattggaattggttaagaaaaacacagcagatgtctggtattgatgagtttttttcatttacaggctagaaaggtgtcaactatgacaaaccgtgaagactttttccttattctatgaagggaagatctaaaatccaaacaggtttaaaaagtctctttaagcaaaatgatcctccattccattattgtgaactctgacatcctgccaaactcatattttttacatatcaaaataaaatatttgtagcaaattaaaaccctttattaatactttatctttgtatgttgctctgataaattttgatgtttttcttttggtagcttaatttttttaaatcctactttggaccatttgagcttctgggaagtattttggattgttggaattacagacttcattctgaaattctttttcatgggcttaaaatgccttattttattggtgccttctttcatcatgccttttaaatctaaggtaagaaactcacttatgctttattggagtgatgttatcgaatcacattaatgctatttagtctttgtttaaatgaatcctccttttgcagtttttcagtttgctaactagcttaattatctgtattatttcagcttagcaaccatttgttcaggcacttgaacctgattattaacctatttggataaaatcagaattatatttgcttcagaataattttaaaatcagtccccacatcatatgtgggaaactatttagatgtgtacttctgttctccagggcattatcaattgacagttgactatgtacaattattcagtggtttcccatatgcactaaaaacttttaaattcttataatcagcaaaaacatactcacataggttttacttgcagtatacataaa

SEQ ID NO: 21089 - DNA, 1032 bp, Homo sapiens
gctggccccggccccggccccacccctccgggaacccagctggtggcctctgcctgcctttccctgatcttcccactctcgcgcctgatgatttagtttcaggatggcgtgccccctccaaccttggcacattcttagttctccatttggaagaccctgcagtgcttggcacgctcgagtcattcaaaacccaacttgacgactcctgctctgataatgcctcgggtttcctctctgataccaactttccatccgcccgcaccctccttcactccctctctgtgcacccagaacacttggttgacaaaatgcattactactgtttattgcgtacatggtacacggaccacgtgggaatcttagaacttgcgtagtattagggcttgtttgctaatgaaaatactgaagctcgtaaaaatacagtatacaaaactctgccacaaagcccctatgttttctgttcctacacactagctcctcccctctgccgtctttctgagtaatcttacacacatcaggccttaaattaatgaattctctgaactgttgacaccatggccttctggccctacgtaggaaagagggaagtggtgcaagttgcctgcttgcacaggcatctcaaactagacagttcctaaagatgaaattcattagctccaaacacgcattcccgtccccagtccatcccaccttccaacacacatgcatcatccaccaagtcacaccagacacaaacactggttcttccctccttcatcccagatcctgaccaactcaggtatttcagaatgtgtctcatatatatttctcagttcatcccctcctgtctattcccatagcgagtgccttagacctcaggcaaggcgacttatgcctggactgttcgctgatcccctctgactgatctcctgcctcctgtctagctcctctccaagccagtcattcctccaatgccagaatgatcttttctttaggaggaaaaaaaattgttcataaactttaaaatctgctttggaaaagtcttcaatacgt

SEQ ID NO: 21090 - DNA, 1027 bp, Homo sapiens
agaaaaataataataataataaagtaggcattggaaccatgactttattatatcctcccccctaccccatctcccaccccacctctgcaactctataaacttttttttttttttttttttttttttaaacagagtctcactctgtcacccaggctgcagtgcagtggtgcaacctcggctcactgcaacctccacctcccaggttcaagcaattctcccacctcagcctcccaagtagctgggattataggtgcctgccaccatgcctggctaatttttgtagttttagtagagacagggtttcaccatgttggtcagactggtctcgacctcctgacctcaggtgatccacccacctcggcctcccaaagtgctgggattacaggcatgagccaccatgcccggcccctgtaaacttttatatgcatttatttaatctgccattttacagacaaggagctaggtgttacaccagataaattgtcctacctcagagcattcaataactgaatttggaatttcttgagtgctgtagtatctcaaacaggcaattcccatgtcatttatttgccataaagttcacatcttcctgtgattaacaggtggttatcaagtactttgtaaaaataaagacttgaaaaatgaaaagcatgattccctgaaactgtactaattattaataagtatccctacatttatcagagtctgaagttagaagcccatgacaaattgtgaggcccaagaggaaagcagaaaagtaggaagggagaatattttttattaagaaaatttagattccttcataattatttcttcctctgtggatcttttccccctttttagattttgcagaggctgtaaaattgattgtggggaagacagagctttcattggaaatgcctatatcgctgtggattgggatcccacagcccttcaccttcgctatcaaacatcccaggaaagggtaagtatttagggccaccataaaatggtggtttttatatgagaaatttccaccagtgtaact

SEQ ID NO: 21091 - DNA, 1045 bp, Homo sapiens
actctttcaaaatggttttgctgtctgtcttgctccatctttatgggcaggaagcaaatgacctgaaaactaaataaatctaaatcttcttctaaaacacaagttccagagcaggtagcagatttaataacaagtcaatttctaagctcttaacatctggagcacattataaaaacaaatgcatgagactataatcctcactagggcaatagttattaattctggctgcatatgtagtgagatcacatagagaactttaaaaatgaaaaaatgcctttggccgggtgactcatgcctgtaatcctagtactttgggaggccaaggcaggaggattgtttggatcctccaggagtttgagaccagtctgggtaacatattgagaccccatctctatgaaaactttaaaaattagttgggcatggtgatgcatgcctgtggtcctagctgaggtggaaggatcacttgagctcaggagttcaagggtatagtgagctataggcgactgagcaagaccctgtattaaaaaaagagcctttgctatactccagactaaaaaaatcaaaaagcataagtgaaaaaaaaaagttgaattgatttaaataataaggcatttatgtttatggaaaattttcttttgaaacctaatttaaccaggtgaggtggctcacacctgtaatcccaccactttgggtgactgaggcaggaggattacctgaggctagagtttgagaccagcctgggcaatacagtaagactccatttctaccaaaaaaaaaaacaaaaacaaaaaaaacaaagagtctcgctctgttgctctggctggagtgcagtggcatgatctcaactcacttcaacctccaccccctgggttgaggccatcctcccacctcagcctctcaagttactggggactaaaggtgcacaccaccatgccccactatttttttttaatatttttttgtaaagacgggatctatccacgttgctcgggctggtctccaactctcctgagctcaagtgatccagccaccttggctcccaaag

SEQ ID NO: 21092 - DNA, 1032 bp, Homo sapiens
gtgcagtggcaggcatctgtaatcccagctacttgagaagctgaggcaggagaattgcttgaacctgggaggtggaggttgcagtgagccaagattgcgccattgcactccagcctgggagacagcaagactctgtctcaaaagaaaaaaaggcctggcacggtggctcacacctgtaatcccagcactttgggaggccaaggcaggcggatcacaaggtcaggagttcaagatcagcctggccaatatggtgaaaccctgtctctactagaaatacaaaagttagccgggcgtggtggtggacacctatagtcccagctactcgggaggctgaggcaggagaatcgcttcaacccaggaggcggaggttgcagtaagctgagaactgcactccagcctgggtgacagagcgagacgccatctcaaaaaaaagaaaaaaaaaagagttaaaattgtttttgccaaaaaaagattgaatgtacattagttatactggaaaggtaacatggaagtggactgtctttatatcagcttaagattcttgatataaataggatttcttttttgagacgaagtctcgcactgttgcttgggctggagtgcaggggcacgatcttggatcactgcaacctccgcctcccgggttcaagcaattctgcctcagcctcccaagtagctgagattacaggcgcccgccactacgcccagctaattttttgtatttttagtagcgacgggatttcaccatgttgaccaggctggtctcgagctcctgacctcgcgattcgcccacctcggcctcccaaagtactgggattgcaggcgtgagccaccatgcccagctgtaaataggatattttaagcaaacaaacaactctgctggcctggcaccgtgcatcatgcctgtaatcgtaccactttgggaggccaaggccggtggatcacttgaggttaggagtttgagaccagcctggccaacatggtgaaatcccgtctctactaaaaatacaaaaattggccgggcacagtggc

SEQ ID NO: 21093 - DNA, 1077 bp, Homo sapiens
gctatcacttcctccccctccctttcctcgcctctagtaaccactattctactctctacttctatgagatcaacttttttagcatctacgtaagactgagaactgtttacctttcatgaagtgtttattttttaacaataaaataacttggcaggatagtaatctatataaatataactcagaacatcttgtggaaataactagttttattttcataaaacttagtaagtctctttggggggaatattttatactctgtgcatgaattttcctttggtgattctctaagggaatctaaaagaaagaaacatcttacagagtgtctcatactgagatccacaaattccatgtgctgctgctataagtattaagtcccagtagaatgagaaaataaaccatggccgggcacagtggctcatgcctttaatcccagcactttgggaggccaaggtgggtggatcacccaaggttaggagttcaagaccagcctggccaacagtccctaccaaaaatacaaaaattagccgagcatggttgtcggtgcctgtaatcccagctacttgcgaggctgaggcaggagaatcgcttgaacctaggaggcggaggttgcagtgagccgagattgcgccattccactcgagccggggcgacgagagcgaaactctgtctcaaaaggaaaaaaaaaaaagaaaacaaaccatggtgtcaaataaggacccgaaatcaggttactagggcagagggtgtgatgaaatgcaatctttgatttatgatgaatctatgtatcagtaggaaatgcatcacctgttttgcaagtaaatcttacttatttacttattttatcaaagtgacatatgcacatagttaaaatagaataaaaaaagagttagtgaaaacaagagttcctatccttacctagctcaattttatcagggttccagaagcaaccagtttctagtagttgcttctggtacataccaccatttagttctaaatatttttactttttttttttttttttttttgagacagagtcttactctgtcacccaggctaaagtccaatgacttaatctca

SEQ ID NO: 21094 - DNA, 1050 bp, Homo sapiens
taatgggactagtgaactccttgtagaaaactttacatcaagaacattacatagattatggatgttctaagtggtatgccagatgttaaagaagtaattcatactaaaaaacactcttacagaaaataccttatgtataattacttatttcaaattcttggtgtattaaccgagctactgacatgactagtgtagtagacgataaaaacagttgggatcctatccaagtgagtctttatgagaaacttctatccttaataggtattataaaggaaaataaggttaagtttataactggcagtgttacagactctgccaaaatttagctgataaaacttaatcagaatttggttatacatgttgcaaaattcaatgcaacaacaagatctgtgtaaccttcaacaaaagcacatgacccattgcccacttcttgaaaaataattgctaaggaataaggctaagggccagggagggctatagacagggtttttgtctcagggaacaaaacctggacttgtaactgggctgaccaatgaacgtactctcttgccctggcagtttaccttcatgactaccgtatgttttccacttttcccttttctgaatggaaatttctattgtagatatatttttttctacttcaccattcataatacaagtaaaagaagaggtacaacttgtgttttagtttataggtcaccagaccacaatgaatcacctttagagttagtggaaagaattgaaaatcacatagagaccttggacctgaatgtaggaactggataggactttgtggaagtctttgttaggaatggagttgttttatgcatagaagaaagattttatgtgtaggaataagtgggtgtttggatgaagaaagacagacacatacttaatatttgcagggactcaggcaaggatacaaatggagggccgggtgtggtggttcacacctgtaatcccaccacttttcggaatctcaaggattgcttgagcccaggagtttaagaccagccctgacaacatagtgagacctcctctctacaaaaa

SEQ ID NO: 21095 - DNA, 1012 bp, Homo sapiens
atcacttgagctcaggagttccaggccagcctgggcatagtgagacctcatctctacttaaaaacagcaaccaaaaaaattagcagacatgatggtgtgtgcctgtaagtcccaggtactcaggaggctgaagtaggaggattgcttgagtccaggagtttgaggctagagtgagctatgattgcaccactgcactccagcctgggtgacagtgagaccctgtctcaaaagaaaaaaagaataaattttataagataataaaaactatggctgggcaaggtgtctcacacctgtaatccccgcactttgggaggccgaggcgggtgaatcacgaggtcaggaattcgagaccagcctggccaacatggtaaaacaccatttctactaaaaatacaaaaaattagctgggcttagtggcgggtgcctgtaatcccagctactcgggaggctgaggcaggagaattgcttgaacccaggaggcggaggttgcagtgagttgagactgtgccactgcactccagcccgggcaacagaatgagactctgactcaaaaaaaaaaaaaaaaaataggaattttaggcttggtatattatatagaaccattctttgccatttttaattaaccctagtttctatttctttttattttctttttttctttgagacagaggtttgctcttgttgcccaggctggagtgcaatggcatggtcttggctcatggcaagtttcgcctcccaggttcaagcgattctcctgcctcagcctcctgagtagctgggattacaggctcccaccaccatgcccagctaattttttggtatttttagtagagacgaggtttcaccatgttggccaggctggtcttgaactcctgaccgcaggtgacctacccgccttggcctcccaaagtgctgggattgcaggcgtgagccaccatgcctggccttctctagttcttttaattgtgatgttagagtgttgattttagatctttcctgctttctcttgtgg

SEQ ID NO: 21096 - DNA, 1032 bp, Homo sapiens
ccctggcctcaagtgattctcccacctcagtcttccaaagtgctgggattacaggagtgagccaccgtgcctggacttttttttttttttatctttaaggctatatttttactataccttttctatgtttagatatgtttagatacacaaatactgtgttacagttgcctccaatattcagtacagtaatatgctgtgtaggtttgtagcctaggagtaataggccatcccatatagcctaggtgtgtagtagtctataccatctaagtttgtgtaagcacgctgatgtctgcacaatgatgaaatcacctaacgatgcattcctgtcatttgtgatgcataactgtagtttaaagtgttaatagcttgaccaggatttgttaaatgacaaccagctccttaattttccttggcattttccttctcttagaggagaccactttgtattcttttagttgatctttggtatttggtattgatttttcagtttcagcattatctgttgacttcccacttctgagcatgagaatttagttgtctctcccttccttccaccttagccacttccccttcccctctccctgttacttaatcctaccgcaatagttatatggtaattttagataactgttaaatgtttaccttatgagcatatgcgtaggattcacagctgaaattaggtagtaagttttgattacttttctagcacaatgtttgttttccttggagctgatgactgattttatttgtgtttgcttagtattctaagtatttatcactaattcaaccctgaacactgtcacttgcctaagtctcctttcaagactatgagttgttggcagtttattcttctaatgtctcatgtggcctttttacttacatgaaaggagcttgcaggactggtgcttcatattgtcagtctttcagtttagccatcctgattgttggaaagtagtatctcaatgtggattaatctgcatttccttgactaagtgatgttgaacaccctttatatgtgcatgttggccattt

SEQ ID NO: 21097 - DNA, 1049 bp, Homo sapiens
atagactgcttttatctattctaataattttgtattgtacaatgtgttggaaaggcaagatgaagttagattatgaagggttcatttccattcaattctgtctatccttctggactttgcctaaatcttaccttctttggagctttcctgaacttacttatctcctttgaattcttacatttggatcctttgtatttgagtatttttacatatatatgtacataaataacacatgttttatgtgtattaatttactctcccaactagattgaaagctgctgaagagtaacctttttttaaaaccacattggactgttttaagcacaaatttagcatatgcttgatgattgagagaaccatatggttacagtcattggtgtgtctgtatgattgtgatatgttgctatttaaaaatcaatagttatttcttatttagttttctgttaagccataaccttttgctctcatttatacgtcttctgaacgttaagtaacatgtggctcatatttcaaactcccaatttggaattttatagcaatgtgactgaagtttataattacaggtctcagaggactgcactacacagaagttctctatgtgttagaagaatttattagaagatagacaattgtaggttacactgtaatttagaagacttttgcgcatctcatgtatttgtgtcagtttgagaatttgaaaatgcccccaaaatgtctgttcttcactagtgcctcttgtgatcctggcagagataagctaaacttttgaaagggtagactttttctgtttatcttagtatcctgagtccctaaatctggaatgtagtagatgtttgtgcatttccctatgtcagtgaagtcaaaatactacaggtggatttttcagcttttcaaagttttcacatttactaagtccttcacagttatctcctactagttaaaaaactatttgcctcaatttatgccagtgctactttgacatttgcattgctgtaaaacccttactaaaaggtatgtttttctagtatacaaatacatgtatgcagctt

SEQ ID NO: 21098 - DNA, 1034 bp, Homo sapiens
agttagaatctgtcaccaagttttattagtttggtattgagtttagtctgttagcttctgcttaattgcctccactttagtccccactgccatcatcttttgctccaagacactgtgcagtagtttcctagtttcacacagtcagtgtattcttaaaatccaaaccagatcttgttattcctttctttaaagtctataattaatttttaaaaatgtagtctttatagtggtctacaaggctgtaaataatttggttcctgcttaaaactccaacctcaattgtagtaatttaccccttgcctcctgtacactagctacactagccatcttcttgttcttggaacctattctggcttgcagcctttgcatttgctactttctctcatcctggaaagactatttatgaatttttacatgtctggctcattctcatatctgatggccacagctcagatggcctcaaggacgccttcctttatcacctcatatgaagtggtatttgtctatcactattgtgcaatattctgaacagtttgtgtacagcctttatcataatacgtaattatcacgtttattgtcaggtctgttgctgaatccccagtgtcaggataggtgcagtgcctaatgtattttaagtgctcagtaaatattggatgtctggatgaatgtataaatgtataaataatggagagaagttgtggagagctttcatgtttgtcagatcggggggtaaaaaataaagacaggaatcgagttatactatatgtatccacctcaaaatttcttttcctttcagcagcttttaaaaagtttgtgcttaaagttttttttttttttttttgggacgatgtctgtcgcttcccaggctggagtgcgaccttgggatcactgcaacctctacctcctgggttgaggcgattctcctgcttcagcctcctgagtagctaggactacaggcacaagccaccacgcccagctaatttttgtatttttaatatagacggggtttcagcatgttggccaggatggtcttc

SEQ ID NO: 21099 - DNA, 1040 bp, Homo sapiens
gaaaagcgatttttgaaaatttaatttagattttaaatatattggtataaggaaagatttaaatgttataaatttttattctttttgtttttaatagaaaagggacctcagtatgttgcccaggctggtctcaaactcctgggctcaagtgatcctcctgccttggcctcccaaaatactgggcttacaggcatgaccaccacacctggccttaaatataaattataagtgttttaatgttatcacatatatccctaaaacttgatatatatgagttggcaaaaatatttttagatggaaaatggaggttcatcttacattcaggttgttttttaatagacatatagcctatttttaaaatatgcatttgggagaatggatgagtaaaagtgttacagagttctcatcttagtgggtagagtaggaaagggcatcattatttagtttaaacattatcagtgctagagatgggcatttgatgccttgtgtaatagaaaagtgtgatagaacttccaaactagggtggtgtgaatatgggtgagaatgatttgaaacttgaccaagctagatataagcaaagtgaatagaggaacaaactgattatgataagtgaaaaataagatgaaaaggttagaccaaatataattatcatcacaatacatgtaaatgggctcaattctcctacctaaagatggcagttaccaagagggttaaaaaattaaaactagtgctatatcataaaaaggaaacaccccaaaacaataatactaacaataaggaagaattcaggataaaagtcattagttaatacaaaagggatattgataatagaatgtataattcacaaaaatgtcataaacctatgtgtagcaaataagataggagccacctacataagcagtgtaccttaaaagtacaaaaactttgataaaaagataatcagtacaatgttaagggcctccagggtaggttaattctgaatatatagaggttattaaggaactagattctttcaatctgtctgctaattctttgtgtac

SEQ ID NO: 21100 - DNA, 1029 bp, Homo sapiens
ctgcagtgggagggctgccttccagctacacaggggcaagggagcagctgcaaattcagtctctcagcccaggcaggaagcctgatggagtcaggatggggatcagtggggtcagcattctggatgggataggggcacaggacagggaggtcagttcggatttgggtccctctaagggaactggccagggtgtgaagcagccaggtgcagacagggataggctcactaggcgtgtgactttgtgaccttgggcaaggccctgcccttctctggggctcaggcttgcttgtcatctgcaaaaaaaatgaggctcgaacagaactctcaggtactttctagtttcatgagtccctgaattgtgaaaataaaaaattaccactgagaaaccatatacacttccagactggtggctgcctagcctggcctctgctccttgacagaggggctggccctggtgtttgagcttgtgtgcttgaattggcctcaggcccaccgtgccttttctcatctcagacagtactcttgctccttcagttgccacgctggctcccaccggcctctttccagatcatgaaggtatttttccttcatcaaattgagaggaagtccgtagtaaagctgcccgttgaccaggtagtgccgagagaatcggtaggtcacatggattcctaaaggtcccctgatcagccacagtttgattcatgttctgatgccctcccagatgatgccaccattaggtctgctggggctgggggtgagtcccagattgccctggatgttatctgtagaggataggaagcggctgctctggggccagtggccagtaaggtccccaaccctggggcccagctctcccttccagctgattacaggctatggcaggctccataacctccccaattagccggaggccaggcccaaggcctttctgataacctgagctccagtggcagccgctgtggggccagcttatctggtctctcttatcctcacccttcccccacatactcaaagagttgccctgacttc

SEQ ID NO: 21101 - DNA, 1075 bp, Homo sapiens
gatacttagggtttttttgttttctttgttttttgtttttgtcccagggatatttatttgaattttctacctgtaaacacaatttgctaacagctccatttaccctttcttttcaccaaaatttgacattgtccttaatcctcccaattctttattctccatataacaatcaggaaattttatcatttctacctcctatatattgcatgtcccattttccatctctcgggcccccattgccctagtttgggtccttaacttggttgttataattttcttctatccagtcttcctatttctagtttcatatctttttaaaccattcattgcatatttataaaactgtcttcctaaaatgccatttccctgcttaacacttccagtggttttccatcactgctgaacaaagcacaaatttcctagcatagcctgcctgttcctttataaccttgtccctaactacctctccagctctattgttttcttccctttttaccatagccctcagatctgtattccaaccacacactgaactgaactactaagagtttctcagatgcatcaaattgtttcaacctttctgtcttcgcatgctgtttttctcctgaatattactattctttcttcccttattccttgtttacctgaccagtacctaattcttcctttaagatccaggccaagttatcttttgcattgtaaaacatttcctgaacctcaggcattaccttctttgtgccaacattctatatattcttccactgccatagacccggtagtatactagctatttctcctgctaaaccaatgattctcagtggtgacagagagtgtgctgggggcagtgcaattttgcccatcagaggacatttggcaatgactggatccattttttattgtcacagcaatggggtggtggtggtgctactggcatctattgggtagaggccagagatgctgctgaacatcttctcatggccaggacaacctcccacaacaaagaattatccagtcaaacatgggtagtaccaaggttgggaaactctgtgtcagaccttaaaattgtatcttttta

SEQ ID NO: 21102 - DNA, 1068 bp, Homo sapiens
aacagagaagatggaaagtaaaactgttttgcccttcactgataaatgtgaatcctcaaatctgacagtaaacacatcgtttggatcatgccctcaatcagaaaccattatttcatcattaaagattgatgccacccttactagaaaaaatcattctgaacatccgctctgttctgaagaagccctggatccagacattgaattgtctctagtaagtgaagaagataaacagtccacttcaaatagagattttgaaacagaagcagaagatgaatctatctattttacacctgaactttatgatcctgaagatacagatgaagaaaaaaatgacctagctgaaactgatagaggaaatagattggctaacaattcagattgcattttagctaaagacctttttgaaattagaactataaaagaagtagattcagccagagaagtgaaagctgaggattgcatagatacaaagttgaatggaattctgcatattgaagaaagtaaaattgatgacattgatggtaatgtaaaaacaacttggataaatgaactggaactgggaaaaactcatgaaatagaaataaagaactttaaaccatctccttccaaaaataaaggcatgtttcctggttttaagtaataatacttaactctcaagctaagtaaaaatatgtcatcatgcttatgttaaactctgttgtaagtaataatttgtaaattgaataagtggcatactttttaaaaaactattttatgttcagaaatgtaaatgttattattcttgagtttttgggtttttttttttgagacagagtcttggtctgttgcccaggctggaatgcagtggtgtgctctgggctcactgcaaccttcacctccaggttcaagtgattctcctgcctcagccttctgagtagctgggactacaggtgtgcaccaccatgcccagctagtttttgtatttttagtagagatggggtttcaccatgttggccaggctggtctcgaactcctggcctcgtgatctgcccttctctgcctccctaagttgctgggattacaggtgtg

SEQ ID NO: 21103 - DNA, 1652 bp, Homo sapiens
gctgcagtaagccatgacctcactacttcactccagcctgggcaactggagtaagaccctgtctcaaaaaaaaataaaaataaaaaataaaaaaaaataacaagtctaaatatgcaattataaacatacaaagttaacaaaaaggccccaaaacacatctagcaaaaagcatcagaaatcaataatttagtaatacttggagacttccataccctgctcaataatgggtagaacaactagaaggaaaatcaacagaaaataaaagccttgaacaaaactacaaaccaacaactacaaacaaacctaacagacatctgtagcacacttcacccaacaacaggaaaatacgcattctgctcaagtgaacatggcatgttcttcaggataggccatccgttcatccataaaatataaggttccataaatgttaagaggttgaaatcattacaagtattatttctgactacaatgaaataaaccagaaatcaataatgggaggaaaaatggaaaactcacaaatacatggaaattcaatgatatacttttaaacaaccagtgggtcaaagaagaaatcagaagaaaaattgaaaaatacattgtgataaatgaaaatggaaacaatgtcccaaaattttggggacacagtgaaagtactactcccagggaaacttaaaaaagctgtaaacatctaggccaggcacggtggctcacgtgtgtaatcctagcactttgggaggccaacacgggcagattacctgaggtcaggagttcgagaccagcctggccaacatggtgaaaccccgtctctactaaaaatacaaaaattagccaggtgtggtagtacatgcctgtaatcccagctacttgggaggctgaggcaggagaactgcttgagcccagggggcggaggtttcagtgagctgagatcatgccactgcactccatcctggctgacagagcgagactctgtctaaaaaaaaaaaatactgtaaacatctgtattttaaaagaataaacatctggaatcaataatctaaccttcctccttaaggaattaggaaaaaaaaaagagcaaactaaacccaaagcgaggcaattaaaggaaatactagaaatgaaaaaggaaataaatgaaatagagaattcaaagaacagtagagaataaccaaggtaacaaaagttgatttgttgaaaagatcaacaaaattgacagacctgtaccaagactgaccaaagaaaatacagagaagttctaattcactaaaattagaaatgaaagaggggatgttactaccttacagaaatacaaaggattataagagaataccttcaaaaattgtgtgatgacaaataacttagattaaatggacaaattcatagatagacacaaaatactgagaatatatcaagaagaaatagaatatctttttttttttttttttttttttttttttttttttgagacagagtctcacactgttgcctgggctggagtgcaatggcatgatctcggctcactgcaacctctgcctcccaggttcaagcaattctcctgtctcagcctcctgagtagctaggattacaggtgcctgccaccatgcccggctgcatttttagaagagacggggtttcactatgttggccaggctgat

SEQ ID NO: 21104 - DNA, 1046 bp, Homo sapiens
cactagtcagaatggctatcgttaaaaagtcaaaaaaaaaaaaaaaaaaagaacagatgctcgcaaggttacagagaaaaaggaccacatatgtactgctggtgggaatgtaaattagttcagccactgtggaaagcagtttgttgatttctgaaagaagttaaagcagaagtactgttcaacccaacaattccattattgggtgtatacccaaaggaatgtgagtcattctcccataaagacatatgtatctgtatgtttatcacagcactattcacagtagcaaagacgtggaatcaacctaaatgcctattgatagtagactggattaagaaaatgtggtacatatacacaatggaatactatgtaaccataaaaaagagtaagatcatgtcctttgcagcaacatggatggagctggaagccattattctaaatgaactaacggaggaacagaaaaccaaataccacatgttctcacttatacacgggagctaaacattgagtatatgtggacagagaagggaacaacagacaccagggcctacttgagggtggagagcttaaaattaagctgtttgaactaagagttgagctaccattcaaggaaaactacctgttggatactatgctgctttttacctgggtgacaaaataatcggtcctaatttgtcacaacaaatcaccatgacatgcaatctgcctctataacaaacctgcacatgtattcctgaaactaaaataaaagttaaaacaacaacaacaacaacaacaactatagatcaatatccctctgaaacatagatgaagatgtcctcaacagagtgccagcaaattgggtaaggtcctcaaaaatggcagaacaaagacctctgaaatttctaaaagcaatgagaaaataggcaaaaataagttagaagcaactttatcaaaactctgggtattaaccaaaagttacagcattctaggaagaatttactccttaaaaatagctgaattgcagtaagaacagtaagctttgtggtattttaacttgctctgttctc

SEQ ID NO: 21105 - DNA, 1065 bp, Homo sapiens
acagtgtctcattctgttgcccaggctagaatgtggtggtacaatcactggctcactgtagtctttacctccctggctcaggtgatcctcccacttcagcctcctgggtaactgggactacaggaacataccaccatgcccagttattttttttgtagagatggggtttagccatgttgcccaggctggtcttgaaatcctgagctcaagagatctgtctgccttggcctcccaaagtgctgggattacaggtgtgagccaccgcgtctggcttttattgttttcttttcacatgatttcaggaaagtagaatttcatgtgtaaatatgttagttgttttacaaatgtcattttttgaagttttttgcattgtaaatatcattgtatatttttatcagaatgtatcaagaagtaactgtaaatcaggtgtcactagtgcattactgcactagtagtgcagctctgacattttcagagtcctcagtattttaactaatttatgagagagagtgttccttttcagagagggctgtaggatcttcatttccagttagattgccaacagaggtcttactttcactttagggcagtatttgtctatattattcctccaagtgcacctccaactgcacctgtgttcattgaaagtttgattctgaaatataacccagcctcttgaggtgaaagtgctgagtcaaatatcaccaaacaggaagctgtttcaatagaaattcatattcttggttttcttatattttcagtttgtatttagcaaaaattaaggacattcatttttactgtaactaaaaaagttatttaaaaaacactactactttttcatttttattagtatttaaaaggaactcttttttatttctaacatatgccacatatgggtacatatcaactgaataaaagaaagtaaacatttaaaacatatgagtacctcatgaaatgaataatgaagaatcatctttagatggaaaaatataccaggttctacttatgaaataaattatgtgagtaagattacaaaagatggtagtctgtttaggcaggcctatt

SEQ ID NO: 21106 - DNA, 1053 bp, Homo sapiens
gatgtaaggataaatataggaagcacttttgggaaatgacagacaaattagttaaatataacttatgattaatttactgtacattttacatattaaagcaatttttgagcttgatatggactagaaaaacttggaggttctagttgtttcatcttggttacaatctttaatatctacccagttaatcttcataatagcaaccaattgattttcctttttggctgacagtttcatattggcaccttttgaatttagatgatttgtgtggtgtcaggagggacgttaacttgatgcagtggtagtctccaaatatacttatcccagaggtcatgggacaaaaaagtgacaccacattgggatgcttgaatcatatagtttagtaaagatagttaaaacacacagtgggaggcaaggggagagagttgagggtaggttaacatgtgaatacaatgtaagtgggtggaaggaccacactacctaaatcctgggctgtgcaatgtttatgtcttgtctttctcttttccacatcagctctcctttgctgatggtgtgcttacagagactagaaatgaggtttatgcaaggggacccaacagatgcacaattgacacactttattagagtaaggccagcgcaaatgcacttggccacagctgtagtccatcagtttgcctgctgagctacaatgtattttatttgcctttcttgggcagaggatacatggagccagaatgggtgtcaccaatgggtggctgaataagattttatggatattgggtagtattttatatgcctcagatatatttaatgtatcttggatatttgatacctcatgtatatgtagtgtatcttgaatatctagtgtctttccatcctttttcatctatgttcatagagaaatgctgtacttactttatctctttaatatggcttacacaggtttctaacttctagctacgattttaacattttaagagtttcacccatctatttgggttcttgtattttatatattctcaaatatacagcagatgcaaattatagaagcgaact

SEQ ID NO: 21107 - DNA, 1033 bp, Homo sapiens
tcatttcagaggggtttgatactgaccatgcagaagacagaaagcctacattagaattcatttcagggggacatgaggaaccaggattgaaatataattagatgggttgtattagttctatgttgctgcataacaaattaccacaaaattagcaccgtaaaacagtacacatttatcatcttactctttctgtgggtcaggagtctgggcatggcttatctgggtttttcttctcagtgtattacaaggctcccagcagagtcaactggggttgtggtctcactaaaggcttgactggggaaagattagcttccagggtccctcagtttgtttgcagaatttatcccttgtagtcgtaggactgagtgagatacccagtcttttgcgggctgttggctaaggatgactcttaggtcttaaaggttgcattcaggtcctagtcatatcgccctctcaacaacgtggcagcttattactactactacttttttttttccttcttcaaagccaacaaaggtgtctcttctgtaggggtgcattgtatcttttaaggacttttacctgattaagtcaggtccacccaagataatctcccttttgattaactcagaatcaattgaggtagaccttaattacgttcataaaatcccctcatctttactacataatataatctaatcatggaagtaaagtcttatttttatctcacaacggggagaagtttatgcaggttgtatatagggagtaggaatcttaggggctatcataaactttttatcacaggggttaatttatcagggtaagaaaaaggttaggaagaaccattagaataaagatttgtgactatggcatatgaaaatattaatagaagtgaaatgatatttatgaaatttaggtagcaaaggcatcacaactgcacataataatctttccataaatgcttgatgaataaacacacgaatggatggagactaactcttattgttccaagtctttcttactgcctttgaagttagaggtattttagaactgc

SEQ ID NO: 21108 - DNA, 1026 bp, Homo sapiens
aggctggtcttgaactcccgacctcagatgatctgcccgccttggcctcccaaagtgctgggattacaggcgtgagccactgcgttcggccttagcattttttgtgtgtgtacaattaagtacattcacaatgttagacaaccaagaccactatctattttcagaacctttcatcataccaaataagaactctgttcccacaaaataactccccagattccttttccccatttcctgttaccctctagtattctttctgtctctgtgaatttggctattgtagctacttcatataagtggaatcatacagtatttgtcctttgtttctgatttatttcattagccataatgttttcagggttcgtccatcttgtagcatacatcggaatcctttttatggcagaataatatttcattttatatatatatatatatatatatatatatatatatatatatatatatatataatctcacatttgcttatccattcatctgtcgatgggtatttggattgtttctaccttttgcctgttgtgaataatgctgctatgaacgctggtgtacaaatatctatttgtgaccttgctttcaattcattcggatatatacctagaaatgtaatttctggatcttgtgataattctaaatgtaacttctttttttgagatggagtctcactctgtcacccaggctggagtgcagtggcatcatctcagctcattgcaacctccgctttccaggttccagtgattctcctgccttagcctcccgagtagctgggattacaggtgtccgccaacatgtctggctaatttttgtgtatttttagtagagacagggtttcaccatgttggccaggctggtcttgaactcctgacctcaggtgatctgcctgcctcggcctcccaaagtgctgggatcacaggcgtgaaccaccacgcccagcctaaatttaactttttgaagaaccaccaaactgttttttttatagtcaatgcataatttagattcccatcagcagtg

SEQ ID NO: 21109 - DNA, 1044 bp, Homo sapiens
ttgcctatggcaaattatactggccttcatccccagtattttggaattatctgattctgctattggtatatattcatcatttcacttgttcatttattcacctaacaaaaatttgttacatgcttaaattttgcaaagctattaagtaaacagagacaggtacaacctgttttgctttcaaagaattttcactctaagagaatttagtgatctgcctaaagcaaaacatttataaattaaatctgtatacagttaattgaaggtaatagaaaaccccctgacaatttaaaaataaattgttaaacttgttgcttgatcttttatgtacatacttccaaataaatactaatttccatgcctttttcaggcataactctaataatgacatattcatattctaggtttgggttggtaccattgggtcaggccccaagggtcggaatctctgtgctaccttccagaatactgaaacatttgagttccaagatgaagtgggagcacttttgttatctgtgtgccagactgtgagccaaggaattttgtgtttcttgccatcttacaaggtaagggaatatttattgtttcttttgcctttaaataatcatttacattttaaacattggcatgctaattttaaaattaccacagtaagcttcctagggtagaggcaacaaggtaataactatagttttctaaacatcacatattattttacttattttttgattaagatactgcctgattgtcctacctctgttttacttaaaagtctgaaagagcaaggctggacgtggtggctcatgcttgtaatcccagcaggttgggaggctgagctgggaggatcacttgagcccaggagttcgagaccagcctggagaacatggtgaaactctgcctctacaaaatacaaaaattagctgggtgtggtggcacacacctatagtcccagctacctgcgaggctgaggtgggaggattgcttgagcccaggaggttgaggttacagtgagctatgattgcacccctgcactccagcgtgggcaac

SEQ ID NO: 21110 - DNA, 1044 bp, Homo sapiens
attgagccatttaagagtatgttgttgccctgatgttccctcaccctgaaatactttagtgtctatgtcttataagcaaagacattcttatacataatcacaatataaccataagaatcaggaagttaaaattgattcattgttgccatctaatactcagaaccggtttaaattttagcagttgtcttaataacgcttttataaaagcaaaagaatccagtcagaaccatgcattgcatttagttatcactttagtaacttcttcagtctggaacacttcttcagtctttccttgactgtcatgattttgacacttcagaatattacagcttatctagaatgtctcttaatttgggttttctcattagactgaggttatttatctttggcaggaatgtcacagaagtgatgccttctgctcattgcatcttataaggtggcacgcagtttcattttttctcattaatgattgataacttgattaatatgatatctgctaggtaaaaaatataactttacagttatctttttgcctttataaaagaggactttatggggaagaactctgaaattatataaataacatgtccttacaaaaattcagtttactcattttatttatatctttatggacttgtgattttccattttattcggtgagttataattattatatgatttgttttggtactcaagtgggaaaccagttaagttgcttgtgtctttctgacatatatcaatcattcttggaacgcttccttattttttggcaaaagatagtgttccaggctcaccttatattttccctgccctagtctcggattcagacatttctccaaggaaccctggttccatttagtgaaaaataacatttgaacgctgtgttctgggagttagttttgctcattgctgttggagttgctgctccaggccctttcagcagacagctagagaatatacacaatgtattgtgtacacaaacccagactcatagacatatacatttatgtctatattttttctgtatctgtctgtctgtacact

SEQ ID NO: 21111 - DNA, 1052 bp, Homo sapiens
gaaatcaaggtattggctccaacctctctctctctctctttctctctctctctctttttctctctctctctctctatatgtatataattttttaaatttatttattttaatttttttttgagacggagtatcgctctgtcacccaggctggaagtgcggtggcgtgatctccgcccactgcaagctccgcctcctgggttcatgccattctcctgcctcaacctcccgagtagttgggactacaggcgcctgccaccacgcctggctaattttttgtatttttagtagagacggggtttcaccacgttagccaggatggtctcgatcttctgacctcgtgatccgcccaccttggcctcaacccaacctatgttaataatagttttccagcatcattagatcacagttttgaaaaaaaaccagtttcatttaagaatgtctttgatgaagcagtaaaaattactaattttatttaatctcagccgtttaggtttttaacattctgtctgaagaaatgaatagaactcataaaacacttttgcatacagaagcaggatggatgtcctggggagaagcgcctgtaggatagtttggattgtgagctgactagccactttttgtcatggaacatcatttttgcttgaaaaagagtgaatgatatactaaccatggtaattctttatgataaaatgagccagataaaatttgagctttcaagtgaaaatcagaattttaaaaaatttgtatatactctgagcttggcagctttgtgataactacagacttttctgatgaaattggtgatattacagaatatgactttttatatttatataatgaaatgtgtcaacatttgtaagatctgtaaaactcaatgaacttaaactcagcgaactaaatattatttaaatgaccagtgcatgatattgcaaaatgatgcctagaaaaggtccatcctaagtgcaagatagactgatggaccttttttctgccctgtccccccattcccaggcaaccacagatttgttttcagttactgtacatttaatttg

SEQ ID NO: 21112 - DNA, 1364 bp, Homo sapiens
ggccatgggttagactcagtgtaataaatgattgttggctgggcacggtggctcacgcctgtaatcccagcactttgggaggctaggcgggtggatcacctgaggtcaggagttcgagaccagcctgaccaacatggagaaaccccgtctctattaaaaatacaaaattagccaggcgtggtggcacatgcctgtaatcccagctactcaggaggctgaggcaggagaatcgcttgaacctgggaggtagaggttgtggtgagctgagatcacaccattgcacttcagcctgggcaacaagaggaaaactccatctcaaaaaaaaaaaaaaagatggttaaaaaagattgttaaattaattcaagccatgggagtggagagaatgcttagagagaagcaaagaggaaggagggtacctttaagaatatttatatttaggaaaagggagaaaccaatgtatgagaatagttaagagcagtgttacagacattaaggaagaagaaaatgtgtttgctgtgttccaagaagacagtgttggctgtatgcctaagaggttacatgtatggatgttggagtcacacagcaggattcagtcatgtctaggctctaccatttaataactgtatgatactgggcaagctactagacttttaaaaacctagtgttcacatttgtaagattgggataattaatgttatttggtgattaagaggtcctggatgaccttgagaaggagctttcaggattatgggattaaaagacagattatatgagcttgattctataatcaatggttttgctctaaagaacgtggagaaacttagtagggaagaaacgttgatactgtaaagaaagatttttacagacatgaaatatattttcttcagagatccttgcagttatacattttaaatcatgttattgggagtagtctacaagtacataaggcgatttaaaaaatcaaattggacttttcctattgaaagcatgtttctcagaatctttggtaaagtaaactgaatggtagagaagtactttttaaacatgtttaagtttcatgttttagattatggtatgaaatttctagaaataagccttacatcctggttccagttttcttctagaaaaattgcctacctgtaagttatttatgctgttttttttaaattacttatataagactcccctgaaaaaaccactctggctgcaaagttatctgctaagaaacaggcatccatatacagagatgaaaatgatgattttcaagtagagaagaaaagaattcgacccttagaaactacacagcaggtaaacagagtttattggcagtaaataacccagttagttacagctgaacatggtag

SEQ ID NO: 21113 - DNA, 1026 bp, Homo sapiens
tctttcttatttcttcatgtacatctccatatccattggtacctccatagtccaaactaccatttcttgtttagagcatccaataacgcttttttctgcttttactcatgctattcctttaccagtcactggcagggagacagaggttgccatgattgacttaagtcaaaacaaagagtatccatttcctaaaatcaaggatggagtcagcttcctctaaagcatgtgactatatagaggagggtagatgattgaacttctggtaggaatgaggaaagagaagtggaacagttattaaataggtgaccaatagtgttgtctacattgttttgattttggccttttggatttcttccctttccttcaaagatttatgctttctccttcctcagagcctttgcttctattagtgtctcttctgagcaaagttccatcttcaatttattatccttttcttcctcagtttacatgtgacttccttggggtatccatcactgatttttctgtcagagtagatttgattttcctattatagtctgtcttctccttgtgtacctttcctttatagcacttgttacagtttgtattatatgtgtctgtctaaatcttttattaatctctgcttccttggcagactacttcatgaggttaggaatattgtcaatttgcttaccattgtatccctagaactctagcagggtgcctggcatatggtaggtgctagataaatatttgttgttaggaatgaatgggattaattttcagctaattataggaattctggtgtataatatttatatacaaccttttaaaaacagctttattgacgtttacttgacataacaaattgcatatatttaaatggtactttttttttttttttttttgagacagaatctcactctgttgcccaggctggagtgcagtggtgtgaccttggcccactgcaaccttcacctcctgggttcgagcaattatcctgcctcagcctcccaagtaattgggatgacaggcgcctgccaccac

SEQ ID NO: 21114 - DNA, 1023 bp, Homo sapiens
actgtttgtagtttgtaagagaataaacacattgtacatcctttgtgaaattacaaacaccctgattgagattctcatatattcctgtggtgtaaaggaaagtaccttggaatgagctttgggtgccaggcatatagaatgcagtagagatgagacagagaaagatactattgactggcaaggacctttactctgtgtgatctgaggattcactgaaggtggccaaatctctatttaaataagatgactatggccgcaggttgaaggatggattaaattggaggcagggaaagtgggccatagaagatatttaaacaaaaggtgagtaggcactgaattaggatagcagcaaaagtacagaaattaaaatggacttagaagaaaaaaaggttggacatggctggttgagggtaggagttgtgagagaaggaagtcaaattcgtattgcctgacttaatttaaaaagaggccagatatgatggctcacgcctgtactttggaatgctggggctggtggatcacctgaggtcaggagtttgagaccagcctggccaatatggcgaaaccccgtctctactaaaaatgcaaacattagctaggcgtggtggcgggcacctgtagtctcagctacttgggaggctgaggcacaagaattgtttgaatccaggaggcagaggttgcagtgagccaagattgaaccactgcataccagcctgggtgacagagtgactcatctcagggaaaaaaaaagatttagtcaccactattgtatataatatgataaaattcactgtggctcatgcctgtaatcccagcagtttgggaggccaaggcgggtggatcatgaggtcaggagatcgagaccatcctggctaacacagtgaaaccccatctttactaataatacaaaaaattagatgggcgtggtggtgggcgcttgtaatcccagctactcaggaggctgaggcaggagaatcacttgaacctgggaggcagagtttgcagtgagccaagatcgcgcca

SEQ ID NO: 21115 - DNA, 1028 bp, Homo sapiens
gtgaaggacctatctctctctctccaaattcctatctaacgtgagctctcccatgacgacacacatggtgctctaaatacagatatggtagggacttaaaatgtttttcccactacttaaaaactaatagattaaaccgaaaggcaagcttctagtggagggtgcacctaagatgatacagatataatggtagttcatattttaaaatcaaaggcagttatgatactagataatatatttggaactgccaaaagttaatagtgagttttactgattcataattcatgtaaaactgtatgtacttttataattttgcttggtttttctttttgccacaattaattcagtgtctataacattctttcttaggattggatttatagacagctgtgtgaaacctctactccacttcatcctcaattacttcctttgattgatgtgtacataaattctatacttactcctgcgtcgaaatctaatccagaagccacaaatcagccagtcacagaacaggagatactcaatattttccaaggagtcattggggtaaaatagtggttcttttatatctattaacttatttttcttttagttcttcttacttaacccatatttttattttcctatcagaggacttctaggtagttctgaatttaaaattagattaaatttccttagatcacctctaaaaattaaaagaatggtattagttccaagtagtttgctaaacaggcacttttttttttgagatggagttttactcttgttgcctaggctggagtgcagtggcgcgatctcagctcactgcaacctcctcctccctgcaacctctgtctgccgggttcaagtgattctcctgcctcagtctctcgagtagctaggattgcaggcgcctgccacaacgcctggctaatgttttgtatttttagtagagacagggtttcaccatgttggccaggctgatctcgaactcctgacctcaggtgatctacctgcctcagcctcccaaagtgctgggattacaggtg

SEQ ID NO: 21116 - DNA, 1042 bp, Homo sapiens
attttggcttgatgatgactcgtgttggaggaatacactaatttaaaagccattaactatttttatattttaactttaacttggttctacaggatattaataatgctgttactttgattttttttttttttttttttttttttactgttgatacccacagattggagctgtttgctgagtcgtcgaaacttgcagtctctaagtaaaaggctcaaagacatgtgtagaatgtgtggtatatctgctgcagactcccctagcattctcagtgcttgcttggtggcaatggagccgcaaggctcttttgttattatgccaggttagctatctttagtttatatcagatttaattctttatgcagttaagtttttaagtattatatacaatttattcttcgtttattaaaagaaaaaatgtctttcattttcagattctgtgtcaactggttctgtatttggaagaagcacgactctaaatatgcagacatctcagctaaataccccacaggatacatcatgtactcatatacttgtgtttcctacttctgcttctgtgcaagtagcttcagctacttataccactgaaaatttggatttagctttcaatcccaacaatggtacgtaatttgttccattttggtagtctgaagaataccccccaaaataaattcatgtccaatacctgaaacgtgtgaatgttaccttgttttaccaaaaaatgattttgcagatgtgataagttaaggatcttgagatggagagattatcctcaattacgcaggtgggcccttaatgcgataacatgtgttcttataagaaggaggcagaaggaggtttgactacatagaagagaagaaagccatgtggtggaaacagtgggaagcaaagtcaaagggagaagatgctatgttgctgactttgaagatggtgaaagagcccatgagccaaagaatatagttctagactctgaaaaagacaaggaaacagattatccctttcagccttgccaacatcctgattgcagtccaacgaaactgatttc

SEQ ID NO: 21117 - DNA, 1041 bp, Homo sapiens
tacttcgatacattaaggtgaaaactgagacaggctattggatgtgaccaaatagaagttggtggtcaccttgataggcagtttcagtcaatctgattggagtgggttcacaaaagaacgggatgagaagcaaacttagacaattttctggggacttttgctgtaaatagcagagaaattgcataatagggttaaaagagaggtttattattattttattaaaggtgcattgggagtgatcctatagaaaggaattttttttaattgacagatatggcttatggctgtaatcccagcatttgggaggctgaggcaggcagatcatttgagcccaggagttcaagaccagcctggtgaacatggcaaaacccatctctactaaaaatacaaaaattagctgggtgtggtagcatgcacctgtagtctcagctacttgggaggctgaggtgggagtatagcttgaacctaggaggtggaggattcggtgaaccatgattgtaccactgcactccagcctatttgacagagtgagatttttctcaaaaagaaaaaaatggccatgtttgcagggttgagtaatcatgatagtacagatggaatgttatatggcttctgaaaatgaattacagttatgtataacaaatagatgaatcttagtgatactattgaggagaggaagagggaacaagtcccagaagattacatatagtcagataccctttaaaaatacctctttaatgtattaccgttaataaagttttgaaacaagcacaactaaatgtattatttacatgcacataaaattgagaatattggttaattcttgaaatttcacatgtgtccaaaaatgaccaagagatagggatagggagaaacatttaataagatcgtttttggtaatgttctagttcttgggcagtgagattacagttgttcattttattattaaagaaaatttttgaaatgtaagaggacaacacatggaccagtgattaagttcatgtatatgacagtatcagcatttatccaattattcattct

SEQ ID NO: 21118 - DNA, 1192 bp, Homo sapiens
aattcttgcaatacttgtcctttcataattttctatgtaattgaaaaacatttgggacgtttttagttgtatttcacattactaatatgttcctttatatatatatttgatcttcttttaccctggtgatgatagtgatggaagtaatatggatcaagaatatggcactgcttatacacctcaaactcatacttcttttgggatgcctcctagcagtgcacctcctagtaacagcggagcaggaattcttccttctccatccacccctcggtttccaactccaaggactccaaggactcctcggactcctcgtggagctggtggacctgctagtgctcaaggttcagtcaaatatgaaaattcagacttgtattcaccagcttctaccccatctacatgcagaccccttaattctgttgaacctgcaactgtcccttccatccctgaagcacacagtctttatgtaaacctcatcctttcagaatcagttatgaatttgtttaaagactgtaactttgatagttgttgcatctgtgtttgcaacatgaacatcaagggtgccgatgttggagtttacattccagatccaacgcaggaagcacaatataggtgtacctgtggcttcagtgctgtcatgaacagaaaatttggaaacaattcaggattatttcttgaagatgaactagatatcataggacgcaatacagactgtggcaaagaagcagaaaaacgttttgaagctctcagggctacctctgctgaacatgttaatggaggactaaaggaatctgaaaaattatctgatgatttgatattattgctacaagatcagtgcactaatttattttcaccctttggagcagcagaccaagatccttttcctaaaagtggtgtaattagcaattgggtacgtgttgaagagcgtgactgttgcaatgactgctaccttgcattagaacatgggcgtcagttcatggataacatgtcaggaggaaaagttgatgaagcacttgtgaaaagttcatgcttacacccctggtccaaaagaaacggtaaagtatgccaataaaatacttttttgtttgcttatttccctttagttacattcttaggaaaaagtaataaaggcagtttcccatgtggcaaatacatttaaagttggacttaaaactctttatggatgatgttttta

SEQ ID NO: 21119 - DNA, 1048 bp, Homo sapiens
cccgtcctccatcaacaagtttgatttatgactcagacctggctgtctcttatactgaccttgataatctcttcaattctgatgaagatgaactaacagtgagtatctcattaatgaataggattataatttgttttccttgattttattatttttttattttttagaagtgatttgtgagtttaatactatgttttagccctgaacaataggaaatatagtaaaacctcattcattgatttcttttttaaatctcatgtttgagtagtcttgccatagtgtcatctataaactttgagggttttgtttctccttttgtttttacatttgggggacacatgattaaccttaatttgagctctgccgtatgttctgttttgtagttttaggaagcagaattattttcctatttgattctgtagtttgagaaatgactctggaatttactcattcagagaacacatacataattgacattaaagttatttgctttgtcaatttattaaggaataccagctcttttgaatttgttttgcatcacagctattataagacagatacatgatataacaataaaagaggaaaaaaataatatttaatctttaacacccatttgcagagaaaggtgaagataaaagaaattaaagcttaaaatgagattccctagaatgtcaagtctctgtcaaattaatgaattgggtgctgcattatcataaaagggaattccttttcatctgcataaaggtagcttggaaacttctatggtacatttgatctttcctttcctatataatatgcatttagtcctctctcaacatatatatctctatatgtgtgtatatgtgtgtgtgtacatatacatatatatatattgcagatacataaacttttactgtgtatcccataatgtagtacattttagggcaccctttactaggcaactatatccttgaatgctttggcacattcatactttctctctactaccattcctgtatcagctgtggttcctctgaaataaaagattgtagtcagaacgtggtctaca

SEQ ID NO: 21120 - DNA, 1021 bp, Homo sapiens
ttataatttaaacaatggagactggtatgaggagaattgttagtctcctattgtaaccccacaactataagcttgaaagtactgtcaagtcttcagtgagcaaacacttggaattattttacatatatatgtgtgagtgtgtatatatatgtgtgtgtgtatatgtgtgtgtatgtatatatagtggaatgggtagatcaagctgtttaacatatgcattaccttacataccttttttgtgcgtgtgggtgagaatacttaaaatctactttcagcaatttgcaagtatacaatatgttattattcactatgatgtacagcaaaatccatttaacttttgatgtgggcaaagtaagtcatcttctggtgtgtgttttcgatgacaaagttttaatatttggaataaatagagggtcagtctgtggataaccaaaaataagaaaaaaatctatctgaacaatgaacaaatggtctaggtagcttgaaaattcaacagtttggattctttgccggagtgatctacagattcagagcaatccctatcaaaattccaatgacacttttcacagtaatagaaaaaacaatcctaaaatgtgtatagggtcacaaaaggccctgaatggctaaagcagtcttgagcaaaaagaacaaagttggtggcatcacactacctgatttgaaagtctgctgcaaggccaagtgtcatggcccatgcctataatctcagtattttgggaggccacagtaggagaattgcttgaggccaggagttcaagaccaccttggccaacgtagtgagaccctatctgtgtaaaaacaataaataggccaggtgcagtggctcatgcctgtaatccgagcactttgggaggccaaggtgggcagatcacctgaggtcaggagtttgagaccagcctggtcaacatggcaaaactccgtttctactaaaaatacaaaattagccaggtgtggtggcgtgcacctgtaatcccatctatttgggaggctgaggcagaattgc

SEQ ID NO: 21121 - DNA, 1862 bp, Homo sapiens
tttgccactatgtgacctcagcaaagcccttgattttacataatttccacatcaaagtcagggataataccctttgcttcttatcttaaaatattattttaagtattaaataagaaaagtacatatcaaagtagttagaattactattttaaaaagatttgcattagtgaatatttggtagacaattcagctaaccgttatttagagtctaatgtggtgaggtaaaaaactacacttgatactcagctgtttatagaacagaactatcctgatgattaattataaaacatatccccaatgacagtgtgctagcattatattcccacagcagaaagtttttgtatgcttgggattttagtttttgcaataaatctggggcgtatttggaataataatgatatgtatttgagcatttgatagcatgtttagaaatcagtttttgttttgatggcctactttgccccgagtttgtaagagatcaagtgctactagtgttaggcattagtgaatagatgaatgagataagatttgcctgtgagtcaaagaatgtacgatctgcaaataccttcattgctaccagaccttacatatcttacaatttttgtcttagtactcagagtagataagcagtggcattggtaccttctagtgtgtaaaaattgtttatttcaaagtacaagatagtgtattttagtagtactaatgcaaaaacatctcagtctgtgatttttagatttcatttattcactagcaagtattgacacctattatgtaccaggtactctaggcatctgtgctaaattagtgaacaaaggttagacccctgtccttgtggagcttttatgttctagtgtgagtgacagtcaactatgaatataataaattatgtaatatgttaaaagataaatgctatgcaggaaaatagagcagggtaagggggattattattgaggcaagtgggcatgggcatattgctatttaaaataaagtagttatgggctcataggtgacatttaagcaaagacttgaaggaagtgagcgagttggccatgcagatatttggaaggagaatgttccccataaaagaaatagccaggaatgggtctggaacccattgaggaacataaaggaagcccttggaagcagtataagagaggactagaatagtaaaagatgaagaggagaagaacaagatgatgggaagttttcataggatggtataaggactttggtttttttctcagagtgaaatagtcattgcaagattctggccatgatctgactgcaagcttggctgctagctactgttaggacaacctgagaaccttagctttgtaaacccgagagaataggaatttgagagtctaaacatgtcttatgcaaaccagaagctaatgattctgtgttcacactcaccgagcagtcgggtcttcagagagaaaaaactcctgatgctttccagggttctttggtatagatcagcttgcttcttgttgtggcatccctcttttatccttagatttcagctttctgtggtctgtcagtttccactagctcatctttccaacttccttgttgtcttctcttttattctgtcatctcctgtcattttattggttattttaggagaataaagagaaacaatttcttagttgctgtgttgaaccagaagactaataacttaaaaattgatgtgccaatgtgattagaaaactcagatacttgcactgaaacttcactttccattgtgaaacatcttgccagaattaatagtaataatgctattttcatgaaacacaaatcaggccttcaaaaatttaaaacttaaagtatatctactcatggcagtaaaaaaaaaatac

SEQ ID NO: 21122 - DNA, 1077 bp, Homo sapiens
aataaaaaactagccaagtgtggtggtacacacctgtagtcccagctactcaggaggccgaagagggaggatactttgaactctggaggtggaggttgtagtgagctgagaccgcaccactgcattccagcctgggtgacagcaagaccttgtctcaaaaaaaaaaaaaaaaaaaaaaaggcggtgggaagattttgacattattgcattcatttgtttcttaactttccgtctgtagcttatctgcttctataattgtcatcttaaaaactgtcatacctcatctggaagaatttttattgaataaaggcataacagcatatgctaccataagctatgttaaattctatatgagtacatttcaggatagtatgttattgtcatagtaaaaggaaagagttgcaattaatgaataatataatgctttgggccttgcagcacttcctgttcatggctgtacctgatctttttgcagtttgtctgtatttagctttatgtctaattgaaactgtgtctgtagttaattatttggctgtatgtgaaagttcgtttgaggaaaggagagggttattcgtattctaaaagtgtatgtgtactatataattgatgttgacagtatggtaattagagtttttttatctggcatctcttaaaagtaacaatttttaattctattatcagctttaaatatagaatgtataatgtaaatgaatttatattttaaaatttattgtgtcttgatactcttgaaattgactacatttaaattctttgcacatgctaatgtctgtgagaatgattcaataaaataacaaacagtcatatttaggtaatgcatttggtttactcattttttattttaatagagccctgtgcagtagagttggtttttttaataatgttactgcacagtagtctagcaactacttatgtaaacagtgtgaaggtttttatacttctgccagaggacaacgtaatatgaaacaccgagttttatttgtctctacagagagtagtagtgtctttcaggctgggggaagggagatttcttatactttattccctaaggatagttat

SEQ ID NO: 21123 - DNA, 1056 bp, Homo sapiens
tggtgaaaccctgtctctactaaaaatacaaaaaattagctgggcgtggtggcaggcgcctgtaatcccagctattcaggaggctgaggtaggagaatcgcttaaacctgggagccagaggttgcagtgagccaagaccacgccactgcactccatcctgagcaacagagcaagactccatctccaaaaaataaaacaacaaaaaacaaaactattgatacaccttatgaaagtaaggtcttgctaaataatgaaggtctggctaaataataatggcatatccacttaaataagcaaaggaaatctgtataggctgatatgagaagctctgtatgtagatgaggaaccaaagtacatatgtgcatacatatatgctggcatatacctaggtttttttccaccttaattagatgatagaaatagtacttgttatcttgaaggagagagattgatacttaggcttttcatctttttgtactacatgactttagctatgtacatgtaatgtgagtacatcgtaaacatgtgaatgcagtttgaggtgcctgctgagagattccatcaggcggttgggatcatgtctgaaacttaatagaggggattgctgataacccagttagagtagatatacaatgcaaaaggacaagaatgcatcagtagaaacagagaactagtggatttataatagtggaacttttacaggtatgtgacttcatagaaaattacggtaggagaaattcaaagctttgttttatttgtgttaagtgaaactccattttctgtttggtgtaaataaatgtttccattgattgctattgaaaggtggcactgtccttccatagtagtgggttagtgaaagaaattaatactcttgatttttattttttctttttatgagagaggatcttgctctgttacccaggctatggtgcagtggcatgatcatggctcactgcagccttgaactcctgggctcaagccatccatcctccttagcctcccaagaagctgagactacagacatgtgacaataccgcttggctaattaaaaacatt

SEQ ID NO: 21124 - DNA, 1027 bp, Homo sapiens
aaaataccattatgctcaatagaactgtctacctatttattagtacaaggccaaggaatgtacaaagattacgattccttccttatcagatcattgtcagtgaattaccttttttttagtgaattacttgcttattgcttaaatgctactaataggttaaataatgtcttagactttatttgcttaaaatgtcacattttcattatcgatttatgtttattttttaatgtagctttttttctcaacatcagattgctccagataatgtaactattatatggagtttaatactttcttatttctgttataatgtgaaccagttgctttctagacttgttttcagctctctaggatttcattttgattagactcaagttaataccacaattttttataactagtggcttctttttggttttgcctttattttcttggtgaatatctttagctccctcggggggagggggcggcggggggaagagtgggagataaatttggcatcctttgtatttctgaaaatgacctgatttttttgccctcatgcttggattgataatttggctacatgttggtttcataattgaaaataatttcccccttgaactcataggcattgctttactgtcttctggtatcttcagaagaaatgtgtaataatgagtttcattcttgctcatttaaaaaaacgcgatctcttctgtgaggcttttaaggtcttctcttagctttagaaatgtcacaagaatctgtgtagcaggtataatgatcttttttccagtccttgtgctgggcacttgaaaggctaactcaattttttttttttttttttttttttttgagacagagcctcgctctgtggcccaggctggagtacagttgcgcgatccctgctcactgcaagctccgcctcctggttcacaccattctcctgcctcagcctcctgagtagctgggactacaggcgcccaccaccactcctggctaattttttatattttttagtagagacgggggtttcaccgtgtta

SEQ ID NO: 21125 - DNA, 1067 bp, Homo sapiens
tcagcctcccgagtagctgggactacaggcgtgtgccaccatgcccagctaatttttatgtttttagtagagtcggggtttcaccgtgttagccaggatggtcttgatttcttgacctcatgatccacccgccttggcctcccaaagtgttgggattacaggcatcagcccccgtgcctggccactttctaagtattatttactgtataatgtaagtaatatgttcactgagtgagcagaaatatgtacaggattcacaggtaagatgttaacttctggattttagtatagatcttttgttcatggagctatgttaataatacctgatactggtattatacctgtaaatttaaaaatttaaaagttactctgaaggctgtagaaatacagattaatgattcccaaacttgtctggatgtgggaatcacctggagagcttacaaaaaattattgatgcctgtgtcttaacctgggactgtaatctgggctttggaaattttagaagatcctaatgtaagacaagtttggaaacttttgaattcacggaataaaaataatctcagaattaagatggctaggggaggctgggcacagtggctcatgcttgtaatccctgcactttgggaggccaagacaggaggattgcttaagctcaggagttcaagaccagcctggacaacatagtgagacctcatctctacaaaaaataaattctaaaaattatctggacatagtggctcacacctgtagtcccacctaacttcgttggctgaggcaggaaaatcgcttgagctcaggaggtggaagctgcagtgaattctgatcatgccactgcactccagcctgagtgacagagcaaggccctgtctcaaaggaaaaaaaaaaagatgactacagtttctttttattgtggtaaaatgtacgtaacaaaacttaataatttttcagtgtacagttcagtggcattaagtacattcacattgttaaccatcaccactatctatctgcagaactttttcatcatcccaaactgaatgtgtactcataaaattttatgagtggcagct

SEQ ID NO: 21126 - DNA, 1025 bp, Homo sapiens
tgaagtgttaccagaaatagtatatgctctttcgagttactcttgaaccatagttgtggtataataactgactttattctggaaagataaatgctgctcctcaaatctcttttttacaggaactttcttaccctttttccttctttggaaaagcaagtaggacaaaaatcaagcagctaagtctatctttaagttattacttcggacttcttttctgttgaattcagtggaatgatatagggaaggtagataaagattgattataaattaatgcatttctagaccattctgaaacataagtattatatagactgtttttgttgactaatcaattcacttttggtataagtattctgaaaaaagaacaagagttgtaaagaaagaaaatttatgatgtgaaactactttgacctgaacaaaggagaaaataatattgcttacctttttatcttctttttcctttctttaaaatttttaaagaaaaaaatctcattttctgataatctggacctacatgtagttgtgtgtttaacagtctttagggactgaaagagaggaaatagaatcaaattctagggatacagctaggttacctgtaaagaatcccgcaagtgtaagagtaaccacaggaacaaaccagtcttcagataattggtttaaagaatgatgaccagtgttttcttgaatagtttaggtgttttcctacattgctggggactggatcacatgacaggcattgagttttctagtgagcccacaagcaaatgggttgtagtaagtaccactgacttaatgtaggttttagtctcttctataaaagatattctgaacttgccatgtttgagagtgcatttgaaaaagattatcttgaataagaactttttttttttttaaatagagacagggtcttgctctgtgcccaagatggatggcagtagcgcaatcataactcattgcagccacaaacttctgggcctaattggttctcccacctcagcctccagagtagctgggactacaggcac

SEQ ID NO: 21127 - DNA, 1053 bp, Homo sapiens
gtgccgtggtggtttgctgcacctatcagcccgtcatctgggttttaagccccatatgcattaggtatttgtccttatgctctccctctccatgctccctatcccctaacaggccccagtctgtgatgttcccctccctgtgtccatgtgttctcactgttcaactcccacttttgagtgagaacatacagtgtttggttttctgttcttgtgttagtttgctgaggatgatggtttccagcttcatccatgtccctgcaaaggacataaactcattctttttgtttttgagatgaagtcttgctctatcgcccagggtggagtacagtggcatgatttcagctcactgcaacctccacctcctggattcaagcaattctcctgccttagcctcccgagtagctgggattataggcacccaccagcacgcccggctaatttttgtatttttagtagagacggggtttcaccatgttagccagactggtctcgaactcctgacctcaggtaatccgcccatgtcggcctcccaaaggcctgggattacaggcgtgagccaccatgcccagccgaactcattctttttttatggctgcagacccccgtctctttaaaaaaaaaaaaaagctgggcacagtggcacacactctgaagtgggacttcagagtcccagctactctgaagactgaggtgggaggatcacttgagctcagaagattgaggctgcattgagttaggattgtgctgttgtactccagcctgggcaacagagcaagaccctgtcttaaaaaaaaaaaattgaaattataactttttttttttgagataaggtctcttattttgtcacccaggctggagtgcagtggcacaatcatggctcattgcagcccaaactgccaggctcaagtagtcctcacacctcagcctcccatgtagctgggaccacaggtgcacgctaccaaggctggttaatttttgtagattttgtagagacaagatatcaccatgttgcctaggctggtcttgaactgagctcaagctacccaccatctt

SEQ ID NO: 21128 - DNA, 1064 bp, Homo sapiens
tgggactacaggtgcccgccaccacgcccagctaattttttgtatttttagtagagatggggtttcaccatgtagccaggatggtctcgatctcctgaccttgtgatccgcccacctcggcctccccaagtgctgggattacaggcgtgagccacggcgcccagccttcacatttcatttcttgtacatcgttttgttttcccaggtgttaatgattatccctttttttcacttaattattaatgttatgagttagtaaacacctgcctgtactctgccactttttttgtaaataaagttttgttgtaacacagccatgctcattcattgatagattgttttatgcctgctttcacactagagcagagttaaatagttatgatagagacagatggcttgcaaagctgaaaatacttagcctgaaatattttctagctgactttttgtagtttgctgactcctgatctgtgtacctgttggtagttcatcagtagactatctattagaagtataaatcacttctccctaccttcaaggactttgtataatcttatgagtttccctttttttctcctcttgttaattaatatccctgttgttacccttcattcttcttttccgatttggattagtagttctgtagtcctgtttcacagtagtcatcttggggattctctttgcttttcccttcttgttggatccctcatttctcatttctcctttttttttttttttttgtcttatttactgttatggtggtgcccaacctgagagtagtttcctgagagtgcaaggatggtgatacttttgagatcctctgtgttggaattctgagtcaaaccgcagaattgcaggctcttaagtttctttcttttctatccttataattgatagttttgactgggtatagaatctttgattagcaaccctcttagacttctgggtactaaaatgctaactggaggttctgtgtatgtgagtagcttatgacattgcaggctttactagagtgaatgatctggggacttgactctttttattgggtgcctgtcacccacctgcca

SEQ ID NO: 21129 - DNA, 1233 bp, Homo sapiens
ctgtattttaatacagtggcctaaattttgatttgtgatgatagacttaatgtgggatgaaagcagagacttaggcttggaagtatcttttttttagtatttgtggaaatatatgcacagcactctgatattaaaattaagtaacaacacctgttaaggatagtgatctgtgagtatgttttggatcaagttaacccttcttattcccaatctctcaattccctttaattaaagtaatttaaatttgtgttttctatataagaccatttactctttgagagcttataattttcttgagcaatgaattaagcaaatttatgacactacttattagactagttgcagatagaggcacagaagacttatgatagatacctccttctcctatgcaattaaaaccttcaggttactcgcttctccgtgatttagataatataaggcatagtctctcaaaagatttaagttcccagcagtcattgagttagtgagacttcaagagagatgaaccagtggcaagtaagttgggatgtggggaagagaaaactaaagggaacttactaatttttcctgaaagatgtgagaggatgtgaagtgaacatttggttgagattgtaatcattttgaggtctttgatgtcatatatgcacatcttttttcatgtgcacctggagtttttgtttgtttgttttttcaaactttttagttttagtaagactggatgagtagataagcctggataaataaaggtgctttcattttttttcctctttgaaaattaacgtaaacctttattgttaacaaaatacttgtgtaagttcagaatgcattcagctggaaatgacagaacaacattaactacttggcttatgtagggattgatttttctcagtagcaagcagtatggaggtcgatagtttagtactggtatagctgttcaataatgtcatcaaggattcaaagttccccagagttttctctgtgccatttttacatcttcatggtcctcccgtgtgttgcacctccagacctcacagtggattccaggcaggaagagaaaggaagggaggaagtaaggaaggtgtggcacctgagtcagaaagtaaattattttctggaaactttagttgacatatctttggccatactaagagaaacaaatatcttttatttggaaacagctgctctgaacaaatgaagtttttgttagtaagaagaaagggctgatagatatta

SEQ ID NO: 21130 - DNA, 1028 bp, Homo sapiens
aagcgggatgtagggatgatcattgtgtaggttagcccaggtctggtaacatccaacagttaaggctttcagaagtaccaactgttgcaaataacttgtcctgtatgggacagtagctgagcttcatcaatgactttaagtttgggtgactttactttttcattttctcctttgtgctatgagaaatattaagagtatatgataggtaagtgagttaagtgggaggagcacaactagttggcaagtgtaaactgccagtcatgtatcagcagtttcatttttggcaccttatgctttgctcctttaagttagattaaattactgaattcctcttgtcgaatttcttaacgcccatgctaaattgagatctttaatactctatcctcgtctacagtatgtttttcttttcaatgtccattaatcagcatctcttcacatgtaataagacatacaccaggttttatatttctatcttatccaactcagtctatttttggtacttttaggatcagttctttgaagatagactagcacaaatctgacagttctttgtgagtagctatttgacttttccgacaggggtgtgtgtgaagaattaacatagattttttcagaacttgttcagatgtcttttcattagagacgttacttctgtaaatgtggaataaaaacccatgatagggtctttaataattgattttcagttaaaagtttgacaccagtgaacaaatgtgaccagttaggacagagaaaaatgtactctgtttgcatattgaagtgtgtgtctatatttaacatcattcagtttcttctgtttctacttggagtacatatttgcttgctattcagtgacatggtggtggtaatttttaactgtattcttctccctaaaattcttggttgttgaattataaagtctttttttgttctaatttgcagtcaatatctcaagcatacattgaaaaattgtaatgtcttaatgaaataagagacatcatattgagtacttttgactttgagtgaatatg

SEQ ID NO: 21131 - DNA, 1096 bp, Homo sapiens
aatattcttcacctagatttttccaattagcattttgccatctgtgctttctctgtgtatggggtatgtgtttaattttttgttattgttggagcactggaaagtttcaagtatctactctttctgccctaaatactacaatgtgtgtctcctacagtttctctcttaccacacaccattatcacacacaacaaattcagagctgctatatattatctaatacaggccaggcgtggtggctcacgcctgtaatcccagcactttaggaggctgaggctggagaatcacttcctgagcccaggaagttgaggctgcagtgagctccctgcactccatcctgcatgccagagtgagaccttgtctcaacaaaaaaaggtattatctaatatggagtccattttccaatttccccatttgcccccaaaatgtcctatatagctatttttttaagtataaatattttttatttcagagatagggtcttgctctgtcacccaggctggaatgcagtggtgcaattgtagctcacccacagcctcaacgtcctgggctcaagccatcctcctgcctcggcctccgagtagctgggactatacccggctcatagctgttttttaatccagagcccaggcagggatgagatgaggccaggcactggtgatcatgctgttttactcttccttcccatcccaatttggcttccagattcctccctccacccagagggctctggtcaaagtcaggagccacttgcattaccagatctaaaggatccttctcgctgggcgcggtggctcacgcctgtaatgccagcattttgggagggcggaacacctgaggtcaggagttagagaccagcctggccaacatggcgaaaccccatctccactaaaaatgcaaaaattaactgggcatggtgggcgcctgtaatcccagctattcaggaggctgaggtaggagaatcacttgaatctgggaggtggaggttgcagtgggctgagatggcaccattgcactccagcctggccaacaagagtgaaactccatctcaaaaaagaaaaaaaaaagaaagaaagaatccttctctatcttgtct

SEQ ID NO: 21132 - DNA, 1247 bp, Homo sapiens
gccactttagagcactggttcctgtcctaaagcctgtggagcagtgctgaggattctaagcacaggagtgacagcataagatggctcatttacaaagaccaccccggcagatggattagatccagtagctcagttaggtgggtatggaagtctatgtgaggaatctaggagatctcagtaaaataattcagtgacagaggatgctcaggaaagaaaaggtgactgaggaggaacaagaagtccaggcctagaagcagcaccatccactagaatttgctgcagcgaaggagggcttctgtggctgcactgtctagcgtgggagccatgagactgtgtggctgtcgagcatttagaaggtgaccagtgagactgtgggactgaattttaaacctcatttaaatcgaaatagccacaagtggctagtggctatcacgttagtgcagctctagagcaatttccaggtttctggcttggacagcttatgcggtcatgaggacttccacgaggacagcagtcccaggtggggctggttttatatgtgttgagttggggtactttggaacagccacccagcctggcctccccttgggcatcttgctcccgtgtggcctgctgcagcgacagcccaggctgtggcactgcagggactgcctctcagacctcatcggatccacctgagcatggcagacggctgggcttcaaagcaggttcatctgactgctccttccctctagggtgaagactctacggtaaaaggaatttgatgccttggaaagggagagcggaaactgtgagccctgctttccagccatggcgaaagcgggtacttttgtgcaacccctctcctttcacgttggcctggctagggcggagctgccacgccagtgaccagcgtttctttgggaaaattggacttactccacttccaccttttccactcttcaaatgatcacatttgcatattgggaacagtgtatttgtgaagagactctcaggccttccagggaccaccccccccccccacccgctacagcccaggtcctggttctgtcctccccagatgctgctagagaaactgaacggcacagtgccctgcctgttggataccagcaccatccccgctgaggagctgaccatgagcccttcgcgctcagtggccaactctggcctgagtgacagcctgaccaccagcaccccccggccctccaacggtgactcgccctcccacccctaccaccgaaccttct

SEQ ID NO: 21133 - DNA, 1047 bp, Homo sapiens
ggttttattgatgaatctagttgactcattttttcatggtagaaattatgagatttaagagaactaaggaaaaatctttcagaacaaaaatatgaacttcctattgtaaaacctgactgttgatttcagaagtaaactttgacaggcctaggcattaccctttggccattttcaaagtgagcctttttgggaactgtcatcttaatttagggcaacaaaaattattttcaataaaaataatagtagagccccattctttgtgtctgaattctaagatactcttttaggatcctatagtttaagaaacagattaccggccgggtatggtggctcacgcctgtaatcccagcacattgggaggccgaggtgggcagattacgagatcaggagatcgagaccatcttggctaacatggtgaaactccgtctctactaaaaatacaaaaaaattagccgggcgtggtggtgggtgcctgtaatcccagctactccagaggctgagacaggagaatggcgtgaacccaggaggcggagcttgcaatgagcggagatcgcgccactgcactccagcctgggaaacagagctagactccgtctcaaagaaaaaaaaaaggaaagaaagaaacagattatcggccgggcacggtggctcacgcctgtaatcccagcactttgggaggccgaggcaggcggatcacctgaggtcaggagttcaagaccaggctggccaacgtggtgaaaccacatctctactaaaaatacaaaaattagccgggcatggtgatgcacacctgtggtcccagctgctagggagactgaagcaggagaatggcttgaactcgcgaggtggaggttgcagtgagccaagatcacgccattgcactccagcctgggcgacagagcaaggctgagtttttgagactccgtctcaaaaaataaaataagaaggaaatttaaaaaacagattatcagattgagtacattggttagctgatccaaaatacgcccagataggtttttttggtcttgttttattttgttgttgttt

SEQ ID NO: 21134 - DNA, 1092 bp, Homo sapiens
gcaacagcacgagactctgtccttccccaaaaagaaaatggtttttaggctgggtgtggtggctcatactgttagtctcaccactttgggaggccaaggtaggagaatcacttgagcccaggagttcaagaccagcctggacaacatagtctgttacctaggctggagtgcagtggtgcgatcgtggctcacttcaacctctgcctcctaggttcaaggtatcctcccacctcaccctcccaagtagttgggactacaggcacatgccaccatgcctggctaatttttatatttttgtagagatgggctttcgccatgttgcccacactggtcttgaactcctgagctccagaaatccatctgcctcagcctcccaaagtgctgggactacagacatgaaccaccacgcccggcctacacaagcaattttttttttttttttaactagccaggcagcttctcacacctgtggtcccagctattcagaaggctgaggtaggaggattgcttgagcccaggaggttgaggttgcagtgagccgtggttacaccactgctttccagcctaggtgacagagcaagaccctgtctccaaaaaaagaatggtttttaatatgccactattggccaggtgcggtagctgacacctgtaatcctagcactttgggaggccgaggcgggtggactgccttagctcaggagtttgagactagcctgggcaacatggcaaaaccccgtctctactaaaaatacaaaaaattaggccaggcgcggtggctcacgcctgtaatcccggcactttgggaggccgaggcgggtggatcacaaggtcaggagatcgagaccatcctggctaacatggtgaaaccctgtctctactaaaaatacaaaaaaaaaattagccgggtgtggtggcgggcgcctgtagtcccagctactcaggaggctgaggcaggagaatggcgtgaacctgggaagcagaggttgctgtgaaccgagattgtgccactgcactctaacctgggcaatagaatgaaaccctgtctcataaaaaacaaaagaaagaaagaaaatttgattttatttttaaatt

SEQ ID NO: 21135 - DNA, 1049 bp, Homo sapiens
gggcatatctgccgtctcctctactatactctccattcacattctagcctgcagctttctctccatttcctgagacagcacccttatgtccacttttcaactcctagaaatttattgaaatttcatctaatagctcctctcattctgtcctcagatatatggttattatttgtattcctttgccttaattgggaccttgggagagaggtgagattctaaaatcttaaatcagaaacctgaaatctaatctttctaattctctgaaaaagttaattttaaggtctctcctagaaacataagccattattataagcatcactatcagagggagaaagatatttgtctcaggtgtcagacggatgtcattaacctcattttagagttattaacgttgagattcggcaagccaaagtatgctgatcaagttaacacagatgcaagaacgcaattcataccatgctcgtcttatttcagagtatgtgctttttttactacgccatattgtcacccttaagtataaatctctgacttcaggttactcttaatgagcctttagccatgttttaaccttattgattattcttacgatttgtatagtaacattatgggtgaaattagctcactcttttttttgagacagagtctcgctctgtcacccaagctggcgtgtgcaatggcacgatctcggcccactgcaacctctccctcctgggttcaaacgattctcctgtctcagcttcacaaatagctgagcttacaggtgcccgccaccatgcctaatttttatattttttattagagacggggtttctccctgttggtcaggctggtcttgaactcctgacctcaggtgatccacctgccttggcctcccaaaatgttgggattacaggtgtgagccaccgtgcccagccaaatttgctcttttctagatgttaacctttcctaatagcttctatttttctaaattaatctttactatctttgaaacatttccaagttctttgtgtgtctttaccattttcttacataggactgaaatacacatg

SEQ ID NO: 21136 - DNA, 1029 bp, Homo sapiens
tgggactacaggcgcccgccaccatacccggctaattttttttgtaattttagtagagatgaggtttcatcatgttagccaggatggtctcgatctcctgacctcgtgatctgcccgcctctgcctcccaaagtgctgggattacaggcgtgagccaccgcacccggcctgttccccattattattattattattattattattttgagatggagtgtcactctgcagcccaagctggagtgcagtagcacaatcacagctcactgcaacctcctgcctcagtctcccgagtagctgagactacaggtgcatgccatcacaccctgctaattttttgtattttaggagagatggggtttcaccatattgcctggggcagtgtggaactgcggagctcaggagatctgcctgccttggcctcccaaagtgctggaattacaggcagagccactgggcctggcctcaattaatttaatcattttttgttttagtcctttaatgatggacttctgtaattctaaacaacatgtttagactttccactgacaggagagacagagaaatgactagtgaagcttctccttatttttccaagagagtaaaggtcatgctgaatctcacaccaccccctcctcactgcctcccaactttttctttttttcattttctttttcttttctctttttttttttttttttgagtcggagtctcgctctgtcgcccaggctggagtgcagtggtgtactctcggctcactacaacctccgcctcccggtttcaagcaattctcctacctcagcctcccaagtagctgggagtacaggtgcccgccaccatgcccggctaatttttgtatttttagtagagacggcgtttcactatattggccaggctggtctcgaactcctgaccttgtgatctgcccgcctcggcctcccaaggtgctgggattataagcgtgagccaccgtgcccagccccttcttttcttttttcttttcgtttcttttcgtttattttcgtttttctt

SEQ ID NO: 21137 - DNA, 1045 bp, Homo sapiens
gaattttagtaagaataatcttgagataattgaagaatattcttaggagcaaaggggtcacgtgtccaagaaaatgtgagctgctgtgcgggcctgcatttgacagcagtgtcattaatgctgttgagtgaactgcccaggatactgcaggcctgtcatcatcatcttaccccttttatcatttttttgttttatttgacttggtttagtgataggtatttttcccctgaaaatgtagctctgtgtttatgcagtcttctttataaataaatatggctttttatgtacatgtgaagaatctacagaggaatcattaataggtaatgcctttcatttttctataaaaggaagttctacatttctttctaaggtttgaaactataatgagttaaaggaagagggggcctgaaacttaacctgagtcagattgtaagcttcttgtcgatgtaaatcatttaatttttttgaactaccactttatagtatctggtctgggcaccttgtaaaaagatctggtgaactcaatagaacaacccacccaaccccctctaccagtatatgatatgaaagctcctttttttcttttaatttatttttatttttatttttgagacagggtctcactctgttgcccaggctagagtacagtggcaaaatcgtagctcgctgcagcttcgaactcctgggctcaagccatcctcccgcttcggcctcccaatatgctgggaatacaggtgtgagccactgtgcccagccagagagctcctcttcactcacatcttttcaaaaactagttattaatttttttttttttttgagacagagtctcgctctttcaccaggctggagtgcagtggcgcgatctcagctcgctgcagcctccacctcccgggttcaagcgattcttctgcctcagcctccctagtagctgggactacaggcacatgccaccatgctcagctaatttttgtatttttagtagagatggggtttcaccatgttcaggatagtttcaatctcttgacctcgtgatccgcctgcttca

SEQ ID NO: 21138 - DNA, 1362 bp, Homo sapiens
tgtgcaggtatctgttcatctaagtgtattgggtgacttgtgtacatggaaaacatctttcttgtattccttcttaattgccttttcttttatgacagggaaggtcagcctttaaagctacctgacactaagaggacactgttgtttacatttaatggtaagtattctgggtcctttctgggttcttagtcttctctgagatgaccttaaggagagtattgtttcctcctaaatgatagctttaaaactacgtcaaaactataagcctgtgcttgcttactgatttccagatttcttcaagaagaaattacctattatatattttaatttatattttctgctgcattttaactgcctaacaaacttagagaaatgagtctcttaagattaaaaaaaaaaaagagttgggtgacctggaaatattaatgctaccattaactcagtaggaaaaatggctttgttttccagtgcctggctcaggtaacacttacccaaaggatatggaggcactgctacccctgatgaacatggtgatttattctattgataaagccaaaaagttccgactcaacagagaagtaagacccaatgcctgtattatataaattggcacctttttttgtttcttctcaagggggagggcagctatcaatgatttcagtgactgaatttttgctagttgatttagaagtgccaaatgggagtagttttatgaaagaatgctaaacgggattttgttgctgttgactagaaatggatttcttatgaaatactttgtttcttggggaagggcaaacaaaaagcagataagaaccgtgcccgagtagaagagaacttcttgaaactgacacatgtgcaaagacaggaagcagcacagtctcggcgggaggagaaaaaaagagcagagaaggagcgaatcatgaatgaggaagatcctgagaaacagcgcaggctggaggttagacaaacttatcactggggtaaaactacgatttgtaaggatgactgcttgtgttctgttggttgttaaggtaatctttgtaggctaaaagtttagcattttctcaacatttgggacattgtatcaattgataacactataaagaagaataaataatccttcctgttcaagccgtgccacactgagtctgtgaacgtgaaaaattatcagtattatcctgttcccccagcacaatttcattttgaaaattccattatcagttttcgagccaaacactttggtagaaagaagttagaaattttaatagaaggcagcacatgcgccctattatctaaataaacttgctatgtaaaatttaaaatctgattatagaattagagatttccaatatttttgtttgt

SEQ ID NO: 21139 - DNA, 1050 bp, Homo sapiens
cccgttggaggttgatttgtgtggttattacagtgttcctgcagatggcagtcgagtgtctcgaggaagtccctcgtgggctgcaagagggcaccatttccctgcctccagtctgcccagagtcctgcttccatccttcagggcccaggaatcttcagtatccggagctccagggctgaaatggggcttctctttcttgggatttagcatagcttgagatttgagagctcagcagcaccatctcacacccctttccatccccagcctagcaaacagaagaggaagttttcttcattctttaagagcctcgtcattgagctggacaaggagctgtacgggcctgacaatcacctggtggaggtgagagtgggcctggggcaaaagcaggctgatgtgcaggtttggcagggaaatggcctcagggcccttgggaggccctgtgttcacgcccacccccttggtgataagccatgcttccctccctgccagtggcaccggatgcccaccacccaggagacagatggcttccaagtaaaacggcctggagacctcaacgtcaagtgcaccctcctgctcatgctggatcatcaggtgacagagaccctggggtcatttctgggcccacagggacccctcaggaggggagctggttcctagaaacccttcctgtccctgccctattttcccactgttctactataagaacccgttctgactcccctccatccaactccagcctccccagtacaaattggacccccgattggcaaggctgctgggagtgcacacgcagacgagggccgccatcatgcaggccctgtggctttacatcaagcacaaccagctgcaggatgggcacgagcgggagtacatcaactgcaaccgttacttccgccaggttagccagatgccagcccccgttttctcagcccttgctttgccttgcctgctgggctactccttggccacagcctgcagactgctgccctcactggtcctggaatggtccactccactgtgcccacaagccaacgctgagcctttcgtatt

SEQ ID NO: 21140 - DNA, 1050 bp, Homo sapiens
cctggaccagagcatttcagggaatggtttcctagtctcatccccagtggcctgtgagttcccaacccagctcagctgtgacagcgcctttgacctcagtgctggtggtggtacacatggaattgattacccagaaaacatcactgactcagacaagcagggcagactcatccgagcaataaaatgatcctcgaatagaatcatgaagatccttccggtcataaacagcaatatgtggagcaggctgaatctacctgctttaatcacaaagtcagaattatttataattagatgattgattttgtagcacagagggtgctcctaaaagtgttttgagaagcattttccctaaataatacaatattgacttgcgtagtaaatccctctctttgtagatagtgtatctgctgcctagggtttgtctgatttagtaaatattccaaaattgtgaggtaactcatgaagcttaatttttttccctcttaaatgcctagaatagataaactggaacttttacatcctattctccttaaaattactgctttgactataaatttaaattatattattgtttttaccaaattaaaaatgttgactagaggctacttctcacatctttagccctttgcatggaatcaacagtatgatgacatgaaaatgtcacaaggagctacctccatggggtctaaatataagatactggctcttagacttttgcttggttctggtactgacctaatgcttttattcatgcttgtggtagtagcagattgggggagctgggttatgcattggagaatattcttttacttagattattctgatttattcaagttacttaatgaaatgtttctattttaataattggagaattttaccagctatatgcaatctaaccggtgtctgtgctattttcctttcatttttctatttgttaaaatatgtttggattcggcaatctgtggatttatattttctggtgagtgtggtatttatcaactctccacatagcatttcataccctgtaacttctgagtcttgttcggtccc

SEQ ID NO: 21141 - DNA, 1040 bp, Homo sapiens
gatttcactggtttttctactaatgtcctttttctcttccaggatccaatccaggatattaaatgtaatattagtttacatctattttttaatgtttttgatgtagcttttatcctagcaattaaaaaaatgctaaacatgaaaacggtataaggataataaaagttacaaaaatgtatttttatagttatgcagtgtaaaatattaaagtgctggaaattatctggctaaaatttaaattaagaaatggcttgcgtgaccctttgtgaggctctggggaattatggttctgatggttggagcctcttaagaagaaaatggtttgatttgattttttgatttctttctttctttctttcttttttttttttttgagacagagtcttgctctgttgcccaagctggagtgcagtggtatgatcttggctcactgcaacctccgcctcccaggttgaagcgattatcctgccttcagcctcccccagtagctaggactacaggtacaggccaccatgccaggctaatgttttgtatttttagtagagatggggtttcatcatgtcggccaggctggtctcgaactcctgacctgaagtgattcatctgtctcggcctcccaaagtgccgagattataggcgtgagccaccgcgcccagcctggtttgattttaaccactttacgtttcacctggccatcagagtaaatctaaataaaattgttagcatcaggcgcatcccatgcttaaaacctctggcgcaacagggtcaatattaaattcgaggttggcttttgaggcactttgcagtctgttcctggctaatctctccatcctcatttcctatcctctgccccccgtactatgcttagaacttcactgaatctctcactggcctccaaacatactgtgccctgtcactgctttttgcatatgctgcttcctgtacctggaatactcttccccacctgggccaggaaaatggcaactattccctcaagatacagcgtagatgtcactgctgtgaaagtcagctagggtaag

SEQ ID NO: 21142 - DNA, 1024 bp, Homo sapiens
ccgcccttcatggattcttcttggttttagtagctctgcaagcataaacaacctctgaagtatcttagaaaaacgattatatctgcttcaagttctttattaatctagttgcctttagaactttagccctggtaaacctgttatatatgtaagacagtattttctgcaaccaaattgaataagaagaaagctgtgtgttctgtgtcaggagatctttggtgaaaatggttgtgcttaaaaagacaaataaatatatttatagaaaaccctactcaacagcagaatgcattttttttaactgcacttggaaccaagatagaccatataacaagcttaaaagaattgaaattatacaaagcctgtttcctattatgaaattacactaaaaaccagtaagagagatatctgaaaatttctcaaatatttggaaattaagcaaaatacttctaaacagcctgtgggcctaaagataaagtcataagggaaaatagaaaatatttttaactgaaggaaactgaaaatacaacctatcagaaattgcaggtaatacagtgcctagagggaaattaatagtattaaaagcttgttagaggatgggtgtggtagttcatgcatgtaatcccagcactttgggaggccaaggtgggagaactgcttgagaccaagagttcaagaccagcttgggcaacatagcaagactccatttctacaaagatctttttaaaaaaattagcttggtgtagtgacacgtatctgtagcccttgctacttgggaggctgaggtgggaggattaattgagcccaggagttccaggttacagtaagttatgattgtgccactgcagtacagccaggatgacagagaaagaccctgtatcaaatacatagatgatagatacatacatatatacatatatatgtgcatacatacatacgaaaagaaagatttgagagaagcacaaattaccagtgtcaggactgaaagagggggcatcaccatagacactacagatattcacaggat

SEQ ID NO: 21143 - DNA, 1251 bp, Homo sapiens
ttaaaaaaccatatgcttatgatttctttataaactctaaacaaattgtaccttaataaactgtcagtaggagaaaaatcactatggcttgaacagagggtgaggtgtaggggccagggaggcatgaaactgggcagtaagccacctggacccttttacaggtgagcaaagcaagtgtctgagggataagcatcacctaccttggcaggaggtaagtggtgcaggcatgattggaacccaggtctgtcagattcccagtacttctgctaaggtaggtgagttggtttcagcgcatgtgttttgaccagcagtcttttgtgtaattggatacgatcagtgtagggtctcatttaggctaacaaatgattgttcacaataaatgtgtaattcaaatcctgatttgtgtgctgtgtttatttgttttttagcagctgtggactttagcatctgatgaatctttaacacaaagataggaacatggtagttcaggaaggaggaaatttgaagataaaagggaaggagaaaccacagcagctggtgattctgaaaagatgggggtagggagaagaagggccaagccaagcccaagcagaataaaggaatttgggtcccctccaggctttcgcaagagaaggaaagcatctcctagattctctttctatgcctacctacttcttgcctctcacttctgcctcctgcagtgcagcaggtaaggttttgtgcttttgaactgtgtaggtaggacttgaaactcccttctctctttcacattcttctgaatcaggttgttctgggattcctgaatttggcaagtggtagaggatgacctttatctgtcagagctgtcagcaaagaaggtaattgcatactcatctcagaactgtgcccatgtgtgagcgagcacacaggctgcagccagcaagaactccacagtggctgttcttcagctaaggtggtagctcaggttgctgggttgaatgcctggctttgtggctaaaaaccgaatccctgaagcactgtggaaatggttgctcttgttatccagggacaggaattttcctaggaataataattgagtagcagttggttagactggggcagagtaacagctcagcacctgaaactgacctgtgaacagatgagctggtgtatgtatctcaacacacatgcctgtatgtcttgttttgttttctaagtctaaaaatcaaaagaataagctaaaaaaatgatatgtttgtctattaattatct

SEQ ID NO: 21144 - DNA, 1029 bp, Homo sapiens
tcagaaggtaagatgagccccagctttgggagttgtgtttgctgccaggagggtttagaggctgcctctaggcaacacccaggggctcaaagaagacagacgcagagagcatgagctgctggtcacctctctatccccagagcatcgtagatgcttgataaatgtgttaaaaatggatgacagtttcaggaatagatttaggagtaaataagagatgggcttgaaatttttctagaaattctgaaaaataggtgccgagggaagtgcagtgccagtgagctgcagagtttgttcagcctgtgctttctgccagaggtaattgacatttctcctcactacgaatgcaagctcgacctccctcctttcgcccttatctagtcctgcaccaaatactgctgatttttatcttataaacgactcttggatggttcttttctctgaagcttctctgccactgttctagtttggtgcaaacaaccatctttttgcttggaatactccagcagcccctcactgacctgccctcatctacctctactcctttctaatctcttcacctctcagcagtctgagtggtctttaaaaaattcctatcatggccgggcatggtggctcacacctgtaatctcaacacttggggaggctgaggtgggaggactgcctgagcccaggagttcgacaccagcctgggcaacatagtgagaccctgtctacaaaaaaaaaaaaaagaaagaaagaaagaaggaaaaattaaaattagctgggtttggtggcctgtgcctgtggtcccaattactcgggagactgaggtgggaggattgtttgaacccaggaggttgaggctgcagtgatctgtgatcacaccactgcatccagcctgggtgacagagaccctgtctcaaataaataataaataattctaacatcatcatgtcacatccttgctcaaactctctgaatgtttctttgttgcctgtgggataaaatctacattccgaacatgtttaggtgctgtgtgatctagcccct

SEQ ID NO: 21145 - DNA, 1050 bp, Homo sapiens
tttttttttttttttgagatggtgtctcactctgtcacccaggctggagtatagtggcacaatgtctgctcactgcagcctccacctcctgggttcaagtgattctcatgcctcagcctgctgagtagctgggattacaagcatgcaccaccatgcccagctaatttttgtctttttagtagaggtggggttttaccatgttggccaggctggtctcgaactcctgaactcaagtgattcgtccaccatggcctcccgatgtgctgggattacaggcatgagccactgctcccagcccagtttatcttattaactatcagttcgacgataactgtgtgaaatacaactggtagaatagagtcccaggtatcagaaagtttactgcctttgagggcaaattcttgtgaatctttaaagtatcatatgcaattcaaataggtttaaaatgtcagtacatatatgtattaatgaagactgtggttgatcatgaataattaacagaagctgaggatttaaatttgtggggttttctctcttttttttttgttctgtgactctagctaaaggtggttatttaagtatttttaaaaattacatgaatatccaggtgaacaatgatttacaaaaaaagaaagatgaaagtggaactgtttttatccaaaacttaagaaatttctaggattgaaatttttaagaagtttgaaatgattcctcttcagtttagagaagaagtaagtctgtttatcaatacttaattcatatcatgtactatgtgtagtttgttttcataattatggctttaatgcaaaaagtaagtttttgaaagatttcttttttatgaaaataactttacgtttcagaaaattatactccaaacccctttccctaaagcacaccatttttttccctaaggcctcttttgaataatcagcaaacaatttttacttaaaagtgttacctttcgaggtagggcgcagtggctcacgcctgtaatcccagcactttgggaggctgaggtgggctgatcacctgaggtgaggagtttgagaa

SEQ ID NO: 21146 - DNA, 3551 bp, Homo sapiens
gtggccctagcaatggtcttttaaaactcaggatttttcctttctctctcctattattagacttattcgtctaatggaagagatcatgagtgagaaggagaataaaaccattgtttttgtggaaaccaaaagaagatgtgatgagcttaccagaaaaatgaggagagatgggtatgtgtgagctcctccattgaagcagattgattaaaacagcttaggaaagggcaaacttggatcacgagcagtggatttttttcatatctgatagtgaatttaactttttcatttctggcgaaattaaagagatctgtgaccaaaagtggtcaagcactggagtctgaggttttcaatgtgagtttaataacacaacttgtcttttaacttaggtggcctgccatgggtatccatggtgacaagagtcaacaagagcgtgactgggttctaaatggtaaatatttcaaatgaagtatttttcccccttacttaacctagctagaattctgctcagataattgatcatgtatatgccttcctttgtagaattcaaacatggaaaagctcctattctgattgctacagatgtggcctccagagggctaggttagtacaaactcgcattcatggcttggtttcccagaagatctccatttaacttttttaaagaaagtttattgctttctttaacctgcattttttctaagttttttttcacataaaggtgctgtctttgtggcaaggcctaggcatgacaatcggaggactcgagggggatggaggactagtgatcggctggctgcttccagtcgattagagaggtgaaaaagctgaacgtgtgccagtaatcttcaaaaggcagaacatatcacctctgccccgtaaactgttctctccgagggaaaaaatggaagttatcctcacagttcactgccgtggtatttcttctgtcccatgctttgcatgactgccatggtacagccttgtttcaaactgttcactgtgatctgtgggtctttgagtttcagtgagtttgctgaaatgtcgaagaagtagttccaaacttcaatgttcaatgaaatttttgttcaagtttgaaatggagagagcagctttaaaaggtactaagccttttacaaattggtgagtactggcacatgagatctagagcaggagcaacttctcacacatagtaagtgggaaaagaaagtgctttgaaagttcctccctcacctacacagtagtcgtcatgtcgagacctgccagagagagacacattctcaagtgaatcctggcttcttggaagcgcttgcctagacgagacacagtgcataaaaacaacttttgggggacaggtatgttttcttgcagctgcggttgtaaggtcttggcaagacaagcagtgtggccagaattttgaacttctgatgaatgtgtaatgcaaaggaccttgtacatttttttgtttcaaggtcctcaaaatgagcacatgaagaggttgctgtgaaactttaagtggccctactgcgcagaagcattcagatgtcacttgatgatctgtaagggaacttgctgatttgggaatgtgcttagggaacacacattccttttgacagggtctgtcactgggtgggtgatgaattatacagatgacatgtgcttttttttcttttttcaacctcaatggtattcctacaggaaatggataaccattttaactgtattttttgcagcccgtaccttcttgggaatacaattgtctaactttttatttttggtctggctgttgtggtgtgcaaaactccgtacattgctattttgccacactgcaacaccttacagatgtggaagatgtgaaatttgtcatcaattatgactaccctaactcctcagaggattatattcatcgaattggaagaactgctcgcagtaccaaaacaggcacagcatacactttctttacacctaataacataaagcaagtgagcgaccttatctctgtgcttcgtgaagctaatcaagcaattaatcccaagttgcttcagttggtcgaagacagaggttcaggtaaggatgactgataggaaatgttggtagttacgagtcacatcgttgtctacaaatccatttaaatggtattggagggtgagtaaaaccttgaatgtgaaaacttaagctgaaaaattgtaaaaacatttcacgcctaccatgaatagatctgtttctttctgtccacaatgatttgtgtcatagacataattgatcaatttgcaattgttttcttgacaggtcgttccaggggtagaggaggcatgaaggatgaccgtcgggacagatactctgcgggcaaaaggggtggatttaatacctttagagacagggaaaattatgacagaggttactctagcctgcttaaaagagattttggggcaaaaactcagaatggtgtttacagtgctgcaaattacaccaatgggagctttggaagtaattttgtgtctgctggtatacagaccagttttaggactggtaatccaacagggacttaccagaatggttatgatagcactcagcaatacggaagtaatgttccaaatatgcacaatggtatgaaccaacaggcatatgcatatcctgctactgcagctgcacctatgattggttatccaatgccaacaggatattcccaataagactttagaagtatatgtaaatgtctgtttttcataattgctctttatattgtgtgttatctgacaagatagttatttaagaaacatgggaattgcagaaatgactgcagtgcagcagtaattatggtgcactttttcgctatttaagttggatatttctctacattcctgaaacaatttttaggttttttttgtactagaaaatgcaggcagtgttttcacaaaagtaaatgtacagtgatttgaaatacaataaatgaaggcaatgcatggccttccaataaaaaatatttgaagactgaattaagtggaaattgtactttattttatataatgtcatgtaaaactttgcttaagatggtctggttttttttttgtttttgtttggttttttttttccatgaaaacaaatgactgttcctttttatttaatttgggaggcagggggaatcagaaggcccttctttataatgagctattcatattgcaggagtcagaatgaattgatacaggtgaatttttagttacaggctaaattgcataaaagctttgtcagcttccagcatcaggggagtcatttaatagcctttttccttatttgctagtatggttaaatgagaaaatagtaaaatagatacaaagtcatctatatagtgtgagaacgtgggtgactttttcaaagtttataatttaaaaagctccaaataactggctttttcaagagacttatactcatgctcttggctatactgtgaattactgaaatgttgaacaaacctgtgaaagacatacattagccctttaagatggccaggagctaagcttgagtctcctttactgaatttcgttcttagtgcaggttac

SEQ ID NO: 21147 - DNA, 1056 bp, Homo sapiens
gttaaacatgatgaaacgcatagatgcttttaataataaatgtgagtctcgatacagtggctcacgcctttaatcccagtgctttgggaggccgtggcagcaggatcacttgaggccaggggtttgagactagcctggtcaatatagtgagacctcatctctacaaaaaaaaagttgtttaaattaaaaaattagctgggtgtggtggtgtatgcctgcagtcctagctacttgggaaactgaggcaggagaatcgcctgagcccaggagtttgaggctgcagtggactatgatcacaccaccccaactccagcctgggtgacagatggagaccctgtctcttaaaaaatgaaagaacatctactttcatcagttataatttacttttattgagcaaaatttatgtaagagtgtgacaaggtttactctgatatgagtattttaaacctactatgcttttaggtaggaacctgtcttggaatgttaggaaaagggttattagaggtgctcaagatggccttttacagaggcaatatcttgacaggagaagtaggggttgaacaggctaattttgtgttgccattgtaatacaaaattattaataatttatattaatggctaacaccttagtagcacttactgtgtgacaagcattgttctttatactttacatatgttggtaaggccaggcatgtggctcatgctgtaatcccagcactttgggaggctgaggttggagaatcacttgagcctaggagttcaagaccaacctggccaacatgtgagtcctattctcttcaaaaaatttttttaaaattagctggtcatggtggtgcgcacctgtggtcccagctactcaggacaccgaggtgggaggatctcttgagctcaggaggtcgtggctgcagtgagctgtgatcgcgccactcattctagcttgggcaacagagtgagactcttgtctttaaaaagcaaacaaacaaaaacaccccaagttcgtaatttcatcctcagaaaaactctgtgagttagctactgccatttttacagatgagg

SEQ ID NO: 21148 - DNA, 1032 bp, Homo sapiens
tttggctatttttccatctctatctgtttatgacatagaatgtctccccagtatctcatctgttttgcttctctttgagctcaaatgtaatcttgagaatatacctttgtctagcaaagagaaaacataagttttggtataaaattaggcataataagcattatcaacctccagactctttgaaaatttctggaagttcctcctcaaatcttcccaatgttggccagcctctttctcagagccttttatacatcatttaaaattttttagttattagtattgtgacaatcttgatttgttttccattgcaacatatttagtatttaagccacgttataagtttagtttgtttatggatagctggcctgtggccctcatcatttgtaaaattgtttccaagagacagaacaaatgatttgtaaagcccttttttgataataaataaaatagattggtaatttggagatttttccctattagtatatcatcttagtgtatataactgtctttgatctggacactctgaatgtttttgttatcagtgtttattaattttacagaacagaggacaacgcaacaaggccaggtgtatttcttacatacacagactggtgtgagcacatggcatgatccaagagtgcccaggtaagaacgtattttaagcactctttagaccatcaaagagccatttcacctaggatttctttgatttttaagaaatttttaccttttaaaaatagtttatgtaaaagtttgactcttctgatagttacttcagttttaacgtttagtagaaagtcctgcctactgctctgcaatcccacctcagttctcccctccctcaccagttcctagccaccctcccctgcttccccttaaaaaaaagtggaataggcagggcatggtagctcatgcctgtaatcccagcactttgggaggccaaggtgggcagatcatgaggtcaagagatcgaaaccatcctggccaacatggtgaaaccccatctctactaaaaatacaaaaatgagctgg

SEQ ID NO: 21149 - DNA, 1045 bp, Homo sapiens
gaaaataaatataaaacctcccaactttgaaaagtctttgaagtggtagatgactacctaaccaacagtttgaccttgtgctcatcattcagcctcagcgtttgtgctcttctataatgaagtgagatgactagtttataacaaaggtagtgtgagaagcatacgaaatgaagtgagactgttttgtaaataggcactgtatagaaaggtaagatggtattgttactgataacggtaatctgaagttcaacctatgacataattttttagacatatatatttagaaataattttaaaggcatatttctgatcatatatttgtattgtctgtaattttggattatctgattggattgttgtaaatgactgagtcacttctatgtttgtataaaatgattacaatcttatataaaatcctagattataaagtttcatgtggaagataacatgagtcttctcctaatagaatacggaagtttctaatttaataccatcttgtgaatccttgtatatagtctgaacttgacttcctcttcttgccaaaagctcaccaaggttacttacatctttgccctcttaacagactatagataaaccactttggattgatgttgacatctaatgaccaacactgggaattgccacatctaagttttattttactcaagaatatattttaaaactcttctgcaaatgcatgattcttattttagttttaaatgtattttagctctttaatttgaaaaaacttgtccattaactgtgctatgactcaaaggttaacttttagcacaatcattaaattataggcttgagtgacagacagacttaggacctaggttcgtatcctggctttgccatgtaacaccgagcacattatttaacctctttgagcctcaattttatcctctatagaggaaaataacagcaccaaccatctaggtttgttgcaagaaatcagtgatatctaatttcatgtgaaatgctggcacagtgtctggcatagtaaattttaactgtcattatcagtgttcagacctgagaa

SEQ ID NO: 21150 - DNA, 1083 bp, Homo sapiens
acccatttttattatatctgagcacaaatgaatatgtacttgtgtcagtgttcaaggtttcacttgaacaccaatttccttctgactcatttaaccagtaaaattagcttgaatttctacatgtataaaaggatgattgttgttttaaatgttaatttttttttttttttggagatggagtcccgctctattgcctaggctagagtgcagtggtacgatctcggctcactgcaacctctgcccactgcaacctctgcctcctggattcaagcaattctcgtacctcagcctcccgagtagctgggactacaggcgcccgcccccacacccggctaatttttgtatttttagtagagatggggtttcgctgtgttggccaggctggtctcaaactcctgacctcaagtgatccgctcgcttcggtctcccaaagtgctgggattacaggtgtgagccaccataccctgccatgttaatttaagaatgaactcttgattatttttttattttgaaagatctgcaatagtagactggaagccccttaaagagacaaactgtcttctttccttttgtgatgtattgtcaaatgactgggtgacttttttagattgggaggtctgagggacctcttaggaggcaataataaactgatttgaatgacaaaaaagagccaggcctagggagagtaggagaaaagaatatgccagatggaaggaagagcaactgctctcaggtggaatgaccttggcaagttcaaggaacaggaagaatatgagtgtggctgaagcagagtgggagggagaatggtgggaagtcaggtctgagggagaggctatagctagatcaagcagtgttttgtaagccagtctcacatccacagatacgtatggattttatatcaaatgtcattaaagtcatttaaatacatagttgatgacatgcttatcatttgcatttctttggtgcttagagacttcaggtttgcttttactcagagttcttgaagtcattatacttgtattagtcattctgttttcagacatgataagtggttgttactgcagtatatatatattgtctaga

SEQ ID NO: 21151 - DNA, 1048 bp, Homo sapiens
gaacagaacttagtgagattattttgttatgaacccatcagagaggttttagttactgaaggtactttattttacaaggcagtgaattgggttcatagttagagaaccatcagagtagccacatagcaaagccctattgtggttatcccagggaagtatctataccagcgcaccccaccatttttggtaccaggaaccggtttcatggaatacagtttttccatagaccaggctgggggtggaggtggtttcaggatgattcaagtgcattacatttattgtgcactttattattattacattgtaatacataatgaactaattctacaactcaccatcatgtagaatcagtgggaaccctgagcttgttttcctgcaactagatggtcccatctgtgggtgatgggagacagtgacagatcatcaggcatgagagtctcataaggagctggccttgtgtgtgcggttcacaatagggttcgtgctcctatgagaatctaatgtcgccactgatctgataggaggcagagctcgggtggtaatgctcactcacctgccactcactcctgttgtgcggccgggttcctaacagaccctggaccaataccccacccatccatggcctgggggttggggattcctgatctacactacatcattactgataattcctgtcattcttagattgagaagggagcaaaaaaaaaaaaaaactcaaaaataaattcagtcatacaacactttcacatgtaagtgttccttctgtatttgatttgttatgttacataatgcttgccaactactgtctagtagtaacaatagttttactaggtatgaatttgcatttatataaatagcaaactttgttagacattagaagtatacctactggagtacaccacatagaaaacaaatgttttactcttaaatatgtgtatgcctgtatatatgtatttatttaaagctcttatgtgaatctggtgttcataataggaccattaataaagagagaggcaggctggactcaaacattatgattctttagttt

SEQ ID NO: 21152 - DNA, 1030 bp, Homo sapiens
ataaaaacctttaataagctttttctttaaatgagctactgagggagacatttggaaagaaaaagccatgaatggttacaagaattcatgtaaccattcatgaccccattcctcgggtcagagggctggtaacaacctattaaaaacttccacattatgaggtaacctctagattttggtagtttaaactgggactattttgagacagaaacgagaaaaaatatagttttggtatttaatgtagaagtaactttagtctttttttttaaaaaatggactattcatttatagctaaatgttaaacttttttaaaagaatggaataatcttttgtagcaaatggaatgcttgtataattaatcttctatcttaaatgtcaaattattaattttagaaaatcttttttcacaggacttcctgatccatttgctaaggtggtggttgatggatctgggcaatgccattctacagatactgtgaagaatacgcttgatccaaagtggaatcagcattatgacctgtaggtttcaacaattagtttgaaatggaacatatcattaaattatttgatatagtctttgaaaataatcatgggaaatgatctgggtttcatctgtggtataatttggtcatcacaaaaggggtaaagaaaagcccagtgggaatgtgctttggcttatagacaggttttgaaagatgaggtatctctaaaattctatgaagaagaaaatgaaactggctcacagtagagcaatcccccacctcttttttcaattaaataaaggtattaattcaccactttagaccaattataaaaccagaaataaggatttgggttgcactgaataggcttctttttgcctttatatggatggtttctttcttttaaattttattttaaaccattggagtatatgcacctttttaaaaaggcaaatgatacaataaagcttttactggaaaacagcaagttccctgctccattctcattcctgattcccatcctcaaggcaactgctttaataactttg

SEQ ID NO: 21153 - DNA, 1033 bp, Homo sapiens
ttgctgagaattgtaattgtcaggatgtcaggagggaatacagtgaaggttgctatggagatttctgacttgggtagtggagtggaaaggaaggctatttattgaaaagaaagtcaactggagggaggagcaggtttgcggggaagacgtgatttttggggggaacgcatatttggtttgtggacctggagttcaggagaaaactaaggatcgggttttatgaatttaggtatcatcataaccatagagtaaatggtaaagaccagagagaatatatggaaaagtggctcttcggattttattttttgagagagaggaagagttctgtcaatctattaagctatgaactctctcccaggaaaaatgtggattctctccccagaaaataaacatatatgtaacagtttacgtataattgcaagatttacaaaaatggacactgtgatcctcaggttacagagtgaaataagagaacctagggcaaaaccctgaagaacttcaagttttatagcacagcaagatctggcaaagagaacttagaatgagttttatgccgtgtagaaccaggtgaatgtggtgttaaacagaactggaagagagggtttctagaagagggagtagtcagcagtggcaaatgcccatgagggggtcaagtgccataaagaatgaaaaatgtccattgtatggacttggtaattaggtctccagggctttgtagcagcagttcagaggcaatggtgagggaggaagccagattgcagtggatcagggcattagtgggaggtaaagaagtagagtcaaaaagtgtaggcagttctttttaaaaatgttttaaaattatactttaagttctggggtacatgtgcagaacgtgcagttttgttacataggtatacatgtaccatggtggtttgttgcacccatcaacccatcatctacattaggtatttctcctaatgctatccctccctaacccccaacccgccaacaggccccagtgtgtgatgttcccctccatgtgtccatgtgttct

SEQ ID NO: 21154 - DNA, 1026 bp, Homo sapiens
gtgctgcttggctttagctgagcttttactttatttatttatttattttagaggcggagtctcactatattgcccaggctggtctctaactcttgggctcaagtgattctctcacctcagccttccaaagtgctaggattataggcgtaagccaccgcacccagcccttttttatttttaacatgtgaacttacaccagaagttgattattatgcttgttaagataagctttactttaaaattacctctgatcacgataagtaaaaaaaattataattgtgactagaataaaatctataattctgactagatttctttaaaatctgcatttattatgtcaaagtagatctattattgataaacttgcactcagtgtttagaaagcttatttgtatagtctcatcttgttttattaatgtaaaaagtacgcatgtttgtgagaactttaccaaaatcttcatctttgttgaaaaaaaatttttaagtagttacttaaaagttgtttgatatgagtggactagaaaggtcattttaaatttgttaactgaggctgggcgcagtggctcatgcctgtaattctaacagtctgggagactgaggtaggaggattgcttgagcctgggcaacatggcaagaccccatctctgcaaaaaaattttagacattagcaaggcatggtggtgtgcgcctgtagtcccaggtactcagaggttgagatgggaggatctcttgagcccagaaaatttaactggagtctgcagtgagtcgtgtttgcgccactccattccagcctaagtgacagagtgagatcatctcaaaaaaataaaaatataataaattttctgagaaccaattttgccttgttgaaatgtttaaatgctgatactgttcttaggataattacctcagaacctgtatcttttaatacatcatcaaacatactaattagattaactacttgccaggtactgaatatattaagttaaacttaagggcctagtttgttttgcagcatgaatgaaatga

SEQ ID NO: 21155 - DNA, 1078 bp, Homo sapiens
ctattgtgaatgagagagaaggctcagtgagatctgttattagataagtagttgggccctaaggaatgggtacgcagagtacttatgaatagttaaggaagccatcctgatttgaacataaagagttactaggttaggggaaacaaggagtgagctgcatgtatcctttaccttttagtttgcacatccttataactcgtcagtggttttctgaggattttatttgattcaacaagtatttgcatattatgtttaagatattatataataaactgtagaagaggtttatagcttaatgagacagaggtaagacatcacatgaataactttaacaagcaaaatgagaaagcactataataaaacaagtagaatccaagtgttggaggttcacgggaaggaagagatcaaaatcagactgaaaaaggagagtcagaaaaggcttcacagaagtttgatgaatggataagattttgagggccagtggttgggataataacatttaaggtgggaagaacattatgaataaaggcaaaggcagaaaagtcctgggcttatttgagggaagaggatgagcttgtcagtctaggggttaatgagagagaaaacaggaatcattgacactgcttgagtgaaggatttatagaaaaataggatggagcctgaattcacaatgcctaaactcttttcctaggtggcagttaggggtgagccaaaacattcacttacagtttttctgtggatattagataactcacaagctttaggggttaaagaaaacaatctatgtagaagttttttggcacattgtaaaatactctagatgtattatttaaatgtgaacactggaaatggagataagcagaggtatgtgataaccggctataatctggcaactgctttaggtatgtgaggtggtcagggagaggaagagagataaagacattgctttctggatgactggaaacgtggtgcagttcacagcactacggaggtcaaaaagaagagcaggttcactagggaagctgatgaattccattttgaaaaaatataatttgaagtgctggtgaggaatctaaat

SEQ ID NO: 21156 - DNA, 1034 bp, Homo sapiens
gccatagtacttattagacatgtatatgaatttggactataatgaataacataaaagattcaggagtcctgacaggatttgactcttttacttaacagacccccataacaaataccaaaaaggagatttatttcactatttgatagaaaatgtatacatagaatacttagtcagttgaggcagacccagtagtctaggacctccagcctttgaatctggtccaaacgtttgagttttctgagtattctcttaggacacaggtggactaacaatggaacatacacagaatagacccactctttttgtatcactcaaagaagagaccaaatttcctctccatgtctacccacaagaaaccagaaggcttcaaacaaacttgcgagacagcagaacaaactcataaagtcagcggaatcaccatcagaaggtgatggaaaccagggcttactatgttctcaggtgttggtggcttgttggcttcatcggatggctcagtcatatgatctgtgtgggacttccaaactgttaaagtacaaagactgttggagaccaaagattgtgtactgagtgaaaaaactttattgccaagcaggaagcctaatccagcacaaagtctaagcgcgctgtcagggatggagatcctttaaagccaaaagatcatgaactgtccttttccatattagaaaagccaaatttttgagtgttcttgattggttggtggtgatatctgggtttgttggatggtaagcagggaactggctggagatggtctatagcatacatgtggtatgaaattataacatctaactgcctctgttttgtatgtgatatacctgagttaggattatgtcacctgcttacatctgcattggccgcagcagactaggtgtccagattagggtttgtcagagtttagtagtcatttggatatgaggatgtggatattaggggagaggtctgcgtgtagttcagtagctatatactttgaaaagtggtctaatggagaaaactgtcagcttgactgggttttaatc

SEQ ID NO: 21157 - DNA, 1041 bp, Homo sapiens
agctcaccacaacctccgcctcccaggttcaagcgattctcctgcctcagcctcctgagtagctgggactacaggcgtgcaccaccatgcctggctaatttttgtatttttagtagagacagggtttcactgtgttggccaggctcgtttcgaactcctgaccttgtgatctgcccacctcgacctcccaaagtcctgggattacaggcgtgagccactgtgcccggcctcctttctcagttcttaaaggatgattacttttctagtacctgaattatttatggattcaacatccccccaggacagttctttcctctaccagtcataggaggtattgttagactttgaatgagttgtttaatttgaagagacatatggtttttaaaaaatttgtttagagttcttggacaatattctgttgtaattcatgtagataatttatttgccaatccactgacattcttcccactaatctatttctggttttaatccattaaaggaggctgaaaaggccatttagctctgcctctaggtctataaaaatattgcctaaaagtttctaaaatcttctgattacaaatgactgcttgcaatttaggattttggtgtaatctactttggtaagaaagacttcggggatggtgtgaagcagatacttttccttctacttgttttatcttagagacagggtctctctctgttgtccagggtggagtgcagtggtgtgatcacagctcactgcagcctcaaacttctgggctcaggctatccttttgccttagccttccaggtagctgggactacaggcaagcgccaccatgcctggctaattaaaaaaattttttttatagagacagggtctcactatgttgttcaagctggtctcaaactcctgggctaaagggatcctcccgccctgacctaccaaagtgctgggattataggtgtacacacacttttcttaaactttcttctgattagtgatacctgatctgcattagggttccaacctgttttttggaaccatcttcgaccttctta

SEQ ID NO: 21158 - DNA, 1040 bp, Homo sapiens
gttggtaagattattcagaattgtatgaatctaataccataaataaggttgatagagattttttacagttgaacttggggaattttgtagagaaagaaggatggaaaaaaaactataaggaaaagtaaaacggcatttgatagattcaaaataccatctctaacatagtgctgcatatgtagtacttcaataaattgtgtgtgtgtgtgtgttttgttttttgtttttgtttttgtttgaaacagggtctcactctgtcgctcaggcttatggctcactatagccttgaccacctgggctcaagtaatcctcctgcctctgcctcctgagtagctgagactataggtatgtggcaccatgctggtgtaatttttaaattttttgtagaaatggagtctcattatgttgcccaggctggtctcaaactcctggcttcaaacagtcctccagtcttgacctcccagaatgctggagttacatgtgtgagccatttgtgaattaaagaatgatgaaattgaaaacaggctttcgtgatctcagggacctcagttgaaacaaataagatctctctttgtgatgtcattattgaattaactaacatttataccttagtaatttcaacatcattaagttataaagatataggactgaagtgttcatttgttaatatttgacttgatggatagaactgttttaccacactgcaaattttgctgcttaacaaaatgaagatcactaacattcactggaataaaatctgttgctggattatcatctaagaaaagtcacatgtaagtagtctgtcaatgttaggaagataatttaacatttttttttagagttctatggttttaagatattctcatttattgtctcatttaattactattgagatcctgttttttttttttttttttttttttttttttttttaagagatagggtctcactgtgttgcccaggctggagtgcagtggcatgatcgtagctcacttacagcctggaactcctaggctcaagcagtcttcctgcttcagcct

SEQ ID NO: 21159 - DNA, 1049 bp, Homo sapiens
gccttctcctggctgggggtcccctgtgaggcatgaagggagtggggcaggggcccccgtccaggcctttgtgtctgtctaggggctgggccagagagaggaagcagaggtagcagaagggcctgcctgcagaatcctcccaacctcccccttcctttctcctcgttggcccagttaaatgtgtaaattactattccctccctataaaaatagcttaactccattacaaatatttgaataataggaggaaatctcaatcaaatgactgttagcatgttggtttcttcccatttattctgccttcttatgtgtatgtcttgggcagttcccatagagacatcacagcgtaatgacgattgtgccttctgctttttcacttaccatattcacctagtcagtgaatgtcagctgctgtactgggcactagggagcaatgaaaaataaaggatggttcctgccctcaggtagcttactgtccaggagaaattgaacagcagatccaattatgatatggtatggcatggtagttatggtatggcagatatgatatgatatgacatgatgcatctgcaaagagctgtggggggcatgttggaggagccatcctcccagaatcttgttcgcaagagggaaatccaagagtgcttcctggaggaggaaggtgttggcaaagatgaattcaaaaggtttctacagttccctctcatgaaaccctctggacctggtgcctttttcagtggcagattttttttctcatcagtggtaattagtttatttaagtttctactcaccttctagttaattttggccattttatattttactaggaaagcattcattttctccagatgtgtaaaatctccacttttaaaatttattatgaatttctttgtgaccaagtaaatgatttttctaagtttttcatagacatataagaaaaatgcatattttcttatttttatttttattttattttttttgagatggagtcttactctgttacccaggctggagtgcagtggcacagtcttggctcaccaaaacctcca

SEQ ID NO: 21160 - DNA, 1033 bp, Homo sapiens
ctggggcaggttcccaagcatcctctgacttggagtaacctcccacccccagtacccatgtaaacacacacagccaggccaggcaggttttgtaccaggggactttctgcaagtgtttcctctccatctctctggatggggcccgctggatccctgccgttggtgtggtggaaactagagccgcgttggcagctgagcccttgtcctctgctccccccgccacctctgaaatgggactgctgtacttaggacacgtctcggttgctctcatgtagcactgaaaccagacacttggatgtctgtccctcggccaaaccaggggccacaggagggcagaggccatatcctgtgcattactgtccccagcactgtccctggtatgtgactttggcaataatgacaacagcctgcatctctaggcatttaccaggtggacaagggtgcaggctcaggagccaggcccctgtgttcaaactccagctctcccacctactagatatgtgacctcaggcaagtgacttaacctctctgtttcctcttctcaaagttggggttgtgttagtaccagcctcacaggattattgtgaggatcaaatgaatgagtgcgtatgaagctcttagcccagttcctggtcccagatgtcagcacctatcctcctcatgattaattaattaattacatgtttactgtgagctctgcaccaagccaaatgctttcaataagttactcaatccagacaactccatttcccagagaggggaacccaaggttcagagagcttaagtaacatgtccaaggtccaaccagctagttagttaccttgaagaccgggtcccaagcaggctgaattgtgctcctaggccctgccccgcccaggcgggaggtgtctgcctggtgagcagcgccaggggaatgaaaataaacaacacgggctggcctgggtcttcgaaacttttctaaagaatcgcttgtgttttgtttgaaggctcaaccaccggaattatctcttggagtctccgcataggttccgtg

SEQ ID NO: 21161 - DNA, 1067 bp, Homo sapiens
atctcagctcactgcagcctctgcctcccgggttaaagtgattttcctgcgtcagcctccggagtagctgggactacaggcaccgccaccacgcccagctaatttttgtatttttagtagagacagggtttcaccatgttggccaggatggtcttgatctcttgaactcgtgaaaaaaatctgaattttatcaatagctgaaactctgggagtttagtctatatttcaagcacattttttctctatgcctttgatctatattcttcttatcctcagccaaaatgcaaatctctctgtttttgacattctcaggagctctcatttgtttcttaacttttcctcctctgctgttcacttccagttctttcagcacttttaatccttactgctcttacatcttcactactcaaagtttttactggtcatctatttctttgtaataaactaaccgtaaattaagtggcttaaaacaatgacaacgtttattttcataaagcagcaattttattttgattttgctctgatcatggtcattgggggggtattgcaaagacttgttgctagaattgtctaaagattgcttactcacaaatctggaagttgatgccagccattggcttagatgttagctgatgctatctgttggaagacttacatgctgactttctgcatggcattggcttccttatacctggtactaaattccacaacaagcttcaatagagacagtgagctgtattaacttttatgacttatcctcagaaatcctacactgtcattctctgtatattctatttgttggggattttatagaagcccattcaggataaaggggtggagaaaggtctggaagaccaatttcagttgaaaattttgttgaagcagttttttatagtctaccacagtgcacgttcttttttctctttcttcagcttgctatagaatcatagaaagctatgcattctaccatgtaccattcaccatgtgggtcattattacttcctctaagctaacaattgcatttatgaaactattgctttagacatattattaaaaatctgctcctt

SEQ ID NO: 21162 - DNA, 1060 bp, Homo sapiens
tggaaaggcatataaatgacacaaatacatggccacaatatgtattttctcaataatatttggggaaatgttctgggcatcaggtttcccgtctaactttccctgtaggaaacggatagtcattgaagtaattttgatttgggtgagttgttacacggatagcgaagttgtaagttctcttgccacttttcttgttctgcacctttcgagagtcattatgagaactgaacactagggggacccagtttccttacttatgcaacggcggctggcccagctgtacgctacgatcgccctcacttaggacacatgcaatataaacacaaatctgaaaacaagggcagcttctcttttctcaatgcaatgtatatttatagcagtgatcatttttgcatgtaacatgtctgaattccttaaataggtcattttaagtaatgtgcataaccattacaatttttcttttttgagacaggttctcactctttgccaaggctgtgtgcagtggtgccatctggactcattgcaacctctgccccctgggctcaagtgatcttcccacctcagcctctcgagtagctgggaccacaggcatgagccaccacacctggctaattttggtttcaccatgtggcccaggctggtcttgaactcctgagctcaagcaattcactcaccttggcttcctgaagtgctgggattatagggatgagccaccacacctggccaccgtttaaagatttaaaggcaatggtttctaaactctagttccttgtgagccccatatttgcaaacttgtgaaaataaggatcatgatttcttattttttattattattattatttttgagatggagtctcactctgttgcccaggcttgggtgcagtggcgcgatcttgactcactgcaacctccacctcccaggttcaagtgattcttctgcctcaccctcccaagtagctgggattacaggcgtgcaccaacatgcccggctaatttttgtatttttagtagagacaggatttcaccatgttggctgggctggtctcgaactcctgacctc

SEQ ID NO: 21163 - DNA, 1465 bp, Homo sapiens
ctaatgtgatgtgactaagccgtagcttctcagcctgcagttaaattgcagaaatgatagggcttacattagttttgtttttatttgatgttgaagatctttgagtcacactagaaacgaggagtatttttcatgtggcactaatgagttaattcataatatgattttttgagacaaagtctctgttgcccaggctggagtgcagtggcacgatcacagcccactgcagcctcgacctcctgggctcagatgatcctcccaccttagcctcccaagtagctgggactacaagtgcacaccaccatgcccggctaatttttttgtagatatggggttttgccatgatgcccaggctgatctcaaactcctaggctcaagtaatccttctgccttggcttcccaaagtgctgggattataagcatgagccaccatgccaggccaatattattccccaaaagaaggaaattgggtgtgaggtcctgctcctatggtcaccatgagatttttttgtttgttttggactcttgcccaggctggagtgcagtggcacgatcatggctcactgcaacctcagcctccctggtagctaggaccacaggtgtgcaccactatgcccagggaatttttaagttttttgtagagacagggtctcaccatgttgcccaagctgttctcaaactcctggcctcaagcagtcctcctatcccaaagtgctgaaattacaggcatgagccaccacgcctggccaccactagtttttgtaatgggagcaggttccatatgagatggaggaatggatttcatgattgtctttgtaatttcttaggtccccaagaaattgattggacatgaggaaaccactctaagtgtgaccactctaaagcattagcagtcagtcatttcactctagggagaaatcagagctgtatatggagaataggtaaagtccccaatatggatatgtatttttatatttgactgcttgtatttttttgttagatgcaaatagtacggtattccgaacagacactaaaaatagctgtcatctcaaagaatccagtgcttgtgtcacagtatgagaaagtagatgctggggaacagcgtttaatgaatgaagcattccagccagccagtgatctctttggaccttgcattctccatcagattggatcacctcccaccctgaggccccccaagactttgaacagttcttcagtcatccttacagaaagataccctctccagacaaacgcagtatttatatacggtccattggtaaatactggtaatgtgctagttttggttcggttttgcaatggttctgttgtcaggaatagtccgggctattggtctgattcagatgggccattttaggatcatttttgatattcattgcaatggtacaagttttgtagccaaacagacctagaacatttttttttaattcatatcaacaccgatgaa

SEQ ID NO: 21164 - DNA, 1047 bp, Homo sapiens
ttgttgtggggagcacaagtgggtcttgctatattgcccaggatattctcaaactcctggcttcgcaagcgatcctcctgcctcagcctcccaaagtgctgggattataggcatgacccaccatgtctgaccagtcttggcattttataataagcataatctatctgaaaatgtcacttaaaagatcattttgtttgcatatctattcactagtccagttagtagtccattaaaaattcgcattacttcgggattaataggtataaaacaagttttttcttttccaggattatattccatcacaacaagatattctgcttgccagaagacccaccaaaggcatccatgaatacgactttgaaataaaaaatgttcctttcaaaatggttgatgtaggtggtcagagatcagaaaggaaacgttggtttgaatgtttcgacagtgtgacatcaatacttttccttgtttcctcaagtgaatttgaccaggtgcttatggaagatcgactgaccaatcgccttacagagtctctgaacatttttgaaacaatcgtcaataaccgggttttcagcaatgtctccataattctgttcttaaacaagacagacttgcttgaggagaaggtgcaaattgtgagcatcaaagactatttcctagaatttgaaggggatccccactgcttaagagacgtccaaaaattcctggtggaatgtttccggaacaaacgccgggaccagcaacagaagcccttataccaccacttcaccactgctatcaacacggagaacatccgccttgttttccgtgacgtgaaggatactattctgcatgacaacctcaagcagcttatgctacagtgatgtacaaaagacttgctgttttaatatctttttgtgtttttgatgttttctgtttgttttgttttttaaaatagcagtttacaaccagaattagaacaatcttaattctacgtttaacttcttgaaaatcttagtactttttctgcggcctttggtttgtggctgaaagctgttgagtgactcatcg

SEQ ID NO: 21165 - DNA, 1050 bp, Homo sapiens
gcagcattgtgaataacagcattgttttaaatcctgccttgatttttaaaatattttgaccttgatgataaatattagctgtcccgttcatgtattaccagaaagttgtgttgtagttttggaaaaatgctagactgacaaggaagaaccagttacattgcataaggaagtgtgccatcacagagtagccagagacttgtgtgaccagcagcttctgtttgttcagggtcttagagttcactgaccaagagtgcagagaagagctcatttgatccttgcaacaaccctccctcccaggtatatagaccaagtgtgatcacctccatttcacagacagaggtgctgacactcagagtaagtgactagtttgagttcttgggtcaataagtaagaaattaattatagtagagaaaggatttttcacacatgtaatatagcagcaatgaaaacatagaagttttaagtcatgagtggggttgcacagtaaaagaacttttagaataggttagagagaggtgggcagaacttggaactgggaagtgatccttgtgaattggcactggaatcagatcccattgccttttttttttttttttttttttttaagacaaagtcttgctctgtcacccaggctggagtgcagtggcatgatctcagctcactgcaagctccacctcctgggttcacaccactctcctgcctcagcctcccaagtagctgggactacaggcgcccgccaccacacctggctaatttttttgtatttttagtagagatggggtttcactgtgttagccaggatggtctcaatctcctgacctcgtgatctgcccgtctcggcctcccaaagtgctggaattacaagcgtgagccatcgcgcccagcccccattgcttttaatagaggagcaaggagcagtgtggagaaggtagatacgcagacaggaagatcactctggctagaaccaagagtggctgatagtggggagtaagattgcaggtggatatatagcagtgagggtgggtaagaacaattgataagacttcagct

SEQ ID NO: 21166 - DNA, 1051 bp, Homo sapiens
gatattgagtgaagagtatgattaccgagagttgggaagttgcagtggaggtaggggaaaaataagaatcaggatacattaaattcttggttctgccactgaaacagttttgttggctaagccacctaacttccctgacccttaggcttctcatctgtaaaatggagcataaggttacttgttctccaagctgtcttccaacttaaaatttatctttgctccctgtataatagtaagaaccccagaaggagaggtggaagcagaggcgtgtgggggaaatggtgttaggcagaggaggtaggaatatgcacagaattttccagaagcatggggagatgagcatggagcttgtttcatagggaaaagtaggagataatgttggagatagtcagttgggactagctggagacttcaaacacgagacatgctaactgcatagctaattcagcattttatcagatactattatatttctcctgttttaggtagttcttggtaaatactttttgactcagcagcacaactgaacagtatccttgatccttcagtgttcaccaagtttttcccaacatccttatgtttctcattcaggtgaacttctcagtattatatcagtaactctgcctcctttttttttctttttctttttctttttgtttctacctcctttttaagaaacaaaatccatagtattcctctttaaggaaactgtcacctacttggggaaggctagattctagagactgcatgtagaggctgtagctctctggaaggtgtgtaggtgggggaagtggaggctgcagattggaagaagaaggtggtgtggagctgaagagtaaagtagggaggcaggaattagagatagtttgatctgtattccttgactttcatctttcttggtgacctgaaagttgcttaaggttgtggcgctatcatcctagtgttgaggccaagacaagtgatctgcagtcatacctctcatgacacatgaaacagtcttcttaggctcaagtatttcatgaaatgccctaagtaccagtgagctaattac

SEQ ID NO: 21167 - DNA, 1023 bp, Homo sapiens
gcattttgggaggctgagacgggaggattgcttgaggccaggagtgcaagatcagcctgggcaacaaagtgagacctccatttctacaaaaaataaaaataggagctagatgctgtggtgtgtgcctgtagtcctagctactcaggaggttgaggtgagaagatagcttgtacccaggagcttgagtttgcagtgagcaattatcaagccactgcactccagcctcggtgacagagcaagaacctctctcaaaaataaataggctgcacatggtgactcgcgcctgtaatcccagcactttgggaggctgagctgggaggattgcttgagcccaagagtttgagaccagcctgggcaacatggctggtctcaagccagatgaacacctcatccctattttttttttcttcttctaaaaaaaaaaaaaaaaacaggatacgtgtgcagaacatgcagacttgttacataggtatatgtgtgccatggtggtttgcttcaccgattgatccatcctctgagttccctcccctcaccccccactccccaacaggccccggtgtgtgatatttacctctctgtgtccatgtgctctcattgttcaactcccacttatgagtgagaacatgtggtatttggttttctattcctgtgttagtttgctgaggatactggcttccagtttcatccatgtccctgctatgacatgatctcattcctttttgtggctgcatagtattccatggtgtatatgtgccatattttcttcatccagtctgtcactgatgggcatttgggttggttccatgtcttcgctattataaatagtgctgcaatgaacatatgtgtgcatatgtctttatagtagaatgatttatattcctttgggtatgtacccagtaatggtattgctggattaaatggtatttctggttctagatccttgaggaattgccatactgtcttccacaatggttgaactaatttacagtcccaccaacagcgtaaaagagttcctatttctcc

SEQ ID NO: 21168 - DNA, 1028 bp, Homo sapiens
ggctttgcagaccgcacctgtgcatgtatggacatcagtttggtgggaggggagtatgacaagggtatggtgctgattaaggaggatgacatggtcatctgggtagggtaaagcttagagctttgaaagttgggaggatattgtaacagaagaaaaactaaaggacagtagaagattaggatgaatgaatatttatagattccttgagtttaaaaaaccttcttctggttgtcatcatctggttgtccctgtgggaacagttgcttggctggtccagaaacccaggtatcctgtctgcagaaccaacagctgggagacaaggtggcattagaagggtctgtgtttaggtattcattgtttttggaggaaaaggcattgcaagtgggggtgagaaagccagaaatctctaaagagccacagtgtgtaatgttccgcattgttttgtttttaaatggacatcgtttattcagtaagtgtgggtggagtgttagatactctgtgttagatactgaggaccctaagtaggggctctctccaaagtagtgtctgatctggatctttggcagacagcctttgatttttgaaagtaacccaagacattggcgtggtccgatgaggtcagaaggcccttagtcaaggtaacattttgaattttaggtcatttgaagtcaagtcatggcaatctctgtggatggacagcagtgatcctcagtgagtctcatgaggagggatgtgtagctgtggcctgggtatccctgtctccggctgtcctttgaggttttggttcaggagacccagagtggagcctggggataggggatgggtaaaattccccaaaggcttctcacccaacacccggttgagattcattgttccagaaatggtcttgaaagcttttcaatgttttggagtcagaatttcgcctgctaaaggaacaattttgaaaggcaaacccattgaaccgtgtaagttctggcacacttatttagagtttgttccttttagcttcctaaaactggaccatctat

SEQ ID NO: 21169 - DNA, 1103 bp, Homo sapiens
cgtggtggtgggcacctgtagtcccagctactggggaggctgaggcaggagaatgctatgaacccgggaggcggagcttgcagtgagccgagatcgcaccactgcactccagcctaggcgacagtgagactccgtctcaaaaaaaaaaaaaaaagaaagaaagaaaaacccagcacctcatatatgcaatacaaacagcctcgcccgggctgcatgcagacacgtggtagcaaatacttcgagagaggttcactgtggcttcctacctctgtgcatcccctcctttgtcccctttggacctggtcttgggtgccccctggggcccatcttacagctcttgggagaaggaacaagaattatagaacaaggccgggtgtggtggttcatacctataatcccagcactttgggaggctgaggtaggtggatcacctgaggtcaggagttcaagaccagcctggccaacatggtgaaactccatctctactgaaaatacaaaaattagccaggcatggtagcacaggcctgtaatcccagctactccggaggctgaggcaggagaattgcttgaatccaggaggcagagatcacagtgagctgagatcgcgccattgcactccagcctgggcaacaagagcgaaactccatctcaaaaaaaaaaaaaaaaaaattatagaacacatcaatgcagcgtttggcaccagaggaaggcctggagggtagtggtgatgggggcacctagcaaagctgggggctgtgatgctgtacagggttcagggctcctgaattcaaagaacacgtgaccatttgcaagtacctagaagtccccactgtcatcacagcaagacttgagcatgggagtgggcacattctgatggagactcaccaggggtcacctggctgcagccgctacccctagctgaagacttgcaatgagcagtgaaaagattaaatgtgcgccaagacctttacgggccttgggaagccatttgtgccagaaagctgagcacttacatctttcagaaactaaatgtactggctagactatttccattcaaacctcaccttaaatctgtcatatttcattcccactttatagggaag

SEQ ID NO: 21170 - DNA, 1048 bp, Homo sapiens
tagtgaaaccccatctctactcaaaaatacaaaaaattagccaggtgtggtggcaggcacctgtaatcccagctactcgggaggctgaagcaggagaatcgcttgaacccaggaggtggaggttgcagtgagctgagattgcaccattgcactctagcccaggcggcagagcgagactccatctcaaaaaaaaaaccagaagagtccatactcctcccatttttctcctcggtccctctctcccacttcatcctgggcctcttctgttcagcaatccacatttcaggcaaataggaagaaagtccgctaatagacaggtaagcgtggttgtgtgcattttatccaggaggaagaacatttgaggccattctgctgtgcctttcaagtccgcagatctggccaagagcctgagatagcaggaagtgtgaagaacagaaacttcaagggaagaagtgtgtgaggggatggaaatgctagaggcttatagggccaggaaagttatcactcctatctgtctgtactcactcacaaaagtcccctcgctcaggaaatggactcccggttctatcaaactcattatatattttcttccactttcttgtccggtatttccaggctgctggtgtcctggtttgggtgtgtctgagcatctgtgtgtgtgtgagcatatgcatgtgtgtgtgcacacgtgtgtgagtgtctgcgtgtgagagagagaaagagagagagaggctgggcgcagtggctcacagttgtaatcccagcactttgggaggccgaggtgagcagatcacttgaggcctgcagttcaagaccagcctggccaagatggtgaaaacccgtctctactaaaaatatgaaaattagctggatgtggtggcgggcgcctgtaatcccagctactctggaggctgaggcaagagaattgcttgaacccggaaggcagaggttgctgtaagccaacatcgtgccactgcactccagcctgggcgacagagtgaaacaacatcaaaaaaaaaaaaaaaaagagagagagagacagagagag
